United States Patent Application Publication US 2004/0034888 A1 - sequence listing, part 7

SEQ ID NO: 14825 - DNA, 1565 bp, Glycine max
  Clone ID: LIB3028-031-F2_FLI
ggaattattaattggtgtttactgggattaatgaaacctagctagaaaggaaaatgatgggagaacaagggagtgtattttatatatatatatgtaaaaatttgtgtattgtttgtagtggttaaatttgtgaaaaaggtaaaaggttttttctttctttctgggtatacatactaaagggtttttgagagttcagtctgctttgagatttgtgttttggatgatggaggaagctcagggcagttctagttccctgccacctttcctcaccaagatttatgagatggtggatgatccttcaactaattccattgtttcatggagtgccaccaataggagtttcattgtttggaacccaccagagttttcaagggatttgttacccaaatactttaagcacaacaacttttccagtttcatcaggcagctcaacacttacggctttagaaagattgatcctgaacaatgggaatttgcaaatgatgattttgtaagaggtcagccacatcttttgaagaacatccataggcgcaaacctgtccatagccattctttgcagaatatccagggtcaaggggtttcttcgctgactgaatcagaaaggcagagttttaaggatgagatagagaagcttaaacatgaaaaagaacaacttcttcgggagttagagatgcatgaacaggagtggaaaatgtatgaggtacaattacaacactccaatgatcgtttggaaaagttggaaaagaagcaagaaaatttggtttcttctgtctctcaagtgttgcagaaacctgggattgccttaaatctcttgctgttgacagaaaacatggatagaaaacggaggttgccaagaagtggtctctttagtgatgacgctagcattgaagatcatatggaaacttcccaagtattaccaagggaaaatgcagatggtgcttctattttctcatcgagcacagaacggttggatctccttgagtcatccatgacgttttgggagaatattacacatgatgttggtgacgtctttgttcaaagtcatttaaacttggattttgatgaatctacaagttgtgcagatagtccagctatatcttgtgtgcaactagaagttgaagatcagcctaagtcacatggaatcaacgtgagttctgagccagctgtagttgcggctcctgatcttgatgcatcaaaagaacaacctgtcgaaacagctcctctgactactggtgttaatgacatattctgggaacgattcttgacagagaatcctggttcgtcagaaatgcaggaagctcagtctgaaagagaggattctgatggcagaagtaatgccaaattttggtggaacattaggaatgtaaataaccctccagaacagatggggcattcttagcaaagcagagcaaacttagttgcaattgattattccttttagcttgtgatgcccctcaattttcatgtaataaatgtaggtatacatattctatatttttggttaaatgattgcatcctctatagaatttagtcaatttttatactgctcactctcttttagttct

SEQ ID NO: 14826 - DNA, 885 bp, Glycine max
  Clone ID: LIB3028-032-C4_FLI
gccaagcaacattttgttgatgccctcctcacattgcaagacaaatatgaccttagtgaagacaccatcattggtctcctttgggatatgatcacagcagggatggacacaactgcaatttcagttgagtgggccatggctgagttgataagaaacccaagggtgcaacaaaaggtccaagaggagctagacagggtaattgggcttgaaagggtgatgactgaagcagacttctcaaatctcccttacctacaatgtgtgaccaaagaagcaatgaggcttcacccaccaaccccactaatgctcccacaccgtgccaatgccaatgtcaaagttggaggctatgacattcccaaagggtccaatgtgcatgtgaatgtgtgggcggtggcccgcgacccggccgtgtggaaggatccattggagttccgacccgaaaggttccttgaggaggatgtagacatgaagggccatgactttaggctacttccattcgggtcgggtcgacgagtatgcccgggtgcccaacttggtatcaacttggcagcatccatgttgggccacctcttgcaccatttctgttggaccccacctgaaggaatgaagcctgaggaaattgacatgggagagaatccagggctagtcacatacatgaggactccaatacaagctgtggtttctcctaggctcccctcacatttatacaaacgtgtgcctgctgagatctaatctttcttttctttcccttggactactctttgttgcattaagaaaaatgccttgtggcactacttttatctttgtgtttatgtaactacatatgaaatcacaatttaaggaactaaggaaatactcattgcgagggtaacggaatggcattggact

SEQ ID NO: 14827 - DNA, 649 bp, Glycine max
  Clone ID: LIB3028-034-B10_FLI
agccagcttgatggaacggaacagaagtgctcgtacctttgagtgggaggattcaatagacaactcacaacaagcaagacagccaaggaggaggaaaaggaaatggagttcgttggaagaagagacactaagggctggtgtaaaaatgtttggagaaggaaactgggcaacaatccgaagtttttacagtaacatatttgaaaatagaagtggagttgatctgaaggacaagtggagaaacatgatacggtgacactaacgcgctactttcatgtgtatatcttggtaatgacaattttgacagcagcttctctctatgcaatcaagctttgttaaaacaccatccaaatcgtacagttagtgaggaccaactggtatccaaggccctttcaaacacatcattcatccccgcgttttggtttcaatggctcagctgaaggttcccccattatggtatgctcggtacgaaaagaaatcatggcaatttcgaggtcttaattgtattagttaacattgaatttcgtatgatggtgttttttgtttcatctgtatattcaattattccttgatacggctacgagtatgatagctatgtaaatttttaatccaacgtatgcttttgtctagtaattaagtcgtagaatttttc

SEQ ID NO: 14828 - DNA, 865 bp, Glycine max
  Clone ID: LIB3028-035-A7_FLI
gatacaccttccaagaaacccatgtggagaggagttattttggcatacataggagttgcattctgctacttacctgttgccttcattggatactatatgtttggaaactcagttgatgataacatcctcatcacactagaacgccccgcttggctcattgccgctgctaacctctttgtctttgtccacgttgttggaggctaccaggtgtttgccatgccagtgtttgatatgatcgaaacctacatggttacgaaattaaatttcccaccttctactgcactccgagtaacaactcgcactatatatgttgcattgacaatgttaattggcatatgtatcccgttctttggctctcttcttggatttcttggaggctttgcgtttgccccgacatcatattttttgccctgtatcatatggcttaagcttaaaaagcccaagaaatttggcttgtcttggacgattaactggatctgcattattcttggggtaatgttgatgatagtatctccaattggtgctctaaggaatatcatattatcggccaaaaactacgagttcttctcataaactattgatgcaatcattgattccccaaccgattttaaagttgatgagtgaaactaaataacaagaaagcacgcagacatgcgttatacattgaatatagataagcttaataggatttgtggaagtgatacacacacaactagccttgtacaaaattatacttcttttgaagtaacaactatcttattcaccgtgtagcttattagcggaaacactgttgtacgagtttaccggttgtaaacgtaatgaagtagtgaatataatggtcatataataaccaatgcaattaatt

SEQ ID NO: 14829 - DNA, 642 bp, Glycine max
  Clone ID: LIB3028-035-C11_FLI
gcccaagaagaagaactcaccccacccagtgaaggtagtctacatatccaaccccatgaagatcaagaccagcgcctccgagtttagggctttggtgcaagagctcaccggccaggacgccgagtccccaccagatccctctcgcttccacggccatcaccccgattcctcctcctccgtcgagaatatcgaagaggaggaggaagaggataatattcaccgtgtgaattgtgttgtccctcctatgacagcaaccgatgagatcagtcttctcatcggctgctgcaaccagaacggacaacatcagccttcctcaatggagagtaataatttccagctgctggacgacgatgacgttttcacgccccagatgattgagaacatctctgccctgctcccagcaagtgtattctatgaatcccctcatcttaatcactggtgataccacggatggatgcagtgtaattagttattatattatattacgctccttctcctcggtaaggtcaaactcaaattgaaaaaagttagttttctctccatgactccatctatataaacagattgatggataataattgtacttaattgttgatttttgaccattaatttgcgaggtatattattgcttgtttatatagt

SEQ ID NO: 14830 - DNA, 1312 bp, Glycine max
  Clone ID: LIB3028-035-F8_FLI
ttttttgatattttggaatcaatggattcttcacaagggtctaccattgctggtttcgtggacaatgcatccattaagagaaatgagtctagttttgatggcgttcccgtgtatgttaaggaactaattgccggaggctttgctggtgcgctttctaagacctctgttgcacccctcgaacgggttaagatactttggcagacaaggacaccaggatttcattctcttggggtgtatcaatctatgaataagttactaaagcatgaaggttttctaggattatataagggaaatggagctagtgttatccgcattgttccgtatgcagccttgcattttatgacatatgagcgctacaaaagttggatcttgaataattatcctgtgttaggtacaggtccttttattgatcttttagcaggctctgctgcaggaggaacttcagttttatgtacctaccccttggatcttgctcgtaccaaacttgcttaccaggtggctgacacaagaggacttatcaaagatggtatgaaaggagttcaacctgcacataatggcattaaaggcgtgcttacaagtgtctataaggaagggggagttcgtggactttataggggtgcaggaccaacccttactggaattcttccatatgctggtttaaagttctacatgtatgagaaattgaagactcatgttcctgaagaacatcaaaagtccattatgatgcgtctttcttgtggagctctagctggattgtttgggcagactttaacataccctttagatgttgtcaagagacagatgcaggttggcagcctgcaaaatgctgcccatgaggatgtcagatacaaaaatacaattgatggacttaggactattgtttgtaatcaaggatggaagcagctgtttcatggcgtaagcattaactatataaggattgttccttcagctgcaattagtttcaccacatacgacatggtgaagtcttggcttggcataccacctcaacaaaagtctcaatcagtttcggcagcatgattgctcagtgctcacccgtgatggcaataagttacaatgtccccttctaattggctccaatttttacaggaatgtctcttactgagtattactgcatatgatttccacaggctactattagaggaaaccctttttggttaaattaactaatgctagaagtttgtttgttattatatctggaaagttccttcacagtgcttctttaaacttaaaacgtaacctgtatagatttaacactaaatagtggatgcaatacaaaggtaactttcttact

SEQ ID NO: 14831 - DNA, 1156 bp, Glycine max
  Clone ID: LIB3028-037-G7_FLI
ctgaggtgcaataaggttatgagtgctgttttctcttcttgaacttctctttaatcctcagatcctggattaaaggaaaaacataaacatcagccagaaaattcctgagccttgttttacatctttcttcaggaaggaaaagaagaagcaaaatgtcattcacaggaactacagataaatgcaaggcttgtgataagactgtttatgtggttgacatgttaactcttgaaggtataccttaccataaaaactgcttcagatgcagtcactgcaagggatacctaacgatgaacacctactcctcaatggatggtgtcctctattgcaagccacactttgaacagcttttcaaggaatctggcaatttcagcaagaactttcaaacagcaaagtcttctgataaacaaaatgagacgaataaggcccccaacagactgtcatccatgttcagtggaactctagacaaatgctcagtttgttcaaaacagtctatcctctggaaaagatgacactggaaggggaatgctatcacaagaattgctttaggtgtgctcatgcaggttgccacctcacacattcctcttatgctgccctggatggtgtcctctactgtaggcaccatttccaacagcttttcatggagaaagggaactatcatcatgtactccaatctgctaaccacaagaagaatgtcactcctgaacctgctgaacctgcagctgaaggagatgaagagccaccaaagccagaagaatctgattctgaggaacacacagaagaaaagcctcaaaatgaagcataggacatgagctgcttcctccctttctttcaggatcctactatatataaaaaggtgtcttttgttagagtgttgttggcacactcttttgtctggttgaattccactgtctaacatttctttttacaaattagtttaattgtaagctaatttgagaggtttattatgtatttaaacaaagagttgttaaatacaatatattttttacccttttgttggaggtttttctcctgcagtgatatgatatcatatcactactgtgtaataacataagggacacagtctcatattgttcaccaatttgtctgccgatttgcacttcaacccaatatataatatatattagtattttagttt

SEQ ID NO: 14832 - DNA, 704 bp, Glycine max
  Clone ID: LIB3028-039-A6_FLI
tgatcactatatacacactactcttcagccttttcatatttcataacacccctttgctaccaaaccaattcagtgatctttttgctttgctctttcctgagtttgaaaaccttagaaccatttcagtacacaacactttctgttccttaatggcatccagttcaatctcagcctctggctcatggagtgttaaggacaacaaggcctttgaaaaggctttagctgtttatgacaaggacactcctgaccgttggtacaatgttgctcatgctgttggtggcaaaactccagaggaagtgaaaaggcactacgaactccttgttcaggatgttaagcatattgagtctggacgtgtgccattcccaaattacaagaaaactacttcagggtcaactgatcaggaggaaaaaaggctgaggaatttgaatttgaacctccagtgacccccctcaagaacaacaaattgattttctaattttcatatcaaccaacatcattaatttccagcatccctggtagtactacgtggtgttatgtcacacataattgctagtgcaatagcatcttaggctatattagtcatcataagaatcatatgtcccgtgattccatctggtactttcttgtcgttgaagcttcctcttgaaagggtcaacgaccgtttcagttcctcatcgtcctaaataaatttataattttataat

SEQ ID NO: 14833 - DNA, 999 bp, Glycine max
  Clone ID: LIB3028-040-A8_FLI
ggggggaagtggtcaagggtgcacctttggttgagccaggagatgaattgttctggttcaatcgaccccgcctcatcctctttttgattcatcttgttctctttcagaatgcatttcaactagcgttttttgcttggagcacatatgacaatgggttcaaaataaactcttgtttccacaaaactactgcagatattgtcattagacttacaatgggggttctcacacaagttctatgcagttatgtgactttgcctctttatgctctagtcacccagatgggttctaccatgaaacctactattttcaatgaaaatgttgcagtagccctgaagaactggcatcacactgctaaaaagcacatcaaacacaacaaggattctacttcaaatacaccattctcaagcaggccaggaaccccgacacatggcatgtctccagttcacttgcttcacaagcaccctagacacagtgacagtccagtagtttctccaagggcatacaattacgaaaatgaacagtggggtgttgaagggatacattccccaagccaccacgcaagagatcatgatcctgatcatgaaaagaccatgcagatgcagatgcagatgcagcagcagcggccagctccaacagcagaattgcctcctagtggactcaatcctattcgaactcaacatgaaatcaacattgctttatctgaattttcatttgggaggggacaccacactggtagtaatactaataactaaatatgagtattagaaacatttccttgttttgttttgtttttttttttttttttttatctttttagcttcaattcatatcgagcacatctacgttgtaagtaaaagacgggcagtgcttttgaagatttttattatctgtatatgttaagatagtaacttttcctcttttatttttttaatcatccgatcaaccttatatttgttagtttttaaagattgaaatgaaagttaagtaatatatttttac

SEQ ID NO: 14834 - DNA, 764 bp, Glycine max
  Clone ID: LIB3028-040-F8_FLI
ctgaaatgcttgttaatttgggaattccttgggttattattggtcactctgaacggaggcagcttttgaatgaatcaaatgagtttgtgggagataaagttgcctatgcacttcaacaaggtctgaaagttatagcatgcattggggaaactcttgaacagcgtgaagctggtacaacaacggctgttgttgctgagcaaacaaaagcaattgcagctaaaatatcaaattgggacaatgtcgttttggcctatgagccagtttgggccattggaacaggaaaggttgcaactcctgctcaggctcaagaggttcatgctgatttaaggaaatgggttcatgacaatgtgagtgctgaagttgctgcatctgtaagaattatctatggaggctctgtaaatggaggaaactgcaaagaattggcagcacagcccgatgttgatggatttttggttggtggtgcatccctcaaggcggaatttgtggacatcataaacgctgctactgtgaagaagaattgaaattcgtagttaggaactgataatgctgcctttcaagctgcttcggaaattgctgtttttgagttttggttctgtgctttgtggccaatgtattgaactctgtttagtacctgaataaacatgctttcctttgatctcatccataggcgatcaattggattttgattaaatttctgattgcaaaaatagtgtaactaccataacatttggtgggtaaataatgttgaacttgactgtactttt

SEQ ID NO: 14835 - DNA, 919 bp, Glycine max
  Clone ID: LIB3028-041-D1_FLI
gactggggttgtgaagcctggtatggtggtgacttttggtcccactgggctgacaactgaggttaagtctgttgagatgcaccatgaggctctcacagaggctcttccaggtgacaatgttggatttaatgtgaagaatgttgcagtcaaggatctcaagcgtggttttgttgcatccaactccaaggacgaccctgccaaggaagctgccaacttcacatcccaagtcattatcatgaaccatcctggccagattggtaatggatacgcaccagtccttgactgccacacttctcacattgctgtgaagttttctgaaatcttgaccaagattgacaggcgatctggtaaggagcttgagaaggagcccaaatttttgaagaatggtgatgctggtatggttaagatggttccaaccaagcccatggtggttgaaactttctctgagtatcctccccttggtcgttttgctgtgagggacatgcgtcagaccgtagctgttggagtcatcaagagtgttgagaagaaagaccccaccggagccaaggtcacaaaggctgccgccaagaagaagtgattgcattttggcaattttgctagcacatgtgatcatcaacgtggtttcaaaaaaacttgttcctttacagtagtttatctttgcagagtcttaggtgtttgttttaccagttatattttgaagtgtccgccgatttcatgtagccgtagccttcaaaactgggttcttgatcggcggtaacattttcgttgctgtttgtttttgatgagtactgttttttgttttgatggtaaaagtctgagattttcaaattcacaagcagccatagggttttagtccatttcctttgctgctgaggagggatgtcttaaatttgcatttaatttataaggaagttttgtt

SEQ ID NO: 14836 - DNA, 787 bp, Glycine max
  Clone ID: LIB3028-041-E7_FLI
gggtaaaagtgttgtcccaaagaaagagcatctttctcctttctttcatcaccgttggaagagactgagatgggttcaaaaaccaagacttttacctttgaggaggtggctaagcacaatcacaggaaggattgctggattatagtcaaagggaaggtgtatgatgtcaccccatttttggatgatcatccaggaggtgatgaagttttagtgactgcaacagagaaggatgccaccactgattttgaagatattgggcacagtgattcagcaacagagatgatggaaaaatactttgttggtgaggttgacaccaacactcttccagcacaagttaccagcagcagcagtgtacgcccaccaacacaagcacctgtctataacaatcaatcttctggatttgttgtgaagatcttgcagtacatagtgccattgctgatattggcctttgcatttggcctgcagtactatggcaaaaaaagcaagtcagaaaattgaacttgagttgtgaccattgttttagtacttctattattcataagtctctaacaacagtgtcctagtggcaatagactggtgccattgttgtttcttttctttttggggcatcatttaaaagcacttcactatctcaaatatcacgcggggattaattttgtatttttcatgtgttgtggcctcttgctcaagttatgctagttgttcatttaaacccaatctagtatctcgtgaataatattttgaaatagattctattaaacctagtaactggagtacattatatgct

SEQ ID NO: 14837 - DNA, 594 bp, Glycine max
  Clone ID: LIB3028-043-E7_FLI
acttaaaacccgctcttttgatgcaataagggctgagctgagggcattctttgatgtgcatgatcaagaaggaagctacccaggaggggttcatttagagatgacagggcagaacgtgacagaatgtgttggaggctcaaggactattacttatgatgacttgagctcacgctaccacacacattgtgatccaaggcttaatgcttctcaatctctcgagcttgcatttaatattgcggacaggttgcgcaagagaaggctcaattcaactcgatcacttggaatttagacaagagggggtctgtcttcctttgtacctggatcacaatactggtcaaacatgtgttgagttttcttgagcacagtgaacaaatactctactgggagccactctaccgagtttcataagaacttaaaatagtcggcacaattaatagttgtgctgtatgagtgttacaagacagttcaaaacactgcaggtgtatgtacttgcaagtttgcacttttaagtttggagatagtacgtgtgtagtatttatgctcgactcgagtaaatgagtaataaataaagtttcaaggtacaacttacatcat

SEQ ID NO: 14838 - DNA, 1102 bp, Glycine max
  Clone ID: LIB3028-044-C11_FLI
ggtagggttcaggacaatgcttttgatgctgaggttgaaactttgggtaaaatcaggcacaagaatattgttaagctgtggtgttgctgcaccactagggattgcaagctcttggtttatgaatatatgcctaatggaagtcttggtgatttgcttcatagcagtaagggagggtcgttggattggccaacaaggtacaagatagctgtggatgctgcagaaggcctctcttatctgcatcatgactgtgttcccgcaattgttcatagagatgtgaaatctaacaatattttgttggatggggacttcggtgcgagggtggctgattttggagtagctaaggcggttgaaaccacaccgataggaactaaatccatgtccgtcatagctggctcttgtggctatattgcaccagaatatgcatacactcttagagtgaatgagaagagcgacatatacagttttggggttgtcatactcgagttggtcaccggaaaacacccagtggaccctgaatttggggagaaagacttggttaagtgggtgtgcacaacctgggaccagaaaggtgtggaccatttaattgactcaaggcttgatacttgtttcaaagaagagatttgcaaggtcttcaacattggactcatgtgtactagtcctcttcccatcaaccggccttcaatgagaagagtggtgaagatgttgcaagaggttagcacagaggaccaaaccaagcctgccaagaaagatagcaagttatccccttattactatgacgatgcctcggatcatggaagtgttgtttaatgaagacttgcaagggttggactatttgatgatcctgaaagggggagttcgaagcttttcttttactataagagccatcttccctccatgttttccgcgcatgctttgctttacaaagttgactaaagaaaagagaattagagtataggatttttttcagggtggaaaatagaggcttgaggagttgatgttttaccctataaagtatgtcaatatcaagaagcttccctaccaaagttaaattggtgttcgcattacaaacttatattcagaaatcaaaaaaatgattgtggtt

SEQ ID NO: 14839 - DNA, 624 bp, Glycine max
  Clone ID: LIB3028-044-F5_FLI
caacggcacagcaggtggtggaagcatcagtgccaatgacaagaaagcagtgtacaggcacattgtgaagtcagaagtgaatctcaatgctattattagtgggaaagcaggcttttcttccaacacgccttcttcaattaatccaaacatatcatgtgaaagtaagactccacaagtagaggatatacaagatggttctagtgtgcttcacctggcatgcataattagtgattctgcaatggtagagctgctcctacagtatggtgcagacataaatgctattgattctagagggaggacacctctacattacagcactatgagagggaagaatgcaactgcaagagtgcttattacaaggggggccaatccacttgccgtagacaaagaaggcaacactccttttaagcctgcaacggaacctgacactgcaggcaaagaaactcttgctctaaaccagcaaatcgcatgccctcaaaacttaatagaaaaatgattcatggggtcaccttgtgttcgagatagaaatttggcaagagagcaattgacaatgtgtacaggaccaactttgttttatagagcaatagataatagaagagaagaatggaagatgcgactttttcc

SEQ ID NO: 14840 - DNA, 819 bp, Glycine max
  Clone ID: LIB3028-045-E8_FLI
cttttgcgaacagctgttagacttgagttgagtcacagtcatcgtctgttcaggatcatattcacgccccctctctctctctctctctctctctctctcttactttgtgtctttctatctctctcttcaattccaaaaccctacccccatccaattccaattcaccctcaatcatgggttctgaaggttccactgtcgtcgttcctaggaacttcagattattggaagagcttgagagaggtgagaagggaattggagatggaactgttagctatggaatggatgatgctgatgatatctacatgcagtcctggactgggactattattggcccccctggtactgttcatgaagggcgtatataccagctgaaattattttgtggcaaggattatccagacaatccaccaactgttagatttcagactaggattaacatgacttgtgtcaaccaagaaactggagtggttgagccacatttgtttcctatgcttgctaattggcaaagagagtgtacaatggaagacattttgatgcaattgaagaaagaaatgatatctccacaaaatcggaagctagctcagccacctgaaggcaatgaagatggcaggattgaccaaaaggggcttgctctgagatgttgtgtcatgtaattcaggtgagaaccaaagaataataatgtaaataattcaatagataatccttttgtgggttaactcatttataaatgtaattatggaccattcgcttatgtaacatggagcaattaaagagcgactacgaatccttgaaaatttatagtcaatcgtgttgaagctg

SEQ ID NO: 14841 - DNA, 1420 bp, Glycine max
  Clone ID: LIB3028-048-G9_FLI
gcattctgctatttaattccactacgtacacgcacattctcctcaaagacaacaatggcaccaacagccaagactctgacttacctggcccaggagaaaaccctagaatcgagcttcgttcgggacgaggaggagcgtcccaaggttgcctacaacgaattcagcgacgagatcccagtgatttctcttgccggaatcgacgaggtggatggacgcagaagagagatttgtgagaagatcgtggaggcttgcgagaattggggtatattccaggttgttgatcacggtgtggatcaacaactcgtggccgagatgacccgtctcgccaaagagttctttgctttgccaccggacgagaagcttcgttttgatatgtccggcgccaaaaagggtggattcattgtctccagccatctccaaggggaatcggtgcaggactggagagaaatagtgacatacttttcgtacccaaaaagagagagggactattcaaggtggccagacacgccagaagggtggagatcggtgactgaggaatacagcgacaaagtaatgggtctagcttgcaagctcatggaggtgttgtccgaagcaatggggttagagaaagagggtttaagcaaagcatgtgttgacatggaccagaaggtggtggttaattactaccccaaatgccctcaacctgacctcactcttggcctgaagcgccacacggatccgggcactatcaccttgctgcttcaggaccaagtgggtggacttcaagccaccagggacaatggcaaaacatggatcaccgttcagcctgtggaggctgccttcgtcgtcaatcttggagatcatgctcattatctgagcaatggaaggttcaagaatgctgatcaccaagcggtggtgaactcaaaccatagccgtttgtccatagccacttttcaaaacccagcaccaaatgcaactgtttaccctctgaagataagagaaggagagaagcctgtgatggaggaaccaatcacttttgctgaaatgtacaggaggaagatgagcaaggacattgagattgcaaggatgaagaagctggctaaggaaaagcatttgcaggaccttgagaatgaaaagcatttgcaagaacttgatcagaaggcaaaacttgaggccaagcctttgaaggagattcttgcttaattaataataattacatatgtatcatttgcatgcccccttggtgtttttagtattttttaagggccatgaattaataatagtccttacctttgtgcttttgtacgtcttatgatttatcctttgtggggatatcatgtgttgtgttcagttgcctatgtcttattagctagctggctcatctatgtataccttatatttgcctctattataaatgaaaataagtggcactgtctttatt

SEQ ID NO: 14842 - DNA, 362 bp, Glycine max
  Clone ID: LIB3028-049-B7_FLI
ggaggaatgaacttgacctgactctggaaccattatattcctgtcaccttggatgcttttgaatactttctttgaggtggatgatattatatagctttggtatggcatttgacaacatatttgagggcttatatatgcctctatgttttgtggttttccctactctgcagacgttaatgtttattgtgtgttgtaagtttataatttggtcacaaggctaggctttcttaagtggaagctttgctatatatagttaagttgctgaaagacaggtctcgtatctgaactaattaagcgttgagtttgtccttgtttgctaattgctaataacagtatatacaatatataattattttaaatcg

SEQ ID NO: 14843 - DNA, 1164 bp, Glycine max
  Clone ID: LIB3028-049-C11_FLI
gttgcacacggtgcaagtcggctggctttaaattgcaatgggtggcttcctcttgatattgctaggatgtgggggcgtcattggcttgaacaattgctggcacccagttctgatgccacaatgcctacattctctcattcaaattacttgtccttgccccttatgagtgtgctcaacatagctagagagtatggattgcaatcatctacagcctcctctgatgagattgacttttgtgctgtatgcctggagaggccatgttcagtggctgcagaaggatgtgggcatgagctttgtgtaagatgtgcactctatctttgctcaacaaacaatgtttcttctgaaatggttggccctcctggctctatcccttgccccctatgtagacatggagttgtctcttttgttaagttgccaggttcccaagcaaaagaaaataaactacatgtgtctcttggcctgtgtaccccatgcatgctacatccacgtgacctagacaagccatccctttctcatacaccagaggttggaagaaatcgtgtagcttctgttcccttcgagatactctgccccgtcacttgtagtccatttccatctatggcaattcccttatgtacctgcaatgatggtccatgtccatcatttgaacctagagaagtagaaacacaggatggattacctcatcactctcaagcatcaacagtggatcaggataaaattgaagggccaagactagataaaacaacctgctctagcatgttttggggtagaagaagttgcagcagggagcaccaatgcaattcagaaataaatgcttgactcgcaccatgcttgtacgacacatacaagtgtcgtggatactgggtacactatagatcaacaggatcagtccacaattttcttattaaccagcctcaaatagtgaaactcgggatctctctagaagagaaaaaactgctctgcagatcctcttggctgctcaggttgtatggtaggtgatagacacaattctggcgtttcagcaacacaaccaccctctggatatgtcctttttctgatatttagggagcgtgtgtgaaattagtttcagtttcgtgagatttttattgtgatttattgtaattggatttcattttatccaggaaagtgtcttctttaaggggg

SEQ ID NO: 14844 - DNA, 953 bp, Glycine max
  Clone ID: LIB3028-050-C11_FLI
gagttctcagtgttagttgatcgtgccactggtggagccagcatcaaagatggtgaggtggaattgatgcttcacaggcgtattctccatgatgatagtcgaggagttggggaaccacttgatgaacaagtttgcgtgaacaataataatacttgcgaaggactaacagtcagaggaaattattatatcagcatccacaagcttggagttggttcacgctggcgtcgtacaactggtcaggaaatttattctccattcttagtggcttttacacatgagatctcggaaaattggaagtcctctcatttgacgaaaggaactatcatggatccaaattacagcttgcctcccaatattgctttgataactcttgaggagttggatggtggaattgtgcttctccgtttggcacatctatatgaacgaagtgaagatgctgagtattcgactctaacgaaagttgaactaaagaagttgtttgccatgaaaacgataagggagttgaaggaggtaagtttgtcatcaaaccaagagaaatcagaaatgaagaggatgacatggaaggttgaaggggacaaaggacaagaacctcaggcagttaggggtggccctgtcagctatcacaatttggttgttgagcttggccccatggaaatacgaactttccttttgaaattttaaaatagctcaaataatcattgatgattttatttgaaggaataaacatgtttgatcacatgacttttacccttgtaaaaattggtagagggagaccaagaacgattttgaaggaaaacatgaaaagaaatgagtaaagatcctatccaatgactagaaataatatatttaagactttggttcttaaccaaatctaacgacatcaggtaacagtgtaaccgactccatctaagattgttgttgttatattgtcagataaacatgtttgatgtttc

SEQ ID NO: 14845 - DNA, 528 bp, Glycine max
  Clone ID: LIB3028-050-D12_FLI
aaggattccaagtggctcctgctgagcttgaagcattgttgattgcccacccaaacatttctgatgctgccgttgtaggcatgaaagatgaagctgcaggggaaattccagttgcatttgttgtaaggtcaaatggttctgagatcgccgaggatgaaatcaagaaatacatttcacaacaggtggttttttacaagagaataggtagagttttcttcacggactctattcctaaagcaccctcaggcaaaattctgcgaaaggtattaactgcaagacttaacgaaggtttggtggtggccaattaggtccataattgtgacagaggaaaatcgtggctgttttacttaccgtaccacaggcccttcctgttgtggtttttgttccaattttatatctcgttatcaatatatatatataatatgcaagtattgcatgaatttattcttgtgtaacttataatgttgtatatattggagaccagactctgaattacagcatgaacacattaaaattcagcaagttgtt

SEQ ID NO: 14846 - DNA, 927 bp, Glycine max
  Clone ID: LIB3028-050-G11_FLI
gttcaattcccttttgtctgaggtgtgtgcattcttgtttaactcctctttgttcctcagacatcccagaagggaaccaaaaataaaaaataaaaaaataaacacaatcaataaaggggagaaaacaaacatgtcattcacaggaactcttgataaatgcacagcatgtgacaagactgtctatgtggttgacttgttaactcttgaaggaattccttaccataaaaactgcttcaagtgcagtcactgcaagggatgtcttacgatgtgcacatactcctcaatggatggaattctttattgcaagacacattttgaacagcttttcaaggaatctggcaatttcagcaagaacttcgcaaagtcttctgagaagcaaaatgagttgaatagaacccccagcaagctatcttccatgttcagtggaacccaggacaaatgctcagtttgcacaaaaacagtatatcctctggaaaagatgacacttgaaggggaatgcttccacaagacttgctttaggtgtgctcatgcagggtgccctctcacacattcaaactatgctgcccttgatggtgttctctactgcagggtccactttgcacaacttttcatggagaaagggaactacaaccatgtgctccaagctgctgcacacaggaggactggttcctctacacctccactactagaggagccatcacaagagccagcaccaccagcatctcatgaggaccaaacagaagaagagacacctcttgaatgagactggaagttgacatgaattgtttcaattccctccatccccttctttcagaatattgagcaaggtctttggtttaagttcagtacagtgaaaatatttgtaacaatatctttttgagtttcattgtaaactaacaacttgagaggtttgtttattatgtattc

SEQ ID NO: 14847 - DNA, 1784 bp, Glycine max
  Clone ID: LIB3028-051-A12_FLI
agctgcccgaaagtgtgagcgggcaggtccaaactccaagaagagtccaatacttagattatctatctatcaccctcagagtcgaaccagacacacttccacgtcaccaccaccaccgtggaaggtggagcgtgaggctgtttccggtaacctctcccggcggcgctgagtggtgatcaaggaaatgggtcagacgctgagttgcgtgcaacagcacgaggaccatggtgtgctcttccctgcacttgcaagtggagaattggaggttgttgaggccatggtggaggaagaccccactgtgttggaacacaccattggctgtgacaggctttctcctctgcatgtcgctgctgccaatggtcggatcgaggttctttccatgttgttggataggtctttcaatgttgacgtattgaatcgacataaacagaccccgttgatgttggctgtgatgcatggaaagactggttgtgttgagaagcttattcatgccggagcgaatatattgatgtttgattctatacgtcgaagaacttgcttgcactacgctgcttattatgggcatatagactgccttaaggccattctttctgctgctcattccacacctgttgctgattcttggggatttgcaagatttgtcaacataagagatggaaacggtgccacccctctgcatcttgcagctcgccatagacggtcggaatgtcttcatgcccttttagacaatggtgctcttgtttgtgcttcaaccggtggatatggttaccctggaagcacgccacttcatatggctgcacgtggtggttctttggactgtgtccggatgctgcttgcttggggagcggatagacttcaattagattcttctgggaaaataccgttctcagttgctctgaagcacaagcataaggcatgtgctgccctgctggatccgtcgtcagcagcaccgcttgtttggccatccccattaaagttcatcagtgagctcaatcaggaagcaaaagccttactggaaaaggccttactagaagctaacagggagagggagaagaccatactaaaggagactgacatgcctccatccccactgcattcagagagtgaagatgataacattgcctctgaggctagcgatatggagttatgttgcatatgctttgaccaagcatgcacaattgaggtcagaccctgtggccatcaaatgtgtgctcattgcaccctagcactatgctgtcacaaaaagcctgatcctgctactgccggcctttctggaccagtttgtccattttgccgtggcaccattcttcaattactggttgctaagattaacaaaatcagtgatacagaagtggaatctggccctatgaagccaaggagatcacggaaatcaaatttcagtgaaggaagcagcagcttcaagagcttgtcggccatgggctcatttggaaggattgctggccgcaattccgggaagattacagatgaaaagcaatgggaggtttcttgaagcttgataactgttgatgattattttaattccaagtcggcaagaaattatatgaatgatggttttaatttctgtggaatagctgcctatattggtatcttatttgtattcattttgtcactattgtccaaagatcactaagatcatgagagacaacagtttgtgatcggtttgagttttttacttctgtaatctgattctcagttggaattggagaatcagaacagttatgtaatttttttcccccaaatatcaaatatagtatgcatgagtt

SEQ ID NO: 14848 - DNA, 917 bp, Glycine max
  Clone ID: LIB3028-051-H9_FLI
gcttgataggaagactggcagcaacttacttcagtggcctgttgctgagatcgagagtttgagattgagaagtgatgaatttaaaaatttgaaggctaaaccagggtcagtggtgtcagtagatattgaaacagccacgcagttggacattgttgccgagtttgagatagacaaggaaacccttgacaaaattcctcaatccaacgaggaatacacgtgcagcaccagtggtggatctaaacaacgtggtgccttaggaccttttggtcttttggttttggcagatgaggggctttctgagtatactcctcagtatttttatgtcattaaagggagcaatggaaatcttaagacttccttttgtgctgatcaatcaaggtcttctcaggcaaatgatgtccgcaagcaaatcgttggcagcgctgttccagttcttaaaggcgaaaagttttccttgcggatactggtggaccattctattgttgaaagctttgctcaaggtggaaggacggttgtgacatctcgggtttatccaacaaaggcaatctatggagctgctaggttgttcttgttcaacaatgctaccgaggccactgtgacagcctcactaaaagtttggcaaatgaattctgcatttatacgcccattccaccctgatcagaagagttaaaaatttgaattggagatagaagagctatagtcacaaaggattggaatacatcttgggttggcaatttgtacttatcagttgtaatgtcctcccctgaataaccgacataaggttatggttcttgctcaaagcgcattccttcatttttgcccagttatgtttatcagaatttttgttgtaattttatcatatcatgtgaaatgatgcttacaagagaatctgttcaaagaaatatgatgttaatgtt

SEQ ID NO: 14849 - DNA, 367 bp, Glycine max
  Clone ID: LIB3028-053-G10_FLI
gggttaacgaatggaagcggatccacgagtgaagagagtttacagaggcaaaagctcagggatggagaggctagcgatgaagaggaggaatacgaggcaaaggacatcgaggtggaggaagtgatcgatcttacagaagaggtccttcaccttgagtatggtcaagagtgagttttataggtggacttggattcgaacattttattcactttttgaggtttagttgggcagcttatttcatctttgtaaaacccaattttgtagtctttcattaattttttttttttatgtggaaggaattccttttactcacaaatttaacgtgaaagacatttttgctgccttctttgggcgaaagtgttcactc

SEQ ID NO: 14850 - DNA, 1276 bp, Glycine max
  Clone ID: LIB3028-054-G5_FLI
atcgaaaggttgttttcaagtcaactcaatggcacttccctcaggtttagtttccatgttgatagtactttttggtatggttttggtagttggggttgaggcaaaggcaagggctttctttgtatttggagactcactggttgacagtggtaacaacaattacttagcgaccactgcacgggctgattcccctccttatggcattgactatccaactcgtagaccaaccggtcgtttctccaatggcctcaacattcccgatcttatcagtgaacgaataggtggcgagtccgtgttgccttatttgagtccacaactaaaaggtgaaaatcttctgaatggagccaattttgcttccgccggaattggcattcttaacgacactggatctcaatttctaaatataatcagaatgtatagacaattggactactttgaagagtaccagcaacgagtgtccattctaattggagtagcgcgggctaagaaacttgtgaatcaagcattggtcctcatcactgttggtggcaacgatttcgttaacaattactacttggtgccttattctgcaaggtctcgccagtattcgctacaggattatgtcaaatttctcattgtcgagtaccgtaaactcttgatgagactatatgatttgggagctcgaagagtaattgtgacaggcactggaccaatgggttgtgttccagcagaattggccatgcgtggaacaaacgggggatgttctgccgaacttcaacgagctgcatcactctacaaccctcaactaacacacatgatacaaggactcaacaagaaaattggcaaagacgtttttattgctgcaaatacagcactaatgcacaatgatttcgttagtaacccagcagcatacggatttactacatcacaaattgcttgttgtgggcaaggaccctacaatgggattgggttatgcacaccactctctgacttgtgcccaaacagaaacttgcatgctttttgggatccattccatccatccgaaaaatcaaacagactcattgtggagcagattatgtcgggttctaaacgatacatgaagccaatgaacctcagcaccgtcatatcattggatgctagaaaatgacgacatttttaattgtgtcttctttgtgattggaatcgtggtatggttgtaaacccgtatcaattatcaagtgcgtgtgtgtgactctcatagtctttagagttgtatgtgatttctccaacaaattattgatcaattaaataattgact

SEQ ID NO: 14851 - DNA, 1331 bp, Glycine max; identical to SEQ ID NO: 13388
  Clone ID: LIB3028-056-D2_FLI

SEQ ID NO: 14852 - DNA, 1136 bp, Glycine max
  Clone ID: LIB3029-003-A2_FLI
gcggtggtggaggtggcaagagtggaaagacaatgtccaccaacagcaaggagaatttgttcatagtttttcttgttacactttggtactcttcaaacattggtgtgatccttctgaacaagtatctgctctcaaactatggattcaagttcccaatcttcctcacaatgtgccacatgtcggcctgtgctgtcctcagctatgtctccattgtgttcttcaaggtggtgcctcagcagatgatcaaatcaaggtcccagttcatcaagattgcaactttgagccttgttttctgtgcctctgtggttggtggcaacatttctctcaggtaccttgctgtgtcattcaaccaggctgttggggcaaccacaccctttttcactgctgtttttgcctatttggccaccctcaagagagaggcctgggttacctatggtgccctggttcctgttgttgctggagttgtcattgcaagtgggggcgagccagggtttcacttatttggattcattatgtgcctaagtgcaaccgctgcaagagccttcaagtctgtccttcagagcattttactctcttctgaaggggaaaagttgaactcaatgaacttgctcctgtatatgtctccaatcgcggtcctagttttgttgcctgcagcacttatcatggagcctaatgtcgtagatgtcatattgacgcttgcaaaggaccataaatctgtgtggctacttcttttcctaaactcagtcacagcatatgcagctaacttaacaaacttcttggtgactaaacataccagtgctctcacactccaggtgttaggcaatgcgaaaggtgctgtagctgttgtaatctcaatactcctattcagaaaccctgtcactgttcttggcatgggtggctatacaattaccgtgatgggagtggctgcatatggagaaacaaaaaggaggtttagatgaacaatctcaaacattcaccgattgtctgattcgtgtatttttattgtagtttatttatttatatgaacaagattctttgtaacgtgactaggagtagaagggagccattttataatgatattctgttgtatctaccacataaatatttatttatcactcgtacattttgtcctaagt

SEQ ID NO: 14853 - DNA, 1300 bp, Glycine max
  Clone ID: LIB3029-003-E11_FLI
agctattgaacttatctctcttctcacttctgttgttataagtaacttccctcatcattacaaaacaatcctccacaggtttcaaaatgctgaaatcgggcatgggaattgaggagagaaagcaagtgaagaagccagcacaagccagctcgagaaaagggtgtatgagagggaaaggaggtcccgagaatgctagttgcacctacaaaggtgtgaggcagagaacatggggaaaatgggttgctgaaatccgtgaacccaatcgaggtgctaggctctggctcgggacttttgagacctctcatgaagctgctttggcttatgatgctgctgcacgtaagctctatggctctgatgccaaactcaacttaccagagctctctatcaaatcacaatctcagtgtccaccaccaccttcttctgtttccaacaacactcagattcctcaaatggagaacctgcagcagcagattcaaaacaattacatggacatggctacatgttctaataatttcaacaacaacaccaataatccttcagaagtttccatggcctctcagcaggttggagttggagtaccaatttacaccagtgactccatcgtgtctcttcccttggacaccaatcccaagcctgtggagaatgatggtgactttcgtccttcgtggggtacaatgaatgagggtttgccagtttttgatgattctatttgggctgaagctgccatgtctctagattttcctcaaattgcagcagagactgcgatttattcatcgggtaacaacttggccgatgtgggtgtgtgggactctctgcaaaccccatggtgcatgtaatttcatcactttcaaaagggcaagggaaagccacaagctatagcttttcttctcatgccagctggactgatatctgcttgttaaaatatatagtgtatatataagaggggtaagtaagtactttgtaaagacatatatgatacccaaattaagactagtttagttaaataggatactatatcatatcatatatatggtgtctaccttggagtgtatggaaaaccatgacgtgcttattttcgcacgacgtcgttttctgccttatagtctatagtaatattatgttatatgtaaatattacttaatacgataagggatggtggtgatgctctatcgccccgatattaataagttgtgttagcttttgtgcagtttattgtgagttttatgtaagcatcttgtgagttatatatgtcaataagaatgtacaactagtagttgtgtagtaataatggtgtacatat

SEQ ID NO: 14854 - DNA, 964 bp, Glycine max
  Clone ID: LIB3029-003-F3_FLI
gatggtgaaatgtattgtaggaattgcatttggtggaaagaatgtaacccgtgtgacataagtggccgcacatttagagaactagccacttctatataagaataacattagcaggcaaaggccttatctggcaccaaacatgagttctctgaatcttggaacatggcctcgtcccacctctatgttgaacacaccttcacatctccttcccccttttcacactctcactctcacaacaacgcttcccaaactcgcaagtggaaccccaaaactaatatcttcttttcccctcgtctctgctgtgcccactaaggaacacacagtcacaacccaggaaattcaactccaagacacgccgctcaacttcgatttcaagggctacatgatcgccaaggcccacacggtaaaccaagccttggacgccgccattgcgttgagggacccacacaagatccaccaagccatgcgctactccctcctcgccggcggcaagagggtccgccccgtgctctgcatcgccgcatgcgagctcgtcggtggcacagaggccaccgccatccccgccgcctgcgccgtcgagatgatccacaccatgtcgctcatccacgacgacctgccatgtatggacaacgacgacctccgccgcggaaagccgaccaaccacaaggtctacggcgaggacgtggcggtcctcgccggcgacgcgctcctcgccttcgcgttcgagcacgtggcagcgtccacggagggagtgtcgccgtcacgcgtggttcgagcgattggggaattagcgaagtcgatcggtacggaagggcttgtggcgggacaagtggtggatatagattcggagggggtggcgaatgtggggctggagacgctggaattcattcacgtgcacaaaacggcggcgttgctggaagctgcggttgtgttgggggcaatagtgggaggtgggagcgacgag

SEQ ID NO: 14855 - DNA, 1058 bp, Glycine max
  Clone ID: LIB3029-003-G12_FLI
atatgaaatatgtttgtctccaagaataataaaaatttagaaagaaaaacagaatttgatggtgaaatgtattgtaggaattgcatttggtggaaagaatgtaacccgtgtgacataagtggccgcacatttagagaactagccacttctatataagaataacattagcaggcaaaggccttatctggcaccaaacatgagttctctgaatcttggaacatggcctcgtcccacctctatgttgaacacaccttcacatctccttcccccttttcacactctcactctcacaacaacgcttcccaaactcgcaagtggaaccccaaaactaatatcttcttttcccctcgtctctgctgtgcccactaaggaacacacagtcacaacccaggaaattcaactccaagacacgccgctcaacttcgatttcaagggctacatgatcgccaaggcccacacggtaaaccaagccttggacgccgccattgcgttgagggacccacacaagatccaccaagccatgcgctactccctcctcgccggcggcaagagggtccgccccgtgctctgcatcgccgcatgcgagctcgtcggtggcacagaggccaccgccatccccgccgcctgcgccgtcgagatgatccacaccatgtcgctcatccacgacgacctgccatgtatggacaacgacgacctccgccgcggaaagccgaccaaccacaaggtctacggcgaggacgtggcggtcctcgccggcgacgcgctcctcgccttcgcgttcgagcacgtggcagcgtccacggagggagtgtcgccgtcacgcgtggttcgagcgattggggaattagcgaagtcgatcggtacggaagggcttgtggcgggacaagtggtggatatagattcggagggggtggcgaatgtggggctggagacgctggaattcattcacgtgcacaaaacggcggcgttgctggaagctgcggttgtgttgggggcaatagtgggaggtgggagcgacgaggaggttgagaaattaaggaagttcgctaggtgcattg

SEQ ID NO: 14856 - DNA, 1504 bp, Glycine max
  Clone ID: LIB3029-004-C10_FLI
cgaagagcttccgcggcgactatatcctcggtgagggaggcttcggcaccgtttacaaaggttacattgatgagaacgtcagagtcggactcaaatcgctccctgtcgctgtcaaagtgttaaacaaagagggtttacaaggacatcgagagtggcttacggaggtgaattttctagggcagctgaggcatcctaatctggtgaagttgattgggtactgctgcgaagatgatcacaggctgcttgtgtatgagttcatgtttcgagggagtttggaaaatcacttgttccgaaaggcaactgtccctttatcatgggctacaagaatgatgattgctcttggagcagccaaaggacttgcctttctccacaatgctgaaaggcctgtaatctatcgtgacttcaaaacgtctaatatattattggactccgactatacagccaaactttctgattttggactagctaaagcaggaccacaaggtgatgaaacccatgtatccacccgagtgatgggtacatatggttatgctgcccctgaatatgtaatgactggccacctgacggctaggagtgatgtctatagctttggcgttgttcttttggaactcttaacggggaggaaatctgttgacaagaccagacctggaaaggaacagagcttggtagattgggcacggccgaagctcaatgacaagagaaagctccttcaaataattgatcctagattggagaatcaatactcagtgagggcagcacaaaaagcatgtagcttggcttattactgtttgagtcaaaatcccaaagcaaggccactaatgagtgatgtggttgagacattggagcccttgcaaagttcaagtgttggtccaggtgaagtctcattatctggatcaaatagtgggagtgctgggccttttgctatgaacaaaatctctgactaccggatgcgccacaagttttcaaacaacgttggtcccggtgctacttgtcggtctccgaacccgaattgctcaccaggtggcccagcaacattacgggtcagatgataatcgcatgccatgaatccatgtctggtgtgctttatctcaagaaaatggtgtttgttgttaaaatgtgggtgcatccttgtatttgtttctttgtacatgatatgataatatggtgacaagaagccccggtggatcatttttgtatcaatttttggtcttctgttcatctgggtgggaattagtgtgtgaaaatctgtgtacttgtaatcatcgcggcatcagaactaatataacgggctcctcacaacatcagcagtgcaagagtaagacgacccgaacacgcaagtacctaatgatgtattttatttgagattattaggtaaaatgagggtaagataagacaatcttagttaacatttctctgtcaaacccggttagattgtctgcacgctcgtatctttttgaaatggcctattggtgttttaaagaaataaagatggagggtcattttc

SEQ ID NO: 14857 - DNA, 1515 bp, Glycine max
  Clone ID: LIB3029-007-B6_FLI
gcttgacaagctcaaggctgagcgcgaaagaggaattaccattgatattgctttgtggaagtttgaaaccaccaagtactactgcacagtcatcgatgcccccggacatcgtgactttatcaagaacatgattactggtacctcccaggctgattgtgctgtccttatcattgactccaccactggtggttttgaagctggtatttctaaggatggacagactcgtgagcatgctcttcttgctttcacccttggtgtgaagcagatgatctgctgctgtaacaagatggatgccactaccccgaagtactctaaggctaggtatgatgaaattgtgaaggaagtctcttcctacttgaagaaggttggttacaacccagacaagattccatttgtgcccatctctggtttcgagggtgacaacatgattgagaggtccaccaaccttgactggtacaagggaccaactctccttgaggctcttgaccaaatcaatgagcccaagaggccctcagacaagccactcaggcttccattgcaggatgtctacaaaattggtggtattggtaccgtgccagtgggacgtgttgagactggtgtcgtgaagcccggtatggtggtgacttttggtcccactgggctgacaactgaggttaagtctgttgagatgcaccatgaggctctcacagaggctcttccaggtgacaatgttggctttaatgtgaagaatgttgcagtcaaggatctcaagcgtggttttgttgcatccaactccaaggatgaccctgccaaggaagctgccaacttcacatctcaagtcattatcatgaaccaccctggccagattggaaatggatacgcaccggtgcttgattgccacacttctcacattgctgtcaagttttctgaaatcttgaccaagattgacaggcgatctggtaaggagcttgagaaggagcccaaatttttgaagaatggtgatgcaggtatggttaagatgattccaaccaagcccatggtggttgaaactttctctgagtatcctccccttggtcgttttgctgtgagggacatgcgtcaaactgtggctgtcggagtcatcaagagtgttgagaagaaagaccccaccggagccaaggtcaccaaggccgctgccaagaagaagtgattgcatttgggcaattttgctagcacatgtgatcatcatcgtggttactcctttatagtagttttatccttgcagagtcttaggtgttttgtttaagttatatttttaagtttctgccgatttcatgtagccgtaactttcaaaactaggttcttgatcggcggtggtcaattttcattgctgtttgtttttgatgagtactgttttttgttttgatggtaagaagagtctgagatatttcgaatttcacaagcagctatagggttttagtccatttcctttgctgctgagggatgttttaagttgcatttaatttataacgaagttttataaactgtttatggttt

SEQ ID NO: 14858 - DNA, 1037 bp, Glycine max
  Clone ID: LIB3029-008-B12_FLI
cagaatgataacactcgccatacccgttaacaaacccggtagatttgagagtttcttcctatctagcactcaagctcaacagtcctacttgcaagggttcagcaagaatattctagaggcctcatacgacaccaaattcgaggagataaacaaggttctgtttggtagagaggaggggcagcaacaaggggaggagaggctgcaagagagtgtgattgtggaaatctcaaagaaacaaattcgggaactgagcaaacatgccaaatctagttcaaggaaaaccatttcttctgaagataaacctttcaacttgagaagccgcgaccccatctattccaacaagcttggcaagttgtttgagattaccccagagaaaaaccctcagcttcgggacttggatgtcttcctcagtgttgtggatatgaacgagggagctctttttctgccacacttcaattcaaaggccatagtggtactagtgattaatgaaggagaagcaaacattgaacttgttggcattaaagaacaacaacagaggcagcaacaggaagagcaacctttggaagtgcggaaatatagagctgaattgtctgaacaagatatatttgtaatcccagcaggttatccagttgtggtcaacgctacctcagatctgaatttctttgcttttggtatcaatgccgagaacaaccagaggaacttccttgcaggttcgaaagacaatgtgataagccagatacctagtcaagtgcaggagcttgcgttccctgggtctgcaaaagatattgagaacctaataaagagccaaagtgagtcctactttgtggatgctcagcctcagcagaaagaggaggggaacaagggaagaaagggtcctttgtcttcaattttgagggctttttactgaataagtatgtagtactaaaatgtatgctgtaatagctcatagtgagcgaggaaagtatcgggctatttaactatgacttgagctccatctatgaataaataaatcagcatatgatgcttttgttttgtgt

SEQ ID NO: 14859 - DNA, 1479 bp, Glycine max
  Clone ID: LIB3029-010-B7_FLI
cgcgcctttgccgccgaaccaaccaccgaacctcagaaaccctctccaaagaaaaccgtcgacaccttcggccaacgcacctccatctaccgcggcgtcacccgacatagatggacgggaagatacgaagctcatctatgggacaatagttgtagaagagaaggccaaagcaggaaaggaagacaagtttacctgggtggttatgacaaggaagataaggcagccagggcttacgatctcgcagctctcaagtactggggtccaactaccaccaccaactttcccatttccaactatgagaaggaactggaggagatgaagaacatgaccaggcaagagtttgttgcttctctacgaaggaagagcagtggtttctctaggggggcctctatatacagaggagtgacgagacaccaccagcatggccgatggcaggcgagaataggcagagttgccggaaacaaagacctctaccttggaactttcagcacccaagaagaagctgctgaggcctatgacattgctgctatcaaattcaggggattaaatgcagtcacaaactttgacatgagtcgctacgatgtaaagagcattgcaaatagcactcttccaattggaggtttatctggcaagaacaagaactccacagattctgcatctgagagcaagagccacgaggcaagccgatccgacgaacgagatccatcagcggcttcatccgtgacctttgcatcacagcaacagccttcgagctccaccttaagctttgccatacccattaagcaagacccttcagattactggtccatcctggggtaccataattctccccttgacaacactggcatcaggaacactactagtgttactgcaacttcttttccatcctccaacaatggcactactagtagtttgacacccttccacatggaattctcaaatgcccccacaagtaccggcagtgataacgatgccgcgtttttcagtggaggaggcatctttgttcagcaacaaagtggtcatggtaatggtcatggaagtggaagcagtggttcctcctcttcttctttaagctgttcaatcccattcgccacgcccatcttttctctaaatagcaatactagttatgagaacagtgctggttatggaaactggattggacctaccctgcacacattccaatcccatgcaaaaccaagtctctttcaaacgccaatatttggaatggaatgagctcatgcacgaggtgggatgagaatctgtgcatataatgatgaaaggggaagggcaatagtggtgatggtgttttagcatgcaaaagaagcaaggacgaactagtacctttagctgatgcagtatttgaatgagttggactgacagtcataatttcatgagaagcgtagctatacctagcagcagctgacactgtactaactcaaagttcctttgttatgttttggatgaattttcttttttttc

SEQ ID NO: 14860 - DNA, 655 bp, Glycine max
  Clone ID: LIB3029-011-F2_FLI
ctggagactcatggttcaactgtcagaagctccatctgcctgagaattgcgggtatgaattccagatgcagtatggatccattggttggtcagtaggtgctactcttggatatgcacaggctgcaacagacaagcgtgtaattgcttgcattggtgatggcagttttcaggtaacagcacaggatatttcaacaatgattcgctgtggacaaaagaccatcatctttctcatcaataatggaggttatacaattgaagttgagattcatgatggtccatacaatgtgataaagaattgggactacactcgctttgtggacgctatccataatgggcaaggcaaatgctggactgccaaggtacgtacagaggatgatctgactgaagcaattgcaaaagctactggaccacagaaagattcactatgttttatagaagtttttgtacacaaggatgacaccagcaaagaattgctggaatggggatctcgtgttgctgctgctaacagtcgtcctcctaatcctcaatagaaaatcatttcctaattattggcctgttttgtgtattttgttgaatagagttccactactggatatttacaagagaaaaacgacaaaaatgaaaaataagttgaaataaatgtttgcttttccag

SEQ ID NO: 14861 - DNA, 772 bp, Glycine max
  Clone ID: LIB3029-011-F8_FLI
caattttggttaagagtcttgaaaaagcaagagaaaaaaaaataccaaccatggcaaccatttctgatcaacctagagggtcctactcctatggaacctcatatggagcaccctatggaaccacgtatgagaccaacaccagcattaacaacccaccttcacgccaaacagtgaagttcataactgctgccactattggcatcacactcttgctcctgtctgggttgaccctcacaggcactgtcataggtttgatcattgcaacccctcttcttgttatcttcagccccatccttgtccctgctgcgtttgtgctgttcctagttgcttctggctttttgttctctgggggctgtggtgtggctgccattgctgctttgtcttggatttacaactatgtgtctgggaaccagcctgcgggttatgacacccttgactatgcaaaagggtaccttgccgataaggcaagggatgtaaaggagagggcaaaggattatggaagttatgctcaaggtagaattaatgaggccacacaaggagcttattagtcatgcctgcttatatatgcatgagtgtatgaggttgaattgaaggtggtgatggtggtggtacccttgtggatttgcatgttcaagttctgcagtttattttgaatcttgtttgcattgttctatgtagttctggtttttgtaatctcgtttgtttttgaagctaaatcgttcgccttatttgtgtaaccatcatgttaataaatctcttttgtagctagatc

SEQ ID NO: 14862 - DNA, 1222 bp, Glycine max
  Clone ID: LIB3029-011-G3_FLI
caaactttccccatcgtcatctttttcctcatttcagtctcagattctctcctttgacaatcctaacccaacctcatcttccaacaccaccacccagttttatgggtttgactgtaccttaaacccaacacagaacgagatggtgtcagtgtcagtccccaacatgagaaaaccacggttcccaactcaaaccgcaaaaggttcaccgaaaaatcaaaactttgaaacaaaaacctcacatggtaagaggtctccagctcatgctcaagatcacatcatggctgaaagaaaacgaagagagaaactcagccagagcttcattgcccttgcagctcttgttcctggcctaaagaagatggacaaggcttctgtgttaggggacgctatcaaatatgtgaaagagcttaaagagcggttaacagtgcttgaagagcagagcaaaaaatcaagggcagagtcagtagtggttctgaacaagccagacctctctggcgatgatgattcttcttcatgtgatgagagcattggtgctgatagtgtcagtgactcactgtttgaagtggaatcaagagtatcagggaaggagatgctgctcaggatccactgccagaagcaaaagggtcttttggtcaaattactggccgagattcaaagccatcacttatttgttgctaatagcagtgtattaccctttggtgattctatccttgacattaccatagtggctcagatgggagaaagttacaatttgaccactaaggaacttgtcaagaacctacgcgtggctgcattgaagatattgtcataacatgaacgtggcttgagtatggaggataccctcatgacatatgatatggattggaactctgaatcacatttaatgcgccagccaccgagtaaatcacaaccaaaatggaagccttgttattaatgtgtgatttccgctacaacctgcagtgttccccaatatgtagattcagcttgatcccaagtgatcttgtctttttcgtgttatgttttggtttctcaggccttcagtgtgtgcctgctcgagggaaaaataattgaataattttgtaaagatgttaggaataatttcaatctgacacggcttaattaacatgagcttaaatagagattagaagctggataatggtgacattgacagtttttgatgtaccatttgttcttttgaacatgtttgaaggatgcaaatctctct

SEQ ID NO: 14863 - DNA, 2248 bp, Glycine max
  Clone ID: LIB3-02-B3_FLI
tggtggcagactttgctggtgaagcgaattttgtttcctagtcgttggcctttcactgtctctctctccttctcctcttatctgaatcatcctctctctgtgagtgaggtgactcgttgttgtttgtgacccggcgattcgttcctttgactccattcgaagcaaccctttgtctttcttaagcagtttcctgtgatgggctttggatttttcttttggattccctgtgatcacctgggaactgggttgttcaaattgaattttttgtgaggtatgctgtgtttggggtttgacatggttgaggttgactctgaaagattgaaacttgagagtagaggagtggggatttggctgagaattgcatgtgggtggttggtgtttatgctgtttttcagtcctgtggcaggtttgagacccttgaggacagaactaattcatggggtgatgagtgggtttttacaagaaaagacgaaagtgacttaggtccattttcacaatggaacataagtggaactcacagagggaattggaagtttttagatactacaaatggttctaccgggatttccagacatcagaaaaataaatggaaattctgtaattgaattagttagtatgcccacaaagataactggtgtacattatgtgcagggggtagtcatattccatgatgtatttgacaatgaatacaatgttggtggagctcaaatcagagtagaaggtgtatatatatggccttataggcagcttcgaatggtagccaacagtggaaaagaggtggggttaaatcaggatggagattatattttatccaatccatatcatctgcttggagttttctcatcacaagtattccaagagtcttcacaacataagatgtggagaagaaagcattctccattacatggcatggagaaacattgcaatgtagaaatcgctgcacatgtttcacgcctgtcatcatcaaaacatgaaggggagcacgattctttccagctagaagggttaatggagagtccgtccgtggatgacgatggggactgcttctcgcctttacagttaaacgcaacatccatcaacattgaagtctactataataaagcattgaactataccttgatggttacttttatctcatttttgcaagttcttctattaattcggcaaatggagcatagcaacacccaatctggggctgctaaggtttcaatattaatgattggtcagcaagccatagtagatgcttatctttgccttacacatttgactgcaggaatactagttgaatccctgttcaatgcttttgcaactgctgcattttttaagtttgtggttttctcaatatttgagatgagatatctccttgccatctggaaggcaagtaggcctttgagcaatggtgaaggttgggagacaatgagacgtgaattgtcagttttatacagccgtttctatgggatcctattgggaggcatactgctcatgtatgaattccacaatcatttgagacctattcttcttcttgtatactcattttggatacctcaaataatcaccaatgttattcgtgactcgcgcaagcctttgcatcctcattatatcttaggcataactgttactcggctagcaatcccattatatatttttggttgtcctaacaacttcttgcacatagaaccagatcagagctggtgtgtttgtttggctatatttgttggacttcaagctgcaattctcttgcttcagcactattttgggtccttgtggttcattcctcgtcagtttctacctgagaaatactgctattatcggaggtttgctcaagatacaaatcatgccacagactgcgttatatgcatgacagccattgatctttctccgcgatctaatgattgcatggtgaccccttgtgatcattttttccactctggctgtttgcaaagatggatggatataaagatggagtgccctacttgccggggccctcttccacctgcataaagagatttctagtgttcatatcaagagaatcaactcaccctgcccaacaacataattttggttgggatagaatccatattccgtataattgcaccttcagtacaatactgaaatacgatacttctcacaattgtatcatgcagcattgttataattttagactctttttttcctctcctttttatttcactggttatgtatcaatatcaagttgtacattagaaattcaatatgatgatcttttgac

SEQ ID NO: 14864 - DNA, 1387 bp, Glycine max
  Clone ID: LIB3030-001-A2_FLI
cttttgttaacaaagggggtcaaattggtgaactggattttcgcttcccaattggggcaccaatacacgggataagggcgtttttgaccacaaatcagcttaatacttatgataaggctagaaatgctgtggctcttgcactcagtccagttgtcagagctcttgttgatccagatggtgcactgagggacataaggaatttggatagtattagcttttcagattggtttttatccaaaggtggcacacgcatgagtattacaaaaatgtgggatccagttgcctatgcccttgggtttatcgactgtgataatatcagtgctcgctgcatgctcaccatatttgcattgtttgccacaaagaccgaggcttcccttttgcgaatgctgaagggttcaccggatgtttatctgagtggccccatccgaaagtacatcatggacagagggggcaggttccatcttaggtggggatgcagagaactgctttatgacaaatctgctgatgggagtatttatgttacaggactttccatgtcaaaggccactgccaagaaaattgtgaaagctgatgcttatgttgctgcttgtgatgtccctggaattaagagattacttccatcagagtggagggaacaggagtttttcaataatatctatgaactagttggagttcctgtagtcacagtgcaactcagatacaatggttgggttacagagttgcaggatctagaaaagtcaaggcgactggggaaagctgttgggttggataaccttctctatacacccgatgcagatttttcttgctttgcagaccttgcactttcatctccagaggattattacattgagggacaaggatcattgctccaatgtgttctgacgccaggagatccatacatgcccttaccaaatgacgaaattattgcaagggtagcaaaacaggttttggcactgttcccatcatctcaaggtttggaagtgacttggtcttctgttgttaaaattggccaatctctgtaccgtgagggtcctggtaaagatccatatagacctgatcaaaagacaccagtgaggaatttctttcttgctggctcttacacaaagcaggactacatagacagcatggaaggtgcaaccttgtctggcagacaagcttcggcctatatctgcgatgcaggggaagaattagtggcattgcggaagaagctcgacgctgagtttaaagacgacttaaaaatatcaaatactaaagatgaattgagcttagtatgataaattttcatgaggtggtcatgttgacatgaagcaatctggtttttttgcatgcaacatttttcaatgtatattcaatcgataaataattacagaatagattgtttcgaagc

SEQ ID NO: 14865 - DNA, 2046 bp, Glycine max
  Clone ID: LIB3030-001-B5_FLI
tgtgacacaagaagatggccctgaagttgacggggagctcacacagcttactcgtggtgttgatgggtcttcaacaaaggctctacctacaatctggttagaagtgatgcgtttcttcacaaatcctcataaacctatgatcttagccttgtcaaggccagatccgaaaaagaacataaccactttgttaaaagcctttggagaatgccgccccttaagagaattagctaatcttacgcttataatgggaaacagggatgacatagatgaaatgtcctctggcaatgctagtgtgctcacaacagtgttgaaattgattgataagtatgacctgtacgggcaagtggcatacccaaaacatcacaatcaatctgatgttccagagatatacagatttgctgcaaaaacaaagggtgttttcataaatccggctttagtggaaccctttggccttactttaattgaggcagctgcccatggacttccaatggtggccactaaaaatgggggacctgtggacattcatcgggccctgaacaatggtttgcttgtggaccctcatgatgacatagcaattgccgatgcattggtgaagttgttgtcagagaaaaacatgtggcatgagtgcaggaagaacggttggaagaacatacaccttttctcatggcctgaacactgtcgcacttacttgacccgggtggctgcctgtaggatgaggcatccacaatggcaaaccaacaatccagaggatgataaagctgttgaagaagaagagtctttcaacgattcgctcaaggacgaacacgacatgtcccttaggctctcaattgatggtgacttggctgcagcaagtggaggcactggtctagatatgcaagaccaagttaaacgcatcctaagcaagataaggaagacagattctggctcaaatggtaatggtggtggaaatatcaatatgctgcttgacaatgtaacgagcactagcactagcactaacactagcaaatatcctctattgagaagaaggcgtaggttgattgttatagcacttgatttgtatgacaataatggagctccggagaagaaaatgattgagatggtgcaaaagataattaaagctgtgcaactagaccctcaaactgctagagttacagggtttgctttatcaactgctatgccagtgatagaaacagtagagttcctaacatcaggcaatgttcaagtgaatgagtttgatgctttaatttgcagtagtggaagtcaagtttactaccctggcatcaatacagaagaaggaaagcttttgcctgatccagattatgaggtacatattgactatcgttgggggtgtgaaggtcttaagaaaaccatttggaaacttatgaatggtgatgagaacagccccattgaggaagatctcaaatccagcaatgcacattgcatctcatacaaaataaaggatcttagtaaggcaaaaaaagttgatgagttgaggcagaagcttaggatgagaggtctacgttgtcatcctatgtactgcagggggtcatctagaatgcatgtgattcctcttcttgcatctagagcccaggcactcaggtatctctttgtacgttggaggttgaacgttgcaaacatgtacgtcatccttggagaaaccggggacacggattatgaggagatgatttctggaactcacaagaccataatcatgaagggagtggtgtctaagggttcagaagagttactaagaggtccaggaagctaccaaagagatgatattgtcccaaatgagagccctcttgttgcatccattactgaaacaacacatgaaaacattgctaatgctttgaagcaactttccaaatctggaggaatctgaagtgctactatatattaagtaataaatttatgagagtggtatgaatatcttcacatatgtggtcactttcatatattacacactttatccatatctattatttttttatatcttatttttcttattggatcatatcacttattatatatactcatatttatatc

SEQ ID NO: 14866 - DNA, 1844 bp, Glycine max
  Clone ID: LIB3030-002-C9_FLI
tgcgcatgtttgttggtcttatctgcttcagatcctaacggtccattgttttacatggggtggtaccatgtattttaccaatacaatccggattcagccgtgtggggcaacataacatggggccacgctgtatccagagacttgattcactggctctaccttcccattgccttgtttccagataagtggtttgacgtcaacggtgtatggtcaggttcagcaacccttttgccagatggcaaaatcctaatgctctacacgggtagcaccgatcaaaacgtgcaagtccaaaatcttgcctaccccgccaacctatctgatcccctcctccttgattgggtcaaatatgctgataaccctgtcttggcccctccaccaggcattgggccaaaggattttcgtgacccaaccactgcatggtttgggccagatgaaaagtggaggatcaccattggctcaaagctcaacgggacaggtctttcattggtttataaaacccaagatttcatccactacgagcaaaatgatcactatttgcaccaagtcccgggaacgggtatgtgggagtgcgtggacttttacccggtttcagtaaacgggcctaacgatgtgaaacatgtgttgaaggctagtttggatgacaccaaggtggatcattatgcaattgggacatacttcattgaaaatgatacatgggtgcccgataacccgcatgaggatgtgggtatcgggttcaaattggactatggcagatactatgcgtcaaagacattctatgaccaacacaaaaacagaaggatcctgtggggttggattaatgaatcagatagtgaaaccgctgacttgaaaaagggttgggcatctctccagactattccaagaacagtagtgtttgacaagaagactagaactaatttggttcactggccagtggaagaagtagaaagcttaagacttggcagttccgaatttgaaggagttgtggttaaacctggctcagttgtgccactggacataggcccagccacacagttggacgtatttgctgaatttgaaatcgaatttttagcatccaaagggagtggcaaggacaatataggatgtggaaatggagctgttgatagaagtgctttgggaccattcggtattctggctattgcagatgaccatctttctgaactaacaccaatttatttccatctttctagtactactaaagatggcagttcaaccacttccttctgtgttgatgaaactaggtcatcaaaggctcctgatgtttcaaagctcgtttttggaagcaaagttcctgttctcagtgatgaaaaattatcaatgagggtattggtggaccattcaatcattgagagctttgctcagggagggagaacagtgatctcatctagagtttatccaacagaagcaatatatggagctgcaagattgtttctgttcaacaacgcaacggacataaacatcaaggtctcgctcaagatttggcaattgaactcagctttcatacgcccctttccctttgaccagaagttgtgaaagtcaaagctatggatgcacatttgcattttattattttgcaaacggttatcattattgccccagcgaagtaaggaaaacaaaacaaatcaaaacaacaaagtcttgtggcatcaacatgtataaattacagctttgtaggcataccgatgccatggatatccatattatttggaatttgtcaagagtaattaaagtctaccactagagtaattatatacggagacccttctattgtatttttttttctttttcttcctatcattttatagtacatatcattcttacacttc

SEQ ID NO: 14867 - DNA, 2809 bp, Glycine max
  Clone ID: LIB3030-002-G3_FLI
attaaaagatctgtgtggaaatcatgaatggtttggtcaaggaagtgtattaatcattacaactagagatctacacctactggacctacttaaagttgattatgtttatgaaattgaggaaatggacgaaaatgagtcccttcagctttttagttggcatgcctttggacaaccaaaaccaagagaagacttcaatgaacttgcaagagatgtagttgcttattgtggaggattaccattagctcttgaagtccttggttctcatttaattagtaggacagagacagagtgggaaagtgcattgtcaaggttaaaaatgactcccaatgatcaaattcagcaaaaattaagaataagttttgatgatttatatgatcatatggaaaaacatatatttcttgacatatgttgtttctttattggtaaagacaaggtctatgttacacacatactaaatggatgtggactacatgctgatattgggttaacagttctcatagagcgtagccttgtaaaagttgaaaagaataacaaacttgcaatgcataatttgctacgagaaatgggaagagagattattcgtgaaggttcaagaaagaaacttgggaagcgcagtcgtttgtggtttgatgaggatgtagttgaaattttgacagagaaaactgggacagaggctattgagggattggctctgaaattgcattcaaacaaaagatattgcttcaaagctgatgcttttgcagaaatgaagagattgagactgttgcaacttgataatgtagaactcactggagattataggttttgcagtggctaaaattcctcaatcttagtcactccaagtacttgaaagaaacccccgacttttcaaaattaccaaatcttgaaaagctcattctcacagattgttcaagtttgctcaaggtacaccaatccattggagatctccagaatcttctatttataaatttgaaggactgtaaaagcctaagtaatctccccagatcgatatataaattgaaatctttgagaactctcatcctatctggttgttcgaagattgacacattggatgaagatataatgcagatggaatccttgacaacactaattgctgaaaatactgctgtgaaacaagtgccctttccaatagtaagttcgaaaggcattgggtatatatccatttatggatatgaaggattttcacatcatgtttatctttctatcatgcggtcttggatgctaccaaaaatgaatcccctatcttgtattcgctcgtttagtggcacttcatcatctccaattcccatggacatgcagaataaaaatttgagtgatctagcaccaccaatttcaaattttcgaagtgttgtggtgcaatgtgagacagagattcaactatttaaccaaataagaacaattctagatgatgtgtatggtgcaaattttagtgaattagaaataacatcatatacatcccaaagttcaaatcattccgtgaagtcttatttgattggcattggagattttgagcaagtcttcatttctctcagcaacagcatatctgagggattggcaacctgtgagtcttctgatgtttttctccctggtgactattatccgtattggttggctcatacaggtgagggacagtcagtgtatttcactgtgcccgaggattgtcgcataaagggtgtaactttgtgtgttgtttatttatcaaccctcgaaaacatggctactgaagttcttattggtgttttaatggttaattacacaaagtgcgccatccagtttcacaagcgagagactttattttcctttaatgatgtagattggcagggcataatatcattttttggacctggaagacaaggtggagatttttgttatttttgggaatggattggcgatcaagaagacagctgtgtatttaatttgtgatgaatccattgaaatggaaatgacaaagattgaaatggacatggagccttcacatttgtattgtgatgatgtcattgaaaaggacacggagccttctaatttgtattgtgatgatgtcattgaaaaggacatggagccttctcgtgagcaaaagaaagtgacaaagaatgagagattagtacgactcaacaaaattttaaaaaaatattttccaagaaagtagagttttgaactaatttttactgggcatgccaaagtcattgtctaggattttggaaagtgccaaaattatgtacttttagggtgtttttaagtcatttttcttgctcttaccttgatttagaaggttgttgggacaaagattgctttgtttccactattttctgaatttaagtttagtattttgatttctttgttatatattgtagtaatttatcccatattttttttagaaaaaaagggtctgaagatggagaatttatcttggggagcaactatgatgtgttgaatcttcaaacggatcaacttggtcaacaaaattctggaagaataaaaactggcatatggtcaagccaaaatttcatggctgagtggatttacacttgaaatggaaatgttgtttatgtatttttaggtctaacccgtgaatatagatagattctccctcccttttgctttcatcattgtaacagtttgcaacttttgtactgtttttgtgttttcttcatccatcttcttccccaccatggataatcccatgtcgcttattgtcatgagtgactaagttctcttgttgtaagggataaatgtaatcatttcttaactctcatgcatcttttgatataaatgattatatatttctcat

SEQ ID NO: 14868 - DNA, 802 bp, Glycine max
  Clone ID: LIB3030-003-F5_FLI
ctcttcttctcaggattcttcatctgaccttgaattttctctctccctatgcccccgctaattcctccttcacttctcttcccattaccgctcccagtcaagttgttggatggcctccccttggagcatatagaatgaacagctataatagccatgcaaaatcaccagccacagaagtattcaattctacacttgacaaaagagcaagcaatagtgctggggttaggaagagtgcagatggtggcagtgatagtagcaacattatttccaaagaaaaaggaaacctcaggacttccctgtttgtgaaagtaaaaatggacgggataccaatcggaaggaaggttgatttgggtgctcacgattcttatgaaaccttagctcaaaccttggaggatatgtttgatgaatcaactacagtcctcactcacaaagtaggatcaaatggagaagatcatggtactgaagttggaacagatgggcattcaaaattgctggatggttcttctgactttgtgctcacttatgaagacaaggaaggagactgggtgcttgttggagatgttccttggtgttactttgcagctccaagattggaagaaaagaacagaagatcgaatacaagctcatatagataatgtttgcacctttacatgttaggatacacaaaacttatgatctaaaatgtacaacatgagttgaaggaatataaatgtgagaaaaaacagaaagagggaagttaattaatactgtgagtaacggatttttatttttaaatgatcaaacctcgcttttttgtttctgg

SEQ ID NO: 14869 - DNA, 1828 bp, Glycine max
  Clone ID: LIB3030-005-A3_FLI
gatttgttagcattgcagaagaaccagatacccccaagtattgttattatcatcatcattgcatctatctatctatctatcttctattcattttctctcattgtatctgatttgtgttgttttttgctaacacaagcaatggaggttgtagagaaggagaagaagaagtacatcacctcagaggagctgaagggtcacaacaaggagggagatttatggatctcaattcaaggtaaggtgtacaatgtctcagattgggtgaaggagcaccctggtggtgatgttcctatctcaaaccttgctggccaggatgtcactgatgcattcatagcataccatcctggcacagcatggtcacaccttgacaaattcttcactggctaccacctcagtgacttcaaggtctctgaggtgtccaaagactacagaaagcttgcatctgagttctcaaaattgggtctttttgacaccaaaggccatgtcacttcttgcacccttgcatctgttgctgttatgttcctcattgtgatgtatggtgtgttgaggtgcactagtgtgtgggctcatttgggctcaggcatgctattagggttgctttggatgcaaagtgcttatgtgggtcatgattctggccactatgtggttatgacaagcaatggtttcaacaaggttgcacagatcctctctgggaactgcttgactgggataagcattgcttggtggaagtggactcacaatgctcaccacattgcctgcaacagccttgatcatgaccctgatctgcagcacatgccggtcttcgccgtgtcctcgcggttcttcaattcgataacttctcatttctatgggaggaagttggagtttgatttcattgcaaggttcttgatctgctaccagcacttcactttttacccggttatgtgtgttgccagggtcaacttgtatctgcagaccattctgctattgttttcgaggcgtaaagtgcaggatagagccttgaacataatggggatccttgtgttttggacttggttccctcttttggtgtctttcctgccaaattggcctgagagggttatgtttgtgcttgctagctttgctgtttgttccatccagcacattcagttctgcttgaatcactttgctgcaaatgtgtatgttgggctaccgagtgggaatgactggtttgaaaagcagacaagtgggacattggatatctcttgctcctcttcgatggattggttcttcggtggcttgcagtttcagcttgagcatcatttgtttccaaggctacctcggtgccaattgaggaacatttcgcctttggtcagtgacctttgcaagaagcataatttgccttataggagcttgtcattttgggaggccaatcagtggacaattaggaccctcaggactgctgccctacaggctagggacttgacaaaccctgcccctaagaatttgttgtgggaagctgttaatacccatggctgaggtatttggagtttatagagtttaggattttgtcaaggtcttttttttttgttttctcttgaaaaagaaaaaaaaaaatctcattgtgattttgctagccaccacttttccagtttgggctttgaatttaactttttgttgggtgtggtgtagaaatggatggtgatccagatgttactgcagttcatgtgcttttcatcaatacaaaattaatatcatgtatgcccttttgcctttttacttctatttccttaccttggcatagggtttcttaatgtctgtaagttattataccatccgtgttgatcttgttataccatggttgcatcattac

SEQ ID NO: 14870 - DNA, 1007 bp, Glycine max
  Clone ID: LIB3030-006-D8_FLI
cttccgttggctttgtcacagtccactgtgcccccaagaaagttccttaacctcaaaccccttatggcaagttgctaacttctcttacttttatctttgaagccaccctcttctaacttctccatttcacaaggaagaagatcagagaacatttagaacaaaaaagagagtttgagaaatggggaggggtaagattgagatcaagaggatagagaactcaagcaacaggcaagttacatactcaaagagaaagaatgggatcctaaagaaggccaaggaaatcactgttctatgtgatgctcaagtttcgcttatcatctttgctgcatctggaaagatgcatgactacatcagcccttctaccacgttgattgacatattggagaggtaccacaagacctcagggaagaggctttgggacgccaagcatgagaacctaaacggcgaaattgagagactcaagaaagagaatgacagcatgcaaattgagctcaggcacttgaagggtgatgatatcaactctcttaactacaaggagctgatggccttagaggatgccttagaaactggtctagtcagtgtccgcgagaaacagatggatgtatacaggatgctcaggagaaacgacaagatcttggaggaggagaacagggaacttaattttctctggcaacaacgtttggcagaggaaggtgcgagagaagtggacaatgggtttgatcaaagcgtaagagattacaattcccatatgccatttgcctttcgtgtgcagcctatgcagccaaatcttcaagaaaggatctaatatataactcttgaattcaaaaacttcatcttggtgctgtcaaaatcgtatgtgtcacaactcttttaagtatatgttggtatctggttgtaagtaataaactaagcaactgacctttggctttaattgtgaagttacaacatcttgtgtctccaaccttattgggtaatcatatgacatcttagtgtgtttgtctgagtat

SEQ ID NO: 14871 - DNA, 872 bp, Glycine max
  Clone ID: LIB3030-007-A1_FLI
tggagatggaaaatcctgaggataaaaaggaaacttagaaaagagagtacatatacaatacaagacaacttcacacacacaacactttcctctctctctctctctctctctagggttccgagtttgaagttgaaagtgttgaactatctctagctagcttttcacaaatttggttgcacttgcaactgaggcaggaaagaggggcacgagaggaggaagaggaaagagaagaaaaaccaagaaaagtggagaaagggataggtgttgtacagaaatagaaattaaaattgagtgaaaattaaagagaagaaggagtgatagggagatatgggtaggggaagagtggagttgaagaggatagagaacaagataaacaggcaagttacgtttgcaaagaggagaaatgggcttctcaagaaagcctatgagctatctgttctctgtgatgctgaggttgccctcatcatcttctccaaccgtggcaagctttatgagttctgtagcagctctaggtatgcagtgtgtgttgatccttttttttctgtttcttctctttgtgagatactgaaaatcactttttctttgttgacctatgagatctacttgctccattattttatattttatttttttggtgcctttctttggatttgtttaatttgttagcttcaacaattaaggacaaaattatttagtgactcctcattttttatatttattattatgtgaacttgtggctttttgtaagaagccctatatgtgcttcattgctccattagaatagtaagagttcatttctaatttgatcttttttgtaagggatggtagatttatcagatctagtaatatggcacatgatctggtggatatct

SEQ ID NO: 14872 - DNA, 1168 bp, Glycine max
  Clone ID: LIB3030-008-E2_FLI
cttagctcaaacctcacctcaataatctttcgtgctagctagcttaatcatattccaattccaacagaaccaaattctgctagctagctagtacgtcaaaggaaataaaataatatggcattcagcgggacccaacagaaatgcaaggcttgcgacaaaactgttcacttggtcgaaggtttatctgtcgatggggctgcttatcacaagaattgcttcagatgcagccattgcaatggccttcttgcgataagcaactactcatccaccgaaggggttttgtactgcaaggtgcactttgagcagcttttcaaggaaactggcgcctaccccaagaaatcccagtcgtctggaaagcctccactcgagctgaatagagcaccaagcaaactttctgccttcttctctgggactcaagagaaatgttcaaaatgcaagaaaaccgtatatccattggaaaagttgaccgtggaaggcgagttttaccataaatcatgttttaggtgtgcacatggaggatgtttcctgaccccttcaacctatgctgctcttgatggatatctttactgcaagcctcacttctctcaattgttcaaggagaagggtagctacagttatctgtccaagcaaacttcattgaagaaaagtgaaatgcaacaagaacaagaggctgtggagaaaacaacaacaacaacaacaaccgatgatgatcgctcagagccagagccagagacgacgacaacaacaacaacaatggaagctgaacaagctgatgatgatcactctgagcaagaacactagattgattgatggaacattaattttgcaaggggaggcttcacttgtgtctttgagtaaaattgatctttctggctacaaatagaacaaccccatttgggacattttgaagttcctgattcattgggttgtgtggctttgtgtcatttgggaagattcccgcaaaagggctattacagtattatgtgttccataatttgcaaacagtcagtgtagacagttaaccgttaagcctttctgttctttggggcatgtacatgactttctcaagccaaagtgcatgcatgcatgctacaatcatttcagatgtatttcattctttgtattcagaaacagatatcagagtagaaaaagaagattttattgtctg

SEQ ID NO: 14873 - DNA, 389 bp, Glycine max
  Clone ID: LIB3030-009-B5_FLI
gccattttagcccaggacaaggataggttgatggatatgctaacatatccgaaagttgaagaggaaaacatgataagagtagaggaaaaggccaaaaaatttggcctagtagtggatttaaatgcaaagaagcctcgagctgagccactgtacataataaatccaagtgtggtttctgatctgtatggccattgggtcatgccattgacaaaggaagtgcaagttgcatatttattgaggaggctggactaaacatatagtaagagttcttggttatgttggtggtagagaaccaataattcatgtatataaataaagcttagactgagtaataatgtctttgaatggacttgaatttgatagaaattaacaaacaccgttttctttct

SEQ ID NO: 14874 - DNA, 1187 bp, Glycine max
  Clone ID: LIB3030-009-F2_FLI
gtttatgtggatgatggcaagaccaagtatttggatcggtgttatgggagggttggtaggaggaagctgaaggagagattggttcaaggctgtgtctccaatggggttaggtttcacaaggcaaaggtgtggcaagttcagcaccaagagtttgagtccaaagttttgtgtgatgatggggtggaattgaaggggagtttggttgttgatgctagtggattcgcaagtaattttgtagcatatgacaaggtgagacaccatggttttcagattgctcatggtgttttggctgaggtggatgatcacccttttgatttggacaagatggttttaatggactggagggattctcatttggggaatgaaccctacttgagagctagtaattcaaggtttcctactttcctctatgcaatgccatttagttccaatttgatatttcttgaggagacttcccttgtgagccgtccagtgttgtcttacatggaagtgaagaggaggatggttgcaaggctaaggcacttaggcattagagtgaagagggttttggaggatgagaagtgtttgattccaatgggaggacctcttccaaggatcccccaagaagtgatggctattggtggcacttctggggtagtgcacccttccacaggttacatggtggctagaacaatggctgtggctcctgttgtggcttttgctataactcagtgccttggctccaccagaatgatcagggggaaacaacttcatgataaagtttggaatagcatgtggccaattgagaacaggctggtaagggaattttactcttttggaatggagactttgttgaaacttgacttgaatggaagcaggagtttctttgatgcattttttaacttgaaaccttattactggcaagggttcctctcttcgaggttgactttgaatgagcttctttggttaagcatatcactctttggacatgcctcaaatccatccaggtttgatattgtcacaaagtgtcctgttccaatggctaagatggtgggcaatatcgctttggagtacattggatgatgatgatgatgatgatggaaggttgtgaaatgcgtgtttaagtttttgtttttcattggctgaacttgcatcttgatttgttgagttgtcattgaattgatatatatgataatttagctgctaat

SEQ ID NO: 14875 - DNA, 1029 bp, Glycine max
  Clone ID: LIB3030-010-C10_FLI
gcccattgggaagagtcacggaagttttcgcaatcctacacaattgagaggggttcttctactaataagggtaccacttcctccagtcattctgcatcagtggatcaagtggagtaccatgaattgcctagtgatgaggggcaggtacaagtgacttcagatgacaaattgccccgtgaagaagaaaagaatctcttgcaagctatgtgcacggttgatttttggatgctgtttgtgatcatgatatcagggttgggttctgggcttgcaactataaataatatgagccaaataggacaatcccttggatatagcgccattgagattaataatttggtgtcactgtggagtatgtggaacttccttggtcgttttggaggtggccatgtatcagattatatcatgcacagaaaaggttggcctaggcccctgttgatgacagtgactctggggataatgattcttggccatttaattatagcatctggtttccagggaaatttgtatttgggtcctgtcctggtgggcatctgctatggtgcacattggtccttgatgcccacaatcacttctgagatatttggtgtaaagcatatgggtaccattttcaatactattgctgcagcaagtccacttggatcgtatatactttctgtgagagttgttggatatatttacgacaagcaagccgataaagaagatcattcgtgctttggcatcaactgtttcatgccgtcattttttatcctggcagctgttgcttttcttgcgtttttggttggtttggcattattcttccggacccggaggttctataagcaagttgtgcttagaagattaaaacattatgcaagatgatggagattgcatttgcctgcatttcaacactaggtaaaggctgaggaaaccagtcttgttttctctggtctgtttggcataaatatagttaatgcagttttctatgggttgtctatgaggattatttgaattgtattttatttgttataagagaaatgtacacagaatttt

SEQ ID NO: 14876 - DNA, 894 bp, Glycine max
  Clone ID: LIB3030-010-D9_FLI
gggtcatcatcatcatcattaaacatgggtggcagtgttagcaagagtaggaggatgagttctgagaaatatgtgatgaatttgaaggagaaagtgaggctcttgcaagaggagataaaggagatgatgtatgagagggagaaggagacaaggagatatgagagggacataatggtgttcactttcaaggaggcagattcgaagcaagaggggaagaggctgagagaggaagtgaagcaattgaggagtttggtggaagagaaagatgagaagataagagagattgaggttggaatgatggagaagaacagtgagaaagagtgggaattgatgggaactaagctcttggttgagcagatgaaggaggagagagcaaggagagatgaagctgtggagaagtggaagcaactttatcttgcaattaagactgagctagatgaactcattcaaagaacatatgatggggatggtctgtattggaaagcagaggaaaatggcatccaaatggaaaatctgaagaaggagttgcaagaaaaggaagaaaccatcaaggccttaaaaactcaattgctttcaatggagaaagaaaagtacaaaaaggagagggagtttgacttgttaaggcaaagcctgaggatcatgaatggcaagaagaattcaattcaaacgaaagagaagctcttgaaaagcaaattgggaaaatgaaatgtacaaaaactagttttcatatccaaaattgaacaatgtggttgaatatgtattattgtatactgggatggtttgtatctttcaacagcacatattttccttttactttttccccctcctttttcttcagaaaaaataagcaagccaatacttccagaggaaaaaaaaaactcttcttgaaccttg

SEQ ID NO: 14877 - DNA, 1416 bp, Glycine max
  Clone ID: LIB3030-012-A2_FLI
cagcaactccactcaattgtatgcattgatccatggctagatacattaatattgtacttttgggaatagtgttggtagtggtgagattgaaaggtgcagaggcacagcgggcgttctttgtgtttggggattctcttgtggataatgggaacaacaactttttggcaactacagctcgagcagatgctcctccttatggcattgattacccaaccggaagacccactggccggttctctaatggctacaacattcctgacttcattagtcaatcacttggggccgaatccacattgccttatttagatcccgagctcgacggggaaagattgcttgttggtgccaactttgcttctgctggtattggaattctcaatgacactggaatccaatttgtaaacataatcagaatatacagacagttggagtactgggaagaataccaacaaagggtgagtggtctcataggacctgagcagactgagcgcttaataaatggagcattggtcctcatcactcttggaggcaacgactttgtcaataactattacttggtcccttactctgcaagatcacgccaatacaatttaccagattacgtcaagtatattatctctgagtacaagaaagttctaaggaggctatacgaaattggagcacgtagggtgctggtgacgggaactggtccattgggttgtgttccagcggaattggcccagcgaagcaccaacggtgactgctcagctgagctgcagcgagccgcagccttgttcaaccctcaacttgttcagattatccaacaactcaacagcgaaattggttccaatgtcttcgttggagtcaacacgcaacagatgcacatcgacttcatcagtaatcctcaacgatatggatttgttacatcaaaagtagcatgttgcggtcaaggaccctacaatggtcttggactgtgcactccggcatccaacttgtgccctaaccgtgatatttatgccttttgggatccttttcatccatcagaaagggctaataggttaatcgttcaacagattttgtcaggcacctcagagtatatgtatccaatgaatcttagcaccattatggctttggattccaagaactagatcaatcaatcaagggtctctgtccatcattttattaccgcacctcttttgtgtctcacaattatatatagtctacctgttaatttgtcatatatttatatatatatatatgtgtgtgttcaaatttggtttcatataatatatagtaattatctccaatgtgtcagtgaatagtatatatattataatgttggagtggatggatgatggtaagtaccgtcctccttctccttctcttgggcagtacagaagaaagactgcatgtataataattgagtgaatttttatcttc

SEQ ID NO: 14878 - DNA, 2389 bp, Glycine max
  Clone ID: LIB3030-012-A8_FLI
atttaatagattctgatcgtaacggtggtgatactagtgatttacttgaaggtcagcggcaatacaattctgccatacattcaattcaagaaaaggtaagcgagcaaccatctattcttcaaggtggagaattaagaccataccaactagaaggcctccagtggatgctttctttgtttaataacaatttaaatggaatattggctgatgaaatggggcttgggaagacaatacaaaccatctcattgatagcatatcttatggaacacaagggtgtgactggtcctcacttgattgtggctccaaaggctgttctgccaaattggatcaatgaattctcaacatgggctcctagcatcacaaccattctttatgatggacggctggatgagagaaaagcaatgaaggaagagttgtcaggggaggggaaatttaatgttctgataacacactatgatcttataatgagagataaagcatttctcaagaaaatccattggctctacttgattgtggatgaagggcatcgattgaagaatcatgagtgtgctctagcaagaaccctggactctggctatcacattcaacgaagactgctgttgactggtaccccaattcagaacagtttgcaggaattatggtccctgctcaattttctccttccaaacattttcaattcagttcagaatttcgaggactggtttaatgctccctttgcagaccgagtggatgtctctctaactgatgaagaacaactattgatcattcggcgtctgcatcaagtgataaggcccttcatattgagaaggaaaaaagatgaggtggaaaaatttcttcctagtaaatctcaggttatactcaaatgtgacttgtcagcctggcagaaagtatattatcaacaagtcactgatgttggcagagttggcttagacaatggttctggaaaatcaaaaagtctacagaacttgacaatgcaactcagaaaatgttgtaaccatccctacctctttgtgggtgactatgatatccataaacacaaggaggagattttcagagcatcaggaaagtttgaacttcttgaccgtttgcttccaaaacttcgtagagctggtcacagagtcctccttttttctcagatgactcggctcatggacattcttgaaatttatctgcgacttaatgattttaaatttcttagacttgatggctcaacaaaaactgaggaaagaggttccctactacggaaattcaatgcacctgattctgcatactttatgtttctcttgagcacccgtgccggaggtcttggtttgaacttacaaacagcagatactgttataatctttgacagcgattggaacccacaaatggatcaacaagccgaggatcgagcacatcgcattggacaaaaaaaggaagttagagtttttgtgttagttagtgtgggatctattgaagaggtgattttagagcgtgctaaacaaaagatgggcattgatgccaaagtcattcaggcagggctctttaacacaacttctacagcacaagacagaagagaaatgttgcaggagattatgcgtagaggtactagctcacttggtacggatgtcccgagtgagagagaaattaaccgccttgcggcccgatctgatgaggaattttggctgtttgagaaaatggatgaagagcgaaggcaaaaggagaattacagatctcgtctcatggaagagcatgaactgccggattgggtatactctccactaaataaggatgataaggtcaaaatatttgacagtggtagtgttactggaaagcgtaaaagaaatgaagtggtatatgcagatacattaagtgacctacaatggatgaaggctgtggagaacggacaggacatatctaagctttcagtcaaagggaaaagaagagaccacctccctgttgacaaccatgcacaagctagtgatgacatggggacagaagaacggttatttagaagtgaagacactttcgacgtgacacctgcctctaagagactcaagcccgaagaaataaattcccagaaacatgaaaacgaagatgtcagtgttggtggtttgaacgagcatatattttcctggaatactcgtagaaagaagagatcaggctaccttggccagggttcattctctgatagtagagggcagaattcaaatggaagagcaaactggaactgatagttctaatttagtcatggatgccagaaattttccctacatttgtattgtgattctgcttcattgtgtttgtcaaggtaaatggtagattacactcgatcagcaaatgtagataccagcaaattccttctggcagttgtgaagtttatcagtgtgaatgtaaaatctaattgatg

SEQ ID NO: 14879 - DNA, 1391 bp, Glycine max
  Clone ID: LIB3030-012-H10_FLI
taaaaaatcaactaccttagaaaaggagtgaaaggaagaaaagagaaacaagaatggaagtgacacaagtactgcacatgaatggaggctcgggagaaacaagctatgcaaacaattccttagttcagcaaaaggtgatttttttgacaaagggtatgagagaggaagccataagcagcctctaccgcagcatgctcccaagaagccttgcagttgcggacttgggttgctcttctggaccaaacactttcttcgtgatatctgaagctataaaatcggtggagaagctttgtcgagaactgaatcatcagtcaccagaataccagatctacatgaacgatcttcccgggaatgatttcaacaacatcttcaagtcccttgacagcttcaaagagaaactgtgtaatgaaataatagaagctgggcatggaattggttcatgttttttcaatggggttccaggttctttttatggcaggatctttccaaccaaaagtctgcattttgttcattcctcgtacagccttatgtggctatccaaggttcctgatggtgtagagaacaataagggcaacatttacatggccagcacaagttccttaaatgtccttaaggcttattacgagcaatatcaaaaggatttctcgttgtttttgaagtgtcgagcggaagaaatcgtggaagggggtcgtatggttctgacatttttgggaagaagaagcgacgatcgatctagcaaagagtgttgctatatatgggaacttttggctatggctcttaatgatatggtctcgaagggaatcataaaagaagagcaaatggatactttcaacatccctcaatacacgccatccccatctgaagtgaaatttgaggttcaaaaggaaggttcatttagcattactagtctggaggtaacggtagtaccttggaatgcctacgataacgggaatgcttttgattctgaatgtggtttgtctaaatcactcagtaatggagggtacaacgttacaaagtgcatgagggccgtagcagaacctttgttggttagtcactttggagaagcaatcattgaagaggtttttagccggtatcaacaaatcttaactgaacgaatgtctaaggagaaaaccgaatttgttaacgtgaccatatcaatgattagaagagcatgaataagaagttgcatatgtttgcatatttatgtggtttctcattaaagcctaccccaaaaaactttcttcatcgtggttgttgtgtgtttaattgtaggaagtattcgtgtgtggtatctcctgtaacaaaactaaaagtattcatgcatgtgtggtttctcattaaaactgggaagtattctgttactataaactaatatctattgattatgttgt

SEQ ID NO: 14880 - DNA, 1635 bp, Schizochytrium aggregatum
  Clone ID: LIB3033-001-A12_FLI
gctcaacgaaaaggagatgcagaccctcgtcgacaaggactgggcatccgtctttggctccaagaacggcatgccggaaatcaactacaaactctgcgcgcgtaagatgctcatgattgaccgcgtcaccagcattgaccacaagggcggtgtctacggcctcggtcagctcgtcggtgaaaagatcctcgagcgcgaccactggtactttccctgccactttgtcaaggatcaggtcatggccggatccctcgtctccgacggctgcagccagatgctcaagatgtacatgatctggctcggcctccacctcaccaccggaccctttgacttccgcccggtcaacggccaccccaacaaggtccgctgccgcggccaaatctccccgcacaagggcaagctcgtctacgtcatggagatcaaggagatgggcttcgacgaggacaacgacccgtacgccattgccgacgtcaacatcattgatgtcgacttcgaaaagggccaggactttagcctcgaccgcatcagcgactacggcaagggcgacctcaacaagaagatcgtcgtcgactttaagggcatcgctctcaagatgcagaagcgctccaccaacaagaacccctccaaggttcagcccgtctttgccaacggcgccgccactgtcggccccgaggcctccaaggcttcctccggcgccagcgccagcgccagcgccgccccggccaagcctgccttcagcgccgatgttcttgcgcccaagcccgttgcccttcccgagcacatcctcaagggcgacgccctcgcccccaaggagatgtcctggcaccccatggcccgcatcccgggcaacccgacgccctcttttgcgccctcggcctacaagccgcgcaacatcgcctttacgcccttccccggcaaccccaacgataacgaccacaccccgggcaagatgccgctcacctggttcaacatggccgagttcatggccggcaaggtcagcatgtgcctcggccccgagttcgccaagttcgacgactcgaacaccagccgcagccccgcttgggacctcgctctcgtcacccgcgccgtgtctgtgtctgacctcaagcacgtcaactaccgcaacatcgacctcgacccctccaagggtaccatggtcggcgagttcgactgccccgcggacgcctggttctacaagggcgctgcaacgatgcccacatgccgtactcgatcctcatggagatcgccctccagacctcgggtgtgctcacctcggtgctcaaggcgcccctgaccatggagaaggacgacatcctcttccgcaacctcgacgccaacgccgagttcgtgcgcgccgacctcgactaccgcggcaagactatccgcaacgtcaccaagtgcactggctacagcatgctcggcgagatgggcgtccaccgcttcacctttgagctctacgtcgatgatgtgctcttttacaagggctcgacctcgttcggctggttcgtgcccgaggtctttgccgcccaggccggcctcgacaacggccgcaagtcggagccctggttcattgagaacaaggttccggcctcgcaggtctcctcctttgacgtgcgccccaacggcagcggccgc

SEQ ID NO: 14881 - DNA, 1073 bp, Schizochytrium aggregatum
  Clone ID: LIB3033-002-B4_FLI
ctcgccgagatgttcatgcgtcctgcgcccgagcaccttcttcagaagctcattgcttccggcgagatcaaccaggagcaggccgagctcgcccgccgtgttcccgtcgctgacgacatcgcggtcgaagctgactcgggtggccacaccgacaaccgccccatccacgtcattctgcccctcatcatcaaccttcgcgaccgccttcaccgcgagtgcggctacccggccaaccttcgcgtccgtgtgggcgccggcggtggcattgggtgcccccaggcggcgctggccaccttcaacatgggtgcctcctttattgtcaccggcaccgtgaaccaggtcgccaagcagtcgggcacgtgcgacaatgtgcgcaagcagctcgcgaaggccacttactcggacgtatgcatggccccggctgccgacatgttcgaggaaggcgtcaagcttcaggtcctcaagaagggaaccatgtttccctcgcgcgccaacaagctctacgagctcttttgcaagtacgactcgttcgagtccatgccccccgcagagcttgcgcgcgtcgagaagcgcatcttcagccgcgcgctcgaagaggtctgggacgagaccaaaaacttttacattaaccgtcttcacaacccggagaagatccagcgcgccgagcgcgaccccaagctcaagatgtcgctgtgctttcgctggtacctgagcctggcgagccgctgggccaacactggagcttccgatcgcgtcatggactaccaggtctggtgcggtcctgccattggttccttcaacgatttcatcaagggaacttaccttgatccggccgtcgcaaacgagtacccgtgcgtcgttcagattaacaagcagatccttcgtggagcgtgcttcttgcgccgtctcgaaattctgcgcaacgcacgcctttccgatggcgctgccgctcttgtggccagcatcgatgacacatacgtcccggccgagaagctgtaagtaagctctcatatatgttagttgcgtgagaccgacacgaagataatatcacatacgcttttgtttgttctttc

SEQ ID NO: 14882 - DNA, 1690 bp, Schizochytrium aggregatum
  Clone ID: LIB3033-013-B8_FLI
gctccttcggcccccgtgcaaaagaaggctgctcccgccgcggagaccaaggctgttgcttcggctgacgcacttcgcagtgccctgctcgatctcgacagtatgcttgcgctgagctctgccagtgcctccggcaaccttgttgagactgcgcctagcgacgcctcggtcattgtgccgccctgcaacattgcggatctcggcagccgcgccttcatgaaaacgtacggtgtttcggcgcctctgtacacgggcgccatggccaagggcattgcctctgcggacctcgtcattgccgccggccgccagggcatccttgcgtcctttggcgccggcggacttcccatgcaggttgtgcgtgagtccatcgaaaagattcaggccgccctgcccaatggcccgtacgctgtcaaccttatccattctccctttgacagcaacctcgaaaagggcaatgtcgatctcttcctcgagaagggtgtcacctttgtcgaggcctcggcctttatgacgctcaccccgcaggtcgtgcggtaccgcgcggctggcctcacgcgcaacgccgacggctcggtcaacatccgcaaccgtatcattggcaaggtctcgcgcaccgagctcgccgagatgttcatgcgtcctgcgcccgagcaccttcttcagaagctcattgcttccggcgagatcaaccaggagcaggccgagctcgcccgccgtgttcccgtcgctgacgacatcgcggtcgaagctgactcgggtggccacaccgacaaccgccccatccacgtcattctgcccctcatcatcaaccttcgcgaccgccttcaccgcgagtgcggctacccggccaaccttcgcgtccgtgtgggcgccggcggtggcattgggtgcccccaggcggcgctggccaccttcaacatgggtgcctcctttattgtcaccggcaccgtgaaccaggtcgccaagcagtcgggcacgtgcgacaatgtgcgcaagcagctcgcgaaggccacttactcggacgtatgcatggccccggctgccgacatgttcgaggaaggcgtcaagcttcaggtcctcaagaagggaaccatgtttccctcgcgcgccaacaagctctacgagctcttttgcaagtacgactcgttcgagtccatgccccccgcagagcttgcgcgcgtcgagaagcgcatcttcagccgcgcgctcgaagaggtctgggacgagaccaaaaacttttacattaaccgtcttcacaacccggagaagatccagcgcgccgagcgcgaccccaagctcaagatgtcgctgtgctttcgctggtacctgagcctggcgagccgctgggccaacactggagcttccgatcgcgtcatggactaccaggtctggtgcggtcctgccattggttccttcaacgatttcatcaaggaacttaccttgatccggccgtcgcaaacgagtacccgtgcgtcgttcagattaacaagcagatccttcgtggagcgtgcttcttgcgccgtctcgaaattctgcgcaacgcacgcctttccgatggcgctgccgctcttgtggccagcatcgatgacacatacgtcccggccgagaagctgtaagtaagctctcatatatgttagttgcgtgagaccgacacgaagataatatcacatacgcttttgtttgttctttc

SEQ ID NO: 14883 - DNA, 1333 bp, Schizochytrium aggregatum
  Clone ID: LIB3033-018-G4_FLI
ccggagcaagcggcagttgattgttcttcacaaaagggtcgaaagtccgcggaggcaaacgcacacagcacgccaagtcaggcaagatgagcgccgtgggcaaggagatcttcatcgtcgccgccaagcggacggctttcggcacctttggcggaagccttaaacacctctccgccgtgcagctcggcgtggaggccgccaagggcgccatcgcgcagctcccgagcgcggagatcattgacaccgtacacgtgggtaacgtgcagcagaccacgaccgacgttgcctacttggctcgccatgtcgcgcttaaggctggcgtccccatcgaggtgcccgccctgacggtcaaccgcctctgcggatctggttttcagtccatcgtcaacggcgtgcaggacattctcgtcggcgacgccgaggtcgtcctcaccggcggtgccgagagcatgtcccaggccccttacctggtgcacggcgtccgcttcggctcccctctgggcgtgaacccgcccatgatcgattccctctgggagggcctccaggacaagcatgtgggctgcccgatggccatcaccgccgagaaccttgccgagaagtacgacatctccaaggaggacgccgacgcctttgcgctgcgctcgcagcaaaagtgggccgccgcccaggaggctggtctctttaaggatgagattgtccccatcaagatcaaggatcgcaagaagggcgagatcgactttgaggtcgacgagcacccgcgcccgcagaccacggtcgagtcgctccagaagcttaagcctctcttcaagaagggtggctctgtctccgctggtaacgcctccggtatctcggacggtgccggcgccgtaatcgtcgcctcggccgaggctgtcaagaagcacaacctcaagcccatggcgcgaattgtgtcctacgccgtggctggtgtgccccctgagatcatgggtattggccctgtccccgccatccaggaggctcttcgccgcgcaaacctctcgatcaacgacatggactttctcgagatcaatgaggcattcgcttcgcagttccttgcctgccagaaggaccttggctttgacctcgagaaggagggcatgcagtccaagggtggtgccatcgcccagggtcacccgaccggtgcctcgggctcgcgtatcatgggcaccctcgcctacgacctggcccgcaaccctggcaagaagtacgccattggcagcgcctgcattggtggcggccaaggcattgccatcattctcgagaactgcgcttgaaaatagctccatcgtcatgaactaatttaccctttttcttg

SEQ ID NO: 14884 - DNA, 1318 bp, Schizochytrium aggregatum
  Clone ID: LIB3033-021-G6_FLI
aagatccaggccgccctgcctcagggcccctacgccgtcaacctcatccactcgccttttgacagcaacctcgagaagggcaacgtcgatctcttcctcgagaagggcgtcactgtggtggaggcctcggcattcatgaccctcaccccgcaggtcgtgcgctaccgcgccgccggcctctcgcgcaacgccgacggttcggtcaacatccgcaaccgcatcatcggcaaggtctcgcgcaccgagctcgccgagatgttcatccgcccggccccggagcacctcctcgagaagctcatcgcctcgggcgagatcacccaggagcaggccgagctcgcgcgccgcgttcccgtcgccgacgatatcgctgtcgaggctgactcgggcggccacaccgacaaccgccccatccacgtcatcctcccgctcatcatcaacctccgcaaccgcctgcaccgcgagtgcggctaccccgcgcacctccgcgtccgcgttggcgccggcggtggcgtcggctgcccgcaggccgccgccgccgcgctcaccatgggcgccgccttcatcgtcaccggcactgtcaaccaggtcgccaagcagtccggcacctgcgacaacgtgcgcaagcagctctcgcaggccacctactcggatatctgcatggccccggccgccgacatgttcgaggagggcgtcaagctccaggtcctcaagaagggaaccatgttcccctcgcgcgccaacaagctctacgagctcttttgcaagtacgactccttcgactccatgcctcctgccgagctcgagcgcatcgagaagcgtatcttcaagcgcgcactccaggaggtctgggaggagaccaaggacttttacattaacggtctcaagaacccggagaagatccagcgcgccgagcacgaccccaagctcaagatgtcgctctgcttccgctggtaccttggtcttgccagccgctgggccaacatgggcgccccggaccgcgtcatggactaccaggtctggtgtggcccggccattggcgccttcaacgacttcatcaagggcacctacctcgaccccgctgtctccaacgagtacccctgtgtcgtccagatcaacctgcaaatcctccgtggtgcctgctacctgcgccgtctcaacgccctgcgcaacgacccgcgcattgacctcgagaccgaggatgctgcctttgtctacgagcccaccaacgcgctctaagaaagtgaaccttgtcctaacccgacagcgaatggcgggagggggcgggctaaaagatcgtattacatagtatttttcccct

SEQ ID NO: 14885 - DNA, 1062 bp, Schizochytrium aggregatum
  Clone ID: LIB3033-022-H5_FLI
gtctcgagcgagcttctcgagaaggccgagaccgtcgtcatggaggtcctcgccgccaagactggctacgagactgacatgattgagtccgacatggagctcgagactgagctcggcattgactccatcaagcgtgtcgagatcctctccgaggttcaggccatgctcaacgtcgaggccaaggacgtcgatgccctcagccgcacccgcactgttggcgaggttgtcgatgccatgaaggccgagatcgctggtggctctgccccggcgcctgccgccgctgcccctgctccggctgccgccgcccctgctgtctcgaacgagcttcttgagaaggccgagaccgtcgtcatggaggtcctcgccgccaagactggctacgagaccgacatgatcgagtccgacatggagctcgagaccgagctcggcattgactccatcaagcgtgtcgagattctctccgaggttcaggccatgctcaacgtcgaggccaaggacgtcgacgctctcagccgcactcgcactgttggcgaggtcgtcgatgccatgaaggctgagatcgctggtggctctgccccggcgcctgccgccgctgctcctgcctcggctggcgccgcgcctgcggtcaagattgactcggtccacggcgctgactgtgatgatctttccctgatgcacgccaaggtggttgacatccgccgcccggacgagctcatcctggagcgccccgagaaccgccccgttctcgttgtcgatgacggcagcgagctcaccctcgccctggtccgcgtcctcggcgcctgcgccgttgtcctgacctttgagggtctccagctcgctcagcgcgctggtgccgctgccatccgccacgtgctcgccaaggatctttccgcggagagcgccgagaaggccatcaaggaggccgagcagcgctttggcgctctcggcggcttcatctcgcagcaggcggagcgcttcgagcccgccgaaatcctcggcttcacgctcatgtgcgccaagttcgccaaggcttccctctgcacggctgtggctggcggccgc

SEQ ID NO: 14886 - DNA, 1946 bp, Schizochytrium aggregatum
  Clone ID: LIB3033-025-F11_FLI
ggcctctgcaagaccatcggcctcgagtggtccgagtctgacgtcttttcccgcggcgtggacattgctcagggcatgcaccccgaggatgccgccgtggcgattgtgcgcgagatggcgtgcgctgacattcgcattcgcgaggtcggcattggcgcaaaccagcagcgctgcacgatccgtgccgccaagctcgagaccggcaacccgcagcgccagatcgccaaggacgacgtgctgctcgtttctggcggcgctcgcggcatcacgcctctttgcatccgggagatcacgcgccagatcgcgggcggcaagtacattctgcttggccgcagcaaggtctctgcgagcgaaccggcatggtgcgctggcatcactgacgagaaggctgtgcaaaaggctgctacccaggagctcaagcgcgcctttagcgctggcgagggccccaagcccacgccccgcgctgtcactaagcttgtgggctctgttcttggcgctcgcgaggtgcgcagctctattgctgcgattgaagcgctcggcggcaaggccatctactcgtcgtgcgacgtgaactctgccgccgacgtggccaaggccgtgcgcgatgccgagtcccagctcggtgcccgcgtctcgggcatcgttcatgcctcgggcgtgctccgcgaccgtctcatcgagaagaagctccccgacgagttcgacgccgtctttggcaccaaggtcaccggtctcgagaacctcctcgccgccgtcgaccgcgccaacctcaagcacatggtcctcttcagctcgctcgccggcttccacggcaacgtcggccagtctgactacgccatggccaacgaggcccttaacaagatgggcctcgagctcgccaaggacgtctcggtcaagtcgatctgcttcggtccctgggacggtggcatggtgacgccgcagctcaagaagcagttccaggagatgggcgtgcagatcatcccccgcgagggcggcgctgataccgtggcgcgcatcgtgctcggctcctcgccggctgagatccttgtcggcaactggcgcaccccgtccaagaaggtcggctcggacaccatcaccctgcaccgcaagatttccgccaagtccaaccccttcctcgaggaccacgtcatccagggccgccgcgtgctgcccatgacgctggccattggctcgctcgcggagacctgcctcggcctcttccccggctactcgctctgggccattgacgacgcccagctcttcaagggtgtcactgtcgacggcgacgtcaactgcgaggtgaccctcaccccgtcgacggcgccctcgggccgcgtcaacgtccaggccacgctcaagaccttttccagcggcaagctggtcccggcctaccgcgccgtcatcgtgctctccaaccagggcgcgcccccggccaacgccaccatgcagccgccctcgctcgatgccgatccggcgctccagggctccgtctacgacggcaagaccctcttccacggcccggccttccgcggcatcgatgacgtgctctcgtgcaccaagagccagcttgtggccaagtgcagcgctgtccccggctccgacgccgctcgcggcgagtttgccacggacactgacgcccatgaccccttcgtgaacgacctggcctttcaggccatgctcgtctgggtgcgccgcacgctcggccaggctgcgctccccaactcgatccagcgcatcgtccagcaccgcccggtcccgcaggacaagcccttctacattaccctccgctccaaccagtcgggcggtcactcccagcacaagcacgcccttcagttccacaacgagcagggcgatctcttcattgatgtccaggcttcggtcatcgccacggacagccttgccttctaaatctaaactagtgaatcgcgacaagttgtctttttgtt

SEQ ID NO: 14887 - DNA, 1007 bp, Schizochytrium aggregatum
  Clone ID: LIB3033-037-H2_FLI
ggccttgcaggacgatgtatgcaaccgcttgctgctacgaggcccccaggacgagcttgatcttacagaaaatgcgcaacctgccatcatggctctgtccatcgccgtcacgcgggtacttgatcatgaacttggcctcggcgccgcgagcccgcattgcaagatggccctcggccactcactcggcgaattcgccgccatggtggccacgggtgccctcgagcttgcggacgctgcacgcattgtacgcgctcggggccgtgccatgcaaacggccagcaacatgtttttccgggagcgcgctgatggtgacgatgactttgccatgtacgcaataatgcccattggatacgaaaaggcggcagaagcatgcgctctcgctcttcaagagcttggcgaggactctcacgtctgtcaggtggccaatgctaatagtcctaaacaggttgttttgagcggatcgcgccttgccgtctcgcgcgctgtggaaattgccaaggaaaaattccgcgcccgaagggctacacctctccgcgtatctgcgccttttcattgccgcgtcatggcagacgctcggccagcactggaagaggctctcagcgctgcaaagtcgtggcgtcatcccgacgttcctatcatttccaatgttacggctgagcccgtcctatccgcagacgcacttcaagagttggcacttgagcagctcacaagcactgtgcgctgggacgcctgcgtgcataccgcactgcaaggcgccgcgaacgcgagttttattgaggctggaggtaaggttctctcgccactcgtctctgctgtcggtggcaagaacgttcgcgttttccccgtttcggacacaatcgatctgccaacaccacaagacttcccgcaggtctctccataaaaagcaaagtaaaggcaaatctctggccaagccgcagctacgagagtgttgactctctatttcctttttccattgcctaatgtaggtccaatttgcattacgtttg

SEQ ID NO: 14888 - DNA, 1121 bp, Schizochytrium aggregatum
  Clone ID: LIB3033-038-B7_FLI
gctgactacgccatggccaacgaggcccttaacaagatgggcctcgagctcgccaaggacgtctcggtcaagtcgatctgcttcggtccctgggacggtggcatggtgacgccgcagctcaagaagcagttccaggagatgggcgtgcagatcatcccccgcgagggcggcgctgataccgtggcgcgcatcgtgctcggctcctcgccggctgagatccttgtcggcaactggcgcaccccgtccaagaaggtcggctcggacaccatcaccctgcaccgcaagatttccgccaagtccaaccccttcctcgaggaccacgtcatccagggccgccgcgtgctgcccatgacgctggccattggctcgctcgcggagacctgcctcggcctcttccccggctactcgctctgggccattgacgacgcccagctcttcaagggtgtcactgtcgacggcgacgtcaactgcgaggtgaccctcaccccgtcgacggcgccctcgggccgcgtcaacgtccaggccacgctcaagaccttttccagcggcaagctggtcccggcctaccgcgccgtcatcgtgctctccaaccagggcgcgcccccggccaacgccaccatgcagccgccctcgctcgatgccgatccggcgctccagggctccgtctacgacggcaagaccctcttccacggcccggccttccgcggcatcgatgacgtgctctcgtgcaccaagagccagcttgtggccaagtgcagcgctgtccccggctccgacgccgctcgcggcgagtttgccacggacactgacgcccatgaccccttcgtgaacgacctggcctttcaggccatgctcgtctgggtgcgccgcacgctcggccaggctgcgctccccaactcgatccagcgcatcgtccagcaccgcccggtcccgcaggacaagcccttctacattaccctccgctccaaccagtcgggcggtcactcccagcacaagcacgcccttcagttccacaacgagcagggcgatctcttcattgatgtccaggcttcggtcatcgccacggacagccttgccttctaaatctaaactagtgaatcgcgacaagttgtctttttgtt

SEQ ID NO: 14889 - DNA, 1319 bp, Schizochytrium aggregatum
  Clone ID: LIB3033-038-E10_FLI
atgatcgaggctgacatggagctcgagaccgagctcggcattgactccatcaagcgtgtcgagatcctctccgaggtccaggccatgctcaatgtcgaggccaaggatgtcgatgccctcagccgcactcgcactgttggtgaggttgtcaacgccatgaaggccgagatcgctggcagctctgccccggcgcctgctgccgctgctccggcaggagcaggagcgggagcgggagcaggagcgcggcagcggcggagcggaggagcgaaggaagatgctggcgagcggcttcaagagcgccgggctcatggcccggcgcggcctcgcggcgagcgcgcaggcgcgcatggcgtcgacgctggtgctcgcggagcacgccgagggcgcgatcgcggactcgaccctgtcggtggtgtccgccgccaaggccatcggaggcgacgtgaccctgctcgtggccggcgctgatgccgccaagatcgccgagcaggccgccaagatcgacggcgtctcctcggtcctcgcggccggcgacgccgcctacgaccacggcatcgccgagaacatcaccgccctcctccagtccgtccaggactccaagagcttctcgcacatcctctttgccgcctccaacgacggcaagaacatcatgccccgcctcggcgccaagctcgacgtgcagcccgtctccgacatcctcgagatcctcggcgaggacaccttcaagcgccccatgtacgctggcaacgccatcgccaccgtgaagtcctcggacagcgtcaagctcgccagcgtccgcatcaccaactttgacaaggccgctgccgagggtggctccgccagcgtcgaggaggtttccggccccggcgacgccggcaagaccacctgggtcgccgacgaggtcgccaagtcggaccgccccgagctcaccaccgccgacaagatcgtctccggcggccgtggcctcaaaaacggcgagaactttgacatgctctacaccctcgccgacaagctcggtggcggcgctgtcggcgcctcgcgcgcggccgtcgacgccggctacgtgcccaacgagctccagatcggccagaccggcaagatcgtcgccccgggcctgtacattgccgtgggtatctccggtgccatccagcaccttgccggcatgaaggacgccaagaccattgtctgcatcaacaaggaccccgaggcccccatcttccaggtcagcgacattggcctcgaggctgacctcttcaaggccgtccccgagatgatcgagaagctctaaactctgaaatcgccaattttatgacacatcg

SEQ ID NO: 14890 - DNA, 2430 bp, Schizochytrium aggregatum
  Clone ID: LIB3033-046-E6_FLI
cgctgccgccgcgtctcgccgcgccgcgccgcgccgccgccgccgctcgcgcgcacgcccgcgcgtctcgccgcgcctgctgtctcgaacgagcttctcgagaaggccgagaccgtcgtcatggaggtcctcgccgccaagactggctacgagactgacatgatcgagtccgacatggagctcgagactgagctcggcattgactccatcaagcgtgtcgagatcctctccgaggttcaggccatgctcaacgtcgaggccaaggacgtcgacgctctcagccgcactcgcactgtgggtgaggtcgtcaacgccatgaaggctgagatcgctggtggctctgccccggcgcctgccgccgctgccccaggtccggctgctgccgcccctgcgcctgctgtctcgagcgagcttctcgagaaggccgagactgtcgtcatggaggtcctcgccgccaagactggctacgagactgacatgattgagtccgacatggagctcgagaccgagctcggcattgactccatcaagcgtgtcgagattctctccgaggttcaggccatgctcaacgtcgaggccaaggacgtcgacgctctcagccgcactcgcactgttggtgaggtcgtcgatgccatgaaggctgagatcgctggcagctccgcctcggcgcctgccgccgctgctcctgctccggctgctgccgctcctgcgcccgctgccgccgcccctgctgtctcgaacgagcttctcgagaaagccgagactgtcgtcatggaggtcctcgccgccaagactggctacgagactgacatgatcgagtccgacatggagctcgagactgagctcggcattgactccatcaagcgtgtcgagatcctctccgaggttcaggccatgctcaacgtcgaggccaaggacgtcgatgccctcagccgcacccgcactgttggcgaggttgtcgatgccatgaaggccgagatcgctggtggctctgccccggcgcctgccgccgctgcccctgctccggctgccgccgcccctgctgtctcgaacgagcttcttgagaaggccgagactgtcgtcatggaggtcctcgccgccaagactggctacgagaccgacatgatcgagtccgacatggagctcgagaccgagctcggcattgactccatcaagcgtgtcgagattctctccgaggttcaggccatgctcaacgtcgaggccaaggacgtcgatgctctcagccgcactcgcactgttggcgaggtcgtcgatgccatgaaggctgagatcgccggcagctccgccccggcgcctgccgccgctgctcctgctccggctgctgccgctcctgcgcccgctgccgctgcccctgctgtctcgagcgagcttctcgagaaggccgagaccgtcgtcatggaggtcctcgccgccaagactggctacgagactgacatgattgagtccgacatggagctcgagactgagctcggcattgactccatcaagcgtgtcgagatcctctccgaggttcaggccatgctcaacgtcgaggccaaggacgtcgatgccctcagccgcacccgcactgttggcgaggttgtcgatgccatgaaggccgagatcgctggtggctctgccccggcgcctgccgccgctgcccctgctccggctgccgccgcccctgctgtctcgaacgagcttcttgagaaggccgagaccgtcgtcatggaggtcctcgccgccaagactggctacgagaccgacatgatcgagtccgacatggagctcgagaccgagctcggcattgactccatcaagcgtgtcgagattctctccgaggttcaggccatgctcaacgtcgaggccaaggacgtcgacgctctcagccgcactcgcactgttggcgaggtcgtcgatgccatgaaggctgagatcgctggtggctctgccccggcgcctgccgccgctgctcctgcctcggctggcgccgcgcctgcggtcaagattgactcggtccacggcgctgactgtgatgatctttccctgatgcacgccaaggtggttgacatccgccgcccggacgagctcatcctggagcgccccgagaaccgccccgttctcgttgtcgatgacggcagcgagctcaccctcgccctggtccgcgtcctcggcgcctgcgccgttgtcctgacctttgagggtctccagctcgctcagcgcgctggtgccgctgccatccgccacgtgctcgccaaggatctttccgcggagagcgccgagaaggccatcaaggaggccgagcagcgctttggcgctctcggcggcttcatctcgcagcaggcggagcgcttcgagcccgccgaaatcctcggcttcacgctcatgtgcgccaagttcgccaaggcttccctctgcacggctgtggct

SEQ ID NO: 14891 - DNA, 2053 bp, Schizochytrium aggregatum
  Clone ID: LIB3033-047-B5_FLI
gcggccgcccggcctttatcggtgtggcgcgccttgacggccgcctcggattcacttcgcagggcacttctgacgcgctcaagcgtgcccagcgtggtgccatctttggcctctgcaagaccatcggcctcgagtggtccgagtctgacgtcttttcccgcggcgtggacattgctcagggcatgcaccccgaggatgccgccgtggcgattgtgcgcgagatggcgtgcgctgacattcgcattcgcgaggtcggcattggcgcaaaccagcagcgctgcacgatccgtgccgccaagctcgagaccggcaacccgcagcgccagatcgccaaggacgacgtgctgctcgtttctggcggcgctcgcggcatcacgcctctttgcatccgggagatcacgcgccagatcgcgggcggcaagtacattctgcttggccgcagcaaggtctctgcgagcgaaccggcatggtgcgctggcatcactgacgagaaggctgtgcaaaaggctgctacccaggagctcaagcgcgcctttagcgctggcgagggccccaagcccacgccccgcgctgtcactaagcttgtgggctctgttcttggcgctcgcgaggtgcgcagctctattgctgcgattgaagcgctcggcggcaaggccatctactcgtcgtgcgacgtgaactctgccgccgacgtggccaaggccgtgcgcgatgccgagtcccagctcggtgcccgcgtctcgggcatcgttcatgcctcgggcgtgctccgcgaccgtctcatcgagaagaagctccccgacgagttcgacgccgtctttggcaccaaggtcaccggtctcgagaacctcctcgccgccgtcgaccgcgccaacctcaagcacatggtcctcttcagctcgctcgccggcttccacggcaacgtcggccagtctgactacgccatggccaacgaggcccttaacaagatgggcctcgagctcgccaaggacgtctcggtcaagtcgatctgcttcggtccctgggacggtggcatggtgacgccgcagctcaagaagcagttccaggagatgggcgtgcagatcatcccccgcgagggcggcgctgataccgtggcgcgcatcgtgctcggctcctcgccggctgagatccttgtcggcaactggcgcaccccgtccaagaaggtcggctcggacaccatcaccctgcaccgcaagatttccgccaagtccaaccccttcctcgaggaccacgtcatccagggccgccgcgtgctgcccatgacgctggccattggctcgctcgcggagacctgcctcggcctcttccccggctactcgctctgggccattgacgacgcccagctcttcaagggtgtcactgtcgacggcgacgtcaactgcgaggtgaccctcaccccgtcgacggcgccctcgggccgcgtcaacgtccaggccacgctcaagaccttttccagcggcaagctggtcccggcctaccgcgccgtcatcgtgctctccaaccagggcgcgcccccggccaacgccaccatgcagccgccctcgctcgatgccgatccggcgctccagggctccgtctacgacggcaagaccctcttccacggcccggccttccgcggcatcgatgacgtgctctcgtgcaccaagagccagcttgtggccaagtgcagcgctgtccccggctccgacgccgctcgcggcgagtttgccacggacactgacgcccatgaccccttcgtgaacgacctggcctttcaggccatgctcgtctgggtgcgccgcacgctcggccaggctgcgctccccaactcgatccagcgcatcgtccagcaccgcccggtcccgcaggacaagcccttctacattaccctccgctccaaccagtcgggcggtcactcccagcacaagcacgcccttcagttccacaacgagcagggcgatctcttcattgatgtccaggcttcggtcatcgccacggacagccttgccttctaaatctaaactagtgaatcgcgacaagttgtctttttgtt

SEQ ID NO: 14892 - DNA, 1679 bp, Schizochytrium aggregatum
  Clone ID: LIB3033-050-B10_FLI
gctccttcggcccccgtgcaaaagaaggctgctcccgccgcggagaccaaggctgttgcttcggctgacgcacttcgcagtgccctgctcgatctcgacagtatgcttgcgctgagctctgccagtgcctccggcaaccttgttgagactgcgcctagcgacgcctcggtcattgtgccgccctgcaacattgcggatctcggcagccgcgccttcatgaaaacgtacggtgtttcggcgcctctgtacacgggcgccatggccaagggcattgcctctgcggacctcgtcattgccgccggccgccagggcatccttgcgtcctttggcgccggcggacttcccatgcaggttgtgcgtgagtccatcgaaaagattcaggccgccctgcccaatggcccgtacgctgtcaaccttatccattctccctttgacagcaacctcgaaaagggcaatgtcgatctcttcctcgagaagggtgtcacctttgtcgaggcctcggcctttatgacgctcacctcgcaggtcgtgcggtaccgcgcggctggcctcacgcgcaacgccgacggctcggtcaacatccgcaaccgtatcattggcaaggtctcgcgcaccgagctcgccgagatgttcatgcgtcctgcgcccgagcaccttcttcagaagctcattgcttccggcgagatcaaccaggagcaggccgagctcgcccgccgtgttcccgtcgctgacgacatcgcggtcgaagctgactcgggtggcacaccgacaaccgccccatccacgtcattctgcccctcatcatcaaccttcgcgaccgccttcaccgcgagtgcggctacccggccaaccttcgcgtccgtgtgggcgccggcggtggcattgggtgcccccaggcggcgctggccaccttcaacatgggtgcctcctttattgtcaccggcaccgtgaaccaggtcgccaagcagtcgggcacgtgcgacaatgtgcgcaagcagctcgcgaaggccacttactcggacgtatgcatggccccggctgccgacatgttcgaggaaggcgtcaagcttcaggtcctcaagaagggaaccatgtttccctcgcgcgccaacaagctctacgagctcttttgcaagtacgactcgttcgagtccatgccccccgcagagcttgcgcgcgtcgagaagcgcatcttcagccgcgcgctcgaagaggtctgggacgagaccaaaaacttttacattaaccgtcttcacaacccggagaagatccagcgcgccgagcgcgaccccaagctcaagatgtcgctgtgctttcgctggtacctgagcctggcgagccgctgggccaacactggagcttccgatcgcgtcatggactaccaggtctggtgcggtcctgccattggttccttcaacgatttcatcaagggaacttaccttgatccggccgtcgcaaacgagtacccgtgcgtcgttcagattaacaagcagatccttcgtggagcgtgcttcttgcgccgtctcgaaattctgcgcaacgcacgcctttccgatggcgctgccgctcttgtggccagcatcgatgacacatacgtcccggccgagaagctgtaagtaagctctcatatatgttagttgcgtgagaccgacacgaagataatatcacatacgcttttg

SEQ ID NO: 14893 - DNA, 1460 bp, Schizochytrium aggregatum
  Clone ID: LIB3033-062-D9_FLI
ccgctgtacacgggcgccatggccaagggcattgcctcggcggacctcgtcatcgccgccggcaagcgcaagatcctcggctcctttggcgccggcggcctccccatgcaccacgtgcgcgccgccctcgagaagatccaggccgccctgcctcagggcccctacgccgtcaacctcatccactcgccttttgacagcaacctcgagaagggcaacgtcgatctcttcctcgagaagggcgtcactgtggtggaggcctcggcattcatgaccctcaccccgcaggtcgtgcgctaccgcgccgccggcctctcgcgcaacgccgacggttcggtcaacatccgcaaccgcatcatcggcaaggtctcgcgcaccgagctcgccgagatgttcatccgcccggccccggagcacctcctcgagaagctcatcgcctcgggcgagatcacccaggagcaggccgagctcgcgcgccgcgttcccgtcgccgacgatatcgctgtcgaggctgactcgggcggccacaccgacaaccgccccatccacgtcatcctcccgctcatcatcaacctccgcaaccgcctgcaccgcgagtgcggctaccccgcgcacctccgcgtccgcgttggcgccggcggtggcgtcggctgcccgcaggccgccgccgccgcgctcaccatgggcgccgccttcatcgtcaccggcactgtcaaccaggtcgccaagcagtccggcacctgcgacaacgtgcgcaagcagctctcgcaggccacctactcggatatctgcatggccccggccgccgacatgttcgaggagggcgtcaagctccaggtcctcaagaagggaaccatgttcccctcgcgcgccaacaagctctacgagctcttttgcaagtacgactccttcgactccatgcctcctgccgagctcgagcgcatcgagaagcgtatcttcaagcgcgcactccaggaggtctgggaggagaccaaggacttttacattaacggtctcaagaacccggagaagatccagcgcgccgagcacgaccccaagctcaagatgtcgctctgcttccgctggtaccttggtcttgccagccgctgggccaacatgggcgccccggaccgcgtcatggactaccaggtctggtgtggcccggccattggcgccttcaacgacttcatcaagggcacctacctcgaccccgctgtctccaacgagtacccctgtgtcgtccagatcaacctgcaaatcctccgtggtgcctgctacctgcgccgtctcaacgccctgcgcaacgacccgcgcattgacctcgagaccgaggatgctgcctttgtctacgagcccaccaacgcgctctaagaaagtgaaccttgtcctaacccgacagcgaatggcgggagggggcgggctaaaagatcgtattacatagtatttttcccctactctttgtg

SEQ ID NO: 14894 - DNA, 1010 bp, Brassica napus
  Clone ID: LIB3034-014-F6_FLI
ggcgaggttcgagcttgagttgcttcttaagaatattgagaagtatagagtcactcagctttgggttgttcctcctgtgttccttgctcttgctaagcagagtgttgtgaaaaagtatgatctttcttcgctcaagtacattggatcgggagctgctcctcttgggaaggatttgatggaggagtgcgggaaaaacattcctaatgttgtgctcatgcagggctatggaatgactgaaacgtgtgggatagtctctgtggaggacccgaggctcgggaaaaggaactctggttcagctggaatgcttgctccaggtattgaagctcagatagtgagtgtggaatctggaaagcctcaacctcctaaccaacaaggggagatatgggttcgaggccctaacatgatgaaaggttacttcaataaccctcaggctactaaagaaacaatagatagaaaaggttgggtacatacaggagatcttggttacttcaacgaagatggtaaccttttcgttgttgatagactcaaagagcttatcaaatacaaaggcttccaggttgctccagctgaactagaaggtctacttgtatctcatcctgagatactagatgctgtcgttatcccgttacctgatgaagaggcaggtgaagttccaatagcatttgttgtacggtcaccaaatagctcaataacagaggaagatattcaaaagttcatagccaaacaggttgctccttacaaaagattaaggagagtgagcttcattagcaccgtcccaaaatctgctgctggtaaaatcttgagaagggaacttgttcagcaagtaagatccaagatgtgaagcatcttttattaccaaggaggcggagatagagatcagaatcatctctttgtcgtcttgttcttttcacgtttttatgtactatttcaaattaaacagtagcacaactgcacaaagtgaacaaaaatagttgaagaacaaacgtcatatacatacacaatgttcttct

SEQ ID NO: 14895 - DNA, 1356 bp, Brassica napus
  Clone ID: LIB3034-015-G7_FLI
cacaagatcacacatctatcaaactcttgtaaaacatggtcatgagtaggccgtcatcatcgttggatgagatcagaaaggcacaaagagctgatggtcccgcaggtatcttggctataggcacggccaaccctgcgaaccatgtgatccaagcggagtatcctgactactacttccgcatcaccaacagtgaacacatgactgacctcaaggaaaagttcaagcgcatgtgtgacaagtcgatgataaggaaacgacacatgcacctaaccgaggagttcttgaaggagaatccgaacatgtgcgcctacatggctccttctctcgacgtcagacaagacatcgtggtggttgaagtccctaagctaggtaaagaagctgcagtgaaggccatcaaggagtggggccagcccaagtccaagatcacacacgttgtcttctgtacaacctcaggagtcgacatgcctggtgctgactaccagctcaccaagctccttggtcttcgtccctccgtaaagcgtctcatgatgtaccagcaaggctgcttcgccggcggcactgtcctccgtctcgccaaggacctcgctgagaacaaccgtggcgcacgtgtcctcgttgtctgctccgagatcacagccgtcacgttccgtggcccctctgacactcatcttgactccctcgttggacaggctctcttcagtgacggcgccgcggcgcttattgttgggtcggatcctgatgcatccgtaggggagaagccaatctttgagatggtgtctgcggcgcagaccattcttcccgactcggatggagccatagatggacacttgagggaagtgggactcaccttccatctcctcaaggacgtccctgggctcatctccaagaacatagagaagagtcttgaagaagcgtttaaaccgctagggataagtgactggaactccctcttttggatcgctcaccctggtggtccagcgatccttgacgaggttgagaagaagcttggactcaaggcagagaagatgagagccacgcgtcaggtcttgagcgagtacggaaacatgtctagcgcttgcgttctctttatattggacgagatgaggaggaagtctgcgaaagatggtgtggctacgacgggagaaggtctggagtggggtgtcttgtttggtttcggacctggtctcaccgtagagactgttgtcttgcacagcgttcctgtttgaacagatctctttctatctatatgccttaccaacctactacacatacttcccagcatcgtgtcttttaatgtatttcaatttgatatggaatatgtaatgccaataactaatgaagagttcatttagtgtg

SEQ ID NO: 14896 - DNA, 1727 bp, Brassica napus
  Clone ID: LIB3034-017-E7_FLI
cttgttcttctctctatcatcgaactgaatcaaaacactgagtagtgggttctctctggaaaaagattcgatttgtttgaaaagacagacggatgatgacacttaactcactctctccatcggctgaatccatatctctttgcttcttggatacctccaggttcacccaaacccccaaacttccaggtgggtgtagtttgaggaagaggaatcaagggagaagttttggaaaaggagtcgtcaagtgttccgtgaaagtgcagcagcagcaacctcctccggcatggcctgggagagctattcccgagccgcctcgtcaatcttgggatggacctaaacccatctccatcgttggatctactggttctattggcactcagacattggatattgtggctgagaatcctgacaaatttagagtcgtggctctagctgctggttcgaatgttgctctccttgctgatcaggtaaagagatttaaacctgcattggttgctgttagaaaagagtcattggtcgatgagcttaaagatgctttagccggtttggactataaacctgagatcattcctggggagcaaggagtcattgaggttgcccgtcaccctgacgctgtaactgttgttacaggtatagtaggttgcgcaggtctaaagcctacggttgctgcaattgaagcggggaaggacattgcccttgcaaacaaagagacactaatagcaggtggtcccttcgtgcttccacttgccaacaaacataatgttaagatccttccagctgattcagaacattcagctatatttcagtgtattcaaggtttgcctgaaggcgctttgcgcaagataatcttgactgcatctggtggagcttttagagattggccagttgaaaagctcaaggaagttaaagtagcagatgcgttgaagcatcctaactggagcatgggaaagaaaatcacagtcgactcagctacgcttttcaacaagggtcttgaggtcattgaagctcattatttgtttggagctgagtatgacgatatagagattgtcattcatcctcagagtatcatacactccatgattgaaactcaggattcatctgtgcttgctcaactgggatggcctgatatgcgtttgccgattctctacaccatgtcatggcccgatagggttccttgttctgaagtaacttggccaagacttgacctttgcaaactgggttcgttgacattcaagaaaccagataatgtgaaatatccatcaatggatcttgcttatgctgcgggacgagctggaggtactatgactggagttctcagtgcagctaacgagaaagctgttgaaatgttcattgatgaaaagataagttatttggatatcttcaaggtggtggaattaacatgtgataagcatcgaagtgagttggtaacatcgccgtctcttgaagagattgttcactatgacttgtgggcgcgtgaatacgctgcgaatgtacagctttcttctggtgcgaggccagttcctgcatgatgattaaatacttgttggagccaagtgaataataagaaatgatggaaagaagattagtgcagcgactgtgttactttaaacaccgtttttggcaaggattactgattctaagttgtacctaatttgtctgtgatccgaacaaagtcaaaccggtattttaaacccataaaccaataaaactgataatttttccccttg

SEQ ID NO: 14897 - DNA, 1113 bp, Brassica napus
  Clone ID: LIB3034-030-C2_FLI
gcaaaaatcatcaatgtcgacggaacgagaagtagtctgtgtcaccggcgcaagtggctgcatcgggtcgtggctcgtccatctgctcctcctccgcggctactccgttcacgccaccgtgaaaaacctccaggatgagaaagagacgaaacatctggaagctctcgaaggagcagccacgcgcctccatctattcgagatggatctactgaagtacgacactgtttccgccgccgtcaacggatgttccggcgttttccacctcgcatctccctgtatcgtcgacgaagtccaagatcctcagaagcaactacttgatccagcggttaaggggacattaaatgtactcacggcggcgaaagaagccggcgtgaagagggttgtggtgacgtcttccatatcggcgataaccccaagccccaactggcctgctgataagatcaagaacgaggactgttgggctgatgaagacttctgcaagcaaaatggattgtggtatccactttctaagacgcttgctgagaaggcagcttgggagtttgcagaggagaagggattagatgtggttgtggtgaatccaggaaccgtcatgggtcctgttattcctccatccatcaacgctagcatgctcatgcttcaacgcctccttgaggggtgtacagagacatacgagaacttcttcatgggttcggtgcatttcaaggatgtggcattagctcatatacttgtctatgagaacccatctgctaaaggaagacacctgtgcgttgaggccatctctcactacggtgattttgtagccaaagtagctgaactctatcctaattacagtgtccccaagttaccgagagagactcaaccgggtttactccgagccaagaacgcagcaaagaagctgatggaattggggttagagttcagttccatggaggttatcatcaaggatggtgtggagagtcttaaaagcaaaggatttatctcttaaactcatttgcttgatctagcagtgagcaaattatggtggcagcagaatcatgttatgttatatatataagactttgtaatttgaataagctgcacattgttgtaatatacaagatccaactattattt

SEQ ID NO: 14898 - DNA, 672 bp, Brassica napus
  Clone ID: LIB3034-030-D9_FLI
ctcactcgtgggacaagctctcttcagtgacggtgcagccgcactcattgtcggttcagaccctgatgtttctgctggagagaagcccatcttcgagatggtgtctgccgcgcagaccatcctcccagactcggacggtgccatcgatggacacttgagggaagttggactcaccttccatctcctcaaggacgtccctggactcatctccaagaacattgaaaagagcctagacgaagcgtttaaaccgttggggataagtgattggaactccctcttctggatagctcaccctggtggtccagcgatccttgacgacgttgagaagaagctaggactcaaggcagagaagatgagagccacgcgtcacgtgttgagcgagtatggtaacatgtctagcgcctgcgtcctctttatattggatgagatgaggaggaagtctgtggaagatggcgtagccacgacaggtgaagggttggagtggggtgtcctgtttgggttcggaccaggtctcaccgtggagacagttgtcctacacagcgttcctgtctaattaaacagaaagctctcttcctataaatgcttacctaccttcttcacatacttaccatcatatcatgtctttatgttttttttttttcaatgtaagaaaatatttgtaatgcaataatt

SEQ ID NO: 14899 - DNA, 1029 bp, Brassica napus
  Clone ID: LIB3034-056-G3_FLI
tggactcttcttcttgcttcttctctccgattccacgattcctaactcttcgaatcgcgactacaactgcccttagatcagcagcaaccttcacgctccgcaggtctccttctcataggagtctaacgccttcactcgccgtcatgtttccggacaattcggtactatcggatgtctgcgcctccgggatcaccagcgtcgtggcggtctcttgcctcggtttctggggtgagattggcaagcgcggcttctttgatcagaaacttatccggaagcttgtgcacatcaatattggtcttgtttttatgctttgttggccactattcagttctggacgccaaggagcgcttctggcttctcttgtacctggactcaatatagtaaggatgcttctcctgggccttggagtctaccaagacgaaggtactatcaagtctatgagcagacacggtgatcgcagggaactacttaagggaccgctttattatgcactctcaatcacatccgcctgtttcttctactggaaaacatcccctatcgccattgctgtgatatgcaacctctgcgcaggagatggtatggctgacattgttgggaggcgtcttggaacagagaagcttccttacaacagaaacaaatcattagctggtagcattgggatggcaatcgcagggttcttagcatctgttgggtatatgtactacttttcttcatttggctacatggagagtaccgggtgggatatgattcttcgcttcttagtcatctccatagcatcggctcttatagaatcactccccataagcaccgacatagatgacaatctcaccatccccttaacctctgccttggtcggtactctactcttctaatacagagtcctcgagcttgattacctctatgtagtaaaaaaaaactacatccttagttgccataatcttgtgtatgtacttgttagtgaaaagacatcatattgttgttgcagttgggtacaatgttgtaatgtagtgaagagatatagtgactact

SEQ ID NO: 14900 - DNA, 1247 bp, Glycine max
  Clone ID: LIB3039-003-D1_FLI
ggaaattgcaatgaagaagaggagcagcagcagcagcagcagttcagtttttgaggcgaatggagtggaggaacctcaacaaccttcatcctgtgcagcagcagcacttgatgagttgcataaagagaaaaatgagaatggagaagaaaccctcgtgccttccaatccctatcccaatcttgacgatggcttctatgaaatcgaaaccatacgccgtaagaggctacgcaagggtcagctccagtacctaatcaaatggcgtggatggcctgagactgccaacacttgggaacctcttgaaaatctacagtccgttcctgatctcgttgatgcttttgaggacagcctcaagtctggaaaacatcagaagcgcaagcgcaagcatgtggatgtgcttcaactcaccctactcaagaagcgctccgaacgttctaccacttcttacagccttagacatttcccacctctaactcccactaatgcaaatgattatgatccaaagctcagtgaacttaaggcaccaacacacactggggttcagctagataaccttgcaatacatttccaacaaccaattccaagcagaggagcaaaaaggagaaaatctgcttcttctgtcaagaggttcaagagagacaccgatgcagctgcacttcaaccaatttctgctcctatcaacatgcctgatgctaatactgcctgcaatattgtcaagattatcaagccaataggctattcagcttctttatctgacaacatgcacgatgttttagtcacctttatggctatgaggtctgatggaacagaagtgatggtggacaacagatatctcaaggcatacaatcctcttctgctgatcaatttctatgagatgcatccccggtatactcctacaccgtgactgaacagggtaatgaaggggcttcctgtgtttgctgttggtgataacaatgtagttttgtagacgcagcggatcgtgaagggtaatacttttttggttagtgtatgacgatataaccattagaccaattgtttcaaatgcctgcctgcatgacttcatactaagacaaccaagaattagagccatgaacatgactaggaaattgtatttcaaatctttgcaaacctctttaatctaattattctacatcccgttctatcctctcattattatcgactaacatgtacaagagagagacacaaatattattatggcgagatttttcattatttgtgttggatttacc

SEQ ID NO: 14901 - DNA, 771 bp, Glycine max
  Clone ID: LIB3039-003-F7_FLI
gagacagggaactggagacagatatggattggcatcacggcacaaagccacttgttcctcggccagagaccttaagcttcttctacaactataactacaacagtccatatccaggagtggaagtgaaacaagcagcattgatggagacaggagaagggtcagttccagcattaatggacagcagaaacaaagagaagaagaagcgattaacaaataaccagatagagttattggagaggagttttcaggaggagataaagttggaccctgaaaggaagatgaagctttccagggagctaggccttcagcctcgccaaatcgctgtttggtccaaaatagacgaacaaggtggaagaccaagcagcttgagcacttgtacgatgtgcttaaacaccaatatgatgtcgtctccaacgaaaagcaaaagcttcaagaagaggttatgaagttgaaggcaatgctaagtaaagagcaaggttttgggaagcaaacatttggctgttatacagaaatatcaggggaagaaacagtagaaagcacgtcagagggtctaactctaagaggaaagagtaacattgagcacgttgcagatcaaggctactgttctttcactgtggaggattataacaccactgttttactgcctcctcactgtcactggcctgctgtgccttattagttattaattaatattatccctgattaatcttccacaactttgaacttgaactctgtgagtactcagcttaattaatattatagtgttctagc

SEQ ID NO: 14902 - DNA, 865 bp, Glycine max
  Clone ID: LIB3039-005-C6_FLI
agaaggggatagtattatcattcattctcatctttctctcttctctctccacccaaaccctaactcccgaccctgttcccctctcgtatccgtcatgaaaggaggaaagtccaagaccgaatctaagagagccgatcccaaacttgctgtgaataagaagggagccgccaccaaggctaggaaacccgccggcaaggggaaggcagcgaaagaccctaacaagccaaagaggcctccaagtgctttcttcgttttcatggaggagttcaggaaggtattcaacaaagaacatcctgaaaacaaagcagtgtctgctgtgggcaaagctgctggagcaaaatggaagaccatgtctgatgctgaaaaagcaccttatgtggcaaagtctgagaaaaggaaagtggagtacgagaagaacatgagagcctataacaagaaacaggcggaaggtcctactggtggggatgaagaagaatctgagaagtctgtatctgaggtgaatgatgaagatgatgatgaggaaggcagtggcgaggaagaggatgacgattagagaatggactgataattgcatttatgtaggttctgatgattttgatcatctgttgtaggtggtctggtcatttcctgataaacatatttcttgcttccaaaaaatatttccctgctccctccgtaaattggttgtctttccaaaacgtgaatagtttaaagaagggagttctttatttgtacttctaaatccaactgtttagttaaggggtgtttatctcttgtagagcttttagtttgatttagagttttcttgttgaaatctggttaagtttgtatcaatataattggcttatcattcgctttctgctac

SEQ ID NO: 14903 - DNA, 637 bp, Glycine max
  Clone ID: LIB3039-007-G9_FLI
ccagcgtccgtctgcgagagccgacagaggggaggaacaagaagcgaaaattaacaaataatttgtactttcatcaaaacaaaatcccgttgtatttttctcagatggctcgaacgaagcaaactgcccgcaagtccaccggcggcaaggcgccgcggaagcagctggcgactaaggcggctcgcaagtcggctccggcgaccggcggcgtgaagaagccgcacagattcaggccgggaaccgtggcgctgcgcgagatccggaagtatcagaagagcacggagctactcatccggaagcttccgttccagcgcttggtccgcgagatcgcgcaggacttcaagaccgacctccggttccaaagctccgccgtctccgcgctccaggaggccgccgaggcttacttggtcggtctcttcgaaaacacgaacctctgcgccattcatgccaagcgtgttactatcatgcccaaggacattcagttcgccaggcgcattaggggcgaacgcgcttaaacctaatccctgtccttttgtatagataatttcaagcgttcttagttagattgaattgcggttttttttgagaattctgtaatgttaacgctttaccaatgaaattatcgcttttgttcttc

SEQ ID NO: 14904 - DNA, 474 bp, Glycine max
  Clone ID: LIB3039-011-A9_FLI
aacttcgaattcaaactcatactctggccgaagtttctggatgtttatattaccatatctgttgaataattaagatggcatgctgttgcttcatggacttgggatgcccaggatgaaacctgtgggatttgtaggatggcctttgatggatgttgtcctgactgcaaacttcctggagatgactgcccactgatttggggtgtatgcaatcacgcatttcatctgcactgtatcctgaaatgggtgaattctcagacatcacaagcgcattgccccatgtgccgtagggagtggcagtttaaaggatgagagctcaggttttcattttctttttcgagtgtgaccagagagcaatgtaaattggtatggttaattcgaagatgtattgtttccttcatgttaaatctgtatcttcattgtaacttgtaaggagatcgaaatcaaagtttctgttaagtgcaagtttttttttcc

SEQ ID NO: 14905 - DNA, 815 bp, Glycine max
  Clone ID: LIB3039-012-H6_FLI
tccacaaagccacttgacatctttaggttccaatctttggaatgaagatctagagtgtcttgaatggctagaatctaaggaatctcgatccgttgtttatgtgaattttggcagcatcactgttatgtctgcagaacaactcttggagtttgcttggggtttggccaatagcaagaaaccctttttgtggatcattaggcctgaccttgtcattggtggatccgtgattttgtcgtctgagtttgtcagtgaaacaagagacagaagcctaatagcaagttggtgtccacaggaacaagtgctaaaccatccttcaattggtgtattcttgactcattgtggatggaactcaactactgaaagtgtttgtgctggagtgccaatgttgtgttggccattttttgcagaacagccaacaaactgtagatacatttgcaatgagtgggaaattgggatggaaattgataccagtgcgaagagagaggaggtggagaagctagtgaatgaattgatggtgggagagaagggaaagaagatgagagaaaaggtcatggagttaaagaggaaggcagaggaggtcaccaagcctggtggttgttcatacatgaacttggacaaagtaattaaggaggtgttgcttaattagacactgttagattgaagggttttctttttttctttttcttaatgctttaatttatcatgatagttcattgatcttctctagaattttctgcattgtagaaatggtgccctggaagtgccactttgtgttttgtttattgtggtatgtaatatcttagtcttgatattcc

SEQ ID NO: 14906 - DNA, 1568 bp, Glycine max
  Clone ID: LIB3039-013-F6_FLI
gagagcaatcctctagcttatgctcacaatggcttcgtcatcttgttctgctgccaccatccacttcatcctgctttcaatatccctcttctcagtttcctctttaccattaccagatgaatcaacttccaaaccaaaaaaaatcttcttcctgcccattaagatagacgcagcaaccaacatgttctacaccacaattggcattggaactccccaacacagcacaaatctagtgattgatcttggcggagaaaacctctggcatgactgcagcaacagacgctacaattcatcatccaaacgtaagatcgtttgtaagtcaaagaaatgccccgagggtgctgcatgcgtttccactggctgcattggcccttataaaccaggctgcgcaatcagcgactgtactatcacagtaagcaacccattggctcaattcagttccagctatacaatggtcgaggataccatattcttgtctcatacatacatccctggctttcttgctggctgcgttgacttggatgatggcctctctggcaatgctttacaaggtttacccagaacctctaaagggatcataggcttttcacactcagaacttgcattgccatcacaactagttttgtcaaataagcttattcccaagttttctctctgcttcccttcttcaaataacttgaaaggatttggtaacatcttcattggagctggtggtggccaccctcaggttgagtccaagtttctccaaaccaccccacttgttgtcaaccccgttgccaccggtgcagtgtctatatacggtgctccttctatcgaatacttcatcgatgtgaaagcaattaagatcgatggtcatgttcttaacttaaactcttctctgttgtccattgacaagaagggaaatgggggtaccaaaattagtaccatgactccgtggactgaattacatagttcactctacaaaccctttgttcaagagttcatcaacaaggctgaaggaagaagaatgaagagagtggcaccagtgccaccgtttgatgcatgcttcgatacaagcaccattaggaattctatcaccggcctagctgtgccaagtattgatctagtgctacccgggggagcacagtggactatatatggagccaattcgatgacggttatgacaagtaaaaatgtggcgtgtcttgcatttgttgatggagggatgaaaccaaaagaaatgcattcgattcaacttgaagcctctgttgttattggggggcatcagttggaggacaatcttttggtcatagatatggcttcctcaaaattaagctttagctcctcgcttttgctccgcaacgcaacatgttcccatgtttgagtcttttattagaccctgagattaccactgttcaatagtgctccttctatctatctttcgcccctgtacatctcgtgtacaataaatcaagcctcctgtagtactgtgacttcaaatttcaatacttataatttgtactgtacaccaattcatgtttattctgccattgtattttccaggactagtaaaataaacatattgaacg

SEQ ID NO: 14907 - DNA, 1080 bp, Glycine max
  Clone ID: LIB3039-015-B9_FLI
aattccagggaagaacaagagatcgtaaggaagagaagaagacgacagaaggggaaggtgcaagagtttgttgtgagctataagctagtttatcgtgaggagaatatgaagttgtttgttttctttgttgctgcagcagttttggtagcatggccatgccatggcgcaggctaccaaaggttccctctccgaatgaaaactggctatggtgagcgttcttcggaggtaaaatgcgcaagttttaggcttgctgtggaagcacacaacatccgagcctttaaaaccattcctgaagagtgcgttgaaccaacaaaggactacattaatggcgaacaatttagatcagactctaaaacagttaaccaacaagctttcttttatgctagtgaacgcgaagtccatcacaacgacatatttatattcggcatagataacaccgtactctctaatatcccatactatgaaaaacatggatatggggtggaggaatttaatgaaaccttatatgatgaatgggttaacaagggcgacgcaccggcattgccagagactcttaaaaattacaacaagctgttgtctcttggcttcaagattgtattcttgtcaggaagatatcttgacaaaatggccgtaacagaagcaaacctaaagaaggctggcttccacacatgggagcagttaattctcaaggatccacatcttatcactccaaatgcactttcatacaaatcagcaatgagagagaatctgttgaggcagggatacagaattgttggaatcattggagaccaatggagcgatctgcttggagaccacagaggcgaaagcaggacctttaagcttcctaatcccatgtactacattgagtagtaccttcacctctctcaacaatctagctagagtttgctcctatctatatgtaataaggtatgctgatatgcactattcaaataggagcattagctatgtttgttaatgtcactttatgttatgtgggtaagtcacctaagacactccacgtacctacttgttgtctcttacgcggctttaataaatcttctgcccttgttccatatttag

SEQ ID NO: 14908 - DNA, 858 bp, Glycine max
  Clone ID: LIB3039-016-A3_FLI
gatagtattatcattcattctcatctttctctcttctctctccacccaaaccctaactcccgaccctgttcccctctcgtatccgtcatgaaaggaggaaagtccaagaccgaatctaagagagccgatcccaaacttgctgtgaataagaagggagccgccaccaaggctaggaaacccgccggcaaggggaaggcagcgaaagaccctaacaagccaaagaggcctccaagtgctttcttcgttttcatggaggagttcaggaaggtattcaacaaagaacatcctgaaaacaaagcagtgtctgctgtgggcaaagctgctggagcaaaatggaagaccatgtctgatgctgaaaaagcaccttatgtggcaaagtctgagaaaaggaaagtggagtacgagaagaacatgagagcctataacaagaaacaggcggaaggtcctactggtggggatgaagaagaatctgggaagtctgtatctgaggtgaatgatgaagatgatgatgaggaaggcagtggcgaggaagaggatgacgattagagaatggactggcaattgcatttatgtaggttctgatgattttgatcatctgttgtaggtggtctggtcatttcctgataaacatatttcttgcttccaaaaaatatttccctgctccctccgtaaattggttgtctttccaaaacgtgaatagtttaaagaagggagttctttatttgtacttctaaatccaactgtttagttaaggggtgtttatctcttgtagagcttttagtttgatttagagttttcttgttgaaatctggttaagtttgtatcaatataatcggcttatcattcgctttctgctac

SEQ ID NO: 14909 - DNA, 852 bp, Glycine max
  Clone ID: LIB3039-017-D3_FLI
agacaaaaaacttgtgtgcctttctcccaagttaattgtgtggaggagttacaaatctttctaaaccacagtgcaatacaccaaaacaatggcagataaagatgctttttgctacccttatcatgttcatgattgcacatcaccacaagagaatttgcccaataaagggccttttcattcagaaatgcttcccaaaaattctaggaaaggagctggttacacatcagagaagccacttgatgcaaagacactgagacgtttagctcaaaacagagaagctgcaaggaaaagccgtctcaggaaaaaggcttatgtgcagcaactagagtcaagtagattaaagctcacacaccttgaacaagaccttcaaagagctcgctctcaggatgagtttatgggatgtggtggtgctggtggcagtataagttctggtgagtttaattagccttttctcttgttggttttttaaactcaatttcatttttctgatacctcagattggaacaaagatagaagggggtgaatatgtcataattttctggcacatcgtatatatgattatggagcatggaaaaacttgttacaatgagtacctgaaagatttagttggcgtgatcttttgactcttttttacactttggaacatgagacaaagaattaagagactcgttagggagcagcaattgctgttattgacacgtaacttcttcctagctatgtcctttgaatcttttttagtgccaaaaataaataaaaagtcaaatttaaccaaaatctagaatcaggtggagaagtcttggaatttgaccaaaatctgtggcctaattcacgtttgaatccacattattaaat

SEQ ID NO: 14910 - DNA, 494 bp, Glycine max
  Clone ID: LIB3039-019-G10_FLI
cgagaagacgacagaagggggcacaagtgagtttgttgatcgagataactagaaacttcttggacttaactcggaaaaagtaaacgtacatggtggagctgttgcactgggtcatcctcttggttgcagtggtgctcgcattctggtgacacttttgggggtactgaagcagaagaatgggaagtacggagttggtggcatttgcaatggaggaggtggtgcatctgcccttgttgttgagcttcagtaagacctatttcatgttcagtagatgtccttttaagagccagcgtttgatgcaaagctcaaaagatcttgcctccctctttagcaagcgaacatgcaagtttcaaatttattacaaggacaagaccgaaagagagcgaaatttagctacatagttgttaggtttaagtcgcatcttgtgaaagtgaaattttcttggcatcaaagtagaacatgaaacaatattatccaaattttagttttctccg

SEQ ID NO: 14911 - DNA, 831 bp, Glycine max
  Clone ID: LIB3039-021-E4_FLI
ctcaagcacaacatctctatcgagtaaattaactatgaagcctaccctactattatccctttccttcctgcctctctttgctttcctggctctttcagaagatgttgaacaagttgtggacataagtggcaaccccattttcccaggtggcacatattacattatgccatcaacttggggcgctgccggtggtggattgaaactaggccggacaggaaactcaaactgcccagttactgttttgcaagattactcagaaatcttccgtggcacaccagtcaaattcagcatacctgggataagccctggaatcatctttacaggtactccacttgaaatcgagttcgcagagaaaccttattgtgctgaatcctccaaatgggtggcgtttgtggacaatgaaatccaaaaggcatgtgtgggtattggtggtcctgaaggtcatcctggtcaacaaacatttagtggcacatttagcattcagaaatataaatttggatacaaacttgtgttctgtatcactggctcaggcacttgtttagatattggaaggtttgatgccaaaaatggtgagggaggaagacgtttgaatctcactgagcatgaggccttcgacattgttttcatagaagcttctaaggttgatggaattatcaagtccgtagtttgaatcaaatcaaataatgtcaagggtagctagatagtgttgagttaatgcttaatcatatgtttgtcgttgtgatatgcattaagtactctgctcccggttgctaacaaaaccccaatgcaaaaataagtgataaaataatggttttgctttattgtattctt

SEQ ID NO: 14912 - DNA, 1177 bp, Glycine max
  Clone ID: LIB3039-021-F8_FLI
aaacggggtatgaggtgagagctagaaactgaggacttagctagtagttagagatgcctgagttttgcgtgacaggtggtactgggttcatcgcatcttacctggtcaaggccttactagagaagggtcacacagtgaggaccaccgtgagaaacccaggggatgtggagaaggttggttttctgactgaactaagtggagccaaagagagactgaagattttgaaagcagatctattagtggaaggaagctttgatgaggcagtgagaggagttgatggtgtctttcatatggcgtcccctgtgcttattccttatgatgagaacgttcagcaaaatttgattgatccctgtataaaaggaactttgaatgtgcttaactcttgtgtaaaagcaactgtgaaacattttgtgctcacctcttcttgctcttccataagataccgtgatgatgtgcaagaagtgtgtcctcttaatgaatctcattggactgatctagagtattgcaaacgctataagctgtggtatgcatatgcaaagacaatagcagaaagagaggcttggaggattgcaaaagaaaatggcatggatctagtggtggttaatccctcttttgttgttggtcctctgcttgcaccacaaccaactagcacactgctcttgatactaagcattgtcaaaggcatgaagggagaatatccaaatacaacagtggggtttgtacacataaacgatgtggtagctgctcacttgctggctatggaggaccccaaggcatctggaaggcttatttgttcaagcacagtagctcactggtcgcaaatcattgagatgcttcgtgccaaatacccttcctatccgtacgaaaacgagtgagtcaaaccatgccaatcaattacactgtgtagcagccaggaaggagataataacccgcacagcatggacactaccaaaattactcagttggggtttcctccattcaaaactcttgaacaaatgtttgatgactgcatcaaaagttttcaagacaagggcttcctatgacatctgttgttacctttcgtgttggtgtgaggtgtcagtgtcatatgacccaaactaactagctcataaaaccaaataaaagaatttaactttatcttttatctatgtatttattccttctttcttgtttcccc

SEQ ID NO: 14913 - DNA, 635 bp, Glycine max
  Clone ID: LIB3039-021-G1_FLI
tggcaattggaacacttgcattatgctacaataacattgaggtcttcagaggtgtagttaaaatgaggcgaggtttaactgccaaagtgattgaccgaactacgactatggctgatgtctatggtgctttctttgattttgcttctatgttggagtccaaggttgacaaaaatgatcccaatgcaactaaagcattgagcaggctggaagctatacagaaaacttgcagagaatctggtctcttgagtaaaaggaaatcttacattgtgaaggatgaaagtggatatggctcaaccatgattatcgtactggtcatcatggtttccatcattttttcttatctgtctgctagccaccaaaataactagtcaactagccatgccttcttgcctttccgaacattgatatcatgcctcgttcatggaatgcaaatttgcacgcaagcaatattatgatggctgcagttgactatcgtgtattttaatggaaaaatagtcgaatgtagtgtcaagagctccttgtgttagtttggatttaactctacccctacgttcgtcctgaaaattatcattattctgcgtgttattagttgtttgtattcacggataaagttggaataccagatgagttatact

SEQ ID NO: 14914 - DNA, 680 bp, Glycine max
  Clone ID: LIB3039-023-D9_FLI
gatagcaaaatcgtttctccaatttaatcaccattgtacaacccaattcccttcgtcgttttcgattaagagagcaatggcacgtaccaagcaaaccgctcgcaagtccaccggaggaaaggctccgaggaagcaattggcaaccaaagccgctcgcaagtcagccccggcgaccggcggagtgaagaagccccaccgcttcaggccaggaacggtggctctgagggagattcgaaagtaccagaagagcaccgaacttctgatccgaaaactcccattccagaggctcgtcagagaaatcgctcaggatttcaaaaccgatctccgctttcagagcagcgccgtttcggctcttcaggaagccgcggaggcttatctcgttggactctttgaggacactaacctctgcgctattcacgctaagcgagttaccattatgcccaaggacattcaactcgctcgcagaatcagaggcgagagagcttaagtttagggtttcgtgtcatttgacattaaaattaggttactgcttattgtaattcgtgttttcttcaaatgcctctttattgtaagattcatcttatttcatcaggtatattcccatatggatctgcacaactgagtttatgttgaaaaacgagataattctctaattttatatatcctgcggtgatgatagc

SEQ ID NO: 14915 - DNA, 776 bp, Glycine max
  Clone ID: LIB3039-025-F10_FLI
gacagcatatatatcaataatctattttatactatacctacattttgataattttctttgtagttgatagccatggctacccgtggaaagcttgaggttgacattgatctcaagtccaacgcagacaagtactggcaaacccttaggaattctactgaaatattccctaaagccttcccacatgattacaaaagcattgaggttcttgagggtgatggcaagtctcctggctctatccgccacataagttatggtgaaggttcaccacttgtgaaatcatcctttgagaagattgaggctgttgatgaggaaaagaaggtagtgtcgtacactatcattgatggggaactcctccagcactacaaaacattcaagggagacatttcagtgactccaattggcgatggatgcgaggtgaagtggagtgctgtgtacgaaaaggttagccatgatatttctgatccaacccttgtcaaagattttgcagtcaagaatttcctagaggtcgatgcctatgttcaagccaacgcatagagaggttctattctatgcatgcctcttaattaataatggctaatgttttaatctgtgcatgtattgtggactattattaaataatatggttgtacttgtaccataccttatctaatataatgttgcagtatcatgtgtctttcgtccttgcttgttgttggactaattaaagagtcatggtgttctatatatgtggtagttctgatcgagaaaccatttatttagtttgagcattagtatgt

SEQ ID NO: 14916 - DNA, 424 bp, Glycine max
  Clone ID: LIB3039-026-C4_FLI
ggggttattggacacattcttcagcgactgcgtttttggatcggaacctcttctgcggcgtagcaatgggacactccaacgtttggaactctcacccaaaaaactacggtcctggttctcgcacttgccgtgtgtgtgggaatccacatggactgatcaggaagtatggccttatgtgctgcaggcagtgcttccgtagcaatgccaaggaaattggcttcatcaagtatcgctaaaagagcagttgtcaactacggaccaatattgtgttctggcactaggatgttttgaggatgttatgtttgaagaaacttgagactttcttttttcatctaattaattatcagacgtaatttgtggtactaagaatacttttatataaattgttttgaaccatattgacttcccgtctgatcctttaacg

SEQ ID NO: 14917 - DNA, 1208 bp, Glycine max
  Clone ID: LIB3039-026-D7_FLI
tgggaggttgatagttaatctatctgcaacagcaacattgtgacagtgacagtgtcgtaggatggagaaggtggtatgtgtgaccggcggcagcggctgcattggttcatggctcgtccatctcctcttggatcgcggctacaccgttcacgccaccgtccaaaacctcaacgatgaagccgagacgaagcatcttcaatccctcgacggagcgtccacgcgcctccgcctcttccagatggatctcctccgccacgacaccgtcctcgccgccgtgcgtggctgcgccggcgtcttccacctcgcctctccctgcattgtcgaccaagtccacgacccccagaaggagcttctggacccggcgattaagggaaccatgaacgtgctcacggcggcgaaggaagcaggggtgcggcgcgtggtgctcacgtcctccatctccgcggttacgccgagccccaattggcccggcgatgttgccaagacggaggagtgctggaccgacgttgaatattgcaagcaaaaggggttgtggtatccattgtcgaagactttagctgagaaagctgcttgggattttgctaaagagaatgatttggatgttgtggtggtgaatcctggcactgtgatgggtcctgttattccaccaaggcttaatgcgagcatggtcatgctcgtgcgccttctacaaggctgtgccgaaacatatgaggacttttttatgggatcggtccactttaaggatgtagcattggcacatattttggtgtatgagaacaaatcagcggctggtaggcatttgtgtgttgaagctatctctcactatggtgactttgtggcaaaagttgctgaactctatccagagtataatgtgcctaagatgcaacgagatacccagccgggattattgagaacaaaggatggagcaaagaaactgatggatttgggtttgcaattcattccaatggagaagattattaaggatgctgtagaggatttgaagagcaaagggttcctttcataaataatgctgctgctgctgctatttagaaccagagtgtaatatttgcaatatgagtacttatgacacgagcctgtaatgtatagtctgtttcctctatgcctatgatgctatgcaaattggcgctgactcgatatgtattttcaatctgatgcttttttattaataaaaaataaaagctagaatt

SEQ ID NO: 14918 - DNA, 872 bp, Glycine max
  Clone ID: LIB3039-026-H1_FLI
gatccataccatacctttcactttcctaaagaaaattggaacctgcctctgttgttaaagtttgtatttttttttgagtgggtggattgagagaactgtgcaagctttggaacttcttcaaagtctggtacttcaatggctactgaagaggttaataaacttcaatcacttcctccttaccctgagatgatagtgaaagcacttgaagccctgaatgaggctgatggatcgagtaaatcagcgatatcaaagtacatagaaaccacctacggtgagttgccagatgaaactgttttggggagtcacctgaacaagatgaaagagagtggagagcttgcgttcaaacagaacaattacatgaaagctgatccaaatgccccaccaaagaggggacgtggaaggccaccaaagccaaaggttccattgccaccaggcactgttgtgtcccctccaaggccaaggggtcgtcccccaaaagaccctaatgcccctcctaagtcccctaaggctaaggccacccctgccactggcaggccaagaggaaggcctaagaaggttgctcgctcaccggccgtgccgtctcccaccgccgtctccactggaaggcctagaggcaggcctcccaaagtgaagcctcagttgacagaagtcagtgttgagtcatagaatggtttctttctttcttcctaattgatgtcaaatgtagtgatctactcttgtcgaagtgatggtgggtgtggtcttagatattgggtcaatttaatttctttgtaaaattaagtagtggtagcttgcttattatgaggctttgtcttggttattcttgctaattactaccaaagagaacagtgacttgagctaatggtgattcg

SEQ ID NO: 14919 - DNA, 649 bp, Glycine max
  Clone ID: LIB3039-029-B7_FLI
gattggtaccgcgaaacgcacatttcactattcattctcgtttccctttcgactgtgattgtttgttaactgaacttttcgagcaaaatgtctggacgtggaaaggggggcaagggtttgggaaagggaggagcgaaacgacaccgtaaggtgttgcgcgataacattcagggaatcaccaagcctgcgattcggcgtttggctcgcaggggtggtgtgaagcgtatcagtggtctcatctacgaggagacacgtggcgtgctcaagatctttctggagaacgtgattcgtgacgccgttacctacactgagcacgctaggagaaagaccgttacggcaatggatatggtttatgctctcaagagacaaggaagaaccctctacggatttggaggctagtttgttttttttttttttttttaatttttattgttaggtttcgtttgttttggaggtttatgtgggatgtaagagacccttgctattagggagatagggaaaaaaattgcaaggatttggtgtagtaagttgctggtggtgttttaggtataagggtttctataacatgtaatgtattgagctatattgctgccaagcttgtaattgtatcacaatatgttgctaatgtcagattcttgtttttctgttt

SEQ ID NO: 14920 - DNA, 1552 bp, Glycine max
  Clone ID: LIB3039-030-F11_FLI
ggaactctcgcaagcttgttttcttgccttctttttctcttattctctactacaacattttttttgtgtgaaatttctctacaactaaatttccatataggctgcaagaccctcatcaacctacaattagtttgttacatatatagctaggttgaacaatatgggaaggtcaccatgctgtgagaagacagggctaaagaaagggccatggacaccggaggaagaccaaaagctcattgctttcatcgaaaagcatggccatggaagctggcgtgcattgcctgcaaaagctaggcttagaagatgtggaaagagttgcagacttagatggtcgaattatctccgacctgatataaaacgaggaaagttcagcttgcaggaagagcaaaccattattcaacttcatgcccttctaggaaacaggtggtcagccatagcatctcacttgcccaagagaacagacaatgagatcaagaactactggaacacccacctcaagaagaggctggacaaaatgggcatagacctaacaacccacaagccaaaaaatgagtccctagcctactccaaagacggctcgaaccttggccacatggctcagtgggagagtgctcggctcgaagccgaagccagactcgtaagagaatccaaactacaagaacaacaaaacaacctcggacctatgtcctctccttcctcaacacaaattacgaggctcgttctcaacaaaatcacacccctacaacaaaaacaacactcactaccaccgtgcctcgacgtgctcaaagcgtggcaaagttcatggtcaaacaacaacaacaacattaacaaatactcatcactaaacgacaagaagaaaaccatgcatgtgcgtagcatgtatgccatgatgctttcaaatgatgacctagagtctccaacatccactttgtgcttccccgagagcgtgcaaatgaataataataacaataactctaacgctatggtctcaaccgaccaccttgggttaatcaatgagaactatttactccctccaaccaccctggatgagttcattattaccaaaagtttaggaacaacaagtagtgagggtgcaattgaaaccgtgaatggtggtggtagtgactcgtggaggtacttcaccaaacacaacaatgaagaagaacaagttgaaactgatgagaagacaataatgtacgacacgatttcatgtttgcaagacgatgacggtgatattatggtggctgttgaggcattaagaggtgctggttattatgatgatgataataatagcaacaataataatgtcacatttacgcatctctctagcaatgtcaataatatggtgggtttcgaaaacgattttgattccaatgaagatttagcggcggtgaacttgcatgtgaacttcgaggagaataaggattattggaatggcatgcttaattagttagttataagtgaacaattttcctagctagctaccatgttatcatatgtagtacgtttgtttgtttcagagaaataatacattccttttgtcattcttcgc

SEQ ID NO: 14921 - DNA, 1319 bp, Glycine max
  Clone ID: LIB3039-032-D4_FLI
gaccacaccaccctactacattcccacctttagtcttgttcttagagatggcttgtgaaaccaagtcatggttggttatgtttcttgttttcttggttgctaattgcatgcaacattgtgtccacggggtgtctcaagtgccttgcctttttatctttggggactctatgtctgatagtggaaacaacaatgaacttccaaccacttcaaaatctaatttcagaccatatgggatcgactttccattaggaccaactgggagatataccaatggccgaacagaaattgacataatcactcaatttctgggatttgagaaatttatcccaccctttgcaaacactagtggttcagacatacttaaaggtgttaactatgcatcaggtggatctggtatacgcaacgaaactggctggcattatggtgctgctatcggcttgggattacagttagcaaatcacagagtcatagtatctgaaattgctaccaaacttggaagtcctgacttagctcgacaataccttgaaaaatgcttgtattatgtgaacataggcagcaatgattacatgggcaattacttccttcccccgttctacccaacaagcaccatttataccattgaggagtttacacaagttctgattgaagagttatctctgaatttacaggctttacatgacattggagcaagaaagtatgccttggctgggttgggccttataggatgcaccccaggtatggtgagtgctcatgggacaaatggatcatgtgctgaagagcaaaatctcgctgcattcaatttcaataacaagcttaaagctcgagtggatcaattcaacaatgatttctattatgctaattccaaattcatctttataaacactcaagcattggccattgagcttcgcgataaatatggttttccggttccggaaactccttgctgcctaccgggattaacaggggagtgtgttcctgatcaagagccgtgctataataggaatgactatgtgttttttgatgctttccatcccaccgagcaatggaacctactcaatgcattgacatcttataattctaccactaattcagccttcacttatccaatggatatcaagcaccttgttgatcatgaaattaagatggaattggagctcacaaatgagtccacttcacaacttagtgccactgaataagttctggttatcatgtagtcgttcatatggagttgaaataattgtgagttgaatatgtattaagtaatggcctgccactgaattgaacgacaaagtggaatgaatcaagtgaataaattggct

SEQ ID NO: 14922 - DNA, 743 bp, Glycine max
  Clone ID: LIB3039-033-E11_FLI
gatctaacagagaggagagtgaagttttgtggtgtggtttagtgtcaaatggcggcgagtagaagcacttttcctctgatgaaatacttgagagtgcgcgtcgacgctcttccccgcaacactcccttaaccctcgctcccaactttttgattcgccgcttctgtgaagaggttaggggttgttttctcgacaagtctgaggtcacagatcgcgtcatttcctgcgtcaaaaacttccagaaagttgatccttcaaaggttaaccctaatgctcacttccagaatgaccttggattggatagtttagattcggtagagattgtgatggctcttgaggaggagtttgggttcgagattcctgataatgaggcagacaagatcaactccattaaacttgcagtggacttcattgcatctcatcctcaggcaaagtagtggaattcttttgtttctcaacatctagtttagatgatccatcagacatttttgcttccatagtggaactttgttttctcatccctcagaagggtgttagctggggatgtgccagcttcatttggcggtattggcatccagaacttcacattctgtgttcctcctatattcgtgtcaataagaattgtgttaaatttccgattatgaaattgtgaggtcttgagttgtcctcagcaacagatgcattatgctattctcttttgctctgttttctgttattacatcatccgtaataattttgcttttgc

SEQ ID NO: 14923 - DNA, 904 bp, Glycine max
  Clone ID: LIB3039-033-G5_FLI
ggtgtgtgtgaaaagaagaaactttgtaagctcaatttgtttccaaggttgctctgggaatccgaggttctaaactctgcaactaactttaatggcaactgggcaagtcattaataaacctccttcacttcctccgtaccctgagatgattcgggaggcaattgaagcactgaatgaagagaatggttcgaataaatcatcaatttcgaagtacatcgaatccacctatggtggattgcctcaggcccacaaggttttgctcaatgtgcacctcgcgaaaatgagggaaagtggagtgctagtgttttggaagaacaactacaccaagcgtgacccaaatgcgccgccacggcggggccgtggcaggccacccaagcccaaggagcctctgccaccgggcactgtcttatcaccgcccaggcccaggggccgtccttcgaaggacccaaatgacctgcagaagcctcttaaggcttcggtggtgggtagtggtaggcctcgaggccggcccagaaaaatggcctggcccactggaggccttggtgaagtatcgcaggcctctaaggcgaagcctgtcactagtaatgggaggcctagaggtaggcctcccaaagtgaaggccgtattcactgaaattagtgtttgactataaaggcttatagggcttgcatggaatagggaagtgttgtttctacaaaaagttggactgagtaacggttttgtgtgtttactagattcttctcttatgtgttacacttagctgaaatgctgaattgttgtgtacaatcgtgtagtgtagtgtagtgtagttagttgctgaggctttgttcgtttgtaaattgtaactgtgaaaataggacaatgggtggagctaatggacgcaatctctcaaattcttgatgcc

SEQ ID NO: 14924 - DNA, 804 bp, Glycine max
  Clone ID: LIB3039-034-H5_FLI
ggaacctttgcattctattcattcaagattcagcaagtgcgttttggaagcagagaccgaaatacttcgagatggcccgtacaaagcaaactgctcgtaagtcaactggaggaaaagctcccaggaagcagcttgcaaccaaggctgcacgtaagtctgcaccaacaactggtggtgtgaagaagcctcatcgttatcgccctggaactgttgctcttcgtgagattaggaaataccagaagagcactgagctcctaatcaggaagcttcctttccagaggttggttcgtgaaattgcccaggatttcaagactgatctgcgtttccagagccatgctgtgcttgcattgcaagaggctgctgaggcataccttgttgggctctttgaggacactaacttgtgtgccattcacgccaagcgtgtgactattatgcccaaggatattcagctggcaagaaggattcgtggtgagcgtgcttgagttggtgcgttctgtgtttgtgaagatggattgttggtggctgcggatggtgttttgttactaagttttctttttgttgaagcctataggttattagggaaaaataggtgtttacttggtagtcatattaattgtcattggcaaatactgcctaagacactgtgaaggtctggttgttagaaatttggcatgtatttgatttttttggatcctttatttctcgttttatttctggttgtgcagccactttgggaattgtattggacaactttctgttgccatctaatctagttgaagctagcttatcgtgtctgtttgttcc

SEQ ID NO: 14925 - DNA, 622 bp, Glycine max
  Clone ID: LIB3039-046-H12_FLI
gatcgcatttcatagcactcaccctcattaccaacacgaaagcatagccaaaaccttttttcgaagtctctgattttcctaatggctccggcaaaggcagagaagaagccggcggagaagaagccagcggcggagaaggcaccggcggagaagaagccgaaggcggagaagaagatctcgaaggaaggagggagcgagaagaagaagaagcgcacgaagaagagcgtggagacctacaagatctacatcttcaaggtcctcaagcaggttcaccccgacattggtatttccagcaaggccatgggcatcatgaacagcttcatcaacgacatcttcgagaagctcgcccaggaagcgtcgcgtttggctcgctacaacaagaagcccaccatcacctcgagggagatccagaccgccgtgcgtctcgtgctccctggtgaattggccaaacacgccgtttctgaagggaccaaggcggttaccaagtttaccagctcttgaattagggtttgttaggcggttgtgttgcagatctagggttttctgtggatttcttttcttaaaaattagtttgtagatgtaatgatctgaacagttgttaatggaaggtttcgtttgagcc

SEQ ID NO: 14926 - DNA, 737 bp, Glycine max
  Clone ID: LIB3039-047-H1_FLI
cacagaaggggattcacaactttacccactcttcattctagcaattcgaattcccaatccaaaaccctaataccttcaaagaacctagtagtgaatcagtgatggcacctaaggcagagaagaagccagcggagaagaagccggtggaggagaagaagtcgacggtgggagacaaggctccggcggagaagaagccgagggccggaaagaagcttccgaagggtgtaggagccggcggagaaggggggaagacaaaaagaggaacaagaagagcgtggagacatacaagatatacatattcaaggttctgaagcaggtccaccctgacattggtatctcaagcaaggccatgggaatcatgaacagcttcatcaacgacatcttcgagaagcttgctcaggaatcttccagacttgcccgctacaacaagaagcccaccatcacttcaagggagatccagaccgcggtcaggcttgtgctgcccggtgaactggccaagcacgccgtttctgagggtaccaaggccgtcaccaagttcaccagctcttgaacaaaatatcttaactttgcttacctcgctcttgttttgcttcatgtgtatctgttagatctagcgaccctatgtttaggtttgaactggtagctttttggtttttaatttgtaagtgaagaattaggattgggttgatcctctgtgtatggaattggtagaattgatcatataggagcaatttgat

SEQ ID NO: 14927 - DNA, 600 bp, Glycine max
  Clone ID: LIB3039-048-G9_FLI
gagggagcaagggtttcaaactcgaggcagtggttgcgtgggtgcgtgcgtctgagtgggatagaaaagaaaagaatggcggaaagggcgaaaccgatcgacttcgaactcaccttaaagcctttctatcagagagcctcagaagcagaggagcgcttatcaagactagaagcagccttgaatagtaaaaaaggtactggaaacgaggaaaacttgaaagtgattaatgatcttcagtcaaagttagaagttgcaaacgtagagttaatttctgaaaaagagaaggctcaaatgcttgttgcagaaaatgcaaaacttcaataccgaattattcatcttctgagagcactcaaggaagctgatctgaagttagaaaaagctacagtgcatgagcagctacagagcatgaaattgcagggttcttgagtttatgagctgctattgacagttgctttttcttgtgtattttgttttatggttgatattcatcatacagtatgttctgggagatgctaaatatttttagctttattggttttacatctttagaactcggatctttgtttagctcatacatgatcatagacacgaatttcttcc

SEQ ID NO: 14928 - DNA, 945 bp, Glycine max
  Clone ID: LIB3039-049-D10_FLI
cggggaagccaaatacacatacacattagcttcaatctgagagagaaacaaaaacaatgaaggtttccattgccaagtttcactcccttcccctatgttttctccttctcttggccatcaacacacagccactgctagcagctgaaccagagccagtggtagataagcaagggaaccctttggtgccaggagtagggtactatgtgtggccactttgggctgataatggaggcctcacactaggccaaacaaggaacaaaacatgccctcttgatgttatccgtgacccttcattcatagggtccccagtgaggttccatgcatcaggccttaatcacattccaacactcactgatctcaccattgatttccctgtggtgacagtgtgcaaccagccaacagtgtggaggctgagcaaggaaggatcagggttctggtttgtgagcactaggggtaaccctcaggacctcattaccaagttcaagattgagaggcttgaaggggatcatgcctatgagatctacagcttcaagttctgctctagtgtgcctggtgtgctatgtgctcctgtggggacttttgtggatgctgatggaaccaaagtcatggctgtgggtgataacattgacccttactatgtgaggttccagaaagtctccacctttggtcaagacaagaaacaaccttttagcatagtgtagtttggtttggttttgtgcctagtgtagcaggtagaggggtcatgactcggaataattaataagccagaagagtaccatgcatgctctcttttttggtgtggctgtgagaaagaatcatgagaacttttgttttcttggttcacatgcatggcacagaacagagagtcattgtatctgttttaggatttgccaatctgttttcttttaaaaatgagatgaaatgaattttggttcttttgcttcc

SEQ ID NO: 14929 - DNA, 843 bp, Glycine max
  Clone ID: LIB3039-053-E10_FLI
ggactgagggaaggagcaagcctcgtggaagtggtcaagcaagtgaagcctgacgttctcctaggattatcggctgttggaggattattctcaaaagaggtactagaggccctcaagggttcaacatcaaccagaccagccatatttgctatgtcaaatccaacaaagaatgctgaatgcaccgctgaagaagcattctccattttgggtgacaacattatttttgcaagtggaagtccattcagtaatgtggatcttggaaatggtcatattggccattgcaaccagggaaacaacatgtacctctttccaggcattggtctcggaactcttctttcaggcgctaggatcgtctctgatggcatgctgcaggctgcagctgagcgtctggctacatacatgagtgaagaggaggtactcaaaggaattattttcccttcaacatccagaattcgagatattacaaagcaggtagccacagctgttataaaagaagcagtggaggaggacctagctgaaggatatcatggaatggatgctcgggagctgcagaaactaagcgaggatgaaatcgcggaatatgtgcagaataacatgtggagtccagagtaccctacattagtttacaagaaagaatgagtaacctgcagggttgataactacaatttccctctcgatgcatgtttggttcgatcaggttgttcacagaatcctgtttactggattagatgatttaaattctgaaacattatctcatagcatatttctaaaagtctagcaaacttgtattttatgtacatgatgcttcttttaaataaaaatgaaaagccaagattggtttgt

SEQ ID NO: 14930 - DNA, 590 bp, Glycine max
  Clone ID: LIB3040-009-E8_FLI
gacagcaaaacaattttcaaactcaattaccattccataacctaatctcctctttgtttccgagtcagagagcaatggcacgtaccaagcaaaccgctcgcaagtccaccggcggaaaggcgccgaggaagcaattggcgactaaagccgctcgcaagtcagctccggccaccggcggagtgaagaagccccaccgcttcaggcccggaacggtggctctgagggagatcagaaagtaccagaagagcactgaacttctgatccgaaaactcccattccagaggctcgtcagagaaatcgctcaggatttcaaaacagatcttcgtttccagagcagcgctgtttctgcgcttcaggaagccgcagaggcttatctcgttggactcttcgaggacacaaacctctgcgctattcacgccaagagagtcaccattatgcccaaggatattcaacttgctcgcagaatcagaggcgagagagcttaaaattaggtttcattgtgtgatctagaattaaaattaggttactgcttattgtaattcgtatttttcaatcgcctttttgttgtaatattcatcttatttcgaagt

SEQ ID NO: 14931 - DNA, 1381 bp, Glycine max
  Clone ID: LIB3040-011-H8_FLI
ggttcccaattcatcgttgtctccgccttcttttatctctctctccactcccatatcgaaacaaagtcgttttgagttccgccgaaggcaccgtaggttgcagcagctatggatttggcatccaatctcggtggcaagattgacaaagccgaagttctctctgccgttcagaagtatgagaagtatcatgtttgctatggaggtcaagaggaagagagaaaagctaattataccgatatggttaataaatactatgatcttgttaccagcttttatgagtttggctggggggaatctttccattttgcacccagatggaaaggagaatctcttcgagagagcatcaaaagacatgaacacttccttgcttcacaacttggactgaagccagggcagaaggttttggatgttggatgtggaattgggggaccattaagagaaatttctcgattcagcttaacttcaattaccgggttgaataacaatgagtaccagataacaagaggaaaggaactcaatcgcattgctggagtggacaagacttgcaattttgtcaaggctgacttcatgaaaatgccattaccagacaacagttttgatgcagtgtatgcgattgaagccacttgccatgcaccagatgcttatggatgctataaagagatttttagagtgttaaagcctggtcaatgttttgctgcttatgaatggtgcatgaccgattcttttgatccccaaaacccagagcaccaaaaaatcaaggcagaaattgagattggtgatgggctacctgacattcgattgactgctaagtgtcttgaagctctgaagcaagcaggttttgaggtaatatgggagaaagatctagcagtggactctcctcttccttggtatttgcctttagacaaaagtcatttctcactgagtagcttccgtctaactgctgtcgggcgacttttcaccaaaaacatggtcaaggttctggagtatgttggactggctccaaagggtagtctaagggttcaagatttcctagagaaggctgcagagggactagttgaaggaggaaagagagagattttcacaccaatgtacttcttcttggcccggaagcctgattcagacaggaactaagctggttgtacaaataggttgctgttttcatcagttactgtgattctggtagggtgaatcgcaagctaggattgtttttggccttgttgccctagtgattcttgctgtttctttgtattgtttaggttaccaacacttcatttggctgcttgtttcgatgaagcagtgctcctccatattttgtttaccctaaatattatatgctcttttactttgtttaaaagtaattgcagtttttgtcttagtttac

SEQ ID NO: 14932 - DNA, 864 bp, Glycine max
  Clone ID: LIB3040-017-G12_FLI
gatgtcatagtattatcattcattctcatctttctctcttctctctccacccaaaccctaactcccgaccctgttcccctctcgtatccgtcatgaaaggaggaaagtccaagaccgaatctaagagagccgatcccaaacttgctgtgaataagaagggagccgccaccaaggctaggaaacccgccggcaaggggaaggcagcgaaagaccctaacaagccaaagaggcctccaagtgctttcttcgttttcatggaggagttcaggaaggtattcaacaaagaacatcctgaaaacaaagcagtgtctgctgtgggcaaagctgctggagcaaaatggaagaccatgtctgatgctgaaaaagcaccttatgtggcaaagtctgagaaaaggaaagtggagtacgagaagaacatgagagcctataacaagaaacaggcggaaggtcctactggtggggatgaagaagaatctgagaagtctgtatctgaggtgaatgatgaagatgatgatgaggaaggcagtggcgaggaagaggatgacgattagagaatggactgataattgcatttatgtaggttctgatgattttgatcatctgttgtaggtggtctggtcatttcctgataaacatatttcttgcttccaaaaaatatttccctgctccctccgtaaattggttgtctttccaaaacgtgaatagtttaaagaagggagttctttatttgtacttctaaatccaactgtttagttaaggggtgtttatctcttgtagagcttttagtttgatttagagttttcttgttgaaatctggttaagtttgtatcaatataattggcttatcattcgcttttctgctgc

SEQ ID NO: 14933 - DNA, 705 bp, Glycine max
  Clone ID: LIB3040-018-F12_FLI
gagtgaccacggagagagagagagaggttttgacgcaacacactttcactgagaaaggatctctatctaccaaggagcagaataaaacccttctctctggtaagtgaataagagaatggcttcagatcggaaacttcacactttcgaggaggtggcaaagcacgaccagaccaaggattgctggctcatcatttctggcaaggtgtatgatgtcacccctttcatggaggatcatcccggaggtgatgaggttttgttatctgcaacagggaaagatgcaaccaatgattttgaagatgttggacacagtgattctgctagagatatgatggaaaaatactacattggtgagattgattcatcaactgtaccactaaaacgtacctacattccacctcagcaagctcagtacaatcctgacaagactccagaatttgtgatcaagattttgcagttcctggtccctctcctgatcttgggcttggcctttgttgtgcgacactacaccaagaaagagtagagcttctttatcacattggaccctggtgaagggtctgttagacattttatacagtgtcatttgaaggacagtgtttagtttatttctggggtctttagaattgaatctggatttgactggagaacctaatgttggacgataagtttcgtttcttttttattaaggacagtgtcattttaagggtc

SEQ ID NO: 14934 - DNA, 1370 bp, Glycine max
  Clone ID: LIB3040-020-C3_FLI
gttcccaattcatcgttgtctccgccttcttttatctctctctccactcccatatcgaaacaaagtcgttttgagttccgccgaaggcaccgtaggttgcagcagctatggatttggcatccaatctcggtggcaagattgacaaagccgaagttctctctgccgttcagaagtatgagaagtatcatgtttgctatggaggtcaagaggaagagagaaaagctaattataccgatatggttaataaatactatgatcttgttaccagcttttatgagtttggctggggggaatctttccattttgcacccagatggaaaggagaatctcttcgagagagcatcaaaagacatgaacacttccttgcttcacaacttggactgaagccagggcagaaggttttggatgttggatgtggaattgggggaccattaagagaaatttctcgattcagcttaacttcaattaccgggttgaataacaatgagtaccagataacaagaggaaaggaactcaatcgcattgctggagtggacaagacttgcaattttgtcaaggctgacttcatgaaaatgccattaccagacaacagttttgatgcagtgtatgcgattgaagccacttgccatgcaccagatgcttatggatgctataaagagatttttagagtgttaaagcctggtcaatgttttgctgcttatgaatggtgcatgaccgattcttttgatccccaaaacccagagcaccaaaaaatcaaggcagaaattgagattggtgatgggctacctgacattcgattgactgctaagtgtcttgaagctctgaagcaagcaggttttgaggtaatatgggagaaagatctagcagtggactctcctcttccttggtatttgcctttagacaaaagtcatttctcactgagtagcttccgtctaactgctgtcgggcgacttttcaccaaaaacatggtcaaggttctggagtatgttggactggctccaaagggtagtctaagggttcaagatttcctagagaaggctgcagagggactagttgaaggaggaaagagagagattttcacaccaatgtacttcttcttggcccggaagcctgattcagacaggaactaagctggttgtacaaataggttgctgttttcatcagttactgtgattctggtagggtgaatcgcaagctaggattgtttttggccttgttgccctagtgattcttgctgtttctttgtattgtttaggttaccaacacttcatttggctgcttgtttcgatgaagcagtgctcctccatattttgtttaccctaaatattatatgctcttttactttgtttaaaagtaattgcagtttttgc

SEQ ID NO: 14935 - DNA, 761 bp, Glycine max
  Clone ID: LIB3040-030-E5_FLI
gacactgctacaaaaacattgaaagaaatagaaaaagcaaaactggtttctcgcatttcctccgaaacaaaccgtttcgctcgtttctcggatctgcaatggaagccccacccaaaggcgctgctggaagaagaggtgacaggaagaagtccgtttccaaatccatcaaagctggcctccaattccccgtcagccgcgtcgccaggtacttgaagaaaggccgttactctcgccgccttggcaccggcgctcccatttatctcgccgccgttctcgaatatctcgccgcagaagtgttggagctggccgggaacgctgcacgtgacaacaagaagaataggattaaccctaggcacgtgttgctggcggtgaggaatgatgatgagctggggaaactgcttcaaggtgtgactattgctagcggtggagtgttgccgaacattaacccggttttgttgcctaagaagagtaccactgcgccttctgagaagtcctctactcctaagtcccccaaatctcctaagaagaaatagaagtttcattttgtaaaggcttatcgttttttatttttattttttgggggtaggggttggtaacattaccatatatatatatatagttcttaggttaggtgaaatatgatggtgtaatttagcgccaggtgttcgcttttttgcttttttggtcaccccatcgatggctgaatatgatgttaaatgtagtgggttgccaattcgtgtatggaagaagcctttttcatg

SEQ ID NO: 14936 - DNA, 569 bp, Glycine max
  Clone ID: LIB3040-032-B3_FLI
gaaccatcttcgtttttcagcatttctactctccaaacactcgaattcgcattctcttcactctttccccaatccatggccaagggagagaagaaaccggcggagaagaagcccgcggagaaggctccggcggagaaaacaaaagccgagaagaagatcccaaaggaacccgcctcgggcgagaagaaggagaagaagagaaacaagaagagcgtggagacgtacaagatctacatattcaaggtgctgaagcaagtgcaccctgacatcgggatctccagcaaagccatggggatcatgaacagcttcatcaacgacatcttcgagaagctcgctcaggaatcttccaggctcgcgcgctacaacaagaagcctaccatcacctctcgcgagatccagaccgccgttcgtcttgttctccccggcgagctcgccaagcacgctgtctccgaaggcaccaaggctgtcacaaagttcactagctcatgagtgggtttctgagaatttagggtttattagatgtatattttcaatcttcgcggtgtaacggaacggcatattttgggaac

SEQ ID NO: 14937 - DNA, 650 bp, Glycine max
  Clone ID: LIB3040-032-F8_FLI
gattcacaacttcaatccctcttttgctttaccaaattccattttccaattcaaaaccctaactccgttcgaagcaccaaatcgtgatggcaccaaaggcagagaagaagccagcagagaagaagcctgtggaggagaagaaatcgacggtgggagacaaggctccggcggagaagaagccaaaggccggaaagaagcttccgaaggagggaggcgccggcggagaaggtaagaagaagaagagaaacaagaagagcgtggagacatacaagatctacatcttcaaggttctgaagcaggttcaccctgacattggtatctcaagcaaggccatgggaatcatgaacagcttcatcaacgacatcttcgagaagcttgcccaggaatcttctagacttgcccgctacaacaagaaacccaccatcacttcaagggaaattcagaccgcggtcaggcttgtgctgcccggtgaattggccaagcacgccgtttctgagggtaccaaggctgtcaccaagttcactagctcttgaattagctatcttatcgcttttctaagactcttttctgtcccaatttgagattttaatcagtagtagacttttttttgtttgataggatttgtaattgaaagaatggtcttgggttat

SEQ ID NO: 14938 - DNA, 585 bp, Glycine max
  Clone ID: LIB3040-033-F4_FLI
gacatctttcactcgttctctgaaattttaattgacttttctcccctcataaaaaaaacctaccaatggctcccgcaaaggcagagaagaagcccgcggagaagaagccggcagagaagaagatatcgaaggaaggaggaagcgagaagaagaagaagagaacaaagaagagcgttgagacctacaagatctacatcttcaaggtgttgaagcaagtgcaccccgacatcgggatctccagcaaggctatggggatcatgaacagtttcataaacgacatcttcgagaagctcgcccaggagtcatcgcgtctcgctaggtacaacaagaagcccaccattacttccagggagatccaaacggcggtgcgtttggtcctccctggggagttggccaagcatgccgtttctgaaggcaccaaggccgtcaccaaattcaccagctcttgattggtttcgtgtgtttatgtcagggttttctgttagcccgatttaattaggggtttcttttcctttttatttctttgagtatgtagatgtaaaattaaagccttttatttttaaataatataattgccgttttgcc

SEQ ID NO: 14939 - DNA, 1037 bp, Glycine max
  Clone ID: LIB3040-040-A9_FLI
ggatcaaccctgccgacagtataatccatgtggttgccaaacggcttgtggaaagcagtgtccttgtcttcaaaatggaacctgctgtgagaagtactgtggacgccccaagagctgcaagaatcgatttcgtggctgtcattgtgctaagagtcaatgcagaagccgtcaatgtccatgttttgctgcagatagggaatgtgatccagatgtttgtaggaattgttgggtcagttgtggcgatggtacacttgggattcctagccaaagaggggacaattatgaatgtagaaacatgaagcttcttctcaaacaacagcaaagggttcttcttggaaggtctgatgtatccggctggggagccttcttaaagaatagtgttggtaagcatgaataccttggagagtatactggagagttgatttctcatcgggaagcagataagcgaggaaagatatatgaccgtgaaaattcatcttttctctttaatttgaatgatcagtttgttcttgatgcttaccgaaagggtgataaattgaagtttgcgaaccattctcctgacccaaattgttatgcaaaggttattatggttgctggagatcatagggtaggcatttttgccaaggaacggatttgtgccggggaggagctgttctatgattatcgttatgagccagatagggctcctgcgtgggctcggaagccagaggcatctggatcaaaaaaagaggatggggctccttcaagtggtcgtgcaaagaagcttgcttaatgggtgtttgttcttcaaaaatcaattcttttaagttattctttaacacgtaggggaagcaatctcattggtagcggaaagaagtattgttttaagttttttgttcgtagcaaggccgtgcaattgttgctgcataggtaactaactacatttaaacaattcattttaatattaatcgactgtatattcaccattccaaacggaaaatacaagcttaatcaaaattccatgcaattctttcccggagggaaatgggcaaatgcac

SEQ ID NO: 14940 - DNA, 649 bp, Glycine max
  Clone ID: LIB3040-040-F9_FLI
gctcgctgatgttttcacaaaatcggtttccactgatttcgcattcttcactcttccatgtctaaaatctccgaaatggacgttgctttcaaagacgcaaacgccaaatcccctctctgggaacaagtctcaagattcaaacttttgcatcaagaagatatagagtttcaaagatttggtatgcgtaacaatgttgatcagctttgtgtttttgagtgtggaatcccaggaagtgcttgatgctgaactctcagcttgagtttcacagttgataaatgtaactgacagttgaatacagtcaggaaaggagatgttcccttgcaacagatctcagcttgtttacttacgaataaaggatggtactgtgcctgtctgatttttttcagaagtacctcctgaagaaacttaatattgccagtggagcagaggtggaaataatgtgtcgaggtcagccagtgctcccatctgtacaactgcataatttagtagatttatgaattaaagtgtagttttttcctttgtttttttaatgcagtttttttcttactttttaatgcaggttttgtctttattttgtggtgttcatgattactttatttgtttcttatggttgattattggctatttaagaaatctagaggttgatacg

SEQ ID NO: 14941 - DNA, 709 bp, Glycine max
  Clone ID: LIB3040-041-E10_FLI
ggatcctttgtattctattcttcaagattcagatggctcgtacgaagcaaaccgctcgtaagtccacaggaggaaaggctcctaggaagcagcttgcaaccaaggctgcacgtaagtctgcaccaactactggtggtgtgaagaagccccaccgttatcgtcctggtaccgttgctcttcgtgagattaggaaataccagaagagtaccgagcttttgatccggaagctccccttccagaggctggttcgtgaaattgctcaggacttcaagactgatctgcgttttccagagccacgccgtgcttgcattacaagaagctgctgaggcataccttgttgggctctttgaggacactaacctgtgtgccattcacgccaagcgtgtaaccattatgcccaaggatattcagctggcaagaaggattcgtggtgagcgtgcttgagttggtggttggaaagatgaagatgattggtggctgcggttggtgtttttgtttttcagattcctttttttattcaatagatggggttgttagggagggtaggttttctgctggtagtagcattaattgggatataggcaaatactgctaagtgtccgtgactgtgttttcttcctttaagaaaattggcttgtaattgatttttggacatatgtatgtgttagaatgcttctgttttagtttttacctgcgggatgttgcagct

SEQ ID NO: 14942 - DNA, 739 bp, Glycine max
  Clone ID: LIB3040-042-D6_FLI
ggagctattggtacgcacgctaatgttgggagttatacgagctcgaacgtggttgcgatattcagagccccttcttcaaccatggaaggtagggttctcctctttgtccgccattgacggccgtaaacaccaccttctgaatctgcaggagatcgagacagttctgaccgacgttaaagctgacgacgttaaggtgataccagttcccaagcactgcgattgggctgatttcatggtactcgccactggcaggtccacctggcacgtcaagaacatcgctcaagccctaatttacaaggctaagcagaaacagagaggagttgaacgaatgatgctaccgagtgtggaaggtcaagcaggaggaaagtggatcgtcattgactctggtaaagtgatagttcatgcactcgatgaaaaggctagagcttactacaatttagagggtctttggacccctgggggaattcaaaatgaacatgatgaggatttacaaaaggctttggtgaaggttcgtcggaaaaacaattcaaagaaacctgcacaaaagaatgcttaattggagtttctatgcaataggggctaaagatacctgcacaaaagaatgcttaattggtgtttctatgcaagagggctgcaaataaccttttaaaactgtggtttctgactctgcattagatgtaattttacttgttctgaatacaaatttttacaggttgtcttgctgcaatgccaaagttac

SEQ ID NO: 14943 - DNA, 529 bp, Glycine max
  Clone ID: LIB3040-043-E12_FLI
gaaaaacaaactccgaaagaaacagtcagaatcagaatcagaagaagcgagcaaagatgtcgggtcgtggaaagggaggcaagggtttgggtaagggaggagccaagaggcacaggaaggtgctccgcgataacatccagggaatcacaaaacccgccattcgccgtttggctcgcagaggcggcgtcaagagaatcagtggcctcatctatgaagaaacccgcggcgtccttaagatcttcctcgagaacgttattcgcgacgctgttacctacaccgagcatgctaggaggaagactgttaccgctatggatgttgtttatgctctcaagaggcagggcaggactctctatggtttcggtggttaaattttagggttttgatgggcttagcagctggttatttttgtaaatggtcgtttgtttgggagtatttgattttgtgcttttttgttttttagcctttcttgttaggtgtattgttatttttgcttcaattgaaatggaacaaagagtgttttgtttcaaat

SEQ ID NO: 14944 - DNA, 1304 bp, Glycine max
  Clone ID: LIB3040-044-H3_FLI
gcctccctttttaattgaaaccaaaccaaaccaaaccaaaccaaacctctctttctcagtttctctctcttagggttttctcctcccccattgacccaccgtccatcgcaaaggaagtcgcgcccaatttccatggtttgtagattaaatcttaaagcagtaagtcatcatggataaatcagagcagactcagcagcaacatcagcatgggatgggcgttgccacaggtgctagccaaatggcctattcttctcactacccgactgctcccatggtggcttctggcacgcctgctgtagctgttccttccccaactcaggctccagctgccttctctagttctgctcaccagcttgcataccagcaagcacagcatttccaccaccaacagcagcaacaccaacaacagcagcttcaaatgttctggtcaaaccaaatgcaagaaattgagcaaacaattgactttaaaaaccacagtcttcctcttgctcggataaaaaagataatgaaagctgatgaagatgtccggatgatttctgcagaagctccagtcatatttgcaaaagcatgtgaaatgttcatattagagttgacgttgagatcttggatccacacagaagagaacaagaggagaactctacaaaagaatgatatagcagctgctatttcgagaaacgatgtttttgatttcttggttgatattatcccaagagatgagttgaaagaggaaggacttggaataaccaaggctactattccattggtgaattctccagctgatatgccatattactatgtccctccacagcatcctgttgtaggacctcctgggatgatcatgggcaagcccgttggtgctgagcaagcaacgctgtattctacacagcagcctcgacctcccatggcgttcatgccatggccccatacacaaccccagcaacagcagccaccccaacatcaacaaacagactcatgatgaccatgcaattcaattaggtcggaaagtagcatgccccttatgattattacaaatttacttaatgcctttaagtcagctgtagtttagtgttttgcattgaaaaatgccaaagattgtttgaggtttcttgcactcatttatgattgtatgagctcttatgctgagttacttttggttgtgtttatttgaggtactggtgtggtagttaaattagtttgtagctgtccataagtaaacagcgtagctgcttaattaggaggtctgaaatgatgaaatagtttgtattgttattgcagaaggtaggttttattcagtatttcatttt

SEQ ID NO: 14945 - DNA, 1082 bp, Glycine max
  Clone ID: LIB3040-047-C9_FLI
gaaaatcctctcgtctatagtctattgcactctgacagacactatcagatttcagaggcggaggcggaggctggagctgcctcaactcaagtcctcaactatctgaatctgaactcatccactcactcgttagcgctgctagaacgaaaactgagtaatggaaagtggagggaactcccttccatcagggtcagatggtgtgaagagaaaggtttcatatttctatgatccagaggttggaaactattattatgggcagggacacccaatgaaacctcataggattcgaatgacacatgctcttttagcccactatggattgcttcaacacatgcaggtcctgaagcctacggctgctaaagatagggacctttgcaagttccatgctgatgattatgtggcctttttgagaggcatcacccctgaaacgcagcaagatcaattgagacagctgaagaggtttaatgttggcgaagactgccctgtatttgatggtctttactccttctgccagacatatgcaggaggttctgttggtggtgctctaaaattgaaccacggagcatgcgatgtcgcaataaattgggctggtggtctacatcatgcaaagaagtgtgaggcttctgggttttgctatgttaatgacattgtgctggctattttggaacttctcaaaatacatgaggtttccctaattaattccccacactatcttattgatgcatggctgttctcattttaatttagattgaatttactctttacatgaccaacatctgcaaaattccataacatccgtttggaactgtgaggttccaaaattgaaagtgtattttagaagaaagagggataagtgagtatgtgctagagaacagtggtaatgtggacgggttataatagctagtggttagtggtaattagtaagggaagtatataaatataaatactgttacaatcttgagtagggattgtttttggcttcttggcttcacttggctgtttttgttgtgactgattgatgtactgcattgtggtttactattttgctttattatggtgttgaaatgttgaattattatatt

SEQ ID NO: 14946 - DNA, 864 bp, Glycine max
  Clone ID: LIB3040-049-C1_FLI
gattatcatagtagatattcattccccttatctttctctcttctctctccccgcccaaaccctaactccctaccctattccgctttctctcatccatcatgaaaggaggaaagtccaagaccgaatctaagagagccgatgccaaacttgctgtgaataagaagggcgccgccaccaagactaggaaacccgccggaaaggggaaggcagcgaaagatcctaacaagccaaagaggcctccaagtgctttcttcgttttcatggaggaattcaggaaggtgttcaacaaggaacatcccgacaacaaagcagtgtctgctgtgggcaaagctgctggagcaaaatggaagacgatgtctgatgctgaaaaagcaccttatgtggcaaagtctgagaaaaggaaagtggagtacgagaagaacatgagagcttataacaagaaacaggcggaaggtcctactggtggggatgaagaagaatctgagaagtctgtatctgaggtgaatgatgaggatgatgacgaggaaggcagtggcgaggaggaggatgacgattagagaatggactgatgataatagcatttatgtaggttctgatgattttgatcatccgtgtaggtggtctggtcatttccttataaacatatttctctttccaaaaaatatttccctgctcctccttccgtaaattgctcgtctttccaaaacgtgaatagtttaaagaagggagttctctttatttgtatttctaaatccaactgtttagttaagggatggttatctcttgtagagcttttagtttgatttagagttttcttgttgaaatctggttaagtttgtatcaatataattgacttatcatccc

SEQ ID NO: 14947 - DNA, 1279 bp, Glycine max
  Clone ID: LIB3040-049-D9_FLI
gatcattagcaaatagaagagcaaagagagtgagaaaagaaggaagaagaagaagaagagatggcaaatgaactacccgtcaaagcttttggttgggctgcttcagacacttctggcacccttgccccttttcatttctccagaagggaaaatggcgtcgatgacgtcactctcaagattctcttctgcggggtttgccactctgatctccacactctcaaaaacgactggggtttcaccacctaccctgtcgttcctgggcatgaaattgttggtgttgtgacagaagttggaaacaatgtgaaaaacttcaaagtgggtgataaagttggagttggtgtgatagtggagtcttgcaaggaatgtgaaaattgtcaacaggatctggagaattactgtccccgccctgtgtttacctataactctccttattatgatgggacacgaacccaaggtggttattctaacattgtggtcgtgcaccagcgttatgtgctccggtttcctgagaacttgccccttgatgctggtgctcctctgctgtgtgctgggataactgtgtatagcccaatgaaatattatgggatgacagagccaggcaaacatttgggagtggcagggcttggtgggttaggccatgttgcaatcaaacttgctaaggcttttgggctcaaagttactgtcattagtagttctccaaacaagcaagctgaggccattgaccgactcggggctgattttttccttgtttcatcagaccctgcaaaaatgaaggctgctttgggaaccatggactatatcatagacacaatttctgctgttcattccttgattccactgcttggtctgctgaagctgaatgggaagctagttactgtagggttgcctaacaaaccccttgagcttcctatctttcctttagttgcaggacgaaagcttataggggggagcaactttggagggctgaaagaaactcaggaaatgcttgatttctgcggaaagcacaacataactgcagatattgagctgattaagatggatcagatcaacacagccatggaaaggcttagcagagctgatgtgaaatatcgctttgtaattgatgtggcgagctctttctcaagtttttagaatccactgtgattctccaactctttgcatcatgtgtcagtatttttgaagtagttaagattggtggtattaactagtctataagatgttgaactttaaagatgagagcatccgctcttcaattaataatactttgggttttgaattc

SEQ ID NO: 14948 - DNA, 1034 bp, Glycine max
  Clone ID: LIB3040-049-E3_FLI
gaacacaatactcttcaaacactttaccttcttcttaagacaacaagctaaaagcgcttctaacttaagtgatggctaacgctgctgaagtttcagcgttgaaacgcatcaagttgcatcttttgggtgaactctctccactggccactccccaaaacaaatttgaccaaacaaaccctagcccctctgaatcttccaattccgaatcttcttctatttctcttaaccactacttcactgacctcctcgaacccgaaattgaatttcctctcttcgaattcgattccaaaccccaagtaatcgacctcgaaaccccgaaaaccctaatttcagctgagaagaagcctcaatttaatcggaaaccgtcgctgctaatcgctgttccgaagaagaccgagtggatccaattcggaaaccctgaggtggcggcgccggagaaccagcctgagaagaagcactacagaggtgtccgtcagcggccgtggggcaagttcgccgccgagatccgcgacccgaacaagcgcgggtctagggtttggctcggaaccttcgacaccgccatcgaagccgccaaggcctacgaccgagccgccttcaggctccgcggctccaaggccatcctcaacttccccctcgaagttaacaccgcggcggagaccgtctccgtcgccgccgtcgacgtcgagaggaagcgccgccgcgaggaggaggaggtggtggtggaggatgtaaaggcggtggtgaagaaggagaaaataacggagcatgatgtgagttgttttagggggatgccgttaacgccgtctatgtggaccgggttctgggacagtgacgtcaaggatattttcaacattccgccgttgtcgccgttatctccttttggattttcaccgctcgtggctgtgtgaaattccaatttaggactgcgttttttcgtgttttagtacttacagcgtcctcctgttcagggatgagcacattgtacatttgacgaatttgtttattcaacaatcttttattcacttttatttgcg

SEQ ID NO: 14949 - DNA, 1123 bp, Glycine max
  Clone ID: LIB3040-053-G6_FLI
gggtcacacgcagttgtattgtagaactgaacaagggtttctctttctctttctctgtctgcttcttcactttctctcgtttcaatcgaaaaaaatcatgggcagaaaattcttcgtcggtggcaactggaaatgcaatgggaccactgaggaggtgaagaagattgttactactttaaatgaagctaaagtccctggagaagatgttgtagaagttgttgtgagccctccttttgtgttccttccttttgtaaaaagtttgctgcgccctgatttccatgtctcggcccaaaattgttgggttcgcaaaggtggtgcttatactggagaggttagtgctgaaatgcttgttaatttgggaattccttgggttattattggtcactctgaacggaggcagcttttgaatgaatcaaatgagtttgtgggagataaagttgcctatgcacttcaacaaggtctgaaagttatagcatgcattggggaaactcttgaacagcgtgaagctggtacaacaacggctgttgttgctgagcaaacaaaagcaattgcagctaaaatatcaaattgggacaatgtcgttttggcctatgagccagtttgggccattggaacaggaaaggttgcaactcctgctcaggctcaagaggttcatgctgatttaaggaaatgggttcatgacaatgtgagtgctgaagttgctgcatctgtaagaattatctatggaggctctgtaaatggaggaaactgcaaagaattggcagcacagcccgatgttgatggatttttggttggtggtgcatccctcaaggcggaatttgtggacatcataaacgctgctactgtgaagaagaattgaaattcgtagttaggaactgataatgctgcctttcaagctgcttcggaaattgctgtttttgagttttggttctgtgctttgtggccaatgtattgaactctgtttagtacctgaataaacatgctttcctttgatctcatccataggcgatcaattggattttgattaaatttctgattgcaaaaatagtgtaactaccataacatttggtgggtaaataatgttgaacttgactgtacttttaatcgtcactttctttattac

SEQ ID NO: 14950 - DNA, 822 bp, Glycine max
  Clone ID: LIB3040-054-G11_FLI
ggagtgagtgagggcattgttgtttaggtacatgaaaaatggcatcatctcagtcgaagaagagagttgacgctgtcgattctcgcgctgcttccgttctccttcgcgccaaagatggaagtgcttttgctcgatgcgacgactgcaagaagaatgtgccggttgcactcatcgacatgcacagttgcagccttgaagctaaaattaaaatgaacctagatgctcaagttgtggaacaggctgctgaagctaagaagccagagaggaagaagcccaaatccaaagagcctatggcaaaaaaggctaaagttgagaaggtgaagaaagtcaaagatcctaacatgcctaagcgtcctcccacagccttctttgccttcttggatgattttagaaaatctttcaaggaagctaatcctgattctaaggatgttaaaagggttggtaaagaggctggtgagaagtggaggtctatgactgatgaaaagaagaagccttatttggataaagttgctgaacttaaggcagagtatgagaaggctatggaaagctatgaagctggtcaagatgaagaagatcaagctgggtctgacaaggaagctgctgcaaaagaagttgaagaagagctaactgacgaggagtaatggtggcattttggcactccttaaacccgatgactactattttaagggccacatattgcttagacagactagggttgtaaattttggaacatgttctagttggagttaaatgccgttaaaatccgtgcgcaatatttttttttttttgtaatgtacatgaatggtagtcactttgttttcc

SEQ ID NO: 14951 - DNA, 616 bp, Glycine max
  Clone ID: LIB3040-055-G5_FLI
gaaaatagagaaaacacaaaaagttctgttctttttcccacccaattcagttttctcaaatggctcgtacgaagcaaacggctcgcaagtccaccggcggcaaggcgccacgtaagcagctggccaccaaggcggctcgtaagtctgctccggctaccggcggcgtgaagaagccgcacagattccgtccgggaaccgtagcgctccgcgagatccggaagtaccagaagagcacggaacttctgatccggaagctcccgttccagcgattggtccgtgagatcgcgcaggacttcaagaccgaccttcgatttcagagctccgccgtctccgccctccaggaagccgccgaggcctacttggttggtctcttcgaagacaccaatctttgcgctattcacgccaagcgtgtcactatcatgcccaaggatattcaactcgctaggcgtattaggggcgagcgcgcttaaatctaattattgattctctgtatagacgatttcaatttcaagcgttcttagttagaacttttgatttggttttcttgttgttgaggattctgtaatgctgctgtgatgttaacgctttattaatgaaattatcactttttgtcttg

SEQ ID NO: 14952 - DNA, 1435 bp, Glycine max
  Clone ID: LIB3040-056-C5_FLI
gaactacttttccctccaatttcgcttcaccacacatgcatggattctttgattttcatcttctctcgcgttttctgattctgatcttaggatagttgttaacagagtgatttgggagcttttgatatgtcgagtggatccgtgagacgggtttcccgtcaagatatccagctggtgcaaaatctcatagaacgatgtctacaactgtatatgagccagaaagaagttgtggaaacactattagctcaagcaaaaatagagcctggtttcactgaactagtttggcaaaagcttgaagaagaaaatgaagaattcttcaaggcttattatgcaagattggttttgaagcagcaaataatgcaattcaacaaattgctggatcagcaagtgcaattaatgcagttacactcaagtactgttgcatcactacctacatctaacgggtcacatatccctgcagtgtcatcactacctagctctaatgggtcacatatccctgcaatacctgagaatccagcatgctacactgcagaccgaacccaaacaagtttgaagccagaaaatatgcaacatcatgttgattccagattatctaatgtgtttaataatggcgggtcatcactacatacaagtatgcatgctgcagttgatatgtctgctcatggtaataggattaatggcccttctagcatgctttctgctcaaagcgcaaacatgggtctgatacaaggaatcaatggtggtggaatgatcaaatctgagcctggatattctggttgttctccttacatgtttggtactgatggaaatgtcctggagacacgcccaactattggtggtgcttcagtcacatcattcactaatgttgagtccaactcacattctctgaatgaggtggtcctagatccagacacttcttcatttggatttctggggcagattcccagaaattttagcctttcagatctgactgctgatttttctcagagttctgatatactggagacctattctaggtcacccttcctagctacggataatgagaacttccttgacagaggagaacaggacaataataggctggactccatatcagaaggcttgagttatgaagactttgggagtgagtgaatagttgataccatttagtcatcgaactttcaggttgaacaaaatgcttaaaatgttgtacataaaactttagaggttttgaaattttaactgttggatgaacatacgcattggtgtgtagaaagtgcactcatctcattcttggtgatgggaaatgaaagttggaatgcttgcatagaagggaaagacttggtgcaaataaataataatcttttttcccttgtgtgtttggccttttgtaatatgcttattcttcattgtgttgatactagaattaatataattgtgttttgttttttgtccg

SEQ ID NO: 14953 - DNA, 614 bp, Glycine max
  Clone ID: LIB3040-058-C11_FLI
gatctttcactcgttctctgaaattttaattgacttttctcccctcataaaaaaaacctaccaatggctcccgcaaggcagagaagaagcccgcggagaagaagccggcagagaaggccccagcggagaagaagccgaaggcggagaagaagatatcgaaggaaggaggaagcgagaagaagaagaagagaacaaagaagagcgttgagacctacaagatctacatcttcaaggtgttgaagcaagtgcaccccgacatcgggatctccagcaaggctatggggatcatgaacagtttcataaacgacatcttcgagaagctcgcccaggagtcatcgcgtctcgctaggtacaacaagaagcccaccattacttccagggagatccaaacggcggtgcgtttggtcctccctggggagttggccaagcatgccgtttctgaaggcaccaaggccgtcaccaaattcaccagctcttgattggtttcgtgtgtttatgtcagggttttctgttagcccgatttaattagggtttcttttcctttttatttctttgagtatgtagatgtaaaattaaagccttttatttttaaataatataattgccgtttcgag

SEQ ID NO: 14954 - DNA, 1120 bp, Glycine max
  Clone ID: LIB3040-061-A11_FLI
gactcacaccaaaatttgccaattgccatttcaatccccagtttcttcttcaacgtcctcttacgagcagatcccaattctccttcccagtttcaaaccctaattccctcattcccatggcctcagaagagcccactgtcgcggtggaacccgctcccgaacctgccaccgccgagcctcccccggaggagaaggaggagcccaaacctgaagccaaggctaggaaaaccaaggaacccaaacctaaaaaggtttccagaccacgcaaccctcccactcatccttcctacgaggagatgattaaagacgcaattacctcgctgaaggagaaaaccggttcgagccaacacgcgattgcgaagttcatcgaggagaagcacaagcagcttccaccgaacttcaggaagcttcttctctaccatttgaagaaacttgtagccgctggaaaactcgtcaaagtcaaaggctccttcaagctcccacctacccgaccttctgcatcttcttcttcttcgccggcgaagaagaagaagcccgcacctgctaagccccaacccaagcccaagcctaagcctaagcccaagcccgctgctaaagccaaggacactaaggcaactaagtcaaaggcaccagctaagcccaaggcagctgctaagcctaaagccaaagttccagccaagcccaagcccgcccctaaaccaaaggctgctgctgctgctgcttccaagcccaagcctgctgccgccaagcccaaagggactaagccagctgccaagcccaagcccaagcccgctgctaaaacaaaggctgctgctgccaagcccgcggcaaagcccaaagcgaagcccgccaaggcttcaaggacgtcgacacggacttcaccagggaagaaagcagctcctgctgcgaagccggcagcgaagaaagtagcgcctgctaagaaagcgccagtgaagagtgtgaaaccaaagagtgtaaagtctccagcgaaaaaggctacggctaagagagggggtaggaagtgagaatgtggtgggtagagtggttttagggttagttttgtgaagttctttaagctttcagcgaagtaggctacgtctcagatagggctatggaagat

SEQ ID NO: 14955 - DNA, 964 bp, Glycine max
  Clone ID: LIB3040-061-G7_FLI
aagacgacagaagggggcctacttcatctctcttataatcacacacacctaccttatagctatggaaactggaggctttcatggctaccgcaagctccccaacacaacctctgggttgaagctgtcagtgtcagacatgaacatgaacatgaggcagcagcaggtagcatcatcagatcagaactgcagcaaccacagtgcagcaggagaggagaacgaatgcacggtgagggagcaagacaggttcatgccaatcgctaacgtgatacggatcatgcgcaagattctccctccacacgcaaaaatctccgatgatgcaaaggagacaatccaagagtgcgtgtcggagtacatcagcttcatcaccggggaggccaacgagcgttgccagagggagcagcgcaagaccataaccgcagaggacgtgctttgggcaatgagtaagcttggattcgacgactacatcgaaccgttaaccatgtaccttcaccgctaccgtgagctggagggtgaccgcacctctatgaggggtgaaccgctcgggaagaggactgtggaatatgccacgcttgctactgcttttgtgccgccaccctttcatcaccacaatggctactttggtgctgccatgcccatggggacttacgttagggaaacgccaccaaatgctgcgtcatctcatcaccatcatggaatctccaatgctcatgaaccaaatgctcgctccatataaaattaatgaagagtactgttcagtaggagaacaagacttcttggacttgattagcttaactctcagtgattggtgttagagtactgttgttgaggatggttaattttataattaagggctgggaattggggagttagtatatattcctaatcctaattatgtgcatctttaatttatggaataactttgttttttgttttaacttctgataatttggattttctgatgtcg

SEQ ID NO: 14956 - DNA, 1519 bp, Gossypium hirsutum
  Clone ID: LIB3048-018-G4_FLI
catctccctctacaaaagacaaaagctattttctgaaatcttccatcttttgatcaaagcaaaaacaaccagaattcaatggggaagaaagctgtgttgattggaatcaactatccaggtacaaaggctgaactgaaaggctgcataaacgatgtgaagagaatgtacaaatgccttacagaacgctatggattctctgaagaagacatcacggtattgatagacaccgataattcttatgatcaacccacagggaagaacatcagaagggctttgaatgatcttgtgagatcggctgagcctggggattttctgtttgtgcactacagtggccatgggactaggcttcctgctgagactggggacgatgatgatactggctacgatgagtgcatcgtcccctgcgatatgaatctcatcactgatgatgatttcagagagttggtggataaagtcccaaaaggtagccgcatttcaatcgtatcagattcatgccacagtgggggattgattgatgaggccaaagagcaaataggtgatagctctaagccccaagattcagaatcagaatcaggttcaggtgggtttaggagcttcttgcaccacactgtacaagatgcatttgaatctcgtggaattcatgttccttctagattacgccaccgcgaccaccaccatgataaggaagaggtggatgacaggggagtgaatgaagactatgatgacagtggctacgtcaaaagcagatctctgcccctctcaactctaattgaaatgctcaagcagaaaactggcaaagatgatattgatgttgggaagctaaggccaaccctttttgatatgttcggcgaagatgcaagccccaaagtgaagaagtttatgaacatcattatgaccaaactgcaggggagtggtgatgacggtgaagggggtggtttcatggggaaggttgggaatctggcactacagtttcttaaacaaaagctggatgatgacgaaggatacgggaaaccggcacttgagactgaagtgagtagcaagcaagaggcttatgcaggagctggtaagcactctcttcctgacagtggaattcttatcagcggctgccagaccgaccaaacttcagcggatgccagcccatcagggaatgcaagcaaagcttatggagcacttagcaatgctattcaaaccataattgccgactcagatggctcaattactaataaagagcttgttctgaaggccaggcagatgctcaaaaaacagggcttcactcagcaacccggcctttattgctgcgaccatcatgtcagagctccatttgtctgcgaatactaatcttttatctgcaagcttcagaaacaaataaagtctatgatttggtcagagaattgttgttgatgagattgtactgcttgtctcactttcgatttatccatatatttacagtttgtgtgcttctggacattgaatggattttaaacaaaaatgatttatctattgcagctataacttgaac

SEQ ID NO: 14957 - DNA, 1533 bp, Gossypium hirsutum
  Clone ID: LIB3048-032-E7_FLI
gaattcggcacgagcatctccctctacaaaagacaaaagctattttctgaaatcttccatcttttgatcaaagcaaaaacaaccagaattcaatggggaagaaagctgtgttgattggaatcaactatccaggtacaaaggctgaactgaaaggctgcataaacgatgtgaagagaatgtacaaatgccttacagaacgctatggattctctgaagaagacatcacggtattgatagacaccgataattcttatgatcaacccacagggaagaacatcagaagggctttgaatgatcttgtgagatcggctgagcctggggattttctgtttgtgcactacagtggccatgggactaggcttcctgctgagactggggacgatgatgatactggctacgatgagtgcatcgtcccctgcgatatgaatctcatcactgatgatgatttcagagagttggtggataaagtcccaaaaggtagccgcatttcaatcgtatcagattcatgccacagtgggggattgattgatgaggccaaagagcaaataggtgatagctctaagccccaagattcagaatcagaatcaggttcaggtgggtttaggagcttcttgcaccacactgtacaagatgcatttgaatctcgtggaattcatgttccttctagattacgccaccgcgaccaccaccatgataaggaagaggtggatgacaggggagtgaatgaagactatgatgacagtggctacgtcaaaagcagatctctgcccctctcaactctaattgaaatgctcaagcagaaaactggcaaagatgatattgatgttgggaagctaaggccaaccctttttgatatgttcggcgaagatgcaagccccaaagtgaagaagtttatgaacatcattatgaccaaactgcaggggagtggtgatgacggtgaagggggtggtttcatggggaaggttgggaatctggcactacagtttcttaaacaaaagctggatgatgacgaaggatacgggaaaccggcacttgagactgaagtgagtagcaagcaagaggcttatgcaggagctggtaagcactctcttcctgacagtggaattcttatcagcggctgccagaccgaccaaacttcagcggatgccagcccatcagggaatgcaagcaaagcttatggagcacttagcaatgctattcaaaccataattgccgactcagatggctcaattactaataaagagcttgttctgaaggccaggcagatgctcaaaaaacagggcttcactcagcaacccggcctttattgctgcgaccatcatgtcagagctccatttgtctgcgaatactaatcttttatctgcaagcttcagaaacaaataaagtctatgatttggtcagagaattgttgttgatgagattgtactgcttgtctcactttcgatttatccatatatttacagtttgtgtgcttctggacattgaatggattttaaacaaaaatgatttatctattgcagctataacttgaac

SEQ ID NO: 14958 - DNA, 663 bp, Glycine max; identical to SEQ ID NO: 14764
  Clone ID: LIB3049-001-C6_FLI

SEQ ID NO: 14959 - DNA, 1503 bp, Glycine max
  Clone ID: LIB3049-001-F2_FLI
ggggacatggaattggaagacaagttggagtgtggtggtctgttttaaaatccaacacttaatctctctcttcgcagcctaaaatcccaatggcttcactctctgttttgcgccacaaccacctcttctcgggccccctcccggcccgccccaagcccacctcctcctcctcctccaggatccgaatgtccctccgcgagaacggcccctccatcgccgtcgtgggcgtcaccggcgccgtcggccaggagttcctctccgtcctctccgaccgcgacttcccctaccgctccattcatatgctggcttccaagcgctccgctggccgccgcatcaccttcgaggacagggactacgtcgtccaggagctcacgccggagagcttcgacggtgtcgacatcgcgctcttcagcgccggcggctccatcagcaagcacttcggccccatcgccgtcaatcgtggaacggtcgtggtcgacaacagctccgcgtttcggatggacgagaaggtgcctttggtaattcccgaagtgaaccccgaagcaatgcaaaacatcaaagccggaacgggaaagggcgcactcattgctaaccccaattgctccaccattatatgcttgatggctgctacccctcttcatcgacgtgccaaggtgttacgtatggttgttagtacctatcaggctgcgagtggtgctggtgctgctgcaatggaagagcttgagctgcaaactcgtgaggtgttggaaggaaaaccacccacttgtaaaatatttaaccgacagtatgcttttaatctattctcacataatgcgtctgttctttcaaatggatataatgaagaagaaatgaaaatggtcaaggagaccaggaaaatctggaatgacaaggatgttaaagtaactgccacatgcatacgagttcccatcatgcgagctcatgctgagagtgtgaatcttcaatttgaaagaccccttgatgaggacactgcaagagatattctgaaaaatgctccaggtgtagtggttattgatgatcgtgaatccaatcattttcctactccactggaagtgtcaaacaaggatgatgttgctgttggtaggattcggcaggacctgtctcaggatgggaatcaagggttggacatctttgtatgtggggatcaaattcgcaagggagctgcacttaacgcaatccagattgctgagatgttgctatgagttctggtttttcaaggatctggtacttaaagattatgcttcttttgaaacagttttgtatgtgctagttgtatgtggttattcatttcttttgtgatgtttaactagtccaagtatcttttcaacgatgtggtagcacactagctggaaacagtttttttaaggtcttggtgcgtaatatctgcaatccttttcaccgggaataacaagcactggttatggcaaaggagagtaacctaatgtttaatcttttgaataaagaatttgttgagcagttttatac

SEQ ID NO: 14960 - DNA, 664 bp, Glycine max
  Clone ID: LIB3049-002-B2_FLI
cacgcgctttgaagcgtgctgttggtgatccattcaaggggggaatagagcaaggtcctcagattgattcagaacaatttcagaaaatactgaagtatattagatccggtgttgaaagtggagctactcttgaaaccggaggagatagatttggcaactcgggcttctatattcagcctactgtcttctcaaatgttaaggatgacatgctgattgcgaaggaagagatctttggcccagtgcaaagcatattaaaattcaaggaccttgatgatgtgattcaaagagcaaataacacacactatggccttgcagcaggggtgttcacaaaaaacattaacacagctaatactttgactagagcattgagagctggaacagtgtgggtgaactgctttgatacatttgatgcagcaattccctttggagggtacaaaatgagtggtcaaggaagagaaaaaggagaatacagtctcaagaattacttgcaagtgaaggctgttgttacatccttgaagaacccagcttggctttgaacatcattagctttagatttatttgatgaaaagattaataaataggctccaataataaagatcattaaattgggtttattccattcatagtttctgataatgatgaaaataatctagtttcttttccg

SEQ ID NO: 14961 - DNA, 1152 bp, Glycine max
  Clone ID: LIB3049-003-A4_FLI
gacacaagaagtcatcttttattgtacgccaaagaaaagaaaagaaagaatcatagtttttttgggttgtgtgtgtcttttggtggaggaatgcttgtcacctactccttttaagttcccccaaaaacacttttgtgagtgagagaaagaagaagaagaagaagaagaagaagtagcataagtgatggatagacacaaatgcaagctttgttcaaggtctttctccaatggcagagcccttggtggccacatgaaggctcaccttgctactctccctctccctccaaagcctcactcttattcctcttcctctgactcagaacaagaacaagaacaagaatctcttaattatgctttaagggagaatcctaagaagagcttcagggttgcggatcctgaagacagagagagcgaaacagagtctagaaaccccactcgccaacgatccaagcgcaaccggaaatccaccatgccgaagctcacaccgccaccccaccccgaacccgagcctctcagctccgtctccgacacctcccccgaagaagacgtcgccatgtgcctcatgatgctctcccgcgacacgtggcagcaacacaagcacgccaatgcagctacacctaagaggcgcttcagtagcggatcagagatcaagaaaaatgtccgcgggaaccacctctgccacaaatgtcacaaatcctttcgatcttctcgcgcgttcggaagccacagaaatgtgtgttgtccccgcgaggaaggccaaaataattacaacaacaaccgtagcactaaggttttcgaatgtccgttctgttacaaggtgtttggctctggccaagcgctcggtggacacaagagatctcacctaattccttcctcgtcttcaaccgttaacgattctgttaagttgaaacatagcttcatagatctcaacttgccggctccggcggaagacgacgaccttagcgttgtttctgatgcgtaattcgatctcgatatgtttaattgttcaatgtttagttgtctggtggtgttactgataaagtggattttttttcttcttcttctttttttttttaaaagtaggtgagaatatttcattgtttattaacagatcaaatgctcttgattctacaatgatagctgagtataagc

SEQ ID NO: 14962 - DNA, 501 bp, Glycine max
  Clone ID: LIB3049-003-A6_FLI
gttggatggggggttgtttgaacactacaccaaatttagagaatgcttggagagtgcactgaaggaattgctgggagatgaggctgctgagaccattgtcattgagcatgctaatgatggctctggcattggtgcagccctcctggcagcttctcactcccaatatttgggagtggaggagtcttaaattttattgccaaacaagggaaagacgtgtaatactagtttcattttttgcataggtggtagatcaacacattgaagcaatggtgccttgcagctggtgactgggggggcattcattattttggtttcagtgtttgtttctccttcgttaaggaataatatcaaagatataaacttcatcttgagtgactagacaccttttgcggaatgtagccaacgagaataaagcaggacttaatgtattgacaagcctaaatttgtttttatttcaaagcttttctgagctatcaatgaagactaaagcattgtttctgc

SEQ ID NO: 14963 - DNA, 782 bp, Glycine max
  Clone ID: LIB3049-003-C7_FLI
gatcccgacattaatttttgtacacacacacagattcccctctttcgaatttcgatactttgatcagatccacaacacttcttcatccatgacgcttggttcttcaggatccagtgtcgtggttccaaggaacttcagattgctggaggagcttgagaagggagaaaaaggaataggagatggcacagttagttatggaatggatgatggtgatgacatttacatgcgctcttggactggaaccattattggtccctataatactgtacatgaaggaagaatttatcaattgaagctgttttgtgataaagactaccctgaaaagcccccgagcgtccggtttcattcacggatcaatatgacttgtgttaatcatgaaactggagtggttgaatcaaagaaatttggtcttcttgcaaattggcaacagaggtttaccatggaagatatactgacccagctgaagaaggaaatggcggcttcacataaccgcaagcttgtccaacctcctgaaggtactcactattagtgtccaagatcacactgatattggatcatattgcatttgcagtatgcaatatatagtatgtaatactctggatccttctaaattcaagaacatactggggaatgctcgaaagagcttcatctttacctccatagagttttgttgcaatacattgtcaactttgttgaagggatgctctctgattggtcctaaatattgaaagcaactcttaaagtagcgttcttttcttattataacagttcttcccgtttcc

SEQ ID NO: 14964 - DNA, 1387 bp, Glycine max
  Clone ID: LIB3049-003-D2_FLI
ggaaaaaatggcgatgctcaagagatgctgtagtagatcagaagtattgcgaacggcacatgaaccgaggacgccatcgttcaagaaagcctgtggaaggccaatcaggccatgccctcaccaccactaacacacctaatgcttcctcaaactcaaccgtggtgcccggcaaccacaacaacaacacctttgcacacatcaatgtgcaccaccctcttcctcctcattcctctccagccaataccatcaataggatgtttatgagtaataataaagagaacaacaacacgagtgagaggacgaaggatggccttgcccttcccatgctacctcctactcttgagccgaaaccaaaggacaacaacaactctttcatggttcataaacaccaagaaccatatgatgaatcctcaaggaacaagaatgagtttggactcgtcacttctgattccttgcttaacccttcacagaaaagaagctttgattcttcttcttcttcacaaaaggatgattcttctgagtcccaacaacaacattccctcaggcacttcattgatgactctcccaaaccacagtctcatcataatcataaccatcgttcgtcgtcatctatttggcctgaactcgacaacatgcagtcagacaggactcagttatcaatctccataccaatatcttcctcagatcacttcatgtcatttgcaacttcctcgccctcgaatgaaaaactcacgttgtcgccactaaggctttcgagggagttcgaccccattcaaatgggattaggagtgggaagtgcctccaatgaagcaaacactaggcaagccaattggattccaatcacttgggagagttcaatgggtggtcctcttggagaggttttgaaccttagtaacaataataataacagcaatgcaagtgatcaatgtggcaagaacaacaacaacacttcagctctcaacctcatgaaagatgatgacgatgatgatgggtgggacaatagtcctcctccaatagggtcatcaccaactggggtgcttcaaaaaacagcatttggatcactttccaacagcagtgctgggagcagtccaagaggggcaccagagaacaacaacaaagaatagagatttctgatgattccttgttttcacgtttgaactgttttttgttgttgttgttcttcttcttcctcaaaaaattgtttgggaatggattggcgtttgtagaatgtgtggaccacaacaactcaacaagagttgtagctggctagctactgtctctttcactccaaagttcttcaaaatctttggtttcacgggtttgtactattgtctggttttatatttggaattgtttaacttgaaaaaattacttctgttttcatccc

SEQ ID NO: 14965 - DNA, 3077 bp, Glycine max
  Clone ID: LIB3049-003-E8_FLI
gaatgccaaagttggtcacgctctctgaaaatgcagcaacagcaacagcagcagcaggcatgaagagcaacatacacaacaccactccttcaaatatcatcatcatttctcacttctcatccttcactctcttcttctctttcttcccttcactctctctttcgcttcatggctggtctcatcgatctcaacaacgccaccgaggacgatgaaacgccgtcgtctggctcctcctcctcctcctcctcctccaccgtctgccttgaactctggcacgcttgcgcgggtccaatgatttcattgcccaagaaagggagcgttgtcgtgtacttccctcagggacacttggagcaacacctccacgattttccgctccctgcctctgccaacatcccttcccatgtcttctgtcgcgtcctcgatgtcaagcttcatgctgaggaagggagtgatgaagtttattgccaggtggtgctggttcccgaaagtgagcaagtgcagcagaagttgcgggagggggaatttgatgctgatggtgaagaggaagatgctgaagctgtgatgaagtcgacgacgccccacatgttctgcaagactttgactgcttctgataccagcactcatggtggattctctgtgcctcgtcgcgccgcggaagattgcttccctcccctggattacagtcaacagaggccttcacaggagcttgtggcaaaggatctccatggtcaggaatggaggtttcgacatatatatagggggcagccgcgaagacacctgcttactactggttggagtgcctttgtgaacaagaagaaacttgtatctggagatgctgttctgtttctcaggggtgaggatggagaactgagattgggaattcgtagggctgctcaactgaaaagtggcagtaccttttcagctctttctggccagcaagggagtcctaccagtcttatggatgtggttaatgctttgtctgcaagatgtgcctttagcattcactataatccgagggtcagttcatctgagttcatcatacctatccacagattcgtaaagagccttgattattcttattcagctggaatgaggttcaggatgcgctttgaaactgaggatgctgcagagcgaagattcacaggattaattgttggaattgctgatgtggatcctgttagatggcctggatctagatggagatgcctaatggtaaggtgggatgacttagaagccacaaggcataatagggtttccccatgggagattgagccatctggttctgcttctactgcaaataacttgatgtcagctggtttgaagaggaccaagattggattgccttcagccaagctagattttccagtttccaatgcgattggaacatcagactttggggaatcactaagattccagaaggtcttgcaaggtcaagaaatgttgggtgttaatactacttatgatagttttaatgctcaaagtcaccagctatctgatttgaggaggtgctatcctggctcgaactatcctaggattgctgcaacaggaaatagcattggaatctcacaagtgagttccaatgtttccaacaacggcataggctttagtgaatctttcagattccagaaggtcttgcaaggtcaagaaatacttcctagccaaccatatggaagggccctgtctgttgacgaggcttgtggaaatggtcgctttggactttttgatggtttccaggcgatgagatccagaaatggatggtcttcccatgtgagcaacaattcctcacatttgcatcctcctgttccatctgggcaagtttcatctccgtcatctgtgttcatgttccagcaagctgtcaatccagttttaaactcggattataacaaccaaataggtcaggtgatgggagataaagtccatcagcgagtttcatatgcgtctgaagttaaaggcggaaaatttgtatcaaccccctatgagcctcttctccgtggactatctcaggaaggcacaaattcttttggtctttcaaactttcataatcagctggatagttcacgttcacacgattctgtttcagtactgagagctagtcaagagttggttccctcgtgtaaaagtagatgcagagtctttggattttcattaactgagggtgctcccgttgcaagtaaagaggcgactgactcatctgcagttgcttgtgctggaccttcctttacaagacatgttgaagatgatttccatccagggcattcacttaggagcaaggcagtggcaagttattgcaccaaggtaatcaatctttatcctttaagatgcatttgacttcttggatcttggttctaatactacacaattagaagcatgcaggttctataaaatagccacgcaagataacaatggataggtaacaaataaagtgaatgatgtaatactgagttacacctgtcagtattgagctatctaatttccttgtcagagccagttcttgccaaatgagtataatgcttagtgggtttaacaatttcttgttatggcttgtcatacaaaatgactcacatatctcttctactgagacaattttgaacatgttgggtgaaaagcaatggtgttgctgcaccaccttatttgatttactttttatttatcgacaaatgttatttttgtttgccgaggggatggaacctacgatctttctcctcttttcttatcccttaaccatcttacccttacttgattatttgttttgtttctttcgactctcgggagttattaaataatgcttattgtctgcagggtgtgctgcaatattgacttggaaatcttgatgtatgctggtactgatgctggcataaggtagcagaagagaatgtccacagttgttgtacttgtgtgctttgctctagtgacttggaatattgggagactaaaatattgtaactattcgtctaatttagatacttgttaaattggctatgaccacgttctagattctgtattaatcatgtatctacccttcattgacttgtatggggaaaacctctaaacgatgcatgtttatccaccgttttgat

SEQ ID NO: 14966 - DNA, 787 bp, Glycine max
  Clone ID: LIB3049-004-C5_FLI
ccagaaggtggtggttaattactaccccaaatgccctcaacctgacctcactcttggcctgaagcgccacacggatccgggcactatcaccttgctgcttcaggaccaagtgggtggacttcaagccaccagggacaatggcaaaacatggatcaccgttcagcctgtggaggctgccttcgtcgtcaatcttggagatcatgctcattatctgagcaatggaaggttcaagaatgctgatcaccaagcggtggtgaactcaaaccatagccgtttgtccatagccacttttcaaaacccagcaccaaatgcaactgtttaccctctgaagataagagaaggagagaagcctgtgatggaggaaccaatcacttttgctgaaatgtacaggaggaagatgagcaaggacattgagattgcaaggatgaagaagctggctaaggaaaagcatttgcaggaccttgagaatgaaaagcatttgcaagaacttgatcagaaggcaaaacttgaggccaagcctttgaaggagattcttgcttaattaataataattacatatgtatcatttgcatgcccccttggtgtttttagtattttttaagggccatgaattaataatagtccttacctttgtgcttttgtacgtcttatgatttatcctttgtggggatatcatgtgttgtgttcagttgcctatgtcttattagctagctggctcatctatgtataccttatatttgcctctattataaatgaaaataagtggcactgtctttattattggcct

SEQ ID NO: 14967 - DNA, 1474 bp, Glycine max
  Clone ID: LIB3049-004-G9_FLI
gggatttagacgccattgtcaaacccttttcacttctctctagggttttagcactctctctctctctcgttttcgttcttcctttctgcctctctcagtcacacaccttctcgatgaccaacgacaacatcgccgtgacagatctcacttctgccctcaatgaagataatcgcgccgacctagtcaatgctctcaagagcaagattcagagtctggctggggcgcattctgatgttctagagactctatccccgaatgtcaggaagcgtgttgaatctcttagagaaattcagggtaaacatgatgaactagaggcagacttcttgaaggagagagaagctcttgaagcaaagtaccaaaaactgtatcagccattgtacacaaagcgctatgaaattgtaaatggtgttactgaagtggaaggggcagcaaatgaatcaacagatgaatcagaagagaataaagagaaaggagtgccttctttttggctcaatgcaatgaaaaataatgatgtgttagctgaagagatttcagagcgtgatgaaggtgctctcaagtttcttaaagatatcaagtggagcaggatagaaaatcctaaagggttcaagcttgatttcttctttgataccaatccttacttttcaaataccgtcttgacaaaaacatatcatatgattgatgaggatgaacctatattggagaaagcaattgggacggaaattgaatggtacccgggaaaatgcttgactcagaaggttttgaagaagaagcctaagaagggttcaaagaatgctaaaccaattaccaaaactgaaagctgtgaaagcttcttcaattttttcaaaccaccagaagtccctgaagatgatgctgacattgatgaagatttggctgaagaacttcagaatcagatggaacaagattatgacattgggtcaacattaagagataaaattatccctcatgctgtatcatggtttactggggaggccgctcagggagatgagtttgaagacctggaggatgatgaggacgaagaggaagatgaggacgaagatgaggacgaagaggatgacgaggacgaagacgatgaagaggaggatgacactaagactaaaaagaagaagagtggtaaggcacaggctggtgatggtgatggtgagcgacctccagagtgcaagcagcagtaattgtttgtttcttcggagtatcatgtggctgatgggtgtttttgaggtcctatggtgcctgacgggaaagtgggtttcaatttcatgcaatttttcatagtccttgattcattttcctccctagatccgatagtctgaatttattgagtcaatttctcctttttcccatattttgggagaatgtggttatatatttgtagtcagggatgctgtgatttgttactgttggaatttgtacgtcattccagacacttcacatatattataggttgtgctttgttgcg

SEQ ID NO: 14968 - DNA, 2121 bp, Glycine max
  Clone ID: LIB3049-005-H6_FLI
ggtaccaaagctgaatagccattcgtattgtcgcagagaaagaaaaccctagctcaccgtttcaagatgcaaatcttcgttaagaccctcactggtaagaccatcactctcgaagtcgagagttcagataccatagacaatgtaaaggccaaaattcaagacaaggaagggatcccaccagatcagcaacggctcatttttgctggcaagcagcttgaggatggacgtacccttgctgattataacatccaaaaggagtccactctccacttggttcttcgtctccgtggtgggatgcaaatctttgttaagaccttgacgggaaagacaatcacccttgaggtcgagagctccgacaccattgacaacgttaaggctaagattcaggacaaagagggtatccctccagatcaacagaggctgatctttgctggaaagcagcttgaggatggccgtacccttgctgattacaacatccagaaggagtccactcttcatttggtactccgtctacgtggtggaatgcaaatctttgttaagactctgaccggaaagacaatcacccttgaggtggagagctctgacaccattgacaatgttaaggccaagattcaggacaaagagggtatcccaccagatcaacagaggctcatctttgctggaaagcagcttgaggatggccgtacccttgctgattacaacatccagaaggagtccactcttcacttggtactccgtctacgtggtggaatgcaaatctttgttaagactctgaccggaaagacaatcacccttgaggtggagagctctgacaccattgacaatgttaaggctaagattcaggacaaagagggtatcccaccagaccaacagaggctcatctttgctggaaagcagctagaagatggccgaaccttggctgattacaacatccaaaaagaatctaccctccacttggttctccgccttcgtggtgggatgcaaatctttgtcaagactctcactggaaagaccatcacccttgaggtggagagctctgacactattgacaatgtcaaagccaagattcaggacaaagaaggtatcccaccagaccaacagaggctcatttttgctggcaaacagcttgaagatggccgaaccttggctgattacaacatccaaaaagaatctaccctccacttggtgctccgtctgcgcggtggtatgcaaatctttgtgaagacccttactgggaagaccattactttggaggtagagagctcagacacaattgacaatgtgaaggcaaagatccaagacaaggagggtatcccaccagaccaacagaggctcatttttgctggcaaacagcttgaagatggccgaaccttggctgattacaacatccaaaaagaatctaccctccacttggtgctccgtctgcgcggtggtatgcaaatctttgtgaagacccttactgggaagaccattactttggaggtagagagctcagacacaattgacaatgtgaaggcaaagatccaagacaaggagggtattcctccagaccagcaaaggttgatttttgctggaaagcagcttgaagatggacgtacactggcagactacaacatccaaaaggagtccacccttcaccttgtccttcgtctcaggggaggtatgcagatctttgtgaagactttgacaggcaagactattaccttggaagttgaaagctcagacacaatcgataatgtcaaagcaaaaatccaggacaaggagggtatcccaccagaccagcagaggttgatatttgctgggaagcaattggaggatggaaggactcttgctgactacaacattcagaaagagtctactcttcaccttgtgttgcgtcttcgtggtgggttttaaaagtctgagaatgttctgtaggtgtcttgaagtctaagcatgtggaagttccgaagatctttgggtttttttttttaatgttcctgaaaggtttactcttgttaaattgtttccatggtcaatagtggcctttgaaaaactgttgtttgttctggtctttttataaattctgtttggttcgtgaatttgtgaagctaccttttatgaaatttagttctttgctgc

SEQ ID NO: 14969 - DNA, 532 bp, Glycine max
  Clone ID: LIB3049-006-A5_FLI
cccttgtttctttgttgatcgttttggatttgaaaaagactttcttattttcttttcatcaagttgctggcatggctttttggttctataaattctccggttgaagcatacagagtccccttccactttcttccttctttctcatcactcttttaagatatttttgttacatagtttatggtctacgagagccctgcctctgtagagtgtagaccaacctccttttctttgctttgagctcgctcgatcttcttccatttcatgtcttgttttattttattttatttatttaagccttttaaatgcccaacattttgttcttgatgtttgagattgatgtattcaattctgagtgaaatcttcttttccgggtgtatgatcaattccactgtgagacgcaggacccatttagttcaatccttctctgttgctttcctttactggctctactacgtttcatgatttctaaccccctctccaattattaattaaataaaaccctattatatatctcttacatatttttatctgt

SEQ ID NO: 14970 - DNA, 700 bp, Glycine max
  Clone ID: LIB3049-006-D3_FLI
gacaccacactactatgagttcaccgctactccctgttgccacctcctccgacgcccacgcgccaaacccgcgcgtgctgccactttatgacatctttagttttctcagcaccacaatcagcagcggcatcataacctacctcgcctacaccaaaaacgacaccccaatgctcctcttcgccgccttcatctacgtcgtttacttctccgtcgacttctccccaccaccacaacaacccaaggcgcgtgggctccacgccgtgaaactcgcgtcgtgggcgttgctgagttccacgatgttgggattcgcgtgttcgttctcgacctctttaacgccgccggagtcgctgtgcttcttctgggtggtgctcggtggcagcgcgttgctacacggcgcgtggatgggggacgagaactttgtttcgaagaaggaacagtacgcggacatggttcggtcgtttgctccgattatgttaatgtttttcggtctggggagacattacctctcgactcaactcatcctacatgctgccatcatgaatgcgaggaacctcgttcggccaacaacaatttgtgtaaatataaatactaaacaattaagtggttgattttcggttttcgtgttcttgagactttaatttggactcgtgtgttcagtcatttgaatgaataatatggaccttgatcatttaagggttcc

SEQ ID NO: 14971 - DNA, 1262 bp, Glycine max
  Clone ID: LIB3049-006-D5_FLI
gagaagcatggtaacttcaccaccagccatgcccaccaagggtcgtgttctcatcatcggagcaacaggtttcataggcaaatttgtggccgaggaaagcctcatctcagcacaccccacttatttgcttgttcggccaggacctcttaacccttccaaggatgccattgttaaaaacttccaagacaaaggtgccattgtcattcacggtgtgataaataacaaggactttgtggaaaagattttgaaagagtatgaaatagacattgtcatttctgctattggggccaagagcttgctggatcagcttatacttgttgaggccatgaaatcggttaagactattaagaggtttttgccttcagagtttgggcatgatgtgtacaaagcagatcctgtggagccaggtctaacaatgtacaaggagaagcgactggttaggcgtgtggttgaggaatctgggattccatataccaatatctgttgtaattccattgcttcttggccttactatgacaattgccacccatcacagcttcctccacctttggatcagttacagatatatggtcatggcaatgtcaaagcttactttgttgatggcattgatattggaaagttcacaatgaaggttgttgatgatgccaggacagtcaacaaaaatgttcattttcgaccatctaacaactgttacagcatcaacgagctagcttctttgtgggaaaagaaaattggccttacaatccccagagtgaccatctcagaagatgatcttctggctgtagcagcagaaaattgcataccgcgaagtattgtggcatctttcactcatgacatattcatcaaaggttgtcaagttaacttcaacatagatggacttggtgatgttgagattagcactctctatcctgatgaagcattcagaagcttggaggattgcttcgagggctttgctcttatgatcgatgacgagattaataaaggggaaaataaaattaccggcacaaaatctgtagtggaagcagtgccattcacagcttcctgtggagaagaatcacctcctcaaaaatgttctaactttgttgttaccaattactaggctttggtgaggtggaaatgtattgagtcattagaaatggaccttttatgttgatgttatttcgaagactgttttatctaaagtgttttattgtattcctagagtatgttcttaggtgcaacaaattcttgttagttgttacctgttactctgctttggtggc

SEQ ID NO: 14972 - DNA, 1003 bp, Glycine max
  Clone ID: LIB3049-006-E1_FLI
ggtgaatcagcaccacattcacctgagctttttgtgaggattccaaagcatggcttcccttgcagcatccactgctgctgcttcccttggcatgtcagaaatgcttggaaaccccatcaacctcagtggtgccacaaggccagctccatctgcctctagccctgcctccttcaagactgtggctcttttctccaaaaagaaggctgcacctccaaaaaaagctgcagctgctgctcctgccaatgatgagcttgccaagtggtatggtcctgacagaaggatcttcttgcctgagggtctcttggaccgatctgagatcccagagtacttgaccggagaagtccccggagactatggttatgacccatttggtcttagcaagaagccagaagatttttccaaatatcaggcatttgaattgattcacgccagatgggcaatgcttggtgctgctggattcatcattcccgaggccttcaacaaatatggagcaaactgcggtcctgaggctgtttggttcaagactggagctctgcttcttgatgggggtaccttgaactacttcgggaaacccatccccatcaatcttattgtggctgtcattgctgagattgttcttgtgggaggtgcagagtactacagaattattaatggcctgaatttcgaagacaaacttcatccaggtggtccatttgacccattggggcttgcaaatgatccagaccaagctgcactgctaaaggtgaaggaaattaaaaatggaagacttgctatgtttgccatgcttggtttctacttccaagcttatgtcactggagaaggtcctgttgagaaccttgcaaaacatctcagtgacccttttggcaacaacttgctcactgtcatttctggatctgctgagagagctccaactctctaaatcattcatcttcatgtttttctccaatcttacttaatgtacaatacatatcactgagatattaaggcatttggctttgttccc

SEQ ID NO: 14973 - DNA, 998 bp, Glycine max
  Clone ID: LIB3049-006-E5_FLI
gactaaagagcagctgcagacaaacaagctggtgagatccatggaagatataggtccgaattcatgcacaaggccagtgacagagaagaaagcaagaccccaagaacaattgaattgtccaaggtgcagttcaaccaacacaaagttctgttattacaacaactacagcctcacacagccaagatacttctgcaagacttgtagaaggtattggacagaaggagggtctctgagaaacgttcccgttggaggtggctctaggaaaaacaagagggtcacctcatcaaaggttcctgacttgaatccaccaattagcctctcatcagtctcagccatttcttcccaaaaccctaaaatgcaaggagtccatgaccttaatctggcttttcctgcagctatggacaagtatcatcatggcacgtctccgtatgttgagatgccaaaacttgaaattggtggtgatcacagtactagtcatcatagtcaccaccatagccatagcccttcttctgcagttgagctactacggtctggcatggattctaggggtttgaatccttatgctcctaattccttgatgtcaggctcagatcattccctttatacacctggctatcccatgtaggaaattaaaccaaaccttagcttttcagttgatgatggatttggaaatagatcatatggggttcaagagaatggtggagggaggcttttgttcccttttggagacatcaagcacctttctgcaggtcttgaagtggaacacaataaagaacaaggaaataattcaactggatattggactggttggtgaagggtcttcatggtaaggaaagaaaagaaatattgggagaacataaatatcaacctgcattgttttctttctcttcactgtttctatctatccgcttgaagttgttcagatcactaacaataggatacacatggttactctattttgtatacattattattattattacatttctattcgagcc

SEQ ID NO: 14974 - DNA, 648 bp, Glycine max
  Clone ID: LIB3049-007-B3_FLI
gattggtaccgcgaaacgcacatttcactattcattctcgtttccctttcgactgtgattgtttgttaactgaacttttcgagcaaaatgtctggacgtggaaaggggggcaagggtttgggaaagggaggagcgaaacgacaccgtaaggtgttgcgcgataacattcagggaatcaccaagcctgcgattcggcgtttggctcgcaggggtggtgtgaagcgtatcagtggtctcatctacgaggagacacgtggcgtgctcaagatctttctggagaacgtgattcgtgacgccgttacctacactgagcacgctaggagaaagaccgttacggcaatggatgtggtttatgctctcaagagacaaggaagaaccctctacggatttggaggctagtttgtttttttttttttttttaatttttattgttaggtttcgtttgttttggaggtttatgtgggatgtaagagacccttgctattagggagatagggaaaaaaattgcaaggatttggtgtagtaagttgctggtggtgttttaggtataagggtttctataacatgtaatgtattgagctatattgctgccaagcttgtaattgtatcacaatatgttgctaatgtcagattcttgtttttctgtcc

SEQ ID NO: 14975 - DNA, 1029 bp, Glycine max
  Clone ID: LIB3049-007-D4_FLI
gaccttctcttctctaagcactttactttttttttcagccatggagtttcattgccttccaatatttctttatctcaatttgatgttgatgacagccaatgctgcgttaactcctagacattactgggaaacgatgcttccaagaactcccttgccgaaagcaatcacagagctactaagccttgaaagtaggtccatatttgaatatgccgggaatgatgaccagtcagaaagtaggtccatattaggatacgctggctataatcaagacgaggatgatgtgagcaaacacaatatacaaatcttcaacaggttgtttttcttggaagaggacctgcgtgctggcaaaatattcaacatgaagttcgtcaacaacacaaaagccacagtcccgttgctaccgcgccaaatttcgaaacaaataccgttctcagaagataaaaagaagcaagtgttggcgatgcttggcgtggaagcgaactcaagcaacgccaagatcatagcggagaccattggtctttgccaagagcctgcaacggagggagaaaggaaacactgcgcgacttcgttggagtccatggttgatttcgtcgtttccgcgctcgggaagaacgttggtgctttctcaacagagaaagaaagggaaactgagtctggaaagtttgtagtggtgaaaaatggggtgaggaagttgggagatgataaggttattgcctgtcatccaatgagttacccctatgttgtgtttgggtgtcatctagtgccaaggagtagcgggtatttggtgcgcttgaagggagaagatggggttcgagtgaaagcagttgttgcgtgccacagagacacgtcaaagtgggaccataatcatggggcattcaaagtgctcaatcttaagcctgggaatggtacagtatgccatgtcttcactgaggggaatcttctttggcttccaaattagattaattaccatatacatatttgtccttgttctatccttaaataagtggaatcccctgaagaattgtgccc

SEQ ID NO: 14976 - DNA, 1216 bp, Glycine max
  Clone ID: LIB3049-008-H10_FLI
ggtactccatcatttccttgttcttcttccttctcttcattctgtctctacccttcaacgcaactttctttcttttctattgagcttccaatattctcacgccttgcaatcgtagttgcaccctccaaactccttcccttttctttcatctgttcaggtacttgcagtaagagaacatattgtaaaactaaaagggaaaaatggccttagatcactttgaggagactgtgcaccaaaaaggaaattggaaatcttccagtgaaatcattgcagattctgatagaaatgcctctggtgactttgactgcaacatctgcctggagtgtgtgcaagatccagtggtgacactttgtggtcatctttattgctggccctgcatatacaaatggcttcattttcaaagcacctctttggatgatgaagaacaacagaggccacaatgtcctgtatgcaaatcagaagtttctcaatcctcccttgttccattatacggccgtggccaaaccacattaccttctaaagggaagccacgtcaagtaggcactgtcataccacaaagacctcatggtccaagaacacttaacactagaagtgtttcacaacctatttctcaaagttaccatccctatagtaatccttatcatcctcaacaacacttcaactcgattccaagcggttacacctcacctatgattagaacaactggttcaatagacaacacatttggaatctttggtgagatgatatatgcaagggtctttggtaaccacgtgtcaaacattcatacatacgccaattcgtacaatctttcggggaccagtaacccaaggatgagaagacatttaatgcaagttgataaatcactcagcagaataagttgtttcctcctttgctgcctagttttgtgtctgctcttattctgattgctacttcattttcatcattagttatagtgcatccttacatagaatacattcactcattgatccagatgtattctatgttagagaagctgcaaattgatgctgagttatgtgtaaattaccaatctctctacgagctatatgaagtgaataatgatattctcataccatttttagaacattttctttttctgtccctctatatcacattgttcatcttatcccatttctttgctaattgtaaaagttttgggggagtagagttatacatttgagagaatagattgaagtcc

SEQ ID NO: 14977 - DNA, 1329 bp, Glycine max
  Clone ID: LIB3049-008-H12_FLI
gggacaaaagacttacttgcccccagcaatcttgagtatccctccaaacccttgtatggctgaagcaaggaaagaagctgagcaagtgatgtttggagccattgaccagcttctggagaaaactggtgtgaaggctaaggatattgggattttggtggtgaattgcagcttgttcaatcccacaccttctctctctgcaatgattgtgaaccactacaagctgagagggaatatccaaagttataatcttggtggcatgggttgcagtgctggacttatctctatagaccttgccaaacagctcctccaggttcatccaaactcttatgccttagtggtgagcatggagaacatcactctcaactggtattttggcaacaacaggtcaatgctagtctcaaattgtctcttcagaatgggtggagctgcagttctactctccaacaagtcttctgatcgcagaagagccaaataccaactgatccatacagtgcgtactcacaagggtgcagatgacagatcatatggttgtgtcttccaagaagaagatgagaagaaaacaattggtgtggcactctcaaaggacttaatggctgttgcaggagaagccctcaagaccaatatcacaacacttggcccattagtccttcccatgtcagaacagctcttgttttttgcaactttggtggctagaaaagtgttcaagatgaaaataaagccatacataccagacttcaagctagcttttgagcacttttgcatccatgctggaggaagagcagtgttggatgagttggagaagaatcttgagctctctgattggcacatggagccttcaagaatgacactgaacaggtttggcaacacttctagcagttccttgtggtatgaattggcctacactgaagctaaagggaggatcagaaagggtgacaggacttggcagattgcatttggttcagggttcaagtgcaacagtgctgtgtggcgtgcattgaggaccattaatccagcaaaggagaaaaatccttggatggatgagattcacgagtttcctgttcatgtgcctaaagtggcaaccattagttcctaagttaaacaacctcttgcatttttttgggaggaggaaattaatttacttgaggttttcattgttaatcttaggaggtgtgcaaaatttagaagagaagattactcccagctgatttgatcttgtgctagtgtgttcaagtcgtaagagtgtgcatacaattattgtccaatgaaatttattacacgatttttcataaaaatgtattacgtttactacttgacctttcaaaggttcgt

SEQ ID NO: 14978 - DNA, 1300 bp, Glycine max
  Clone ID: LIB3049-008-H2_FLI
gaacgtaactcaactgaaaatggatcgagaatggggatcgaagccggggagcggaggtgcggcgtcggcgcagaacgaagccatagaccggcgagagcgtctccggcgactggctctggagaccatagacttggcgaaggatccctatttcatgcgcaaccacctcggaagctacgaatgcaaactctgtctcactctccacaacaacgagggtaactacttggcccacactcagggcaagcgccaccaaaccaacttggccaaacgtgccgctcgcgaggccaaggacgcccccgcccagccccaaccccacaagcgcaaagtcactcttcgaaaaacagtgaagattggacgccctgggtatcgtgtgaccaagcagtatgacccggagacaaaacaaagatctctcctattccagattgaatatccggagattgaagacctcatgaagccgaggcaccggtttatgtcctcctatgaacagagggtgcaaccctttgataaaaggtatcagtacctcttgtttgctgctgaaccatatgaaatcgttgctttcaaggtgcccagcacggagattgacaagtccactccaaatttcttctcgcactgggatcctgactccaagatgttcacgctacaattgtattttaaatccaagccgccagaggcgaacaaaccgcagcctgcctctactgccaatggcacagcaccatctggtgtaccaccaaggcctttgcccccaccaccccaaggtccactaccaccacctccacctcctccacaagggctacctcctggtgcacccatggcaaatcctcctagagctcctccacctccaatgccgggatctatgccacctcctcctatggcagcaactaacggtcctagacctgcaccttctggtggaatgccatctattccacccccaccccctgttgcaagtgggacatcgggtttcaacatgggtgctagacctccatcaatgccacctccacaaggttttccttcccaacccatgcagggccatggtgtccgtcttcctcctccacccccaaacatgggacagtaggtcctcaggctttaggacagcaagcatcattggaagtgctaaacaactgtagtagaatgtgtccgttaaggacttaatgctttgtatggtagaggcaaggtttcttaagcaatacaccaaattacctgtacactcttcattgtgccatttttacatttacaaattaagatgttgaagtatcgagatttttggctttggtggtatttatgtctttggagtgaccgtgtccgc

SEQ ID NO: 14979 - DNA, 804 bp, Glycine max
  Clone ID: LIB3049-010-H5_FLI
acggaggaggagcactctccccgtcgatctcttccaatgctgacacgtgctcattattctcctccgaccatttccgaatgttccagttcaaggtgcggaactgtccacgtggcaggtcccacgactggaccgagtgtccctacgcccaccccgccgagaaggctcgccgccgtgacccccgcaagtaccactactcaggcacctcctgccccgattaccggaaggggaactgcaagaggggcgacacgtgtcagttcgcgcacggcgtcttcgaatgctggctccacccttctcgctaccggacccagctctgcaaagacggaacaaattgccgccgcagagtgtgcttcttcgcccacaccagcgaccaactccgcgtcgtgacggattcatcgtcgtcgtcgtttgtttcctctcccacttcggtgctcattaactcttcgttctccgattcttcgccgtacagcttcgtccgcggaatagttaaactggatgaggaagggtcgtattcgggtctgacccgttgcgtgttcgggtcgccacgtggcgggtttatgagtgtgaatgggtgcgaggaggagcctgcgatggagagggtggaatcggggagagacattagagcggggatatatgcgaagcttagtagggagaattccattggatgagtatcggaactcgtgaaatgaatggattccgtggcctttcatttgggtctgtctgtttgtctctgtacaatatataatgcaattcaataaaataaaactatatgtacatagttgagaaggtagagaccgttttgctccc

SEQ ID NO: 14980 - DNA, 1412 bp, Glycine max
  Clone ID: LIB3049-012-A7_FLI
gaaccaactgagttagattttggtgttatcctttgatataaactaagctctttcatttttccaatattaaaacttccagcttcttccttcctctgtgactcaaactgcatcaaccaagttagtgggattttctataaattgttgtcaatttgtcatgtcatgtatatgagaaactcatgaaaactctggtggtgacttattagttctctcggcaagtaaggatttcaaacaaactaaagttgaagagagtataaatgactttggaaactcttcaatccaatgagttctccaacttcattatctatgacactatctctgcaactccatttagcagccatggctccccagaggctagtttcttggaaagttttgtgaactatcaggagcagcatgaccaccctacatttgataattgcgcaatgaggacccgaaagcgtgaagccagcgaaccagaaagcattggccggaggcagaattcggtggcagtgcaagggaggaagaagaggagaaggaagccaagggtttgcaaaaacacggaagaggctgagacacaaaggatcacacacattacagtggaaagaaaccgccggaagcagatgaatgagcatcttgctgtccttcgttcactcatgccggagtcctacgtccaaaggggtgaccaggcctctatagtgggtggtgccatagagtttgtaaaagagctggagcacctcttgcaatcacttgaagctagaaagctgcaacttttgcaccaagaagtggcacaaaccaatgaaaatacggccatttccaaactcatgcaacctccttttgcacattgtttttcgtatccacagtacacatggtcccagactcctaacaaatacacatccaagaccaaagctgccatagctgatatcgaggttactttaatcgagacccatgcaaatcttcgaattctcaccaggagaagcagccacgggcagctaacaaagttagtagctggttttcaaacgctgtgcctcaccgtcctacatcttaatgtcaccaccatagaccctttggtgttctattccttcagtgctaaggttgaagaaggattccaacttggttcagtagatggtattgcaacggcagtccatcatttgcttgcaagaattgaagaagaggcttccctttgctgttgatcaggttcatctggggacacgagattttagtgaaatgaccaaatcaaccatctacaccaacctcaacagagagagaggggggaaagaatatttgctaatggctttagttttttatttttgtttgtttgatgtccaactgatgtgttaatgctaaactttagttgcagtagatgatggtgttttttaaaagttgcttcaagcaagtacaactaaaaatcaaatgaaaaagaatgttgatacagtttg

SEQ ID NO: 14981 - DNA, 652 bp, Glycine max
  Clone ID: LIB3049-012-B2_FLI
gatataacactgtcactcttacaatctcagctcatagcattcttcttcttccaacgagaatcagtctttgtgttccaaatggctcgtacgaagcaaacagcaagaaagtccaccggaggaaaagctccaaggaagcagctcgccaccaaggcagcacgtaagtccgctccggcgacgggcggcgtgaagaagccccaccgtttcaggccggggacagtggctctgagggagattcggaagtaccagaagagcacggagcttctcataaggaagcttcctttccagaggctcgtaagggaaatcgctcaggacttcaagaccgatctacgcttccagagcagtgctgtctccgctcttcaggaagccgctgaggcctacctcgttgggctctttgaggataccaacctctgcgctattcatgctaagagggttaccattatgcccaaggacattcagctagctcgtaggattaggggcgagagagcttagggtttatgatttacaaagccgtagtgttttctaagggttattattttgcaatcgattccttcagcttagtattagggtgtaagtccttgttttattgtgactgtattggaaactcgtttctgtaacgtgagaaatattaatgttgagtcctctcattttaagc

SEQ ID NO: 14982 - DNA, 1893 bp, Glycine max
  Clone ID: LIB3049-012-H5_FLI
ggagtgctaagagacaatggagctgtgcactcgaaccttcacaagtttctttcttttcaacccttcttcctcttcaaaccccctgtttcttcgtgctaatgccaacgctaaaacacccttcaaattcaattcccttaaactctcatctttcccccctcatattcacctcttccaaccctttctctctcctcacacttcttctcccttcacactctcagctgcttctgcttcttcttcttcttcttcttcttcagttgcagttggcacagaacaggaccgtcttccagcagaattgaatgtcactgaaacagcggaacccaattccagagttagattgcatgtggaggtgccatcattggtatgtgaggattgttacaagagggtcatagcagagtttatgaagcaagcaaagatccctggatttcgccctggaaagaaagttccagaaagcattcttattagttatgttgggagtcaaaatgttcagaaggctactattgaatctatattgaggaggacactctcacatgctatgacatcggttactggaagggctttgcaggactcggtacgaatagtgactaagttttctgagatggaggagacatattcttctcttgggtctcttagatatgatgtccttgttgatattgcaccagaaatcaaatggattcccgataataatgcatacaaaaatttaaagattgttgttgagatagatagtgatatagatgctcacacagcatctgaacaagaatttagaaggcgctataaatccattggtgctctgaaagtggttactgacagagggctacaggttggagatgttgttgtccttgacatctcagcaacaaccattgatcaagatgaatcaaatgttaaaagtattccttctgctgaaagtaaaggctttaattttgatacagaatatggtgaaaaagtattaccgggtttccttgattgtgtaattggaattcaacaaggtgaatcaaagtcttttcctcttgtatttcctgaaacatggaaccaagaaaatcttcgaggtgttcatgctcagtttactgttgaatgcaaagaacttttttacagagatttacctgagctggatgattctattgctgataagcttctccctggatgcaccacagtggagcaggtcaaagacttgttgttacagaaatgccaagaggtggagcaaacagctagagaacaagccactgataatgctatcttagatcaggtttctaagattgtacaagttgatatacctcaatccttgtttgaggaacaaggaaggcagctttatggagccaacctattagaaatacaggcaaaaatgaaactaaatgagcagcagctggcgactctgtcaagttcaaaggctgtgaacgaatttcttgagcatcagaaggaaaatataacaaatttgataaaacagagtctggcagttggtgatatatataggcgtgaaaatctgcagtttgctactgaggaccttgtcaaagaggttgagaattccattgctgaattcaaacgtcaaaaccaagaatatgatgaggaacgggtgaagggacaggttcaagaaatactagaaggagctaaagtgcttgaatggttgagagaacatgcagaggttcagtatataactaaatgagggatgagcactagccaaaacaaatcaggaaaatgaaattgcatgttcatttgaatgtgttttgtttcagcggatgtaagttgtgagaaaatttcttgattgaattttgaagaaagaatattaagaatagaataatgcattacaagtttgtatattgagactttgatgataaattaatagtagataactctaacaaaaaacagtattgaaaaacaccaatatatttatcattacaaaac

SEQ ID NO: 14983 - DNA, 874 bp, Glycine max
  Clone ID: LIB3049-013-F4_FLI
ggaagatggacaaaaatcggcgacgatccaaatccagttctttcatttacggtcctaagtgacacactcgattctggctccgcctcagacgaagaagctcgctctggattctcactcacctgaacggatccttcttcttccttatcgcgaaatccatacttcaaaccctaatcgcgactgcggtttatgatttgtgacacaacacaaagttgacgaaggtggtttttcagcatttgtattctagtattcttctacataagttgaagcgaaaatgaggattatgataaagggcggtgtttggaaaaacaccgaagatgaaatcctaaaagcagctgttatgaaatatggcaagaaccagtgggctcgaatctcttctctccttgttcgcaaatctgccaagcaatgcaaagctcgctggtatgagtggctcgatccctccataaaaaagactgagtggacgagagaagaggatgagaagctacttcatcttgctaagcttatgcccacacagtggagaacaattgctccaattgttggccgtactccttcccagtgtcttgagcggtacgagaagctccttgatgtagcctgtgtgaaggatgagaactatgagcccggtgatgatcctcggaaactgcgtcctggggagattgatccaaaccctgagtcaaaacctgcacgccccgatcctgttgatatggatgaagatgaaaaggagatgctttctgaagcacgagcccggttagccaacacaaagggcaagaaagcaaaaaggaaagctagggagaaacagcttgaggaagccaggaggcttgcttctttacaaaagaagagagaattgaaggctgctggaattgatattaggcagcggaag

SEQ ID NO: 14984 - DNA, 1303 bp, Glycine max
  Clone ID: LIB3049-013-H3_FLI
ggtgtcctattggtggaggaatgcttgttacctactcctttttaagttcccaaattccccaaagaagcctaaggccaaaccaaaccaaacgtatcagaataaacaaagaaagtcctctctctaatggagcggtacaaatgcaagctctgctccagaacattctccaatggcagagccctcggtggccacatgaaggctcacttagccaccctccctcttcccccccaaaaccaacaaccaccactttctccctctgctgctgcttccttctcttctaattcctcttcagaacaagaacaagccacacacgatgaaaagtccctgatttatgggttaagagagaatcccaagaaatgcttcaggctcgcagatcccgagtttgacacgggctctgtcgttcaagacagggagagcgagaccgagtcaaagaacccaactcgccgacgatccaagcgaacccgaaggcccgtgaatttggaacaaaaaaagcccaaactgagtttcatggagtcgcctgagcccgtgagttcggtctccgacacttcccccgaggaagatgtcgccatgtgtctcatgatgttgtcgagagaccgatggagtaagaacaacaacatcaacgttgttaatgttaatgatgaggatgttgtcgaagaggaagaagaagaagaagaagaggaggaggagggtgggagatcagtactagagataaagttgaggagagttcgcgggaagcaccagtgtcagagctgcgggaagacgtttcgatcttcacgcgcattgggcagtcacagaagcatttgcgaaggttcgggtaacgatagtaaaatcttccaatgccccttttgttccaaggtgtttgggtctggtcaagcacttggtggccacaagagatctcacctcatgccttcttcttccacaaccgctaataatgattctgttagattgaaagagagcttcatagatctcaacttgccagctccgcccgaagatgacgaccttagtgttgtttctgatgcctgataattacttgttcttctctgcagcaattgggtaaagtccttttctttttttatagtaggtaacgatatttcattgcggttcattgttagatcagatgcttttgatgctacaatcatagcttataatttatgctctattgtgcctagattctcaactaaattgttactctaggtaacatcgtaatcaattaatataagattattttattttaattaccctgatctcaagtttgtgtttttaagtataattctacttaactccatcatcattactttgatttccc

SEQ ID NO: 14985 - DNA, 906 bp, Glycine max
  Clone ID: LIB3049-016-F10_FLI
ggcacaagcaaagttctcccacaaacctcttctttctcttcctcccaaacatgtttctctttctctctctctctcttaattcctgaaaagcaagtagctaaggaaaacaaaaacatcatcacagaaactcacaaaggaaaaacaaacaaacaaacaaaatgtcttctccaagcaagcggcgagaaatggacttgatgaaactgatgatgagtgactacaaggtggagatgattaatgatggaatgcaagagttttatgtgcacttccatggacccaatgagagtccttatcatggaggtgtatggaaagtaagagttgagctgccagatgcttatccttataaatctccttccataggctttatcaataagatctatcacccaaatgttgatgagatgtcaggatcagtttgtcttgatgttatcaatcaaacctggagtcccatgtttgatcttgtcaatgtgtttgaggtgtttctaccacaacttcttctgtatcccaatccatcagaccccttgaacggagaagctgcagctttaatgatgcgtgatcgagccacttatgaacaaagggttaaagagtactgtgagaagtatgctaaacctgaagacataggagctgccacagaagagaactccagtgatgaagagctaagtgaagatgaatatgattctagtgatgaacaggttgctggtaaggcagacccctagccttgcatgcatgttcctgttcttctcattctatcttaacttgtgcatgatgttctagtcatgttaatttacctcattaaatgaaatgtacttggttgtggataggggaaaattctccttcctgttatttagtttaccctgtaaataatgtatcattgatttcctgatgcaatcttatttattcttaatctcctct

SEQ ID NO: 14986 - DNA, 753 bp, Glycine max
  Clone ID: LIB3049-016-F3_FLI
ggcattctattcattcaagattcagcaagtgcgttttggaagcagagaccgaaatacttcgagatggcccgtacaaagcaaactgctcgtaagtcaactggaggaaaagctcccaggaagcagcttgcaaccaaggctgcacgtaagtctgcaccaacaactggtggtgtgaagaagcctcatcgttatcgccctggaactgttgctcttcgtgagattaggaaataccagaagagcactgagctcctaatcaggaagcttcctttccagaggttggttcgtgaaattgcccaggatttcaagactgatctgcgtttccagagccatgctgtgcttgcattgcaagaggctgctgaggcataccttgttgggctctttgaggacactaacttgtgtgccattcacgccaagcgtgtgactattatgcccaaggatattcagctggcaagaaggattcgtggtgagcgtgcttgagttggtgcgttctgtgtttgtgaagatggattgttggtggctgcggatggtgttttgttactaagttttctttttgttgaagcctataggttattagggaaaaataggtgtttacttggtagtcatattaattgtcattggcaaatactgcctaagacactgtgaaggtctggttgttagaaatttggcatgtatttgatttttttggatcctttatttctcgttttatttctggttgtgcagccactttgggaattgtattggacaactttctgttac

SEQ ID NO: 14987 - DNA, 550 bp, Glycine max
  Clone ID: LIB3049-017-A12_FLI
gggtgacaagggagcaagggtcctttgattggttcaaaggggtgatgaatgaggtggctgaagaggatcataagggggtgattgagctccacaactattgcactagtgtctatgaagagggtgatgctcgctcagctcttattgctatgttgcaatctctaaaccatgccaagaatggcgtggacattgtctctggcacgcgtgtaaagtcccactttgctaaacctaattggcgcgctgtctacaagcgcattgcggttagtcatccacgagctcgtgttggggtattttactgtgggccaccagcgctaaccaaagagcttggtcagttagcttcggatttctctcacaacacaaacacgaaatatgatttccacaaggaaaatttctaataagatggagattgttgagggcaagatggtcttccagctttatatcacaccatgaagattattacaccatatccttgttgataataattaatccatgtgcttcaatgtaggaataataattacggatttgtataattgcgaaagctttgctttaagac

SEQ ID NO: 14988 - DNA, 810 bp, Glycine max
  Clone ID: LIB3049-018-F7_FLI
ggggcgaagaaatgtggcgacgttcttgtcgggacaaggacaagggaagaggttagcttccatccatggcagagtacgaaaggagcatccagcaccagtcgaaagaaacagccttccaggccctgaacaccataatccagctccacttcgagaaaaccctggagaagaagcgtgccatcgacctccagaagaaggagctctacaagctcttccagatattcttcatcttcctgggcctcgtcttcctggtcctggcccagtccccccgcctccaatgccgccactgctggatccccatcaccctcctctccatcgcccacctcatcttctacgtctccgtcgcccaaaccctaaggtgcatcaacgccttcaagtaccagcgccgctgccacaagctcaccctcggcttggccaccgagaaactcagggacatcaagatcagaatcgccgccgcctccgccgccgatgccgactacgattccgttgttgccgacgacgagttcgagattcactaccaggaaccccctgagacctatttcggaaagtttaagaggaattgggctctgcattttggcttcttgatcttgatctacgcttttatgatctcttcctctgtcgttcttctttgcttttaatttccacttcagtgttagttctggaatcaaatccattctcttatcattcgttctgtgcattttttatttattttagcattaacagtcatttaccgagaaacggttagatccgtagattgctatggccagtcaaaaggtctatattgctttatagtaagtagcctatggttatgac

SEQ ID NO: 14989 - DNA, 983 bp, Glycine max
  Clone ID: LIB3049-019-H7_FLI
gatcgcacaacattattctttcgcaccttgcagaatcaattttctctctcaatcgtctttcatggctcgtaccaagcaaaccgctcgcaaatccaccggtgggaaggctcctaggaagcaactcgccaccaaggctgcaagaaaatctgcacctaccaccggtggagtcaagaagcctcatcgctatcgtcctggaactgttgctcttcggtaatttgctcctttcagtaattgttttgttttttcttctccttcgcgttttgaattttcgcgaattattgttttttttttcgtggtttcagtgagatccgaaaataccaaaagagcacagagcttctgatccgcaagctcccctttcagcgtcttgttcgtgaaatcgcgcaagacttcaaggtatgttctaaattcaaaaccaaggttttaaatattggttgcggtcctgttgtggtttcattgagaccgttgatattgcagcaaatcactgacattttttgttgatatcgttgccaatgtgaccgatatgattccaggtcgtgaacagttaaaaccatgttcaaaaccctagtttttgacccatacctttttttaattattataattaagtttttgtcttttgtgcagactgatttgaggttccagagtcacgcggttcttgcgcttcaggaagctgcggaggcttacttggtgggtttgtttgaagacaccaacctttgtgcgatccacgccaagagagtgaccatcatgcccaaggacattcaactcgcacgccgcatccgtggagaacgtgcttaggcttataataatgataatagcatagttgtcgccttttcgttttgcaatacatttcttgtttcttagggttttagtgttattttccagtttgttatgttttgtatagaagatagatatatcaacagcaacagcttcttaccatttgtagtgtgcctaaacggaaatatttgaataattagattcactttgac

SEQ ID NO: 14990 - DNA, 950 bp, Glycine max
  Clone ID: LIB3049-020-F8_FLI
gggggaagagaaatgagaagatgggcaccaccttgatgagatgctcccacgcaaacgctctcttcagagctctcaaacccaaaccccgcaattcttcactgccactttcttcaatggccatcaacaaaggtaatagtaataaggcatatgatgcattgctgttggatgctgggggcaccctattgcaattggcaaagccagttgaggagatttatgccactattggatccaaatatggtgtgactgtggatccagctatgataaagcagggatttaagagagcatttgctgctccgtggcctgaaaagctgcgctaccagggagatgggaggccattttggaaacttgtagtttctgaagccactggttgtggagatgaagattattttgaggaagtttatgagtactatgcaaaaggtgatgcgtggcatcttccagatggagcttttgaaacaattacttttctcaaggatgctggagttaagatggctgttgtatctaattttgacaaccgcttaaggaagctattgaaagatcttaatgttttaaatctgtttgatgctgtcattatatcatcagaggttggatatgaaaaaccagatccaagaatattccaagctgctcttgatgaagtaaatgtagaggcttgcaaagccttacacattggagatgatcagaaggcagataaactgggggccaatgctgtggggattgattgttggttatggggtatagatgtgaagacattctctgatatacaaattcgaattcttaattcagaggcataacacttgatgtggtttgtagctctgatttgatcatgctgataactagctagcattttaattaggtggatgactaacactgcccttcttaattttctatgcatgatgtaaaaacatatgtgaccaccttgtttgccaagtttggtaaataatatgttgcaaccc

SEQ ID NO: 14991 - DNA, 1967 bp, Glycine max
  Clone ID: LIB3049-020-H4_FLI
ggggacaggacgggagtgttacataaagcgttagcctcactcatcactgcgactccaatggagcctcccacatcctacatttccaccgatgaacttcgcaagcataacacgcgccacgacgcctggatctccatccacggcaagatctacgacgtctcctcctggctccaccgccaccccggcggccccctcccactcctcaccctcgccggcaccgacgccaccgacgccttcctcgccttccaccctcccaacaccgcctccctcctcctccccgccttctccacctcccaccgtctttccgaccacaccgtctccgccgcctcctccgactaccgcaagctcttctccgacctctccgcgctcaacctcttcaaccgcaagggccacacaacctccatcctcctctcccttattctcaccctttttcctctctctgtctgcggcgtcctcttctccgacagcactttcgtgcacgtgctttccgctgcattgataggctttctctggattcagagcggctggataggccacgactccggccattacaacgtgatgctcagccgccgcctcaaccgcgcaattcagattctctccggcaacattctcgccggaatcagcatcggctggtggaagtggaaccacaacgcccaccacattgcatgcaacagcctcgactatgaccccgatctccagcatttgcccttcttcgtcgtctcctctaggtttttcaattccctcacttccagattctacgacagaaagttgaatttcgattcctttgctaggtttttggttagttaccagcactggactttttaccctgtgatgtgtttcgctagggttaatctgtttgcgcagtcttttttcttgttgttgtctaagaggaaggtggagaacagaggcagtgagcttttgggtttgcttgcattctgggtttggtaccctttgttggtttccttcttgcccaattggtgggagaggcttttgtttgttttcgtgagtttctctgttacgggtattcagcatgtgcagttctgtttgaaccatttttcttctgaggtgtaccttgggccccccagcggcggcgattggttcgagaagcagactaaggggactcttggtgtggactgctctccttggatggactggtttcatggagggttgcagtttcaggtggagcaccatctgtttccaaggctgccacggtgccatttgaggaagattgcgcctttggttaaggatctttgcaagaaacatagtcttccttataattgtgtgtcgttctggaaggccaatgtgctgacgattcagaccttgaggaatgctgctttgcaggccagagacggttccaatccggttccaaagaatttggtttgggaggctgttaacactcatggatgaatgggggacctgagtggagtttcgtgtgattttgctgtcattgatagtttgatggaggtgtggtggtacttggtaggtagggacgaaattttatgtagttacataggtgcttttggtggtgttctcctatcagaattggagttttatatcattattaccttggattaccaaggtaaaacttcaaatcctgttggaggaaaagaccaaacgcatctaagaaactgcataagttttgtccggtaggtaatccttggtgagaataattgatttgcaaattgcttagaggcttcggttactcattgtcttggtagcgggaatggctagtctccttttggaaataggtaatgctcagcacttcatgcttgggaatgtaagcacggtttattctcgctttggccgttggccgtttgatttctttataagccaagggtctctattgttacataaccatttgtgttatgcctttgaatacattgtcatttggagcaagaaatgtactgtatgttaatttcaggttcagattcctgaatgaatgtcattccctgcttcttgtttagttcccg

SEQ ID NO: 14992 - DNA, 635 bp, Glycine max
  Clone ID: LIB3049-021-H2_FLI
gggatcggagtaatgattaacaggggctctgttgaatgtagaacgctgctgccgaaacccttcccgatccctaaggtaagtgagtaatcggtggttgagaatggtggagaaggcgaagggtaggaaggaggaggtggttaccagagagtacaccattaacctccacaagcgcctccatggctgcacatttaagaagaaagctcctaaagctattaaggagataaggaaatttgcccaaaaggccatggggaccaatgatgtgagggtggatgtgaagttgaacaagtttgtctggagccagggaatcaggagtgttccaaggaggattagggtaagaattgctcgcaagaggaatgacgatgaagatgccaaggaagagctatactctcttgtcaccgttgttgagattcctaaggatgagctcaaagggttaggcaccaaggttattgatgatgaggattgatttgtatttgtttgaaccctggagacatatatgtaggttttttgtttctgcaattcagtcttgtttttctaggttatcaaattactcctaattttgttgggttacttcgaattttgttgagacataatgtggcttgataatatcaattttagcttctgcccctgcagtttgc

SEQ ID NO: 14993 - DNA, 1320 bp, Glycine max
  Clone ID: LIB3049-022-A10_FLI
gatgaggaaatcgtggcaaataaaggaccacctgttttgtccatggaggagaggctggcccttgtcagtggattgaagtgggtggatgaggtcataactgatgctccttatgcaattaccgagcaattcttgaatcgtctctttcatgaatataaaattgattatgtcatacatggtgatgatccttgcttgcttccagacggaactgatgcatatgctgcagcaaagaaagctggtcgttacaagcaaattaaacgtactgaaggagtttccagtacagacatcgtaggaagaatactgtcttctttaagagatcaaaaaaaattgtgaagatcataatggcaccgaggtaaaacctcaagaagaaaaccagtcaaaggcttcccacatagcccaattccttccaacttctcgacgtattgtccagttttcaaatggcaagggtcctggaccaaatgcacgtattgtatacattgatggggcatttgatctcttccatgccggccatgttgagatacttaagagggctagggagcttggtgactttcttctagttggtatccactcagatgagacagtgagtgagcatagaggaaatcactatccaattatgcatctgcatgagcgtagccttagtgtgttagcttgccgttatgttgatgaagttattattggttcaccttgggaaattacaaatgacatgatcaccactttcaatatctcagtagttgtgcatggtactgttgctgagaagacattaaattgtgaattagatccatatgaggtccctaagagcatgggaatattccacttgctcgaaagcccaaaagatattactactgccacagtagcccaaaggataatggctaatcatgaagcttatgtgaaacgcaatgctaagaaaactaggagtgagcagagatactacgaagagaaaaaatacgtctctggagactagagtgtatataatgatcttttacattagtttggtactgctcttcaagtttgaccctgtcacagagatgctacctatagtatgaatctagacacgctttgtgaaggacatgtggtgcagggtatgtataacataggagtggtcataactcaggaataccgatgtactttaatgtcctgatgttttacttttgtcatctgaaaggcaaccatgtggtttgctcaccagttttatgccatttggtttttgctatggttttggtgtttttagtgtactccagttccagttagagattccttactctgatagtatatatattgtgactatcagaagttatacgcatcagaatggctttgcctttatgc

SEQ ID NO: 14994 - DNA, 1792 bp, Glycine max
  Clone ID: LIB3049-022-B12_FLI
ggtagctgtgacaagaacttcgtccgagaaatattcagaattttgcatgccaacctcagatttgtctaaggagcaatgtaaatcatgtgatatttgcagacgatcagagtttattttaaaccctatcctagtgtgctctggttgcaaggtttcggtgcacttggattgttatcgtagtgtgaaagaaacaacaggtccgtggtactgtgagttatgtgaagatttgtcctctagaagctctggggcagctgctatcaatttctgggagaagtctgttgtagaatgtgctctctgtggtggtactactggtgcttttagaaagtcttctgatggtcaatgggttcatgccttctgtgctgagtgggtttttgagtctacattcaaaagaggacaaatagatgctgttgaaggaatggaaactttgcaaaaaggagttgacatttgttgcatctgccaccacaagcatggtgtatgcatgaagtgttgctacggtcattgtcagaccacattccatccatcctgtgctagaagagctggtttgtacatgaatgtgaggcctactggtggcaaggctcaacacaaagcttactgtgaaaaacatagtttggagcagaaggcaaaggctgaaactcaaaaacatggaattgaagagttaaaaagtatcaggcagattagggttgaactagagagattacgtctcctttgtgaaagaattgtcaaacgtgaaaaaataaagagggaattggtaatatcttcacatgacatactggcctttaaaagagatcatgttgctaggtcggtgctggctcgtagccatttcatccttccggatggtagttcggaatcagctacaacgtcccttaaagggaacacagagggttacagatcatgcagtgaaccactccaaagatcggatgatgttactgtggacagttcagtttctgccaagcgccgtgtcagagtcgccatatctatggacacagacccaaaattggacgatgactgctcaacctctcaaagtcgatacaaccacaagattcttgatagatcacaattttctggcaagaaagttcctcagagagccgctgcatcacgcaatatttccgatgaaggtggatggagatccaaatctagaaagcattcggagacattcggaaaagagcttgttatgacgtcagatgaagcatctatgaagaattcaatgctacctaaaggatatgcatatgttcctgctgattgcttgtcaaatgagaagcactctaacgaggacgtatatgctagtgaaccagtggagcatgataggtagagtgttggatctcagcctggttctttatttttccttcgaggctgacatccataatattgaatgccatgctatttttctcgtggggaagttttatttgagaatatggcaaaatgtaaagataggctttttgctctggcgggggctagttttgttagcattgtacattccttatgagagtaaactgtacagtggatgagcatttcttgcatttacttgtattagaagggtatgcattccgttttattgacacatttgtgggaaggactaaacggaagcattccttgtaatcatacaagggaagatcggggaatcacctgtttttctgtaaagttgatgtgtacatattttatggcagtcttagtaattctgaaagggatcgtgctcgatatcagatccaccgagcatacaaattatacttaactcccacctcataaatttgtatttccccctttatcctgcatttctattatgatgattcttgcgacc

SEQ ID NO: 14995 - DNA, 1091 bp, Glycine max
  Clone ID: LIB3049-022-F9_FLI
gactcgcagttgtattgttgaacaagggtttctctgtctgcttcttcactttctctcgtttcaatcgaaaccaaaacaaaaacatgggcagaaaattcttcgtcggtggcaactggaaatgcaatgggaccactgaggaggtaaagaagattgttactactttgaatgaggctaaagtccctggagaagatgtcgtagaagttgttgtgagccctccttttgtgttccttcctgttgtaaaaagtttgctgcgccctgattcccatgtttcggcacaaaactgttgggttcgcaaaggtggtgcttataccggtgaggttagtgctgaaatgcttgttaatttgggaattccttgggttattattggtcactctgaacggaggcagcttttaaatgaatcaaacgagtttgtgggagataaagttgcctatgcacttcaacaaggtctaaaagttattgcatgcattggggagactctcgaacagcgtgaagctggtacaacaacggctgttgtttctgagcaaacaaaagcaattgcagctaaaatatcaaattgggacaatgttgttttggcctacgagccagtttgggccattggaacaggaaaggttgctactcctgctcaggctcaagaggtccatgctgatttgaggaaatgggttcatgacaatgtgagtgccgaagttgctgcatctgtaagaattatctatggaggttctgtaaatggaggaaactgcaaagaattggccgcacagcccgatgttgatggatttttggttggtggtgcctccctgaagccggagttcgtggacatcgtaaatgctgccactgtgaagaagaattgaaattcgtagttaggaactgatataatgctgcctttcaagctgcttcggaaattgctgtttttgagttttggatctgtgctttgtggccaatgttttgaactctgtttagtactgaataaacacgctttcctttgagatctcatccataggcgatcaattggattttgattaaatttctgaatgcaaaaatagtgtaactaccataacatttggtgggtaaataatgttgaacgcctagttgactac

SEQ ID NO: 14996 - DNA, 1161 bp, Glycine max
  Clone ID: LIB3049-024-H1_FLI
ggggtttgatcttcttgatatatgcatcaatgggccaaaagaaaagttagattccaccgttattagccagcctgctatttatgtcacaagtcttgctgctatagagctacttcgtgcacgtgaaggaggtcagcagattattgactcagttgatgttacatgtggtttaagcctgggagaatatactgctctggcatttgctggggctttcagctttgaagatggactcaagttggtcaaactgaggggagaggccatgcaggatgccgctgatgctgctagaagtgctatggttagtgtgataggactggactcagagaaggtccaacaattgtgtgatgcagccaatcaggaagttcctgaagctgagaaggttcagattgccaattacctgtgcccaggaaactatgctgtctctgggggattaaaaggagttgaagtgctagaatccaaggcaaagtctttcaaggctcgaatgacggtgcgcctagctgttgctggtgctttccacactagttttatggaaccagctgtgtcaagattggaagcagcattggcaacaacagaaatcagaaccccaagaataccagtcatctccaatgtgaatgcacagccacatacagatcctaacacaataaagaagatattggcacgccaggttacttcacctgttcaatgggaaacaacagtgaagactcttctaaccaagggtctgaagaaaagctatgaactgggacccggaaaggttattgctggaatcgtcaaaagaatggacaaaggtgctgatattgaaaatatcggtgcttaatgtggggaccttgctccttcttcgggttggaatgaacaaaactaaattgtgttagctataaatcaggatgcgtggaacttgaagctttgaaagcaaggagcagctacagtcatatttgaatgccagttttgaagttaagatgttaaattataattcacgagttagataagtgattgtacttggcactagaattttttagtttttctaatcttatattcaatctgtctcggagttaattatgcctatgcttctttgtaccaaatatagcttttggcctttacacaggcttaataataattagaagaaacaacactttccattcaattgttatggcaggtagaatttgtaaggct

SEQ ID NO: 14997 - DNA, 781 bp, Glycine max
  Clone ID: LIB3049-024-H6_FLI
gagacccaattgcgtcaaattcacgatgatcaccatcatgatggtcgccgacaccgtcgccgtaaccgccgccaaaggcctcggcgtccttcgggcctatcaatccacctgtaacttttccgtcgccgatcagatctccgccatgattcagacttacgacgccgtcgcgccgccgccggtcaagcctactacctacaggctaagacgccgaacgctcctccggagaaaacaacttaccaaacgcagattatcaggtgacgactccggggacgccgggaacgaggggttcctcttcggtgacggcggagacggtccttttggaggtggaggtgacttcggtggcggcggcgtcggtggtggtggttggaatttcaatagatttgggggtggaaacaattgggatgaaccgtcatcttcggttccggaccctgcgttcgatttcgtgtatcaggtgctgtcgtggattatgctctcgaattgcttgcatttttcgttcaagaggattgttcgaattgttgcagcggggtcgattgtggattccgatagggaaaaggttcccgccagattggttccaatttgctgatttggtacccttttaagccggttcatggatcaaatcatccataattacgcattgcatccctgtttaaattgtgcatttgctgtaaataatgttgtatataataatttatcatttaattgactaattccaaggtaattattttgctgtacttatggtttgtcttagtgaattgtttataatttgatagatagtttggac

SEQ ID NO: 14998 - DNA, 948 bp, Glycine max
  Clone ID: LIB3049-025-A9_FLI
ggcaggagggatacggtgagaaagaacagtccagtggtggcacagcgtttgtcaacagatcataatgtagctgatgaagaggtgagaaaagaagttgaagctctccatcctgatgactcgcacattgtggtttataaccgtggagtttggaggattaagggcattatacaggtgtcaagatctatcggtgacgtgtatttgaagaaacctgatttctaccgagacccggtttttcagcagtttggaaatcctattcctttgaagcgtcctgtaatgacagctgaaccatcaatcattattagggagcttgagtctcaggatttattcttgatatttgcatcagatggcctctgggaacaattaagcgacgaggcagcagttcagatcgttttcaaacatccaagagctggaattgccaagagactggtgagagctgctcttcatgaagctgcaaagaagagagagatgagatacgatgacataaagaaaattgacaaaggaataagacgacacttccatgatgatatcactgtagttgtaatctatcttgatcaccatgcaggctcctctaatggtagatttaagcaaactggtgttgactatacaactgcccctgttgatattttttcccttaatgcggatgaagcagaaaagcgtatgcttggtacagttgcctaaagagtgaagttgcttcaaaggttcatacactgacattatttgaggcgataattatttatagttgaagattaatattgttggtaaatgaagagaattctcgagaaaatatataaattactgcatagatatagtagctgggagttgctgacagattctttctggtgatatgtatatgtatagttgtgaagtctattttttgggtttgatggtatcagttttgtttttctttggaaagaaagaaaataaaattatattgattgggttagtcac

SEQ ID NO: 14999 - DNA, 1451 bp, Glycine max
  Clone ID: LIB3049-026-G7_FLI
ggggagcaagagtgaagagcgaagagaatggctcccaagggtttaatctttttggctgtgttatgcttctcagcactgtcactgagtcgttgtcttgcggaggataatggacttgttatgaacttctacaaggaatcatgccctcaggctgaagacatcatcaaagaacaagtcaagcttctctacaagcgccacaagaacactgctttctcctggctcagaaacatcttccatgactgtgctgttcagagttgtgatgcttcactgttgctggactccacaaggaggagcttgtctgagaaggaaacagatagaagctttgggttgagaaatttcaggtacattgagaccatccaagaagctttggaaagggaatgcccaggagttgtttcctgtgctgatatcctcgttctctctgccagagatggcattgtttcgctaggaggtccccatatccctcttaaaacaggaagaagggatggtagaaggagcagagccgatgtggtagagcagttcctcccagaccacaatgaatccatttctgcagttcttgacaagtttggtgccatgggaattgacacccccggcgtagttgcattgcttggagcacacagtgttggtcgaacccattgtgtgaagttggtgcaccgtttgtacccagagattgatccagctctgaaccctgaccacgtccctcacattctgaagaagtgccctgatgccattccagaccctaaggccgtgcagtacgtgagaaacgaccgtggcacccccatgattctagacaacaattactacagaaatatattggacaacaagggcttgttgatagtggatcaccaactagccaatgacaagaggaccaagccttatgtgaagaaaatggccaagagccaggactatttcttcaaggagttttctagagccattactttgctctctgagaacaaccctctcactggcacaaagggtgagatcagaaagcagtgcaatgctgccaacaagcaccatgaggagccttaattgcttcccgcttaatttgggccttgaattttcttccccttctctatgtggaagaaatctgtaagatattatgcaaaaaataattaaggtgtttttctttaaatgggttggttgattggttcaatgaaccgatcaagaccacagcaggttcatggggatgcgaggattaagacgctttgttttttaatcttccgatgtcactcttgtttgttagtttgtttttttattttttatttcaataagtactgtgcaagtaggttagagttgggtagaagggcatgttcatggtgttaattactatgttatgtatgcatgtgagtgctgctatcgatggcaagatgtcaatgtatgcgtgtagtgctgttatcgatgagagtgaaaatgtttatgatatccacactaataaagctagcttgttcttgctacgc

SEQ ID NO: 15000 - DNA, 721 bp, Glycine max
  Clone ID: LIB3049-028-F4_FLI
gaacgcatcctaaataagcatcttaattcatagtctcttggtccttccttccttcttctgctcaataagtgtgtgccactctaattaattaccacccccttctagacatagttcttctccctctgttctctattctctacactgtgaaaccaagatgaaggtagcatttgcagctgttctacttatatgccttgtcctcagctcctccttgttcgaggtgtcaatggctggttctgctttctgttcctccaagtgctcgaagaggtgttctagagctgggatgaaggacaggtgcatgaagttctgcgggatttgctgcagcaagtgcaactgtgtgccatctgggacttatgggaacaggcatgagtgcccttgctacagagacatgaagaactccaagggcaaggccaaatgcccttgattatttttttttttcaccatccacacatcaacttcaagcctttgattcagtcactaccgtgcatgtatatctccaccttagagatattccaccatggacccttgctagctgattatgtttactacctttattgttgtgtttgtgtattacataaagagaaaaatttggtcactttagttggatcggatatgcatgatacatgagagtgagaataaatcggggtcttctttgtcctcgtgtgaatttggtctgtcttaattaggctctatggatagttaataaaaatgaattctccttttg

SEQ ID NO: 15001 - DNA, 667 bp, Glycine max
  Clone ID: LIB3049-029-D2_FLI
gacatcgcacaacattactctttcgcaccttgcagaatcaattttctctctcaatcgtctttcatggctcgtaccaagcaaaccgctcgcaaatccaccggtgggaaggctcctaggaagcaactcgccaccaaggctgcaagaaaatctgcacctaccaccggtggagtcaagaagtctcatcgctatcgtcctggaactgttgctcttcgtgagatccgaaaataccaaaagagcacagagcttctgatccgcaagctcccctttcagcgtcttgttcgtgaaatcgcgcaagacttcaagactgatttgaggttccagagtcacgcggttcttgcgcttcaggaagctgcggaggcttacttggtgggtttgtttgaagacaccaacctttgtgcgatccacgccaagagagtgaccatcatgcccaaggacattcaactcgcacgccgcatccgtggagaacgtgcttaggcttataataatgataatagcatagttgtcgccttttcgttttgcaatacatttcttgtttcttagggttttagtgttattttccagtttgttatgttttgtatagaagatagatatatcaacagcaacagcttcttaccatttgtagtgtgcctaaacggaaatatttgaataattagattcactttggccg

SEQ ID NO: 15002 - DNA, 1554 bp, Glycine max
  Clone ID: LIB3049-029-F5_FLI
ggaatgaaaacgagagtgaagcagctaagaggggaagagcgatggaaggtgggtacggaaaccgtggttcctctttctcccaatcacgtcgtggtcgaggtcgcggtcgcggtcaaagatttccttcgaatcaatccaaagtttcaagttttgccgaaaggggcactccttcttctagtagtgccaacagagcttctgcctctgttatcagtaacacgctagaagacgacgcacaaccatcttccaattttgttggaacatgtccttacatgtgcccagaaagagagaggatccagcgtgaaaaactgcgagatttggcaatttttgagaggctacatggaaatcctggaaaatcatccccagctcttgctgtcaagaagttttgcagaactatatccaccaaatatgttcaagcatcagatatgcggcctattactgttttggaagacactttaaattaccttttgagtttgctggaatctaaagagcatttgtctgaagtagttcatgactttgtcttcgatagaacgaggtccatacgccaagatattaccatgcaaaatattgtaaacaagaaagcaatttacatgtatgagggaatggtcaaattccatgttgtatctcattacaagctttggtgttctatgtctgatccaaacactgcatcgttgcatcatctcaatatggaacagctcacaaagacattggcttctttgttcaatctgtacgaagcaaatcaaaattcaaatcatgtgcatgagaatgaagctgagttccattcattatatgtgctgcttcatcttggttcttacagccaaccgatgggggagccactttctttgtggtttcaacgtgtatcaactccagtattgaagtcaaaagaaatgtgttttgctaggagaatcttacgatcatttcgacttggtaattataaggatttcttctgtactgcagcagctcaggcatcatatctgcagttctgcattatgatgccttatatcaatgaagttcgtgtgctggctttatcttgcataaattttggtggatacaagcttcatccatatcctctgttggatctttcaaaactcctgttcataaaggaatcagatttagaatccttttgcaatcattgcggtcttgagactggtacagatgaatctggaaataagctacttcccacaaagcaaactacattcagtcatcccaaaggtgggttccaaagatatagtttcttgggcttgcaagaatatgaaaggtagtttcagagcttttgtagatcctggatggccacacctattttcactactttccctaggtattatcgagatcatacttggtgttggtgatacaatgtgactatgatcgttcacaagtgtctctttgtggtgcttttgaaaacatgggaacaaattgtactatacacaactatttttgcacccttatgccttattgtacattgagtctgtatttggtacgcgacaattgtataactctttaagctatctgtaaaccagtgtatgtaacattattatggtaaggtttctctttacttgc

SEQ ID NO: 15003 - DNA, 628 bp, Glycine max
  Clone ID: LIB3049-029-G6_FLI
ggttgtcttattgtttgtagatgattaaggacgctttgattgctctgaacgagaaaggaggatcgagtccatatgcgatagcgaagtacatggaggagaagccaaggcggtgcttcctgcgaatttcaagaagatactaggtctgcaactgaagaaccaagctgcgagagggaaactcgtcaagatcaaggcttcgtacaagttagccgaagccgcgaagaaggtgaaggagagcaccgccaaagcgacgaaggaatcgcgtccgaaacgaaacaaaatcgcaaccgccgttgctccgaagaaaaccgaggcggttaaaaagcccgcgaagaaggtcgggccgaagaaaacgaagaaagtgtcgacgcctgcgaagcccaagcagcccaggtccattaggtctccgaccaagagggcccgtaaagctgccgtcgctgcggcttgatgtttgatgtttttcttgtttagttaaaactctggcatataatatatgtagatatgaaaaggtgtgtgttaaccttgttgcacaatcttgaatatagttgtgtggtttaggatcgtagatagtttagtgttctgcaatgttcgctctaagaagtgatcaattggagatgaattttactgttag

SEQ ID NO: 15004 - DNA, 794 bp, Glycine max
  Clone ID: LIB3049-030-E8_FLI
ggaacctttgcattctattcattcaagattcagcaagtgcgttttggaagcagagaccgaaatacttcgagatggcccgtacaaagcaaactgctcgtaagtcaactggaggaaaagctcccaggaagcagcttgcaaccaaggctgcacgtaagtctgcaccaacaactggtggtgtgaagaagcctcatcgttatcgccctggaactgttgctcttcgtgagattaggaaataccagaagagcactgagctcctaatcaggaagcttcctttccagaggttggttcgtgaaattgcccaggatttcaagactgatctgcgtttccagagccatgctgtgcttgcattgcaagaggctgctgaggcataccttgttgggctctttgaggacactaacttgtgtgccattcacgccaagcgtgtgactattatgcccaaggatattcagctggcaagaaggattcgtggtgagcgtgcttgagttggtgcgttctgtgtttgtgaagatggattgttggtggctgcggatggtgttttgttactaagttttctttttgttgaagcctataggttattagggaaaaataggtgtttacttggtagtcatattaattgtcattggcaaatactgcctaagacactgtgaaggtctggttgttagaaatttggcatgtatttgatttttttggatcctttatttctcgttttatttctggttgtgcagccactttgggaattgtattggacaactttctgttgccatctaatctagttgaagctagcttatcgtgct

SEQ ID NO: 15005 - DNA, 854 bp, Glycine max
  Clone ID: LIB3049-030-F8_FLI
gattgcaaacttgatagctagagtgcctatggagaacatactctatcttggtggtccaaatattgcctcagaaatctacaacaaggagtatgccaatgcaagaatctgtggagctgagaaatggcggaaacctctggcgaagtttttacgacaaccacactttattgtctgggataacagtgacctcgtcacgcatgaggtcatgggtggcttgaaaaatgtctatgcaataggagctggaatggtagctgcccttaccaatgagagtgctacaagcaaatctgtgtactttgcacactgcacgtcggaaatgatatttatcactcatttgttggctgaagaacctgagaaacttgcagggccattgctagctgacacttatgtgaccttgttaaaaggccgtaacgcttggtatggccagatgttagctaagggtcaattaagaccagacatgggtgacagtattagtggcaaaggaatgattcagggagtgtcagcagtggaggcattctttgaacttctgagccaatctagcctgaatgtgttgcatcctgaagaaaacaaacctgttgctcctgtagagctctgccctatcttgaagacactctacaaaattttgatatcaagggaacagtcatcacaagctattctgaaagccttgagggatgaaaatctgaatgatcctcgtgaacgaattgagattgcacaaagccatgttttctacaagccttcacttcttggacaaccctgattgttttctcattggcaaaagccaaatgtggatgcaactatatatggaagcatttgtcaactcaaagagaatatttaaatgagcatgaatgtattgttttggg

SEQ ID NO: 15006 - DNA, 1504 bp, Glycine max
  Clone ID: LIB3049-031-B6_FLI
gatggaaacattgttgcctctttgttagcacataaattaggagtaactcagtgtaccattgctcatgctctagaaaagaccaagtaccctgagtctgacatttactggaaaaaatttgaagagaaatatcacttctcatgccaatttactgctgatctttttgcaatgaaccacacagactttatcatcaccagcaccttccaagagattgctggaagcaaggacactgttggacagtatgagagtcacactgccttcacccttccaggactctaccgtgttgttcacggtattgatccctttgatccaaagttcaacatcgtctctcccggtgccgacatgagcatatacttcccatacactgaaactgagcgtaggttaacagagttccaccccgacattgaagagcttctttacagctcagtggagaatgaagaacacatatgtgtattgaaggaccgcaacaagccgatcatcttcaccatggcaagacttgaccgtgtgaagaacatcacgggacttgtggagtggtatggcaagaatgcgcgcctccgcgagttggtaaacctcgtggtggtggccggagacaggaggaaggagtccaaggacttggaagagaaggccgagatgaagaagatgtatggcctcatcgagacctacaagttgaacggccaattcagatggatctcctctcagatgaaccgtgtgaggaacggagagctctaccgtgtcatctgtgacacaaggggtgcctttgtgcagcctgcagtttatgaggcctttgggttgactgtggttgaggccatgacttgtgggttaccaacatttgccacatgcaatggtggtcctgctgagatcattgtgcatggaaaatctggttaccacattgacccttaccatggtgaccgtgctgctgagatccttgttgagttctttgaaaagagcaaggctgacccatctcactgggacaaaatctcccagggtggactcaagcgtattcatgagaagtacacatggcaaatttactctgacaggctcttgacactcactggtgtgtatggcttctggaagcatgtgaccaatcttgaacgccgtgagagcaaacgttaccttgagatgttctatgctctcaagtaccgcaaattggctgagtctgtgccccttgctattgaagagtaaaatcatgtttgaagagaacatgaatggagaaaccggcttttggtcgtttggagtcttatggagctttcataaataaagccattgaattttgattgtgatctgtttttggatttaaagagtctaaaaaaaaaagtgtcgttgatttttgatattttgcgtaggttttgtgtaaaacaaaaaacaaaaaaatagttttttttttattcttttcttttttgttgttgcaatattgagtatgattggaaatctttaaatttgggtgttccaccccatcaattcaatttaaagatatgccttcttcaattcaatttcggtgtttattggt

SEQ ID NO: 15007 - DNA, 731 bp, Glycine max
  Clone ID: LIB3049-032-B4_FLI
gatccatcgaaattctagacacacaacacataaaagatttccttgttctttttactgcttaaccgttcggctatctcatatatgaacaacaacatgttaggaatgaagagacggagagatgataatgaagggtccttggatttggcaaaatgtcttatgctgttttcttgtccaatagaaagcaacaagacacaacagaaaagttttggttctgtggaatttgagtgcaagacgtgcaaccgcaagttctcttcttttcaagcactgggagggcacagggcaagccacaagaggcagaagctggagggggaagaactgaaagaacaggccaaaagtcttagcttgtggaacaaacccaaaatgcacgagtgctccatttgtggccttgaattctctctgggccaggctctgggtggccacatgagaaaacacagagcttccctcaacgaagggtttcctattattccttctatcgaccaagttattgcgaaaatcccggttttgaaaaggtcgaatagcaccagggttatgtgcttggacttggagttacacctgtagataatgactctgtgcttggaatcaactatgaaatcaccacctcagcttctttttctttgttctgactaactcttttttacctctttctggacacatgtagtattctttcatttttgtgtaaaaatttcattgacttttcccttataaagatcattgattctttatttgttagc

SEQ ID NO: 15008 - DNA, 891 bp, Glycine max
  Clone ID: LIB3049-032-G12_FLI
ggcgtagaagagagtgaaagtaaaaggaaagctaaaaagagcagagtagcctccactgcaccaccatcatattttggctttataaaaaagccatagaactcattagaacttccccctttcccctttcttcttcttcttcttctctctaatttcatttccttgattatagctttcaattaatgggcttctacgctgaagatcctctctcaggcttgacaataggccaggccatatatgaggtagctctcatgattgcagttctgagatgggtcttgtgcttgatcttcagagtgatcaacgacagaagaacaacacaatccgacgagaccccaacaccagaaccatgttctcagatgacaagggacaaggacagcattcttttgctgacgactttcggagagattaaggagaggcttccagagacagaggagacgtgtgcggtgtgcctgagccagctgagcgtggaggacgaggttagggagctcatgaactgctaccacgtgttccacagagagtgcatagacagatggttggaacacgaacacgagaatcacagcgccacgtgtcctatctgcagggctcctttgctcagttcttcttgccaccacagctctgccacgtgtctgcctcctcctcagcctagttgggctgtggagagactcctctatctctttggagatgatctgcttccttgttagttacttgttttctttgtagattgtgcagaaaaaaaatagtttaggggattcattatttgttatgtttatcatctgagccttgtaattgttgcttgctgccacaaaataactaaactaagacacaaactagcttcctgtttgtgtgtgtgtatatacatatatttttcacatttgactaatattaatgttgcct

SEQ ID NO: 15009 - DNA, 2295 bp, Glycine max
  Clone ID: LIB3049-034-E2_FLI
gtagaaccaaaggtataccaaagaagggtcaacaggcagaaaaaggttgttgctgggaaatggtgtggcaaagtttggatgtccaatcaggtccatccccttttagcaaaaagagactccgaagatgttgaggatgagaaactcttacttgggtggatattacctgatgagaaattggagagatcagaaattaccctcaaaagtgaaactactagcagaaaatcaggtaagaaaaggaaaatgacagctgagaatggacgacccaagaaaggaagttatgctaagaaaaatgtagttgcagataattccactgaaggtaaacacaactcacagccaaggaggattcttagaaataagaaagctaggtgtgttgaaagagaccatgctgctttgaaaggggattattgtcccccatatcatcggaaatctataagcaagcaagcaaactgctctgaaagtgatgcagtttctgatgattctcttgatgatgatgatcacatgcatcataggaggaatgctattgttgaaaaagacaaatttattgacaatgatgtttcaaacgatacagtggactgtgattctgactggcagcagagggaagaacttagcagcaagaaagttgaagatacagagagagatgcaatttcagaggattctttggatgttggttctcttcagttgcttaggaagaattccagagccaagcatgccaaaaacataagtcaagaagatataatttctgatgaccaaatggagagtcctttgcaaaagcggcaaaggagaattcctaaaagcaggcagggcaaataccttactggaaaagatataatatctgatgaccaactagagcataaaaagaagaagcagcaacggaagaatcctaaaagcaggcaagccaaatacctcaatgaagaggatattgcatcagatgaccaattggagggccattatcgtagatatcagagaaagaattctagaggaagacatgccaaatgtgtagcaggggaagatggcatgcctgatgaccaattggaggatcgttgtcagaagcagcaaacaagtttctctaggaaaaggcaaaacaaaggcattgatagagaggttaaaaatgaaatatctgatgaccacttggaggaccattttctgaagcagcaaagaagatttcctaagagcaggcaaaacaaacacactgataaagaagtcatggatgacttagctgagaataattctcatctgctgcatagaactcccaaaaggaagcaagctaaatgcatggaagaagatgatatgaattcagatgatgaaatggaagataatcagccgctgaggagaacacttcgaagtaaacaagctaaaccaaagacacttcaacagatgaaacaagctaattccttccaagcgaaaaagcaggcatctcggcccataaaacagggatctcggatgcttgtgaaatcaaaggctcctcagcaaataaaacagccttctcatttgcggaataagcaatctaataacacccaggaatttagtttagatatggaagaggaggaagaaggtggacctagcacacgccttaggaagagagccacaaaagctcaggaatctgagggaaaattgaaagacaagcaaacaaaaaggatgaaggtgaagaatgctgcagctgcaaaggtttcggttggcgatgccagaatgcaggatggggaagcagaatatcagtgtgatattgatgggtgcactatgagttttgggtcaaaacaggagctgatgcatcataagagaaacatctgccctgtaaaagggtgtgggaagaagtttttttcacacaagtatctggtgcagcatcgtcgagttcatgaggatgagcgccccttgaagtgcccttggaagggatgcaagatgactttcaagtgggcatgggctcgtacagagcacattcgggtccacactggtgcacgaccttatgtatgtgctgagccagattgtggacaaacattcagatttgtttctgatttccgtcgtcataagcgaaagactggtcattcagcaaagaagaattgtcaatagcaagtggaatagatgtttaattgttatttaacatgactttttatgtatttatgaatccattgctcaattgacccggctaggactagggtttagtaacagtttaggatgtccctgcaattagcatttgtagttaactgttaattctgtttgcctttcgggtcttcaacccatttgtttattacaattaaagcaattgcctggatctagaaacacgattctaatccagttcatacc

SEQ ID NO: 15010 - DNA, 1154 bp, Glycine max
  Clone ID: LIB3049-034-F10_FLI
ggtttcggacaagaatatccctcaagacattggaataagacaaaccctatccttggtctgttccttcattcttattgtctccccgcatcgtacgccgccgacacagcttcgaatcgctgccaagtgctaacaaacgcctctgagtctctgacaccaacgcaactctctctgctcacatttttgaaggagatggtgaacgtgatggagtggcagaagcagcgttggcaaccgaatgggaacgcggaaatgatgtacgtgaaagtgatgaccgacgaacagctcgagactctgcgcaaacagattgcagtttacgcaaccatctgtgaacaactcatcgaaatgcacaaaaacatctcctcgcaccaagatcttgcagggattaggctggggaatatgtattgtgatccattgttggggtctggtgggcacaaaatagcttcaaggcagcggtggactccgtccgctatgcagcttcagattcttgagcgaatatttgatcaagggactggaacccccaccaaggaaaagatcaaggagatcactaatgagctcagccagcatggccagatttctgagaccaatgtgtataattggttccagaacaggcgtgctcgctccaaaagaaagcagcagaatgtggcacctagtgctaatgctgaatcggaagtggagactgaggttgattctaaggataagaagacaaagccggacgaatttcagtcccctcctagcgtttctgctgtgcctgctgatgataatttaggcttccagaaccatggcagtttgcagtacttgaatccagagtccaacaaaccagattctgtgttcccatctgatgcaagtttaagatctacaagaaatttcaatcatgtgcctgtttttgatgggctgctatcgaactcaacgagtgactatcttactggaaaaatggaagcacctgagaactacgacttataccagccagcaggcgacttcaacatggcaggttgacgtccaatgtaatttctgaagactgtgattagctgtaaagaattgctggtgtggttctgggcttgtgttgatgtgaaaagttgaaccaattgaagcatgaaacttatagtttatagtatatagataaaatgatcttttataatggtaggcggacattttacttg

SEQ ID NO: 15011 - DNA, 1811 bp, Glycine max
  Clone ID: LIB3049-035-B2_FLI
ggatgatttgaaccttgatgatccaaatccggctcaggattcctcttcctctacacagaaagttgatgaacgtagtaaggaacaggtggaggattttgatcttccggatttcgaggttgtggataaaggggttgaggttcaagagaaggaagaagatggaggagaggaagctgaggaacctgtccaggaggaatcaacttcaagtgaggttgtcaaggaagtagtgcttgatcatgtgcaccttactagattgtcagagcttgattcaattgctcagcagataaaagctctcgagtctatgatgggagaagatgataagtttacgaatgtagaggaagagacagaaccacagaggctagatgcagatgaagaaactgtgactagggagtttcttcagatgcttgaggatcaagacaacagtgattacttgttcaatcaacctgaaattccacctctaaagcttgaaggacacgaagatgcttcttctgaagatggagattccaaagtgtatcttcctgaccttggaaagggcttgggttgtgtaattcaaacaagggatggaggctacttggcttccatgaaccctttggatattgctgtggctagaaaagatgctccaaagctagctatgcagatgtcaaggccttttgtgttggcatcacaccaatccttgacagggttcgagttgtttcagaaattggctggcattggatttgatgaactcagctccaaggttttgtccttaatgcccatagatgaaatgataggcaaaactgcagaacaggttgcttttgaaggcattgctaatgcaatcatacaaggtaggaacaaggaaggagccagttccagtgctgctagaatagtttcttacttgaaaagcatgggaagtgccatgagttcaggaaggagagagagaataacaacaggactttggaatgttgaagaggagccactcacagcagagaagcttctggcgtttgccatgcagaaggttgagtccatgacagtcgaagcattgaaaattcaagctgacatggctgaggaattagaagccccatttgatatttctgcaaagaaaggagagggtgggaaggatcttttggcttcagttattccacttgaggaatggatcagagaccacagctatgctaaaactgttgcaggttctgatggggaaccagaaaaagtgacactcgtgttggttgtccaattgagagatccattgagacgctatgaagcagttggaggacctgtgatggtgctgattcatgcaacaagtgctgacacaaaagggaaggaggaggagaaaaggttcaaggtaacaagcatgcatgtggggggtttcaagttgacaagtgccataaagaagaatgcatgggacagtgggaagcagagacttactgcaatgcaatggttggttgcatatggtttgggaaaggcagggaacaagaaagggaagcaatcattggcaaagggacaacaagaccagttgtggagcatttcatcgcgaataattgctgacatgtggctcaaaaccatgagaaatccagatatcaatcttggaaagtagtaattagcacctccattctattattaattaattatgccaaggaagtagtcttgcattcatgtccaagtgaaaggttgttcttgtctacaacacacctaagccaagccactgcagctacctataccatttgggaagatttatgaattcaagaattgtgtaaatgttgtgtcatcattagttgtttctgtaaaagtcaataaaatttctaagtcgtatataagacatatggtatttcaacggc

SEQ ID NO: 15012 - DNA, 617 bp, Glycine max
  Clone ID: LIB3049-039-B7_FLI
tgttatgccatgtgggtttttggagagaaccaaagagaaaggcatggtttttccttcatgggcaccccaaattcaaatccttagccacagttcagttggagggttcttgactcactgtggttggaattcgatccttgagagtgtgctaaagggtgtgccattcatcacatggccactgtttgcggagcagaaaatgaatgcgattttgctatgtgagtgtctcaaagtgggagtgaggccaagagttggtgaaaatggtttggtggaaagggctgaaattgtgacggtgataaagtgtctaatggaagaggaagaaggtaagaaaatgcgtgaaagaatgaatgagttaaaagaagctgctactaatggtctcaaacaagatggggcttctaccaagaacttttctcgggtagcattcaagtggaaaaatttggcataggagaacaagttttattgaatgctttgatcaggatcttggtttaatttattagttattaccttctttttttttctgtttctgctttcctagtaagtaattctgtggagtattgtactagaatttctgatctagaacgagatcataatgataatttgcactattaggctcgtgttgcagc

SEQ ID NO: 15013 - DNA, 836 bp, Glycine max
  Clone ID: LIB3049-040-C8_FLI
ggaagttttgtggtgtggtttagtgtcaaatggcggcgagtagaagcacttttcctctgatgaaatacttgagagtgcgcgtcgacgctcttccccgcaacactcccttaaccctcgctcccaactttttgattcgccgcttctgtgaagaggttaggggttgttttctcgacaagtctgaggtcacagatcgcgtcatttcctgcgtcaaaaacttccagaaagttgatccttcaaaggttaaccctaatgctcacttccagaatgaccttggattggatagtttagattcggtagagattgtgatggctcttgaggaggagtttgggttcgagattcctgataatgaggcagacaagatcaactccattaaacttgcagtggacttcattgcatctcatcctcaggcaaagtagtggaattcttttgtttctcaacatctagtttagatgatccatcagacatttttgcttccatagtggaactttgttttctcatccctcagaagggtgttagctggggatgtgccagcttcatttggcggtattggcatccaggacttcacattctgtgttcctcctatattcgtgtcaataagaattgtgttaaatttccgattatgaaattgtgaggtcttgagttgtcctcagcaacagatgcattatgctattctcttttgctctgttttctgttattacatcatccgtaataattttgcttttgtttaatctccatgcatcataattgaagttatacatttatactctgccagatggttcttatgtaatgagttgtttccgtgttaagaaagaactgctcttttagagttctaatcc

SEQ ID NO: 15014 - DNA, 1353 bp, Glycine max
  Clone ID: LIB3049-040-F2_FLI
gacattcaatcactcacacatgcccctatcttccttagctacctagattattcacttcaattcctcacaagcaacaccgtttcttgctccaatggcagctttgtatctcccaataagcatgttggcactcattgttgttgtttctcttggtttgtggagtggtgttcaaggtgcaccacaagtgccatgctacttcatttttggtgattctttggttgataatgggaacaacaaccagctccagtctttggctagggctgattacttgccttatgggattgacttccctggtggaccttctggaaggttttccaatgggaaaaccactgttgatgcaattgctgaacttttgggattcgatgattacatacctccatatgctgatgctagtggcgatgctatactcaaaggagtcaattatgcatctgctgctgctggaattagagaggaaactgggcagcaactgggagggcgtattagttttagtgggcaggtgcaaaattaccaaagcacagtgtctcaagtggtaaatttactgggaaatgaggactcagctgcaaattacttgagcaagtgcatatactcaattgggttgggtagcaatgattacctcaacaactatttcatgcctcaattctattccagcagcaggcagtactcaccagatgagtatgctgatgttcttattcaagcatatactgaacaactaaaaactttgtacaattatggagcaaggaaaatggtgctgtttggaataggccaaataggttgcagcccaaatgaattggcccaaaacagcccagatggtaaaacatgtgtggaaaagatcaattctgcaaaccaaatattcaacaacaaactgaaaggtctcactgaccaattcaacaaccagctgcctgatgcaagagtcatctatgttaactcttatggcatctttcaagatattataagcaacccttcagcctatggtttcagtgttacaaatgctgggtgctgtggggtaggaaggaacaatggtcaaattacatgtcttccaatgcaaacaccatgccaaaacaggagagagtacttgttttgggatgcttttcatcctactgaagctggcaatgttgttgtggctcagagagcttacagtgctcaatctgcatcagatgcttaccctgttgatatccaacgcttagctcagatatgatctctgaacaatcaacatgttctagtgggtagtggctattaagctctgccacaaccatatttaatgttcttcgaatgtgctactccttttaaggcataagagtcttaagttttctctctttctcttacatattcatatatgctaaatgttcatgggttcac

SEQ ID NO: 15015 - DNA, 789 bp, Glycine max
  Clone ID: LIB3049-040-F6_FLI
gaattaaccatcgcttcaaacatttctcattcacaactttacccactcttcattctagcaattcgaattcccaatccaaaaccctaataccttcaaagaacctagtagtgaatcagtgatggcacctaaggcagagaagaagccagcggagaagaagccggtggaggagaagaagtcgacggtgggagacaaggctccggcggagaagaagccgaaggccggaaagaagcttccgaaggagggaggagccggcggagaaggggggaagaagaaaaagaggaacaagaagagcgtggagacatacaagatatacatattcaaggttctgaagcaggtccaccctgacattggtatctcaagcaaggccatgggaatcatgaacagcttcatcaacgacatcttcgagaagcttgctcaggaatcttccagacttgcccgctacaacaagaagcccaccatcacttcaagggagatccagaccgcggtcaggcttgtgctgcccggtgaactggccaagcacgccgtctctgagggtaccaaggccgtcaccaagttcaccagctcttgaacaaaatatcttaactttgtttacctcgctcttgttttgcttcatgtgtatctgttagatctagcgaccctatgtttaggtttgaactggtagctttttggtttttaatttgtaagtgaagaattaggattgggttgatcctctgtgtatggaattggtagaattgatcatataggagcaatttgataaaaggaatggttgtttatgaactcatgattccc

SEQ ID NO: 15016 - DNA, 1622 bp, Glycine max
  Clone ID: LIB3049-041-G4_FLI
ggttcatcctttgattatatcacatactcaccatggaggctaagttggccaccaccataatacttattttctccgtaatttggcttatgagggtgaatggcatagacccttgtgcctctcaagcggataattccgacctgaacgtgattcccatctacagcaaatgctcaccgttcaaaccaccaaagtcagactcatcgtgggacaacagaattataaacatggcctcaaaagacccactccgattcaaatacttgtccaccttagtgggccaaaagaccgtgtccacggccccaatcgcttcgggccagaccttcaacatcggcaactacgtcgtcagggtcaaattgggaacccctggtcaacttttgttcatggtcctcgacaccagcaccgacgaggccttcgttccatgctcgggctgcacgggctgctccgacaccactttctcgcccaaagcctccaccagctatggcccattggactgctctgttccccagtgcggtcaggtccgcgggctttcgtgccccgccacaggtaccggcgcgtgctccttcaaccaatcctacgcgggctcatctttctccgccaccctagtccaagactcgttaagattagccactgatgttatccccaactactccttcggctgcgtcaacgccatcaccggcgcctctgtcccggcccaagggcttttgggcctgggccgtggcccgctgtccttgctctcccaatccgggtcaaattactcgggcatcttctcttactgtctccccagcttcaagtcctactacttctctgggtcgctcaagctcgggcccgtgggccagcccaagagcattcgcaccaccccgcttcttcgcagccctcaccgtccttctctttactacgtgaacttcaccggaatcagcgtgggacgtgtcctggtaccctttcccagcgagtatcttgggtttaacccgaatacaggatccggaaccataattgattcgggcacggttataacccggttcgtggagcccgtttacaacgcggtgagggaggagttcaggaagcaggtgggaggcactacattcacgagcattggagccttcgatacgtgttttgtgaaaacctacgaaactctggcgccgccaattacgctgcacttcgaggggttggacctgaaactgccgttggaaaacagcttgatccacagcagcgcgggttcgctggcgtgtcttgcaatggcggcggcacccgacaatgtgaactcggtgttgaacgtcatcgccaactttcagcaacagaaccttaggattttgtttgataccgtcaataataaggttggcatagcccgtgaggtttgtaactagctggttggctacatttttatttatttatttattaatatgtaccagtggctttcttgattagctaactaggtttggatctttcgttgggttcaaaaacgtgatggtgtgggtgtgtggccacggtgaataagcttgccttgtgtgcctttggaagatatgcaatgtgaaataggacctagctagtactattttatcttagatcgatcgttgtcgatcattgtaatgatgtttgattaaattaataatgtaagatcaattaagtagcgc

SEQ ID NO: 15017 - DNA, 1073 bp, Glycine max
  Clone ID: LIB3049-042-D5_FLI
atgagttcgctacggtatttgggcagcggcggcgcgccgctcaggaaggaggtcgccgaggactttagagcccaattccccaacgtggaaattgggcagggctatggtttgactgaaagtggaggaggggcagctagagtgttggggcctgatgagtctaagcgccatggttctgtgggtcgactatcagaaaatatggaggccaagatagtggaccctgttactggagaagcattatctcctggccaaaaaggggagctctggttgcgaggtccaacaatcatgaaaggttatgtaggagatgagaaggccacagctgaaacattggattcagaaggatggctgaagactggtgatctttgttattttgactctgatggtttcctctacattgtagatagactgaaggaattgatcaaatacaaagcttatcaggttccccctgctgaattggaacatatacttcacaccaatcctgaaattgctgatgctgcagtagttccgtatcctgatgaagaggcaggacagattccaattgcctttgtagtaagaaagtctggaagcaacatcactgcagatcaggtcatggagtttgtggcaaagcaggtttcaccatacaagaagatacggcgagtttctttcatcaaatctatcccaaaatctccggctggcaaaattttgagaagagaattagttgattatgctctatcctgtggttcatccaaattgtgatcaagaaaagagcatggagaaaatgtacttggcctcgaaactattgtgacctgttcagatgcaacaaatgcacgatatcgtgtgaagcatctggcctaccatgtggttcatcgccctagtccaccaccaagaatgttggtggtttctacccaaaaatcagcaatcattttattcacgcacacctttcagaaatttaatcattttaatcaactacctcggtttccctcattttatttaccaaaataaattatgcacctttaggtttgttcacaaaataatgtgtgcaagaaacattttcattcgttgtaaactatttgttcattttgtatagttgcatttgt

SEQ ID NO: 15018 - DNA, 1128 bp, Glycine max
  Clone ID: LIB3049-043-G11_FLI
ggcaagcgatacgaaaaataaatttcagttttttctcataatgggttccaccaatgccaataatgaaacggtcgcagagattccggagtggatccgcgtcttcaaagatggcaccgtggaacgcccacttgattttccgatcgtgccacccactctcaacactggactctcatccaaagacatcaccatctcacaccaccctccaaaaccaatttctgcacgcatttaccttccaaacatcaccaattcccagactaagaaacttcccatctacgtctactttcacggtggtggcttcttctttgaatccgctttctccaaacttttcaatgaccattttctcaagttggtccctcaagccaacattatagtggtttccgttgagtacagactcgctccagaacaccctctccctgcagcttacgatgattgttgggacgctctcaaatgggtcgcatcccattctactaaagacaccacccccaacaacactgaatcttggttgactgagcacggtgacttcagcagagtgttcataggaggagacagtgctggtgccaatattgttcacaacattctctcctttcgtgttgggcctgagcccttgcctggggatgttcaaatattgggctctattttggcccatccttatttctacggctcagagcctgttgggtctgagcctgttactgggctggaacagaatttcttcaatctggtttggaaattggtgtatccttcagcacccggtgggattgacaaccctttcattaaccctttgggtgctggggcacctagcttggctgaacttgcttgttctagaatgctggtgtgtgttgctgagaaggatggcttaagggacagaggggtttggtactatgaggctgtcaagaaaagtgggtggaaaggggaaatacaactctttgaagagaaggatgaggatcatgtttatcatttgctcaaacctgcactcaatcaagattctcataaggctgatgcattgatcaagctcatggcttcttttctcgtcaattagattgacttttcctagccctggaatggaacggtttttaacaataagctctgttgttttgcttttaataatgtggagggataaaatttggttcc

SEQ ID NO: 15019 - DNA, 701 bp, Glycine max
  Clone ID: LIB3049-047-D11_FLI
gcgattagaaatatttataaagacggaggtgttggcgctttttatgctggtatctcaccaactctggttggcatgcttccatacagtacatgtttttatttcatgtatgatacaataaaggaatcttactgccggaccaaaagtaagaaatctctaagccgtccagagatgcttttgattggagctcttgcaggttttactgccagtacaattagcttccccttggaggtagcaaggaagcgcctgatggtgggtgctttgcaaggtaagtgcccgccaaacatggcagcggcactttcagaagttattagagaagaaggtctgaagggtctctacagaggatggggtgcaagctgtttgaaggtcatgccatcctctggtatcacctggatgttttatgaagcttggaaagacatattgcttgtccagaatggtaatcccctttaggctaataagaaggttatgcggataacttgtactctataagaaggaatggtaaaacacaatgccgggtaaggaaaaataattattcggaaattaaagttgttttgccatggcagccagctggctagctcgttggaatagtcacatttactaacgagttaggtacctagcttgtaagtttccagattttgatattgatttgggaagattctcatcgaagaaaaaggttaaagaatgaggagaagtttcctatgtac

SEQ ID NO: 15020 - DNA, 673 bp, Glycine max
  Clone ID: LIB3049-047-G5_FLI
agaagggggcagtttcaaattttcttttccttcactttcccgagaaaaaaataacacttttcactttcttcactacgttctcacttcgatatggctcgtacgaagcaaaccgctcgcaagtccaccggtggcaaggcgccacgtaagcagctcgccaccaaggccgctcggaagtccgctccggcgaccggaggagtgaagaagcccaccgcttcaggccgggaaccgtggcgctgagggaaatcagaaagtaccagaagagcaccgagcttctcatcaggaagcttccatttcagaggctcgtgagagaaatcgcgcaggatttcaagaccgatttgcgtttccagagcagcgctgtttccgcgcttcaggaggctgctgaggcttacctcgttgggttgttcgaggacactaacctctgcgcgattcatgctaagagggttaccattatgcccaaggatatccagcttgcacgcaggatcagaggcgagagggcttagaaacaaggttgagaggtttgggtgttaggtgcttagggttagggttctggtcttgaaggatgtgtttgggagtttggttgtaggaatcctctccatctgtgtgtttatgtggaatgtgaaatgtgaatctctttgcttttgtaattatattgtgttactatgaggagttaatg

SEQ ID NO: 15021 - DNA, 2327 bp, Glycine max
  Clone ID: LIB3049-048-G9_FLI
cgaagtccattcactattttctacaatccaagagcatgcccctcagaatttgttattcctctggccaaatacagaaaatctgtatttgggactcaggtctcagttggcatgagatttggcatgatgtttgagacagaagaatcgggtaagcgcagatatatgggtacaatagttggtatcagtgatgtggatcctttaaggtggcctggttctaaatggcgaaatattcaggtggagtgggatgagccagggtgtggtgataagcagaacagagttagtgtgtgggagattgagactcctgaaagcctttttatctttccttctttgacttcaggtctaaaacggccattaccatctggtcttttggaaaatgagtggggaactttgttaagaagaccctttataagagttccagaaaatggaaccatggagctctcaaactcaattccaaatctctactcagaacacatgatgagaatgcttttgaaaccccagctgattaacaataatggagcttttttatctgccatgcaacaagaatctgctgctacaagaggccccttgcaagagatgaagaccacacttgcagcagaaaaccaaatgccacttaaaaatctacatcctcattctatccctgaccaacctaatgccttaaacatgcaatcactgttgaaaaacgaccaacctgaaaaattgcaccctcttggcaaaattgataatcatctgtcttctgggatagttattgacaagccaaaatcagaatctgaggtattacctgatcatgtgattgactacccttccatggaagggtgcaacatcgaaaaggtggcagcaaatcctgttaaccagcaaggtctagcaaaccaattgccattccataatcaaaaccagagtccactactccctcaatctagtccatggcctatgccacctcagatagaattgtccatgccccatcctcaaatgattgatatggttcaagctgattctgctatggtaaatggcctgtttcctcagcttgacatcaatgaatggatgtcatatgcttcttcccaaccttttgctgggcagaacagaccaactggacctttgtctgacttgcaagaacatacctcacttcagcctcaagtagtgaatccccctttaccttcaatgaacaatgaagtgtgggatcattatgtcaagaacttgaagttcttatctcaagcagaccagctaacatccatttgtcagccggggctgtatggctcaatggcataccaagctcaaacaatttgagggatctttcagctgagagcaacaaccaaagtgagatttgtgtcaatgttgatgctagcaacagcgtaggcaccactgtggttgatccttctacttcaagcaccattttggatgagttttgcacaatgaaggacagagaatttcaaaatcctcaagattgcatggtgggcaacttgagttcaagccaggatgtccagtctcagataacttcagcaagtctaactgaatcacatgcctttcctcttagagacatccctgacaactcaggtggcacttcttcaagccatgttgattttgatgaaagcagcttcctgcagaataactcgtggcagcaagtacctgcgcccatccgaacttacacaaaggtgcaaaaggcaggttctgtaggaagatcaattgatgtgactactttcaagaactacgaggagttgatccgtgcaattgaatgcatgtttggactcgatggtctgctgaatgacactaaatgttcaggatggaaattggtctatgtagattatgagagtgatgttctacttgttggtgatgatccttgggaagaatttgtgggctgtgtccgctgcataagaattttatcaccttcagaagttcagcagatgagtgaagaggggatgaagcttctaaacagtggggctttgcaagggatgaatgtttgaatattaggtggtggctgcatacaatgtctcactaagccttgctttgcgatgttcttgtataaggttaacctcaaatggctttatcgtccaatgtttgaaaagcaaaggcatatgttgtggaagaagtcaggattattgacttgggtgtcatgtgatgtattattattaactaaaggacactcgttatttgaaacatttcttaaggtatggagcaaaccttggagatggaagagtttaagttttattattacttatcaaaagttctaagatgatgttccaatgagtcaagggtgttgcataccttatgttgtaagacattcttgctggcaagaggaaatattatgatttattattaatacgcattgggggctttcc

SEQ ID NO: 15022 - DNA, 1095 bp, Glycine max
  Clone ID: LIB3049-049-B9_FLI
ggtagttgaaggagcagaagaagaagaagagaaggtggtaccgccttcaattctctttttctctctccatttctcatcctcatcatcttattattcctcttccatctctattctccataacacccaccacaccacttgtgaaaaacctcattaatatcacacactgacatgtatctctgagctccaatccaatacaagaccacaccttgtcgtgtcggacgaaccttggtgtctgtttttttttttttttcattattttctccgaagagatgaggaagggcagaggtggaggcgcctcggcggcggcggtggatgtgaacggatccattttaaaggagcctcggtaccggggcgtgaggaagagaccgtgggggagattcgccgcggagatcagagacccgttgaagaaagccagggtttggttgggaaccttcaattctgccgaggatgctgctcgtgcctacgacgccgccgctcggactctccgaggtcccaaggccaaaacaaatttcccccctctctcacctttttgctatccacaccccaccaccgatcctttcttctacactggtttccacgatcaacaccaccaccacaacaacaacaaccttaacaaccctcaaagacccacttcaagtggcatgagtagcaccgttgagtccttcagtgggccccgccctcccaccaccaccactaccaccacaaccacaactgcgacgccgtttttgactgctacgcggagatacccgcgcactccccctcttgtccctgaagactgccacagtgactgcgactcttcctcctccgtcgttgacgacggcgacgacaacatcgtttcgtcgtcgtttcgacctcccttgccgtttgatctcaacgcgctgccgtttgatgatgctgccgcggatgatgatctacgccgcaccgcgctttgtctctgatgatgattatcgtgcgatgatgatttttaatttctcatttttttacttgatttttttgttattgctatgcagaagaaatatatatttaaaatgatgatcagatgtaagattatggtaatatgatcttaattctgtgagaggaagattccgtgttggt

SEQ ID NO: 15023 - DNA, 1175 bp, Glycine max
  Clone ID: LIB3049-050-E1_FLI
gaatcccaagagagttggaaaacaaagtatagagtgaaagaatgggtgagaaaagcaagattttgatcataggaggcaccggctacatcggcaaacatatagtggaagcaagcgcaaaggctggaaatcccacttttgctttggtgagggaatccacactctctgacccctccaaggcacaactcatccacaattttgaggctttgggcgttaatttggtccgcggggatctgtacgatcatgagaagttggtgaaagctatcaagcaagtagatgtcgtcatatccacgctgggtcacctgcagcttgccgatcagctcaagatcatcgctgccattaaggaagccggtaatgttaagaggtttttcccttcggaattcggtaacgacgtggatcgtgtccatgccgtggaaccagcaaaatctgcattagctatcaaagcccaaattcgacgcagcattgaagccgaaggcatcccctatacgtacgtttccagcaactacttcgccggctattttcttcccacattagcacaaccaggtgcttttgctccacctccacccaaagacaaagtcattatcttgggcgatggaaatcctaaagcaattttcaacaaggaagaggacattggaacctacaccatcagggctgtggatgaccctaggacattgaacaagattctctacctcaggccccctaagaacatttactcgttcaacgagcttgtggccttgtgggagaacaagattggcaagaccctcgaaaaaatttatgtaccagaggagaaggttctcaaggacatcgaagaggcacctcttccaatcaatgtggtattagcaatcaaccactcagtgttcgtgaagggtgaccacaccaactttgagattgagccatctttcggggttgaggcttctgagttgtacccggatgtcaactacaccaccgtggaagaataccttggtcagttcgcttgagaatttaaaaggagaaagatgctcttgtgatcggatatttaaataatctgagttgttgatttggagagtggaagattgtgttttatgtcaaaagatcgctatgtgatgtaatcttgcctttcatgtgtagaatgttcctacttgaatggttgaaaaataataaatgacttacgagttgagataataaccgagtttctgcac

SEQ ID NO: 15024 - DNA, 794 bp, Glycine max
  Clone ID: LIB3049-050-F5_FLI
ggaacctttgcattctattcattcaagattcagcaagtgcgttttggaagcagagaccgaaatacttcgagatggcccgtacaaagcaaactgctcgtaagtcaactggaggaaaagctcccaggaagcagcttgcaaccaaggctgcacgtaagtctgcaccaacaactggtggtgtgaagaagcctcatcgttatcgccctggaactgttgctcttcgtgagattaggaaataccagaagagcactgagctcctaatcaggaagcttcctttccagaggttggttcgtgaaattgcccaggatttcaagactgatccgcgtttccagagccatgctgtgcttgcattgcaagaggctgctgaggcataccttgttgggctctttgaggacactaacttgtgtgccattcacgccaagcgtgtgactattatgcccaaggatattcagctggcaagaaggattcgtggtgagcgtgcttgagttggtgcgttctgtgtttgtgaagatggattgttggtggctgcggatggtgttttgttactaagttttctttttgttgaagcctataggttattagggaaaaataggtgtttacttggtagtcatattaattgtcattggcaaatactgcctaagacactgtggaggtctggttgttagaaatttggcatgtatttgatttttttggatcctttatttctcgttttatttctggttgtgcagccactttgggaattgtattggacaactttctgttgccatctaatctagttgaagctagcttatcgtgac

SEQ ID NO: 15025 - DNA, 1231 bp, Glycine max
  Clone ID: LIB3049-050-F6_FLI
gaattaaagggagggtaccagctgtcaaatagtgctttccacacactttcaccaatttataaattatttgcagttacactccaagtctactttttctttggcagcttagccttcctattttggaaaccctcttcactgctctcccaccttttttgtgtgtatgtgtatgagcttctcttctactctattcactgcactcttattaataaatatcagtgcttggaaagcagaagagaagatccatagctaagatagatctcgagatgggtcgtggcaagattgagataaagttgattgagaaccccaccaacaggcaagtcacctactccaagcgaaggaatggtatcttcaagaaagctcatgaactcagtgttctctgtgatgccaaggtttcactcatcatgttctctaaaaacaacaagatgcatgaatacattagccctggcctcacgacaaaaaagatcattgatcagtatcagaagactttgggggatattgatctgtggcattctcactatgagaaaatgcttgaaaacttgaagaagctgaaagatattaacaataagctcaggagacagatcaggcataggataggtgagggcttggacatggacgacatgagcttccagcaactgcgcactcttgaagaagatatggtttcatccatagggaaaatacgcgaacgaaagtttcacgtgatcaaaactcggactgatacctgtaggaaaaaggttaaaagcctgaagcagatgaatggaaatctgctgcttgaacttgaaaagtgtgtgatccatccacaatttcttttgcacgatgaaggagacgaggaatcagcagcagcagcagcagcagcagcagttgcactggccaacggtgcctccaccctgtatgcattctgtcatcagcaccattctcatctgaaccttttctcccaccattctaatggagaagagcaaccctttaaaactgatcatgaccttcgccttgcttgatccagtgcaacaattaactagcaataatgtaaattaactagctagccagcactaagcacttgttatttatgctttaatttgtattaattggacctgttaaacccaactttgcttgcaacctctctagtttctatccaggtagagaattagctaagcttatatagtgtttggcaagagcgtgctatgaaaaacagaaagactgtactttatttgttattataagtttacattgagtgacg

SEQ ID NO: 15026 - DNA, 1420 bp, Glycine max
  Clone ID: LIB3049-050-G10_FLI
gaaccacagcttaattctctctactactgctagctgtgacttgttttgagttcaatcaaatcgcattggtatctgaaatcaggaaagatggttagcgtagctgagatcaggcaggcacaaagggcagaaggcccagcaaccatccttgccattggaactgcaaacccaccaaaccgtgttgatcagagcacctatcctgattactacttcagaatcaccaacagtgaccacatgaccgagctcaaagagaaatttcagcgcatgtgtgacaagtctatgatcaagacgagatatatgtacctaaacgaagagatcttgaaagagaatccaaacatgtgtgcttacatggcaccttctttggatgctaggcaagacatggtggtggtagaggtaccaaagctagggaaagaggctgcagtaaaggccataaaggagtggggccagccaaagtcaaagattacccacttgatcttctgcaccactagcggtgtggacatgcctggtgctgattaccaactcaccaaacaattgggccttcgcccttatgtgaagaggtacatgatgtaccaacaaggttgctttgcaggtggcacggttcttcgtttggccaaggatttggctgagaacaacaagggtgcacgtgtgcttgttgtctgctctgagatcactgcagtcacattccgtgggccaagtgacactcaccttgatagtcttgtgggccaagcattgtttggagatggagctgctgcagtcattgttggttctgacccaattccacaagttgagaagcctttgtatgagcttgtttggactgcacaaacaattgctccagacagtgaaggtgctattgatggacaccttcgtgaagttggactcacatttcacctcctcaaggatgttcccgggattgtctcaaagaacattgataaggcactttttgaggctttcaacccattgaacatctctgattacaactccatcttttggattgcacaccctggtgggcctgcgattttagaccaagttgagcaaaagttgggtctcaaacctgagaagatgaaggccactagagatgtgcttagtgaatatgggaacatgtcaagtgcttgtgttcttttcatcttggatgagatgaggaggaaatctgctgaaaatggacataaaaccacaggtgaaggacttgaatggggtgtgttgttcggttttggacctggacttaccattgaaactgttgttttgcatagtgtggccatctgagatgcctcatatattatttcattattgtgtaccacttttcaaacttgcttggggtttgtaacaacaacaaccaccaaaaaaaaaaaaactcgtttagagtttgtttgtgtacgtttatattaaaataataatacgtgtttggtggctttttagcctaattatc

SEQ ID NO: 15027 - DNA, 1000 bp, Glycine max
  Clone ID: LIB3049-050-H12_FLI
cattcggaagaggaaggtttctaatgacttcaacatgatggatctgaaaatttacacatgtgaacaccctcagtgcccttacagtcaagttcgccttggtttccctgaccgaatttcaagggacaaccatcagttgatttgtgcttatagaggtacttcagattttgggggtccaagttttcctgttaatgagataaagccagtcgtacaccccccgtcctttgttcaacccaaatctactgctcagcctggtagtatggttccacctgttattgatctaactggacttgaagtttcagataatggccagaaaatgattactgaccttatgactaactatgacacaaatgttcgaggcaacaagaagacaagttcctgtaatcacttagctgcagaaaatttcgaccttcctcagcatgccatgcagcagcaacaggacaacttcattcgcggtcaaggaatcactgcagaaggcaacatctttgatgaagctaacatgcccaacaatcatcacatgtttgcaagagaagagggtcaatttgaccgtttcaaagctttgaatgctccctttgagaccaatcacaacaacaacaacttccactcaatgtttggttccctttgtgatttggcatcatttgatttcaaggaggatatgcaaggagtagggatggatactcttcagaaacagccagatatttcaatatggtaccagtgaaaatgacaagttgaatctggaagctcgttatccacatcatgaattcttattttcatgtgatgttccttcagccaagtcttactggaattttcttcacatgtaattctgtaggcctagtagaactagatatttttgacttatcctttacaggtctagtagttgttacaataaaaaacttatatgtttagcccttgtgtgctttttttttttatcagtctagccttgttacttaagattactattctatgcaagactgggatataaataagagttgaagtttcttcc

SEQ ID NO: 15028 - DNA, 1130 bp, Glycine max
  Clone ID: LIB3049-051-F5_FLI
ggaggtagaataattattaaaatcgtttttctttatttctcttattacgccaacgccatgctcattactcgtaaccctgttttgttgaattccacttttgtccccactctcatttcagattcagagcatcgttgcgcatctccacgctctctttgcttctcttctcgcacggacatggatactgctgctggtcaaagtctttacccattacaccgttgcaaaactcttcacctggtaagacatgcccaaggatttcacaatgtagaaggtgagaagaactttgaagcatacaagtcttatgatctttttgatgcaaacctgacccctctcggctggaaacaggttgataatctgagacaacatgttaaggccagtggtctttccaaaagaattgaactagttattgtttcccccttgttaaggactatgcaaacagcagttggagtctttggtgggcaaccatatactgatgggattaatgtacctcccctgatgaatgacaatgtgggagatagtggtcgccctgcaatttccagtctaaatgccccaccatttatagcagtagagctttgccgagaacatttgggggtgcatccttgtgataagagaagaaacatcactgactaccgacatatgtttccagctgttgatttttcattgatagaaaatgatgaggacattttgtggaaacctgacattagagagaagaatgaagaagttgctgccaggggactgaaatttttggaatggttgtggacacgtaaagaaaaggagatagctgtcgttacccccagcggttttctgtttcattctctaagtgcttttggaaatgattgtcatccaaacgtgaagaatgaaatctgcacacactttgctaactgtgagctacgttcaatggttatcattgacagaggtatgattggttcagatgagtcctctaccaactatcctggcaaagttccatatggccttgaccttcctagtgacgttgctgaccagaagcatccagagaatgggcaggcaaactgatagtggaattttcttcatttttatgatttcctaattacatttatgataccaactacgattacttttaaacattaattaaatggacatcaatttcatgtgtg

SEQ ID NO: 15029 - DNA, 635 bp, Glycine max
  Clone ID: LIB3049-051-H3_FLI
gaatccaaacctagctaagtgctcttacaaagagaggagtgagtgagaaacaagatatttaaagttacaaaaaatggagagagtggcaaaggtggtggtgatgttggccatggtggtgctggtgctaattgcttcaaatgttgaagggggacgattactgaagcaagagaatgtggatcagcccgagaccttccttggtgggatatttccaagcccaagcccaggtttcagcttcaccggtgtgggctttggcccatctgggttttgcactttccctggtggttgtaccggtaccccttctttgcccactattcccggtgctggcgtgtcactaccagttccaccacatgcataaggaaaatggctttggtagaagacctatgttattattacttaatgctaagtagtaaattaagtactgtagaactttgtttaagctttaatttgccttttataatcatatgtttgcgtctattaggttttgttttgggttcatggctgggtgtgatatgatttctatttggttggtcactgctacgatcttactggtcattactgtaatagagtgtcagcttctatcatggacgctacagtttttttttttaaattatttatattatattatagttatgaac

SEQ ID NO: 15030 - DNA, 696 bp, Glycine max
  Clone ID: LIB3049-052-A7_FLI
gtactgtgtgggatttcagcttccatgctttattcaaggtcacactaaatgctaaaagtctagcgactgagttaacagttaaaaatacagacaataaagcattctcatttagtaccaccttgcacacatattttcaagcttctgtgagtaatgcatcagtaaaggggttgaaaggttgcaaaactctgaacaaagatccagatcctaaaaatccagtgtagggtaaggaagaaagggaagttgtcactttccctggatttgtagattgtgcttatcttgatgcttccagtgagttgcaacttgacaatggtttgggtgatctgatatctatcaagaacacattgatcagatgctgtgttgtggaatccttaccttcaaatggaagcatgctacaaagattttgtttgcgttgaaaatgctaagattggaagtgtccagctagagccagaacaaacttggacagctgtgcagcatcttagcatagcttgaactgtaaatgtgcttctacatcagcaattatttttgtcttatttgataccccaacaaatatgtatcttctgtattagtaattttctatgccactactagtggcaagggagggatagtgtacaagaggtaaacctcatttaaacctcattacgttcgtaacattattgtaacaacaaaaaggaataataatttattctttttcttttt

SEQ ID NO: 15031 - DNA, 1601 bp, Glycine max
  Clone ID: LIB3049-052-F1_FLI
gaaaacaaacctgtatcatcttcttcgtctttcctttgtctctcttctttcccctctctttcgagggtttttctttttcttttttccctttttttatttttcctttattttgtttttttctttctcttgtttttcagttttgcttccatttcctttgaatccccatttattcttcttcttctgcaaccctaaccctagaattgaagatgcagcctcagaggttaaggcagcaagccatgatgcaaccatctctctaccaccaccctgctctacttactcctcctcagatagagcctatcttgagtggaaatctgccacctggctttgattcgagttcatgccgcagtgtttatgtaggcaacattcatccccaggttacagattcccttcttcaagagcttttttcaactgcaggcgcccttgaaggatgcaagcttattaggaaagagaagtcatcctatgggtttgtggactactttgatcgcagttctgctgcatttgctattgtaactctcaatgggaggaatatttttgggcagcctattaaggttaactgggcttatgctagcagccagaaagaggatacctcaggtcactttaatatttttgtcggtgaccttagtcctgaggttacagatgccacattgtatgcttgcttctctgtatatcctagttgttctgatgcaagggtaatgtgggatcagaagacaggccgttccaggggatttgggtttgtttcttttcggaatcagcaggatgctcaaagtgctataaatgatttgactggaaaatggcttggaagtagacagattcgttgtaattgggcaaccaaaggggccagtgccagtgatgaaaagcagacttcagattcgagaagtgtcgtggagttgaccaatggatcatctgatggccaagaaacaaccaatgatgacactcctgagaagaatcctcaatataccactgtttatgttggcaatcttgctccagaggttacttctgttgatctccatcaacattttcattctcttaatgccggaactattgaagatgttagggtgcaacgagacaaaggttttgggtttgtgagatacagtacccatgctgaagcagctcttgctatacagatgggtaatgctcgaattctatttggcaaacctatcaagtgttcatggggtagcaagcctactcctccagggactgcctcaactcctctcccaccacctacttctgcgaatgtgtcgggattttctcttgctagtcttgcagcttatgaacgccaaatggctttgagtaaaatgggtggtgcacatgcccttatgcatcaacaaggtcaacatgccctaaaacaggtagccatgggaatgggtgctcctggggctggttatgatgcaagattccagaatgttgcgaccacccaacacctaatgtactatcagtaaaatgtgttggtgtgcaactctccgcgataaacaagggaggattaaagtatgtaagaacggttttacaataccgattgtttcttctgtgcttatgtatggttattacatttgtaatactacagttatttagccgttgcatgcatgaatggtgtgtcttctacc

SEQ ID NO: 15032 - DNA, 855 bp, Glycine max
  Clone ID: LIB3049-052-H7_FLI
gacgctcaattcattttcttctcctctctctctctcctagggttagggttttctctcttcatcactctctgtgtcgctccgtttcaatggctcagcaagacgctcaaaacggcgggtcggagaatgccgctgctgctgctacggtgtcgtttgtcgctgtgaagccgcagctcctcgtcgaagctcccaaagccaacgacgccattctgttcttcaaggctgcgtttggcgctgaggaagttggccgtacgctcaaccctaagcgcaaagctgagcacgagctccctctcatactctccgcagaactcaaaatcgctggctccaccattctcgtcgccgacctcgttgatgacacttcttcgccagcgaaaacggggggaaacggtgtcgttttgtgcttggagacggaggacgtggatggggcagtagctaaggcggtgagcgctggtgcagttgcggagggcgaagtagcggaaggtgaagtcgcgtgctgcggcgggcgcgtggggaaggttaaggacccgtatggcttcgtttggctcttctgcactccagggaagaagtgtgctgacgtggaggcttaatggcctttgatgttgttctgagtctaattgtttggattatcagttttagttgtagaattgattagggaaaggtcgtacgtgtctagttaagacatttctcttcttcagtctttcagtcttttatatctaagtgggattagtattaatctaatggttacgcgtgtatttctattttgaatattttgaagtgcttctcgtttgtcattagactcattatgaatgacattagttgttgacacattaaaatagtcaaatttatcttctctttcgg

SEQ ID NO: 15033 - DNA, 1147 bp, Glycine max
  Clone ID: LIB3049-054-C7_FLI
gttcttcttctttaccatagagccctttcttctcttcccccattttttcctctttcttcctcgcctagctagctccagaaaattaggatctgcttcagatctagtgtttccctgtcccaaatcacgagtccattgagtttgattttgtggatgaaaagcatagatagggcttttgcaaaactctccaatgtttcttgaaattatatgaccatgcgtcgaattcgtatgctgcactccttctccgtcgtgttcctctactggttctacgttttctcatgaactccctcttaaatccgtgattaattagatctatctccttagttaatccttgtcttttccaataattaattagatctgcgtctcctttttggattagtttcttttttggttctgttatcaaatcaaataaaaaatctccttctcggaaatggcatcaccgatccaacaacaacaacgctcgactactacaagttctggatctgaaggaggagatccgcatatcatcgatgagaggaagcggaagaggatgctgtcgaaccgcgagtcggcgcggcgatcgcggatgaggaagcagaaacagctggaggatctgaccgatgaagttagcagattgcaaagcgcgaacaagaagcttgcggagaacatagaggccaagggagaagcgtgcgtcgagaccgaagcggcgaacagcattctgagagcacagacaatggaactggccgatcgattgcgcttcttgaactccatccttgagatcgctgaagaggtcgaagggttatccgttgagattcccgagattccagatcctctcctcaagccctggcagattcctcatccgatacaaccgattatggccaccgcaaacatgtttctgcgttgatcattcctgaggattttactttaattagggttattcagtgcggtagtaactttctctgttatgtgtattatattactattagtgttatctgtctgcatcaaaagtatcgtgtggtcatcaatgcattgggttcctgagagagatgaatgtgaggtacagggtgttgatggctggtagtggcagtgtgtgtccctttgcgcgacttgtaatcattttttatggtggctgttttattttaattaaaagtaatctcatcttctatgtttg

SEQ ID NO: 15034 - DNA, 644 bp, Glycine max
  Clone ID: LIB3049-054-D7_FLI
atcgcatttcatagcactcaccctcattaccaacacgaaagcatagccaaaaccttttttcgaagtctctgattttcctaatggctccggcaaaggcagagaagaagccggcggagaagaagccagcggcggagaaggcaccggcggagaagaagccgaaggcggagaagaagatctcgaaggaaggagggagcgagaagaagaagaagcgcacgaagaagagcgtggagacctacaagatctacatcttcaaggtcctcaagcaggttcaccccgacattggtatttccagcaaggccatgggcatcatgaacagcttcatcaacgacatcttcgagaagctcgcccaggaagcgtcgcgtttggctcgctacaacaagaagcccaccatcacctcgagggagatccagaccgccgtgcgtctcgtgctccctggtgaattggccaaacacgccgtttctgaagggaccaaggcggttaccaagtttaccagctcttgaattagggtttgttaggcggttgtgttgcagatctagggttttctgtggatttcttttcttaaaaattagtttgtagatgtaatgatctgaacagttgttaatggaaggtttcgtttgaataattataattgcatgactgtggac

SEQ ID NO: 15035 - DNA, 618 bp, Glycine max
  Clone ID: LIB3049-055-F3_FLI
gattccagcaaagcgcaaagcattctccactacgattcgctcttccagaagcttccagaaaactccagatggcgcgtacaaagcaaacagcccgtaagtcgaccggcggcaaggctccccggaagcagctggcgactaaggccgcccgcaagtctgctccggcgaccggcggagtgaagaagccacacaggttcaggccaggaaccgtggccctgagggagatcaggaagtaccagaagagcacggagcttctgatccgaaagcttccgtttcagcgtttggttcgtgaaatcgctcaggacttcaaaacggatctgaggttccagagcagcgccgtttcggcgctccaggaagccgctgaggcttacttggttggtctctttgaagacactaacctttgtgctattcacgctaagagggttaccattatgcccaaggatattcaactcgccagaagaatcaggggcgagagggcttagttaaataattcactttggtttggggtttaagtgtctttgttttaacgccttgtgtgtgaatctagatcgttgagcagttgctgattagatttcttgtaatgatggtcttatatatgtaatcaagtatttgtctcttagc

SEQ ID NO: 15036 - DNA, 820 bp, Glycine max
  Clone ID: LIB3049-056-E1_FLI
gatccacacctctctctctctctcagaatttctatctatctcttgtttcaatttcaacaacggttactcctttttcgttttgagtttcaatcaagccatcatcatgtctaccgcatcgcaacccaaggccaagaaaacggcgtcgtccaagaagcccctctcccaccctcccttcgccgtgatgatagcagaggcggttgcgagtctgaaagagagaaccggttcgagccaatacgcgataaccaaatacatcgaagggaagcacaaggagttgcctgcaacctacaagaagcttgtcctcgttcatctcaagaaatctgttgctgctggcaagcttgttaaggtgaaaaactcctttaagctcgcaccgactaagcctgctccggttaaggccgctgctcccaaaaagccaaccaaagctgccactaagcccgcttccaagcccaaagctgctactcctaagaaaaaggctgttgccaagcccaaggccaaagctgcggccacgactgccaagcccaagtctaagcccgctaaggtcgcggccaagaaggtcgctgctaagccagctaagaagaagacacccgtaaaggccgtgaagaagcccaagagtgtcgtgaagaaacctaagagcgtgaaatcaccagcgaagaagactaaggctaaggctaagaagtgatgatttggattggggtttggttttggtttggcgttatagttttatgcattccgggttcattcgtagtagtataggtgaatatatttttagaagagtattgatgtaaatcctttttctagaaattcaacaagtgttcttgtttac

SEQ ID NO: 15037 - DNA, 1120 bp, Glycine max
  Clone ID: LIB3049-056-G12_FLI
gacaacaaaatttgccaattgccatttcaatcctcagtttctttcttcaacgtttccatcatacacagatcccaatcctctctcaagccctaatttcccctcatttccatggccacagaagagcccactgtcgcggtggaacccgctcccgaacctgcctccgccgatcctcccccggaggagaaggaggagaccaaacctgaagccaaggctaagaaaaccaaggagcccaaacctaaaaaggtttccagacctcgcaaccctcccactcatccttcctacgaagagatggttaaagatgcaattacctcgctgaaggagaaaaccggttcgagccaatacgcgattgcgaagttcatcgaggagaagcacaagcagcttccaccgaacttcaagaagcttcttctctaccatttgaggaagctcgtcgccgccggaaaactcgtcaaagtcaaaggctcgttcaagctcccacctaccagacctgctgcatcttcttcttcttcttcttcgccggcaaagaagaaaaagcccgcagctgccaagtccaagcctaagcctaagcccaagcccgctgcgaaagccaaggatactaaggcaactaaatcgaaggcaccagctaagcccaagccagctgctaagcctaaagccaaagctccagccaaggccaaacccgctgctaaaccaaaggcttctgctgctgccaagcccaagcctgctgccgccaagcccaaagccgctaaaccagctgccaagtccaagcctgctgctaaaacaaaggctgttcctgccaagcccgcggcaaagcccaaagccaagcccgtcaaggcttcaaggacgtcgacgaggacttcaccagggaagaaagcagctcctgctgctaagcccgcggcgaagaaagttgcggtggcagcgaagaaaacgccagtgaagagtgtgaaaccgaagagtgtaaagtctccggccaaaaaggctacggccaagagagggggtaggaagtgagaaagagtggtcggtggggtagggttgttttggggttggtgttgtgaagttctttgtcctcttggtgtagttgggggttacagatgatgttcctataacagatgaaatctgattttac

SEQ ID NO: 15038 - DNA, 484 bp, Glycine max
  Clone ID: LIB3050-002-C10_FLI
gtcgtcggaggcggatgaattggagagggttccggcggggacgtactgcgtttggagaccgaattcgccgcaggcttcaccaggaaagtgcaagaagagcaattcgacaggatcgtcgtcgtcgaagaagtggaagcttctggatttgctttaccggagcaacagcgaggggaaggagtcgttcgtgtttctgacgccggcgccggcgccggagaagaaaagggcaaaccagcggtggagcattgaagtcgccgaaaaatcgaaggggaaaggtttctccggcaagaagaaggcgccggtgtcggtgcacgaggctttgtatcttaggaacagagaattgagaatggttgataagaaaaagtcgtttttgccctataagcctggcttggttgggttctgcaccagtcgtttgggcaaggcatttccttcattctgaggactttgctaaatgaatttcctttcaaattttccctatagttatttt

SEQ ID NO: 15039 - DNA, 1369 bp, Glycine max
  Clone ID: LIB3050-003-D3_FLI
aagacgacagaagggggcagcaaattctgtgaagatgaagttcacggtgtcaaatctatcaagctctatgttcctcctcgtgttattcatagctcttgtctctcatacacacggaagcaagatcgaccaccatagaagcaacaaacatgttgccctcttcatttttggcgattctttcttagacgctggcaataacaactacatcaacgcaacaacccttggccaagcaaatttctggccctatggggaaacatacttcaagttcccaacggggagattctctgatggacggttgatatcagatttcatagctgaatacgcaaaccttccattggttccaccatatttacaacctggcaatagcaattactacggtggagtgaattttgcatctagtggtgcgggtgctcttgttgaagcttttgaagggtcggtaatacccttcaaaacacaagcaagaaactacaagaaagtagcagctttgttgaggcacaagttaggcagttctgaaactaaatcattgttatcaagcgctgtctacatgtttagcatcggatccaatgattatcttagcccgttcttgacacattctgatgttcttaactcttactctcattcagaatatgttggtatggttgttggtaacttgacttccattatcaaggaaatatacaagagaggagctaggaaatttgtgttcatgaccttgccacccctgggttgtcttccaggcactagaataattcaattagaaggaaagggtaaatgcttacaagaactttcagcccttgcaagcttacacaatggagttctaaaagtagttctcttacaattggataagcaattaaagggctttaaatttgctctatatgatttcagtgctgatctcactctaatggtgaaccatcccttgaaatatggtttgaaggagggaaaatcagcatgttgtggaagtggaccatttagaggagtgtatagctgcggagggaaaagaggggagaagcaatttgaattatgtgacaaacccaatgaatatttattttgggattcttatcatcttacagaaagtgcttacaaaaaattcgcagatcttatgtggggcttcaccaacaactcttcaaatatagggccttacactattggagatctcttccaactcccatgacttgtttacttggctcattgtttttcttgcaacaaattaagtcaaaatgttgatcattataccttgattgtgttaacaaattgcatgtataaccgcttggtccagtaataattatttacgtaattgatggtacaatacaattataaagcttgtgtaatttaaatgaattgaattttgaagaaaggaaatgtgatgaattgtgcc

SEQ ID NO: 15040 - DNA, 655 bp, Glycine max
  Clone ID: LIB3050-003-F3_FLI
gcgagaagacgacagaagggggaaaagaaaccaaagaaaacgcgatggttgacgtggactttggaacctcgggctcgccgaagcgccacaaccacaacggcttcatcgtaacaatctcggcgatcttggcgctgttaaaaaagcgcaaagcagcagtgaaggcgagcaaagaggatgaattgaagaagtcgtcgcggccggagaagcttctcagcaacataagcagcaaagcgcttttcggtcacaagaagaataataagaagcagctgcgaagcgtggaagagacacaacaagcacaagggtggggaaacggcggcgtttggcagaaggagattctcatgggtggcaagtgtgagccgttgaatttctccggtgttatttattacgatgggaatgggaagcagctaagccaaatccctctcaggtcgccacgcgccagccccttgcccggttacctcacgcgccgccaatgaatcatccatcaccaccgccacgagcgatttcagatcacgcgcgtctcttatttttgttttaattttagttttcttgaatttaatttaatttcaagcttctgtttgtttggctggttttctaggttgttgctttcttcgattttattgtttttttcatcggataaatattaattattagtacc

SEQ ID NO: 15041 - DNA, 617 bp, Glycine max
  Clone ID: LIB3050-004-G8_FLI
gagagaaagagagagaaagatgtcgaagcgtggtcgtggtggttcggcggggaacaagttccgcatgtcgctgggtcttccagtggcggcgacggtgaactgcgccgacaacacgggggcgaagaacctctacatcatttcggtgaaagggatcaaaggccgtttgaaccgtcttccctcggcctgcgttggcgacatggtgatggccaccgtgaagaagggaaaacccgatctgaggaagaaggtcttgccagctgtcatcgttcgccagcgcaagccatggcgccgaaaggacggcgtctacatgtacttcgaagataatgctggtgttattgtcaatcccaagggagaaatgaaaggttctgctatcactggtcccattggaaaagagtgtgctgatttgtggcctaggattgcaagtgcagctaacgccatcgtttgagtggaatttcttgttatgtttaagcttgtaggatttaagtgtgtctcagattttgtttaagcttgaaattggaatacaggtgatacagatttttaatcattcgtaacttataatcagcttgctttttgaagagacgatattaattattaattaagaattttgttttttgtttccc

SEQ ID NO: 15042 - DNA, 521 bp, Glycine max
  Clone ID: LIB3050-006-E7_FLI
atggaaaaagaggatggaacatcttgcaaaacttggtgaaagtgtggagagtgctagtagaagaagatttatgatccttcagagagccaatgtgtcttcatagtttcatccctagcaaaatttcgtacgtcctggactcctgggtgtaactaactgggaactaggtccatcctaggagaaattgttatatgggtctatgtggtctcggtcaatctttacatgatatgctttaactctttttcataaattgaaaaatgtgattatatgtcccatatagattcatcgggaccccatagttccggaccatgtaacaatttctctctttctcagctaatgatgatggatagacaaagcaggcaaagttctatgtggttgatgtatagaatggagaacactaacagcactacattgctaatgatcttttgagtggccatatatttttgtttgatatgaatgagagatataaatatattagtggcctttgtattgttaatatagaaactagaaagtgattctatggg

SEQ ID NO: 15043 - DNA, 504 bp, Glycine max
  Clone ID: LIB3050-007-A6_FLI
agggaaagatgcaaccaatgattttgaggatattggtcacagcaccagcgccgtagccatgatggatgagttctatgttggagacattgatacatcaaccatccccagcaaggttaagtacactcctccaaaacaacctcactataaccaggacaagatgccggagttcatcatcaggatcctccagtttctagttcccttgtttatcttgggtttggcagttggtattcgtttctacaccaaatcaacataatcatttaactgcaagagcacatgaatataggcatttgcgatattgtgttggtgttgaaagaccccccagtttgttttatcttttttgtgctgcgatgacgaggggttgctaggatatgccatatgaattgtgcttgtttcccttttcggtgtaatttggtgttaaatatcagattgcctttctctgtcactgatttgctaaaggagcaattttctgcagtttaaacttataaaattttggtgattctaaat

SEQ ID NO: 15044 - DNA, 545 bp, Glycine max
  Clone ID: LIB3050-008-F6_FLI
ggacgggacatggagagttacgggtcgggtcatggttcgggtcaccgtccgcacggaggtggccgtaagatggaggttgtgagcggcaaaagccacggttggagttctactaaatcaccggattcaactcaggcgagtgaaatgccgtggagattcggcgatcctgaagcgaagaggaagaaaaggatagcgaagtacaaggtttacggcgtagaaggaagggttaaggctacgctcaagaaaggtcttcgatggatcaagaaaaagtgttctcagatccatggctactagtagaaatactcagaagccagccacgtcaaatgctgacgtgtcagtatctaaatgttgggatgctactcctcatatcatatcacatgcaaagggtcaattctttgtttatttatcctttcactcaaaccactttatgcatctattgtgcattgatagaggatttctaatttctatcttgtttgtatgatcacaagggtcttccatgaaatatgagccattaatagagttctatttctaatcggaattttgatgcc

SEQ ID NO: 15045 - DNA, 600 bp, Glycine max
  Clone ID: LIB3050-008-F7_FLI
agaacaagaggaacagagaatgtaaagaaggaggagggaaggagaaaatatagaggggtgaggcagaggccgtggggaaaatgggcagcggagataagagacccattcaaagcagcaagagtatggttaggaacatttgagacggtagaggcagcagctagagcctacgatgaagctgcccttcgttttaggggcagcaaggccaaactcaacttccccgagaatgtcactctccgacaacctcaattcactgtttccacatcaacagacccatttcaactctcgggtaccaacctttatgatcataggatgtttctgacttctaataccatggcttctcatcatcttcaatcttctttgccgctgccaccagcaacctcctcttctctaacttctcctcctcagaacatcacttcactttcttccttgtattctgcccagttgcccccatggtcggcctctggtcatagctcttcttcctccccatgatccttttttgtttctttgtttttattgagtctatattttcccgtcttttatcgtatctctccatttttttcaaacactaattaataataataataataattattcctctac

SEQ ID NO: 15046 - DNA, 996 bp, Glycine max
  Clone ID: LIB3050-008-H5_FLI
cacaagagccttgttgatgctgtgaagcaggttgatgttgtcatcagtgccatctctggtgttcacatcgggagccacagcatcactctgcaactcaaacttgttgaggccatcaaagaagctgggaacgttaagcgtttcttgccttctgaatttggcccagacccagcaaggatggggcatgcattagaaccaggaagggtaacatttgaagacaaaatggctgtaaggaaagcaatagaggaagctaatatccctttcacttacatctccgcaaacctctttgctggatactttgctggcagcctctctcagatggggtcttttgtgccaccaaggggcaaggtacatctctttggagatggcacactcaaagctatttttctggatgaagatgatgttgcaacatatacaatcaaggcaatagatgatccacgaacccttaacaaaacattgtacctaaggcctccagaaaatattatctctcaagcagagcttattggaatttgggagaaacttattggaaaggaactagagaagacatacatacctccagaaggctttcttacaacactgaaagggttggattataaacttcaagtagggattggacacttttatcatatattctacgagggatgtttagcaaattttgaaattggagaggaaggagaagaagcatccaagctttaccctgaagtgaattacacacgcatggacgagtacctaaaaatttatgtgtaaaaggaactcattcagtaggagttcagtgattcaaacaggaacacggtttttagctacaataaccttaatttaaggagatgattttgtgcttataattcgatggggaaactggatttttcggatcttgaaatgtgaacgagtttaactttatcattaatttaagctctgttgtttttgaaagggtacggagactttacttataattcgatattgtcctcatccaagaagacgttgagaaacgagtttattgac

SEQ ID NO: 15047 - DNA, 723 bp, Glycine max
  Clone ID: LIB3050-009-H5_FLI
gggggaaatgggcagcagagataagggacccattcaaagcggcaagagtatggttaggaacatttgacacagcagaggcagcagctagagcatacgatgaagctgctcttcgtttcagaggcaacaaagccaaactcaattttcctgagaatgtcactctccgacaacctcaattcactgtttccaatcctccatcttctcttgtatctattacaacatcaatagacccagttgttcacagtactcgacctctccttcttccttctcaggcttcaactgcgaccaatgtttacgagtattttcaactctcgggcttccccaccaacaccaaccttttatgatggtaataggatgtttgtgacgtctaatgccatggcttctcatcatcttcaatcttcgtcttcgttgttgtcgtcttcttcttctgcgtttgtttcttctgtaacttcttcaggacacttcacttttttcgttgtattctggccagttgccaccatggtcaaaggtttctggtcacagctcgtcttcctccggatgatcctttttgtttaatgtttatggaatctgtatttttcttctttcattatcataatctcttcatttttttttaaaaaaaacattatacttctattatctgtaattgcaagactagcttgccaatacgtacattcatgattcatgactttagatgattaagatgtttatggaggaaattatggtatt

SEQ ID NO: 15048 - DNA, 829 bp, Glycine max
  Clone ID: LIB3050-010-A3_FLI
cacaaaggtgctttcttccagaatgaatctgatgaccgagctgccactgttggatctgatggtatttttgctcgtgatttctctgctccaactggggaggataaaatggacaagacaatattacctaaggttatgcaagtcaagcactttggtcgtagtggaagaaccaagtggacccatcttgtcaacgaggatactactgattggaataacccgtggacttacaatgatccacttcgtgcaaagtataatgacaaaatggcagcaatgaacgcacctatagtgaaacctaaaggaagcaggaaattaaaggattgggaatctcgatgaacttgaagttacaaaagtatgcatgaagatatcatcctttcagttattagactttggagaaataccagagtagatatgtccttgtcctatgtatgattgtgttctgtcttaaacagaacgtaaagtagttcatcacggttggagcgtgtatgttgtggaccatggaaggcaattgtgacgagaattcagcactactttatctggatattcttccccagttaatgaatcatagctgatttagagtcctgccagcccagcctaatgactatgtcttcctttctttgttttgtcatcattttgacttaattactgcctggctatgaggatttaattgagtttgctgcctatgttgatgctttaggagccactctttttcaaactaagatcatttatatgtgcaacttcgatactgactggaactcccaagagtgacactgaattgatggtgtcaattggcgtaccagtacactagtaaatgtagcataaacttccatgttag

SEQ ID NO: 15049 - DNA, 606 bp, Glycine max
  Clone ID: LIB3050-011-A10_FLI
gttggatgatggctacaagtggaggaagtacggacagaaagtggtaaagaacacacagcacccaagaagctactaccgttgcacccaagataactgtcgagtaaagaaacgcgtggagcgcttggcagaggatccaaggatggtgataaccacatatgaagggagacacgtgcactcgccatcaaatgaacttgaagactcgcaaaccccttttgaacttagtaatttcctgtggtagtagcatacaccatcataatgtttacatatatgtatattttaatatatcgtagagactagagatgaagaccgaataagtagagaggaatgagtaaaaattgacagtgtatctaggaaatggtgcatgcatgctttggttcattgtcaattttcactcgtttccatctaatattcctcccattttcaccctttccaaaagcacaacatatatatgtggttgtgttttttagttttcaagcgtctagatcaacatttcagaagtgtacttaacagtcttggtggtgtttcataaaaactcaacagcaaattaaccagtaatatttgtaagttgcaaactgggttcaagcttttaattatttttttgcgcac

SEQ ID NO: 15050 - DNA, 858 bp, Glycine max
  Clone ID: LIB3050-011-A8_FLI
gactgcatttcccacctcaatattaatatatttctttccccacaagagagatcatggaaaaggatatcattcatctttctccaacatgggatggtgacaatggcaattccactgagaaaaggctcaggctatttggttttgagctaaacccttctaaagatggttatgccaaagaatctggtgaaggagatgaaagtgtgaactcctctaactcagtttcttctggaggagacaaaactgtgcaagagaaaccctctgccaaagactctgatgagagaaagtttgagtgccaatattgttacaaggaatttgcaaactcacaagccctaggaggccaccaaaatgctcacaagaaagagagaatgaagaagaagaggttgcagcttcaatccataaaccgctacctacaacaccctttccaatccaagcatggctttgctcacccttctgatactccttggttctatgacccctctacctataataactctgagttcacccttagtgaagaacctcagattagcttcaattcaaatgttttagatgccaacttttcttgtgaccagaaatctagttggtattctcttgcatctcacccttctaattcccaacaagatacttgcatgtttactttctccaatgcaagtaataatagtcctttcatcttcaagccttgccacttccctgcttcaaatcagagccataaaagtaaagccctagatcttcaactaggcctcaacttgcagtcaaatacaagaagttccttaagaaggatgtaatttaagtatatataggacacataagttaaattaacagtttccttgaattattttaatgcatcaattctcaaacatctgg

SEQ ID NO: 15051 - DNA, 602 bp, Glycine max
  Clone ID: LIB3050-011-F6_FLI
ggtggagtataattgctgcgtgtgcatggtgcggcataaaggcgcggcgtttattccgtgcgggcacacgttctgcagaacgtgttcgagggagatttgggtgagcagagggaactgccctctctgcaacaatttaattttggaaattcttgatattttctgaacctggtaataattttcattaatctttcaatataacctttttaatctctatctatgaatttttctttttctttgggtttggggaagaaactatttctactattagattaggatcatgtggttatgatgaatttgtacgtgacatgtgattatgatttgtgattaacaaaatggaattagtaacgtgtcatgaagattggttagaatcaaatgtaaaggagtggattatggatgattttatttacacatttactgtgtgtcatatatttggctcacgtgttcatgtgatgagatgctgtatcttccggtggattctagttgtgcttagacgataacgtgttactagtgagagagtggacaagctatggaatgataacttcaaatgtggtttacacgattgtatatatttatctttttatttttaatttggctattgatgg

SEQ ID NO: 15052 - DNA, 783 bp, Glycine max
  Clone ID: LIB3050-012-B4_FLI
gggacaagatttggagggcctaagtatcaaagagctttagaatttggagcatcagcttgaaagtgctctcaaacacattagatcacggaagaaccaactgatgtatgaatctatttcagagcttcataaaaaggataaggccctacaagaacaaaacaacactctcgctaagaagataaaggagaaagagaaggcactagcccaacaggcacaactggagcgacttggtgatgaagtggatctgacttcctctgcccttgttccccaaccactggtgacatcaaacattagaacctcctcacaaatcagaggtgaaggagataacgaaggaaccccaactccaacccaagctaatgccattcttccaccttggatgcttcgtcctacaaatgaatagaatactatttaattaatgacataaagttttaatcaaattaaatatgaatatggccaatacaaagctcaccctacaagatgtaaaatggtctagtgtgttgatttgggaatggcacccggtgacttgaccagttggaatatcaacgatatgtaatatgtctgtgactaccacatttcaaggatgcttagtaaattatatggtatggcctgtctatacaggcctacaatacatatatagtgtcaattatgtatgtttggttcttatcaaaagtttaagttgtgctagaaactacgatattgggcgatgttagatccctcaaaatctatgattttttacaacagaaatattaaattttgtatgaactaatggttttatctaagtgttac

SEQ ID NO: 15053 - DNA, 649 bp, Glycine max
  Clone ID: LIB3050-012-F12_FLI
gattgaccgaacaaagactatggctgatgtctacggtgctttttttgattttgcttctatgttggagcccaaggttgacaaaaacggtcccaatgcaacaaaaacattgagcaggctggaagctatacagaaaacttgcagagaatctggtctcttaagtaaaaggaaatcttacattgtgaatgatgaaagtggatatggctcaaccatgattgtcatattggtcatcatggtttccatcatttttgcttatctgtctgctaaccaccataatagctagtgtaagttctgttgttaattttaatgtacggttgaaattgtaagaacaattatccttatctataaaattgttcactcctttttttgttgcaactaaccatgccttcttgccttttgcgatcatggatagtagtgaaacactgatagcacgcctcgttcatggaatgcgaatttgcatgcatgcaagcaatagtatgatggctgcagttgactatcgtgtattttaattgaaaaatagtcgaatatagcgtcaagagcttcttgtgttagtttggatttaactctgtcctacgttcatcccgaaaattatcattattatgtgtgttataagttgattgtattaacatttcacggataaagttggaatacc

SEQ ID NO: 15054 - DNA, 692 bp, Glycine max
  Clone ID: LIB3050-014-D7_FLI
tggggagaaacaaaagaaacaagaaaacaaaacgcgatggttgacgtcgacgttggaacctcggactcgccgaagcgccaccacaacaacggcttcctcgtaacaatatcggcggttctggcgctgctaacaaagcgcagagcagcgaagccgaccaaaggggatgagtggaagaaggaattgaagaagtcgcggccgaagaagcttctcagcaacataagaagcaaagcgcttttcggtcacaaccacaacaacaagaagaagctgcgaagcgtggaagagacacaacaagggtggggaaacggcggcgtttggcagaaggagattctcatgggtggcaagtgcgagccgttggatttctcgggtgtgatttattacgatggaaacgggaagcagctcagcgaaatccctctcaggtcgccacgcgctagccccatgcccggttacctcacgcgccgcctctgaaatctgaatgagtcatcaccaccgccatgccgatcttagattgtgcatgtctctattttttgagtaaatgttagtttattagttttataaatgctgcagattcaaatcccttccgtttgtttagctagtttaatttttaggttgttggaaacaatatttgaagacgtcgttttatagttttaacgtgtctaaggtttattccggcacatgaggtaatatcttttttc

SEQ ID NO: 15055 - DNA, 539 bp, Glycine max
  Clone ID: LIB3050-014-E7_FLI
ctgggcattccatttaatattgcatcttatgcccttttgacatgcatgattgctcatgtttgtgatctcattcctggtgattttattcatgttattggggatgctcatatttaccgcaatcacgtgaggcctttgcaggagcagctccataaccagccaaagccttttccaactttgaagataaatccaaagaagaaagatatagattcttttgtggctgctgatttcaagctcataggctatgatcctcaccagaagattgatatgaagctgtctgtctaaaatctggggattctcactccttcaggcacaaccttaggaagattatgttaaatctgtgtacaattaaagaacatatcgtagcacatacttcatcgcataaatactgttacttaagtaggaattctctggctccacctgttatgcctctaaggtgatttagattaacttaatttccttcctttccaaggtacacgctctattgtacttttgagggatctgaaactcgatgtttaagataaagccggtgtttttatgcc

SEQ ID NO: 15056 - DNA, 417 bp, Glycine max
  Clone ID: LIB3050-015-F6_FLI
gggcagaagccgatcaagggatcgccgtacccgagggggtattacaagtgcagtagcgttagagggtgtccggcgaggaaacacgtggagcgtgctccggacgatccgacgatgttgattgtgacatatgaaggggagcaccggcactcgatgcaggagaacatttccgggggagtgggtttgggattcgagtcaacgtgagggtggttgcaatgtaaatctgacattattaaaagaaaagattatattacaggggaatcttaatcttctcccaccaaagtcttcttattcaactttttgaaagtagtttggagccaagtgtgaattagaagggtagtttgtttagtgggaatggtaaaaggtcccaatccaagttgatgcctcggaatgggaaaaatggaatgacgtttaaactcc

SEQ ID NO: 15057 - DNA, 812 bp, Glycine max
  Clone ID: LIB3050-017-A10_FLI
gattctaatcacaacaactaaccaacgtagttatggcttcctctctacacaactatgttcttgctatcttacttttggccataacccaattcaaaaccacatctgcgggctcccatcaccacctccagcacctcaaatcccttcacttctctctgtttcaacacgagaccataaacaaaaccggatacatcatagtggatggtataaaaggaggagcaggggtgactcaaaccacaaccccttttggcaccttatttgcctttcaggaccctttgactgttgcagccaacaggtcctccaaactagttgggattgtagaagggactacagtcacatctagtctcgacgggcttcggagcatttcgatcgccaagctaaccctgcgtttgaagcaccacaagggctccctttccattgttggtgtcacaaacaatgtcaaaccctctgatcttccagtggtaggaggcactgaagatttcatgtttgtgcaaggctatattagtacttctccagttgatctcaagggtcttactgttgtctacaagattgagtttcatctttactggcccccatatgcaactcaagcctcatgaactatgttgcatgggtagaatttatgtatgttgtgaattttaaggtatccctgtatctatggtcatgaaggtcctgaacaagaacagtctaataattttgtttggaaaattaccacctgtagcgttattgtcttcgtttaaatttgttcttggtagtcagtaatttctattgtatttccaagatgttgattcaagtggttaatcttccattttcttggc

SEQ ID NO: 15058 - DNA, 786 bp, Glycine max
  Clone ID: LIB3050-017-B3_FLI
ggtataatggcacattatgatgagatatttaggctgaaggccaatgcagctaaggctgatgtcttccatttgctgtctggaatgtggaagacaccagcagagaggtgttttctatggcttggtggttttcggtcatctgaactcctcaagctcctggtaaatcagttggaacctctgacggagcaacagttagtgggtatcaccaacttgcagcaatcttcccaacaagcagaagatgctttgtctcagggcatggaagcattgcaacagtccctttctgagacattatccactggatcacttggctcctctggttcatcaggcaatgtggcaaattacatgggtcaaatggctatggccatgggtaaactagggacacttgagggattcattaagcaggctgacaacttgcgccagcagacgttgcatcaaattcaccgcatattgacaactcggctgtcggctcgtgcactacttgcaatacatgactacttttctaggttgcgtgcccttagctctctttggcttgcccgcccaagagactgatgggggtaaatagtgtgtcattaattttcatggatctggcaccagaatcctttggcataggttttttactcttgcaattttactgtgttgtagttctcacattactgatattagtttcagtaagttattatctagaaactgaattggtgacatgacaagggtatgtattttgtttattactactaacgtaataatattgtctattgtaacacagttgaaggaatttagatgattttatac

SEQ ID NO: 15059 - DNA, 992 bp, Glycine max
  Clone ID: LIB3050-017-E9_FLI
ggtagaatttgttgttaagaatacagaggccattcaagctaaggctggaagatacaaaaaccctgaagaaaacgccttcttcccagaaaatttaccaccatcaattgtgccatcttactccttcaaacagtttttgcatcctggagctgcttcaattaacattaacaagtccatctggaaaatgtatttccaagagttacttccattggttgctacttcgggggatgatggaaactatgcacaaactgcagctaatgatctttcattattgcaggccatctctagaaggattcactatggaaagtttgtagctgaggtgaaattcagggatgctcctcaagactacgagcctttaattcgagctaaggataaagaaggattgatgaaattgttgacatttacaagcgttgaagagacggtgaggaagagggttgaaaagaaggccgcagtgtttgggcaggaagtgagtcttgacaatgaggacgatgatgaggaaaaccataagtttgatccatcagtggcttctagcttgtacaaaaattgggtgataccctttaccaaggaggttcaggttgagtacctattgcggcgtctagactgaaggcattataatgcagttagaaatttacaagaatggaagtgaatatgatgttgttgttcaaatgattaagctcttaagtgatcctttattgccaacttcatggagctgttgattaaaaaatattaaattgtagctttagattgttacttttattttcatcggctttattagaagaaaaaaaaaggattagatcatgaacttcaatatgtgtcgtgagaaaacacattttcgaactagaatctcagcccttttcctggcctagtttatcaagggattagattcctttcccatgatgggaaacatgccttgttctcccatgctagccaaatcctcaaatctaagcctttgatagtggtttcacttggtgtcttcttaataaaaaaattatccc

SEQ ID NO: 15060 - DNA, 326 bp, Glycine max
  Clone ID: LIB3050-018-A3_FLI
ggaagatattgctgaaggtcttgagaatggtcctgcagccttggttggcctctatagtggtcgcaatgttggtaaacaagtggttgttgttgctcgtgactgaatgcagatgctttcgttggacgttgctgtctttttttatgattttggtgttgaatattcagggctctttgtatgttttttgcaatcattttcaattgtggtatttgtgatagcagtgtaacttaagcaactcttagttgaaacgtattccctgagtggtatcatatggtaaagccttttgttacttaattttgttgtgaagatgaggatacaatttcgttacg

SEQ ID NO: 15061 - DNA, 1840 bp, Glycine max
  Clone ID: LIB3050-018-B5_FLI
gaacccaaccaaactgaaccaaatcatcacacacacatactaagaagcaacaattcttctacaatggatctcctccttctggaaaagaccctcataggtctcttcctcgctgcggtggtcgccatcgccgtctccaccctccgcggccggaaattcaagctcccaccgggcccactccccgtcccaatcttcggcaactggctccaagtcggcgacgacctcaaccaccgcaacctcaccgatttggccaaaaaattcggtgacaccttcctcctccgcatggggcagcgcaacctcgtcgtggcttcttcccctgagctcgccaaagaggttctccacacgcagggcgtggagttcggctcccgcacccgcaacgtcgtcttcgacatcttcaccggaaagggccaagacatggtcttcaccgtctacggcgagcactggcgcaaaatgcgccgcatcatgaccgtccccttcttcaccaacaaggttgtgcaacaataccgccatggatgggaatcggaggctgccgccgtcgtcgaggacgtcaagaaaaaccccgacgccgccgtctccggcaccgtcatccgccgccgccttcagctcatgatgtacaacaacatgtaccgcataatgttcgaccggaggttcgagagcgaggaggatcccatcttccagaggctaagagccttgaacggagagaggagtcgcttggcgcagagctttgagtataactatggtgattttattcccatcttgagacccttcttgaagggttacttgaagatttgcaaggaggtgaaggagacgaggttgaagcttttcaaggattacttcgttgacgagaggaagaagcttggaagcaccaagagcaccaacaacaataatgaacttaaatgcgctattgaccacattttggatgcccagagaaaaggcgagatcaacgaagacaacgtcctctacattgttgaaaacatcaacgttgctgcaattgaaacaactctatggtcgattgagtggggcattgctgagcttgtgaaccacccagagatccagcaaaagttaagggatgaggttgacagagttcttggagcagggcaccaagtgactgagccagacatccaaaagctcccatacctccaagcagtggtcaaggaaactcttcgtcttagaatggcaatccctctccttgtaccacacatgaacctccacgacgcaaagcttgggggctatgatatcccagctgagagcaagatcttggtgaatgcgtggtggctggccaacaaccctgcacactggaagaagccagaggagttccggcctgagaggttcttcgaggaggagtcgcttgttgaagccaatggcaatgactttaggtaccttccctttggtgttggcagaagaagctgccctggaatcattcttgcattgccaattcttggcatcactttgggacgtttggtccaaaactttgagctcttgcctctccctggccagtcacagattgacactagtgagaaaggagggcaatttagcttgcacatactcaagtattccaccattgtggcaaagccaaggtcattttagactccaccacatgatcatgatcatatgatcaatccccttaattttttcttttttcttttcccttttctttactctgtattgtatcaatgcttgaaaatggggttgttccaaaaatgtcatatatatttggcctgctaatgggtattgtaaatctctgaacttgaagtgatgcacggttttgagatggttttctaataaacctacacttttgtctctaaatactctgtttcatatagtagaactttattgttgtagc

SEQ ID NO: 15062 - DNA, 792 bp, Glycine max
  Clone ID: LIB3050-019-A6_FLI
ggttttgaatgtactttggacagagttatagaggagcttaaaaattacaatgacttctgtattcaccggcttttacttcattatggtgtcaatgatagaaaggggatccttccagataagcatgttatgctttctgcaaaatgtcgggccttagcagaacttcttccttcactaaaggagggtggtcatcgagccttgatctttagtcaatggacttcaatgcttgacatattggagtggactttggatgtcattggattgacctataaacggcttgatggaagtacacaggtggcggagaggcaaacaatagttgatacgttcaataatgatacttcaatatttgcatgcttactttccacgagagctggtggacagggcttaaacttaacaggagccgatacagttgtaattcatgacatggattttaacccacagattgatagacaagccgaagatcggtgccatcgaattggtcagacaaagcctgtaaccatatatcggctggtgacaaagggaacagttgatgaaaatgtgtacgagattgcaaaaagaaagctagtattagatgctgccgttctcgagtccatggaggagattaatgaaggtgacatgcccgagaagaccatgggagaaatattgtctgcaattttattgagttaaaatattgatctaagaaaaacagtttaatttatcgtcactcctttcctatagttccaatcttgaattaatctgttgatttgggatagaagagaactggcagcctacaaattagtgagattcttctctccg

SEQ ID NO: 15063 - DNA, 815 bp, Glycine max
  Clone ID: LIB3050-019-B5_FLI
gggtttctgaaatcaggcttcccaatagccgtgaacgaatatggctagggtcttatgactctcctgaaaaggcagcacgagccttcgatgctgccctttactgtctacgtggccgccatgccaatttcaatttccccaacacaccttgcaacatggacactgctaccaatgctcctcctaaccaatctcttaccccaccagagattcaagaggttgctgctaagttcgcaaatcaggtgtccccgctactacaaaaacctcaagaacaacctcaacctcaacgtagtagtgatggtggtggcggtggtgctaattcttcatcgtttggatcaaagttgttatgtaaatcagacagcatagcagagagtagtactactagtactactactaattgtacccccaccaccactgcctcgtcatgttctgctactatgtacgaatgtgatggaacggagcaagtggaccgtggggacatgatggattggacattcttgaacgtctttgatttctccaatgaggtggtgcttcctgctgttggatccgactataatgatctctataattctgagctacacaagatgcactcagattcaggtgagttattgtattctactccttttgagggttacgaacaattaattgaagctgatcatcatgatgatgatcctttttctcaccaatcattcctttggaattggaacttttgatcatcatatcatcactcgctactgcatgtgctgctagaatatgatgactactagttaaaattacttgccccagcctaaatatataataaagcatccttgatcttttgc

SEQ ID NO: 15064 - DNA, 860 bp, Glycine max
  Clone ID: LIB3050-022-D1_FLI
gagaagagtgatgtttatagctttggggtattgctcctcgaagcaattactggaagagacccagtggattatagccgaccagcaactgaggtaaatttggttgactggctcaagatgatggttgggaataggcgcgcagaagaggtggtagaccctaacattgagaccaggccatcaacaagttcccttaaacgtgcccttttgactgctttgaggtgtgttgatccagattctgagaaaagaccaaagatgagtcaagttgtccgcatgcttgaatcagaagaatatcccataccacgcgaggatcgaagacgccgaaagagccaggcaggaaatatggagctggaggcccagaaggagacctccgacacagagatgactgagaatccagattccaagtccaatggcagaaggaaccaaaggaagtagagccatgaatctcaaagctaaaggtaccaattcctggataagatacactattggaggggccatttttgcattcttttgagcttctgagtttggataactgccacgtttgacatcaaagacatgggaacaggaacgagttactttgggatggtttgtatacctatattttgttgttatagcatagatgtagatgttagaatgtagatgattgtgtattagtatgggactaaaaagatccttacactacactagtgtgtacagctcattgctattcatacatgccctttgctttttatttgtttcaccactcattaggatcatgaaggaattaatgttttcttgtggaagatgacatgaaaattttaccaaagcatgaaagacagaaaagatgtgcttattgtctataaattgcagtgaggaatttcttgatt

SEQ ID NO: 15065 - DNA, 621 bp, Glycine max
  Clone ID: LIB3050-022-E11_FLI
aagacgacagaaggggccttagagcacgatgttttggaagcgttctcgtccattttgcctccagtttattccataggtcctttgaatttacacgtgaagcatattgatgacaaagagttgaatgctattgggtctaatctttggaaggaggagtccaagtgcgtggagtggctcgacactaaacaacccagtagtgttgtttacgtgaattttgggagcatcgcggttatgacaagtgagcaattgattgagtttgcatggggacttgctaatagcaacaaaaactttttgtgggccataagggcagatcttgtggcgggtgaaaatgctgttttacctccagagtttgtgaaacaaaccgaaaatagaggcctattgtctagttggtgctcccaggagcaagtgttggctcacccttcagttgggggatttttgacacacagtggttggaattcaacgttggaaagtatgtgtggaggtgttccaatgatttgttggcctttctttgcagagcaacagaccaattgtcggttttgttgcaaggattgggggattgggttggagattgaagatgttgagagggaaaaaatagagacccttgtgagggagttgatggatggg

SEQ ID NO: 15066 - DNA, 986 bp, Glycine max
  Clone ID: LIB3050-022-G11_FLI
agaaggggactcaaaattaaccacaagcataagcacaagcacaagcacaagcacttctctaattccctttcacactctattacagatttcacaagtgcttacacttcaaatggctttggaagctcttcaatcacccaccacagccactccatcgtttagtccctttgaagaaaccagtctcagttacttagagacaccgtggacgaaaggaaagcgttctaagcgtagccgcacggagcaacaactgcaacacccttcatgcaccgaggaagagtacctcgctctttgtctcatcatgctcgctcgcggcggcgccggcagtgtctccaccgccaaacccgctgtctccgacaacaattctgcgccgctatccgccgccaaactgagctacaaatgttcggtttgcaacaaagccttctcctcttaccaagcactcggaggacacgaggccagccaccggaagctcgccggagaaaaccacccgacctcctccgccgtgacgacgagttcggcgtcgaacggtggtggtaggacccacgagtgctccatctgccacaagacgttttcgacaggacaggccttgggaggacacaaacgttgtcactacgaaggcggtaacagcgccgtaaccgcctctgagggagtggggtccactcacacaggaagccaccgcgatttcgatctcaacctcccggcttttccggacttctcagcaaggttcttcgtcgatgacgaggttaccagtcctcatccatccaagaagtcccgtttcaatttgaccatacccaagattgaaatccctcaatactgatccatagatccaaaaaaattattcagtgtttttttatatatttttttaagttatttgggattaatttgtccttgtacatatatagtacttgggccttattcgctagttttagcttttagattgtagtatacttttgacagtggtgattcaattcaattcatttatttttatttgt

SEQ ID NO: 15067 - DNA, 672 bp, Glycine max
  Clone ID: LIB3050-023-A3_FLI
gcgagaagacgacagaagggaacagaaaactgactaaacttgacgacaacacagcggattatattcgtaccggtttaagtcctaggtggagtgatctagatatcaatcagcatgtcaacaatgtgaagtacattggctggattctggagagtgctccacagccaatcttggagagtcatgagctttcttccatgactttagagtataggagagagtgtggtagggacagtgtgctggattccctgactgctgtatctggggccgacatgggcaatctagctcacagcgggcatgttgagtgcaagcatttgcttcgactggaaaatggtgctgagattgtgaggggcaggactgagtggaggcccaaacctgtgaacaactttggtgttgtgaaccaggttccagcagaaagcacctaagattttgaaatggttaacgattggagttgcatcagtctccttgctatgtttagacttattctggtccctggggagagttttgcttgtgtctatccaatcaatctacatgtctttatatatatacaccttctaatttgtgatactttggtgggtaagggggaaaagcagcagtaaatctcattctcattgtaattagctactgctgtattctctctttctgctgctccatatttcatttcatctctgattgcgt

SEQ ID NO: 15068 - DNA, 626 bp, Glycine max
  Clone ID: LIB3050-023-C4_FLI
cacgggggacaacataaccctcttctcaataataacggttatgtcattcttgttatcagtacctgtaactttgttgatggagggtgtcaaatttacccctgcttacctgcaatctgctggattaaatgttaacgaagtgtacatcagatcacttcttgctgcactatgtttccatgcatatcagcaagtttcttatatgatactgcagaaggtgtcacctgttacccactctgtaggaaattgtgtgaaaagggttgtgatcatcgtgagctctgtcatcttcttccaaacaccagtatcaccaattaacgcactggggactgctatagctcttgctggtgttttcttgtatttcagggtgaagcgacttaagccaaagacaacttaattttcagtcgtaaaatttttgccagttgcatgacacacttgctagttacatttctgaatttttttttatcataggtcagatataggcattaagggttcttgaccctttattttttcttttaaacagttaggtccccgattttattgtacatgtcttagtggcgcctaatggttctgctataagaaatttttatcaacgtttcaattttgataaagtatgacatccagttacttttatc

SEQ ID NO: 15069 - DNA, 1151 bp, Glycine max
  Clone ID: LIB3050-023-F5_FLI
gaagtgaaaccatcaatcccctgtatatataaccactcttcctctcctccaaattaaaacacttatcatggatgttaagaaaggtgggtctgtagtacaagcacaagtgaagttgcagaagcataacgaaaaggagatgggcatgagaaaaggtccatgggcggttgaggaggacaccattctggtcaattacatcgccacacacggtgaaggccactggaattccgtggcacgatgtgcaggcatgcatgcatcttaattataatttaatttctgcatgtgccaagtaataatggtatatatgttaattatgagatttatcaattacaggtctaaggaggagtgggaagagttgcagattaaggtggctaaactacttgcgcccagacgtgcggcgtggaaatatcacactccaagaacaaatattaattctcgaccttcactctcgctggggcaacaggtatggtataaaaatattccactctctctctctctctatatatatattaatttgttttataaggttggatgtacacatatataacatagtatgaatgaatgaatgttttttgataggtggtcaaagattgctcaacagctgccaggaagaacagacaacgaaataaagaactattggaggaccagagtgataaaacaagcgaagcagctaaagtgcgatgtgaatagcaaacagttcagagacacgttgcgttacgtttggatgccgcgcttgctggagcggcttcagcccacatcacaagcactggagccaaaccaaagtggacttgtgttacacgcttcatcatcactgcttccttcgaattccgaccatagtattgaaagggggtcggatctgtggccaggtttcaataaccaaatgttgttggaacaggggagtggcggtgacttgttggaaagtttgtgggatgacgacaatatgtgctttttgcaacagctttcttatgacctccaaatgaaataaaatacaattcccttccgtcacgcattctgcaatgcacagtgctgaaagttgagcatgcgttcaatgaatattgttttcctcactttcatgtacatattaaatcttagagactaaactagtcacgtgcctaaaagttgataccagttgaaataatatggtttattaatcc

SEQ ID NO: 15070 - DNA, 687 bp, Glycine max
  Clone ID: LIB3050-024-F12_FLI
gagcctcctgatgagaatggggaccacagtcttttggagtcctgtcagcaagatgacattgccactgaaaatgaagaggccggggaaacctttgtttacgagaaaactgaattagactgttcccctgaatctctccaaagcaaatattcaactgaaggagaatgtggcagtttgataggctctcctgagaatctggtttgtgaggaggacttgtattgtgagtttccacccaaaggaaacattgagaagagtaagagtggacaatcaagtaattccagtgctaaaaaggggtccaaaagaaccagaggcctgctccaacctgtgatccatgcaacagtggctgttgataaaaagggtattagcaatcttagccgcatagattcaagatcagagcggatagaagcctggcggtgaaagaagcatcactgtgatcgagtgtagtttgattctgacattgtgcattgtaattgtaagtttgtttctaggacaagtttgtgaagtggttcagattttttttttttaatttcctcggtttgtttaacttgtttgatttctagaatgacattgtactgaaataacatatcctatgtgtgtttacttgtattctcaacttctcataattattcctgaatgacaggccattcacctgtcaatgttgcaatggataaattaatcacttccggatcc

SEQ ID NO: 15071 - DNA, 1278 bp, Glycine max
  Clone ID: LIB3050-025-A6_FLI
taccgagaagacgacagaaggggaaccaacttctttctttgttccgttctactttcccttcccaacaacaacaagaagatgccttctgcagaagcttcctccgaaaccatttgtgtcaccggcgctggtggcttcatcgcctcttggatggtcaaactcctcttggaaaaaggctacactgtccgaggaaccctcagaaatccagatgatcccaagaacgggcacttgaaggagtttgaaggagcctccgagaggttaactctgcataaggctgacctccttcatcttgactccgttagatcagttattaacggttgccatggtgtctttcacactgcttctcccgtcaccgataaccccgaagaaatggtggagccagcggtgagtggagctaagaatgtgatcatagctgctgcagaggctaaagttagacgtgtggtgttcacctcatccattggtgccgtctatatggaccccagtaggagcatcgatttggtggttgacgagtcctgttggagtgatttggaatattgcaagaacaccaagaattggtattgctatgggaaggctgtggctgaacaagcagcatgggacacagcaaaagagaatggggtggacttggttgtagtgaacccagttttggttcttggaccattactgcagcccacaatcaatgctagtacaattcacatcctcaagtacctcactggctctgctaagacctatgcaaatgccacacaggcttatgtgcatgttagggatgtggcattggcccacatacttgtttatgagaagccttctgcctctggtagatacctatgtgccgaaagctccctccaccgtggagaattagttgaaattctcgccaagtatttcccggagtacccagttcccaccaagtgttcagatgaaaagaatccgagagcaaaaccctacactttttcaaatcaaaagctgaaagatttgggattggaattcactccagtgagtcagtgtctatatgaaacagtgaagagcctgcaggagaaaggccaccttccagttcctgcaaagcagcaggaagaagattcaactaccgtgaaatcctaaatgagcagctagttgtccactaaggcaagaagctgcagcttgtggcaatctgtgctcatcttatatattataatagagaatcctacattagaagactgctgtatttggattttgttaaaaagacatcaactaaattgttgccgtgtatgaacttataatattaatgaaatttattcccctcgttgagtc

SEQ ID NO: 15072 - DNA, 917 bp, Glycine max
  Clone ID: LIB3050-025-F7_FLI
gaacacaacctggggtgttaaatagaaaagaggagtttgagaatggcaacgatcagcgcggttcaggtggagttcctggagtttccagcggtggttacttcaccagcctccggcaagacctatttcctcggcggcgcaggttcaatttcatttaatttctgcatgcctacctccaattaagtttctatgataagaaattaaacaaaagaatgaattgaattatgtatgtatatgcttgtaggggagagaggattgacgattgaggggaagttcataaagttcacaggcataggagtatacttggaggataaggcggtgccatcactcgccgctaagtggaagggtaaaacttcagaggagttagttcacaccctccacttctacagggatatcatttcagggccgtttgaaaagctaattagagggtcgaagattctgccattggctggcgctgaatactcaaagaaggtgatggaaaactgcgtggcacacatgaagtctgttgggacttacggtgatgctgaagccgcagccattgaaaagtttgctgaagccttcaagaatgtgaattttgcacctggtgcctctgttttctacagacaatcacctgatggaatcttggggcttagtttctctgaagatgcaacaataccagaaaaggaggctgcagtgatagagaacaaggctgtatcagcggcggtcttggagaccatgattggtgaacatgctgtttcccctgacttaaaacgcagtttggcttctcgattgcctgcggtattgagccacggcattatagtctgagaaatgagaaggatcaactttacctttttcaaatattcttgtttttctcctttctttcttgtcgcctgtcatgtatttctactgttttattaaataataaaattgagttctgttag

SEQ ID NO: 15073 - DNA, 1390 bp, Glycine max
  Clone ID: LIB3050-027-B7_FLI
gacgtcctatcgctctcagacttgtgttacaaacaaaaacccttcttcaaaaccttttctctaaaatttcccacaacccatttctactctctactcattccacacccaactcacaaaaaacccattctttcttttgctcactcattttcttaatcatgtgtggcggtgccatcatagccgacttcattccccgccgtggaggccgccgcctcacggcctccgagctctggcctaactccttcggcaaagacggtgactttgacttcgattactcccacatcgccgatcaacaacgttccactctcaaaatgtccccacctcccaaagctagcgagcaagtggagaataagccggtgaagaggcagaggaagaatctctacagagggattcggcaacgtccgtggggaaaatgggccgcggagattcgcgatccaagaaaaggggttcgtgtctggttgggcaccttcaacactgcagaagaagccgcaagagcctatgatcgtgaagctcgaaaaatccgcggcaaaaaggccaaggtgaatttccccaacgaggacgacgaatattccattcaagcacgtcatccgattccaccccttcctttcacaccacaaacacaaaaccctcccctgtaccagcaacagtaccgttgcgatctcaacattgcccctaaaaatctcaactttgagttcgggtacgacctgaaccacgcgggggcatttccgtcccacgtggacgccgtcaacgctgactcggtggttgtctccggcgatgaaaattcagggttagcgtcgggttcagagggtgcttattcgacaacggagtttatgggatccagtcaaaacgggaacgggtatctgggtgttaccgcaatggagaagaatgagaaagagacagaggttattgaagctcaagaagaaaagaacaaagtgcaggagctttctgaggagctgatggcgtacgagaattacatgaagttttatcggattccgtactatgatggacaatccacggctccaccgaataatgttcaggaaagcttggtcggggatctctggagttttgattaacgaggaatatatcaaaggatgttcttttcatgcatgtgtttgttccttcgtcaatgctgtgaaagcttctgctgactaatatctttgcgttttagcagggatggacaaaaatgtaaattgggtgcttcggtagaaatggtctcatgattttccgactttttttttttttttttaccaatttatttaatattaatttatttgtttctagaacttagggctatcatctggttttgttgaattgtaatttttcttttggtggtatgtcgaactgtaattttactagatatattcaaccgtgtttgaattccaatttttctttc

SEQ ID NO: 15074 - DNA, 638 bp, Glycine max
  Clone ID: LIB3050-027-H7_FLI
ggccctcaggttgacaaggaacaatttgaaaaggtcctttcatatattgagcatggaaagaaagaaggagctacccttttgactgggggtaaaacagtgggaaacaagggctactttattgagccaacaattttctccaatataagggaggatatgcttatagcacaggatgaaatatttggcccagtaatggcactgaagaagtttaagaccattgaggaagcaattaagagtgctaacaataccaagtatggcctagcagcaggcatagtgaccaagaatttggatacggcaaacacagtgtcaaggtccattcgtgcaggcactatttggatcaactgctattttgcctttggcgatgatgttccctttggagggtataaggtgagtggatttggaaaagatcatggattggaagcccttcacaagtacctacaagttaaatctgttgttactcccctttacaattcaccctggctttgaatgtctactgcatatatcatatatggatcttggaaaatagtccattctggccttctggccactacctatcaatttgcatctgccatgagccatggaaattcagttcttgaatagtggtgtctgttatattatcaaaaagttggccttttcctact

SEQ ID NO: 15075 - DNA, 1000 bp, Glycine max
  Clone ID: LIB3051-002-B9_FLI
atggatttgaggatagtcaaactgtcctaagatatgactatggaaaatattatgcctcaaaaaccatttttgaggatggaaagaacagaagggtcttattgggttgggttaatgaatcctcaagtgtttcggatgatatcaagaaaggatgggctggaatccatactattccaagggccatctggcttcataaatctggaaaacagttggtgcaatggccggtggtggaacttgaaagcttacgtgtgaatcctgtccactggcccaccaaagtggtcaaaggtggtgaaatgcttcaagttactggtgttactgcggcacaggctgacgttgaaatttcatttgacgtgaatgagtttggaaagggcgaagtattggaccaatgggtggatccccaaattctgtgtagtagaaagggtgcagccgtaaagggtggtttgggaccctttggcttgctagtttttgcttctcgtggcttgcaagagtacacggcagtattctttagaatattcagataccaaaataaaaatttggttctcatgtgtagcgaccaaagcagatcctctttgaataaagataacgatatgaccacctatgggacttttgtggacatggaccctcttcatgagaagctgtcactaagaactttgattgatcactcagtagtggagagttttggaggagagggaagggcttgcatcacagccagagtatatcccacaatagcaattaatgaaaaggcacaactatatgctttcaataatggaactgccgccgtcaagattacaagattgagtgcttggagcatggagaaggcaaaaataaactgataccaacaattaaagaggaacccaatataggattaatgataaccaatatttgtgttcttttattagtgccaacaaattttattattactgtactactataaccatagtgcttgttattcaggttaaaagcaataatttgataagaaaataagaacaaaaatatgttttgt

SEQ ID NO: 15076 - DNA, 1071 bp, Glycine max
  Clone ID: LIB3051-002-E5_FLI
caaaatactactagtaccttaataaacaaataaataaataaggtgagagaaaaaaaaaaatgtagaggaacctggaaacttccacgaggttttcggtgaaaaccaaatttggggctttgcatcgcaagatttaccctttccaatcaaaattcttctgccttcccctaccaattctttctctcaaccgatttatctgagtgaggggtttggccaatgacgagtggttttggtgaatcaacgagagcgtctgcaccgagcccatcatgctcggggaacagttcaaacgatgccggtgattttgaatgcaacatatgcttcgatttggcgcaagaccctgtgatcacactctgtggtcacctattctgttggccatgcctttataggtggctccaccatcactcccattctcaggaatgccctgtttgcaaggcccttgtgcaggaagagaaattggttcctctttatggaaggggcaaaacacagactgatcccaggaccaagtcatatcctggaatggagatccccaccgtccttccgggcagaggccgcaaaccgcgccacccccgccacctcctgaggctaaccctttcgggagttatgggtttggactaatgggagggttcattcctatggcaactgctcgatttggaaacttcacgctttccactgcctttggcgggtttatcccgtccctactcaacattcatttccatgggtttcaggatgccactgtctatgggacaacgtctggttatccctttgggtttaatggctttcatggagggaacacgcggggttttacgcaggcaactggtcaagtgcagcggcaggaggataatgttttgaagaatctgcttatgttgattgggtttcttgtccttcttacggttatttttgtgtggtaatggtcgttctgtgttgaggttacaatgcttcttaaggagttgcttgtgtaaatattttaactggctttatgagggaattgtatgcttgagaatgctgccactttggctctttattaactgtattataagcatctgcagtaaacttgaatgctgcctatttgtcttt

SEQ ID NO: 15077 - DNA, 566 bp, Glycine max
  Clone ID: LIB3051-005-D5_FLI
tgccaacttcacatctcaagtcattatcatgaaccaccctggccagattggaaatggatacgcaccggtgcttgattgccacacttctcacattgctgtcaagttttctgaaatcttgaccaagattgacaggcgatctggtaaggagcttgagaaggagcccaaatttttgaagaatggtgatgcaggtatggttaagatgattccaaccaagcccatggtggttgaaactttctctgagtatcctccccttggtcgttttgctgtgagggacatgcgtcaaactgtggctgtcggagtcatcaagagtgttgagaagaaagaccccaccggagccaaggtcaccaaggccgctgccaagaagaagtgattgcatttgggcaattttgctagcacatgtgatcatcatcgtggttactcctttatagtagttttatccttgcagagtcttaggtgttttgtttaagttatatttttaagtttctgccggtttcatgtagccgtaactttcaaaactaggttcttgatcggcggtggtcaattttcattgctgtttgtttttgatg

SEQ ID NO: 15078 - DNA, 1858 bp, Glycine max
  Clone ID: LIB3051-006-C10_FLI
tctgcaccaataacccctagaacagcttcagtagtaggaacacctgttgtggcatctccacctgtgtcatgtccaccctctcagcttcactcaccatctctaacaaggtcacctctacttcaccctgaggatggagatgcaccacgtcgtaaaacatctaagactccaaagactccaagaacccctagaacccctagaaccccacttagaatctctaatttgactccaaagttcatcacccctttgggaagccctatgagaaaagctctgaggttcaccaagcttgatcctcaggatgcttggcttccaatcactgagtcaaggaatggtaacaagtactatgctgcttttcacaccctttgttctggtattggaattcaggcccttgttctccctgtggccttcactattcttggttggacgtggggaatcataactatgactctggctttcatatggcaactttacaccttatggctgctggtcaaccttcatgagtcggtagagcaaggtgtacgctactgtcgataccttcaactctgcggagctaccttcggggagaaacttgggaaaatcctagccttgttcccaatactgtacctatcagcagggacatgcaccacattgatcatcataggaggatccacagcaaggacattttaccaagtggtgtgtggtgaaacatgcactgccaaacctatgaccactgtggaatggtacttggtgttcacctgtgtagctgtggtgctatcacagttgccaaacttgaattccattgctggggtgtcactcattggagctgtcactgctgtagggtattgtactgccatttgggtaacctctgtggcacggggtgccctaccggatgtgagctataaccctgtgaggactggaaacagtgttgaagatgcctttagtgtgctcaatgcattgggtatcattgcctttgctttcaggggccacaatctcatccttgaaattcagtctactatgccttcaagcgagaagcatccatcacacgtgccaatgtggaaaggggtcaaggtttcttacacgatcattgcagcatgcttatttcccatggccattggaggctattgggcctatggccaattgattcctgcaaatggaggaatgctcactgccctataccaattccactctcgcgatgtgtcaagattcgtgctagggttaacaagtttttttgtagtggtgaatggtttgtgctcgtttcaaatctatggcatgccagcattcgatgacatggaatcagggtacactacaaggatgaagaagccatgcccgtggtggctgcgtgcatttattagggtgttctttgggttcttgtgcttcttcataggagtggctgttccgtttttgtctcaaatggctggtttgattggaggagtggcgttgccagtgacattcgcgtacccatgtttcatgtggcttaagacaaagaagccaaagaagtatagtgccatgtggtggctcaattggttcttggggacattgggagtggctttgagtgccatattggttgcggctagtttatatgtcatcattgatactggtgttaatgtgagctttttcaatcctcagtagtctcacatatagagtgggaaaatgtactaggaaaatgatgttgggaggtaattaattagtaagagaattgctaaggttttctttctttctttttttgagaaattcaaatttgtgaccccactttgtagttctaggttgattttgcctaatagtgatatttgtataaatatcattaactgcataaggggaggggaaggtaaatcaagattgtataaattttcttgttctgcaaattgaaaaatacttaagagtt

SEQ ID NO: 15079 - DNA, 771 bp, Glycine max
  Clone ID: LIB3051-007-E1_FLI
caagcagtcaaaatgagtatgtacatataaaatttgattttcagattactgagagttctcagtcagacaaagcaatttcaacaatacattatagtagtaggaggcagtactacaacaatgaacctaaggagggcctgagcttcagcatgtgcaaaaagttggtacagatgatgcaaggtaatatatggatatcaccgaactcccttggtttggtgcaaggcatgacacttcttctcaagtttcagataggaccatcacttggaaaatccatatttgcacctaaagattattcaagctcacagttcagaggccttaaggttttgttagccgaggatgatggtgtaaacaggaccgtgaccaagaagctacttgagaagcttggttgtcaagtaattgctgtttcatcggggtttgagtgcctgagtgctataagtggtgctggtaactcattcagaattatcctgttggatcttcacatgcccgaaatggaaggctttgaagtggcaaagagaatccggaagttccacagccgtagttggcccttgattatagctcttatagcaagtgcggaagaacatgtgagggagaaatgcctacttgctggaatgaatggattgatccaaaaacctatcgtacttcatcagatagcaaatgaacttagaacagtcctacaaagagcaggtgaaaaactgtgagaacagttttaaaagcatgcttcggttgaagaaaatatgatgtcattaataattacaaaaaggtcatgttactgct

SEQ ID NO: 15080 - DNA, 583 bp, Glycine max
  Clone ID: LIB3051-007-H12_FLI
aacattgttcaggctcctttgattcctagtcacactgatattgctaagattgtccagaaagtgttacaaccaaagcttcctgtccatcccacgtggactcctccatcaagggattatatgaataaggctttcacatgtcagatgtgtgaactcagtgtcaatgaggttgatactgtacttctctgtgatgcttgtgaaaagggatttcacttgaagtgcctgcagccatcagtcttgagaggaattcataatagagttgattggcattgtatgaggtgcttgagtttaagtggtggaaagcctttgcctccaaaatatggtcgtgtcatgagatcctcaaacacaccgccaaaattgccctctaatacaggtggcgttcaaccatgttctgagaagaaagtagagaatatcgatccaaaggtcatcccacagacgttagcaacaaatgggagctctgttccaactgtttccggtggccatcacaatgttgagttgccatccgaatcaaagataccagataccaaagatatgcaagggactggcatttcatccaccattgaagctattgataagaagcctgatc

SEQ ID NO: 15081 - DNA, 1196 bp, Glycine max
  Clone ID: LIB3051-008-C12_FLI
aatgacacagttggaacagtggctagagcaagattcagcaatcaggatgtcattgctggagtgattcttggtactgggacaaatgcagcttatgtagagtgtgcacatgcaattccaaaatggcatggtcttctaccaaaatcaggagagatggttattaacatggagtggggtaatttccgttcctcgcatcttcctctaacagaatatgatcatgctctagatgcagagagcttaaaccctggagaacagatttttgagaagataatttctggtatgtatttgggtgaaattgtaaggagagttttgttgaagttggctgaagaagttgacttctttggagatactgttcctccaaaattgagaattcctttcgtacttaggacacctgacatgtctgcaatacatcaagatacatcttcagatctgaaggtggttggaaacaaattgaaggatatattagagatcaataacacatccctgaaaatgaggaagattgttgtggaactctgtgatattgttgctaatcggggagcccgcctttctgctgctggtatttttggcatcctcaagaaaataggaagagacacagtaaaggacgggaagaaatcagtagtagcactggatggaggattgtttgaacactatactaaattcagaagttccttggagagtacactaaaggagttgttgggagatgaggcagctgagacaattggcattgagcagtctaatgatggctctggaattggagcagccctcctggcagcttctcactcccagtatttggaagtgcaggagtcctgaagatgtggtttaatgtcaaggtaaatcagtgtaacactagtttcatttttttgtatacctactagatcaacagattgaagcagaaaagtcttcgttactagtcctagagagcttttaaccaggaaggtggaccaagtccacagtggagttatttgtagggctgtgttcttcttgctgcaaatgcaacattgctgcttctcggctaattactggtgcattgttttggttacagtgtttgtctctcccacatcaaagaataataggagagatgtaaacttttgagttgtctcgttttcccaatgtaacatgttttcaatgagaataagtcaggattaatttattgacaaaggtgaatgatttcaattcaaggcttttgcgagttatcaatg

SEQ ID NO: 15082 - DNA, 2251 bp, Glycine max
  Clone ID: LIB3051-008-E8_FLI
ctcgattccgctcccatgtccctgcttcccaaaacagagcaaaacgacgtccccgtcgtcgacattgacagcgacgaaaacggcgtcgccgccgtagctcctgcaaaaaacgacgcgtcgtcgcacaagactccgtcgccacaagttgagcttgtgcagcaagaaacccctgcgtcgggttccgctctgtctgcctccgacggcctgtctcgaagcttctggaaagccggggactacgttgttggtccctcctcaaagcccactcccttccaaggtcacttggaacatgctcgggtgcaccccaagtttttgcattctaatgcaacttcccataaatgggcttttggagcaattgctgagcttgtggataatgctgttgacgagattcaaaatggtgcaactttcgtgaagattgataagtttgatgtcaagaaggataattcaccagcattatgttttctagatgatggtggtggaatgaaccctaatgcaattcgaaaatgcatgagcttgggttattcatcaaagaagtcaaagacaacaattggacagtatggcaatggattcaagactagtaccatgagactgggtgctgatgttattgttttcagtcgggcaatgcattcaggccgggcaacgcaaagtgtgggtctactatcctatacctttttgcgtagaactgggcaagatgatgtagttgttccaatgatagattttgacatatctggtcattgggctgagccaattatttatagctcacaggatgaatggtcagccaacttgaaaacaattcttgattggtctcccttcacatcaaaggaggagctcatgcttcagtttgatgatataggatcacatggaaccaaagttgtaatatacaatttgtggttgaatgatgaagggatatatgaattgagttttgatgatgatgctgaggatattatgctgagagatgaggccaaccatggagctgagaaaaatttgaggaaaaaaactgttcagcttcagtcacatatttcttaccgccttcgtttttctttacgggcatatgtttcgatgttgtaccttagaaaattttctaacttctcaatcatactaagggggaaacttgtggatcaatttaacattgcggacgatttaatatattcaaaagtaattccatataagcctcagctagccatggcaacaaatgaggctatagcggagacaaagacaaccattggatttataaaggaggctgcagaaattaaggttactggatttaatgtgtaccacaaaaatcgcctaatcaagcccttttggaaagtagtagctgatggttcttcaaaagggcgttgtgttgttggggttcttgaagccaatttcatagaaccagcgcatgacaagcaggattttgagagatcggtgctgttcattcggttggaaaacaagctgaaacaaatgacaatggattactggagagatcactgtcacttgattggatatcagccactaaatttcaagtcacaaaaaaatgtagtaaaagaagcccacattcgaaaatcagctcaacattcaattaatccacagaatcagttgcttgctgatcaacaggatactagcttggtagctgagcatcaaagcgacctgagtcagccaattgtgggtcttgcagtgattggcatgcaaggttcgagtcgtgagcagcttggtacgatgctagaaactccagtgtctgtatctcctgatgaaatctgtgcagaaaacataaaacttttcgagaggtgtgaggagtacagggaaaaggagacagaattgaaacagacggttgtggacttagaggaggaattgaaacaaatcaagaagaaatgtgatcttctatcttcactcttagagactaagaggaaggcgaagagtgttaagggatgataattacgttatgcaagcatcatatcatcaatgagagacaagttgattacctttcaagtaatgtccgagtgtaaaagcacctgttttttttttttttttggggtactcaggagggctaaacgaccaaactacaaccaaacatgtaggggcaaagttatgcccatagaatctttacaatgtaaatgaatgcacctaccagttagaacacctgttttgtatatgttcgttcacctctgttagaacaactcactctggctggttcggaagaaaaggcatactagactttgcacatatagtagaactgattcaagtaattagaggaaactctctatttaaagttgct

SEQ ID NO: 15083 - DNA, 1016 bp, Glycine max
  Clone ID: LIB3051-008-F7_FLI
cagaaggttcgttaaagtcgaagataaattaatgcaaagtagttagttggcagatagaagaagatcatcatcataatcgatccgttacaattagggtttctgattggagcataatagcgtattatcatctcatctctcagcagcagcagcatggcggagcaccttgcatcgatcttcggcacggagaaggaccgcgtgaactgcccgttctacttcaagatcggcgcgtgccgccatggcgatcggtgctcgcgcctccacaaccgccccagcatctcgcccaccctcctcctctccaacatgtaccagcgccccgacatgatcacccccggcgtcgacccacagggccagaccctcgacccccgcaagatccagcagcacttcgaggacttctacgaggacatcttcaccgagctcgccaaattcggcgaaatcgaaagcctcaacgtctgcgacaacctcgccgatcacatgatcggcaacgtctatgttcagttccgcgaagaggaccaggccgccaaggcgcttcacgcgcttcgtgggagattctacaacgcacgcccaatcatcgctgatttctcccccgtcacggattttcgcgaggccacgtgtcggcagttcgaggagaatagctgcaaccgcggcgggtattgtaatttcatgcatgtgaagctcatcgggagagatctacggaggcgactcttcggccgcaaccaccgcggtggcagtgggacctaccaccgcgtcagccggagcaggagtcgcagccgcagcgcgagtccgagataccgccgggagagacgggagagtgattctcgtggagggcggcggagcagggagagggacggcagcggtggacggaggagacaacacgggagccctccggccagggaagggagcgaggagcgccgcgcgaggatcgagcagtggaatcgggagagggaggagaataaatgatttcacgatgattctatgttcatttgcttgcgatagaataaaccatcaatttcatcatc

SEQ ID NO: 15084 - DNA, 1898 bp, Glycine max
  Clone ID: LIB3051-009-A6_FLI
ggaaaacgttactagcacagttaatttagattcttctgattatccaaagcatagtaatttcaagttacacggtgatacaagtaaaggaaaggatgagttgcataagtttgagaaggtgccaattggtagtgggattgacatgtgtagttttgaggaccctttggatgaaaatcctcctgcattgatcagtttaggtggcaatgccaaattgtctgggtataatgataggattccctgtagcttgttgtccaaaagtcgtgacaatgtaccagtagttagtagagatgatgatgaaaactcttatgggtgtactcaccctattaatactaaaaccaagtcctttaggctaaagactggtataggtgataatagaataagtaaaagactggcttctaactttcagaaagttgctgaaaaaacaaaggatcatacacattctaacaatgatggagattggaagcgaacttactgcagcaagaggaactgcaataaacaccaaagttctcagatgaatattcctttcaaaaagaggaagctttttaattatcgctctgtttcaaattctaatggattgatcaggagtggtggcatttattattcacctgagaattgtatgaatcaggacggttgtggttcaccacctgggatgcacaaagaccctggaatgccatctttggaagcatgtcaacatcagacgttacgaagtagaggttctcatgtgaatcttaggatcaagtcatttagagtgccagagctttttatagaggttccagaaactgcaacaattgggtccttgaagaggacagtgatggatgcagtgactgctgtgcttggaggtgaattgcacattggtgtttttctccagggaaaaaaagttaaggatgacagtaaaactctacttcaaaccggaatttctcatcaaaacgagctggatgctttgggtttcaccctggagcctaattcttcacaaagcctaccgattgtatgtgctgcacattctcccggtcctaaagctgacataactcagcctgtaataaggtatccttccagtccagctgtaattcatcagaggattcaaggcaattctgacatgttacctgagcatcaagtaaccagtttaggtagccattttgaaaacgaccatgattcagcaccttctcctgttaatgcatctgttgagaaaggtatgaaagattccaaagaactggttactgttcctgaaatggatgaggaactagctatggtacctgtacaccagaagtcaaagcgatctgagatcatccaacgccgaatacgcaggcctttttctgtagatgaagtagaagcactggttcaagcagtcgaaaaactaggaactggaaggtggcgagatgttaaggtttgtgcttttgataatgcaaagcatcggacatatgtggatttgaaggataaatggaaaacactggtgcacacggcaagaatatcccctcaacaaaggaggggtgaacctgttccccaagaacttttggacagggttctagtggcccacgcttattggtcccatcagcagactaagccgcagcacaagcaccatccagaaactgaaactgtcttctccttttaataataagggccagggtcaggggttgtcagcagcaagtagccatgtggatgaggagggtgctttggtttctgacttgttattagtgtcattttctttttctgctttcaataaatatttatgaagtctctctgtttatcaaccatgtaaaaaagtgacgacgacaaggaaaaagaagccaagcctagaggctgcttgtaaatgatttgatgtaataaagtgctcgctaacacaattcttttgcttgtaaataattgaaattgttctgtataaaattgttatgtttttattgcttgat

SEQ ID NO: 15085 - DNA, 956 bp, Glycine max
  Clone ID: LIB3051-009-E7_FLI
ccagcgtccgcagcgattgaggtgaggaaccatgtttccccagaaccagagccagagtcggaggaggattccagttgttgttgcccaatctgcttgggaccattccttcaactttcctacctcgacaaatgttttcataagttttgcttcaattgcattttacgctggaccaaggtggttgctggcaagcaccgttctccaccttcttctgtaaaatgccccctctgtaagttttatcttatcaagagcgcacagatatagattacaatgctattacactgaacaaggtttcttagatgacatattcaatatatcgcaatattggagatctctaaagtacaatcagccaaactgttggcttgaaaattggttaagaagagaaattcaagctcttatccaggaggaggatgttgacatcattttgcaccatatccttgctgtggtcaaagcagcattatggactaggagagagcagaagtcacacatgaatgcacctgaaaagaaacaggaggagttcaagatgtcagtctctgaagccgcaaggccttttctggcagcaagaacggacagatttgtatatgagattcaactatttcttgcttcgggaatgaatattgaagcttatgatgctgcttacatacaacggttaggttggagctcacctggggtaaacactgaggtttctcatagtgaattggttgatcgctcaactgtgattccatacatgcacctatttgatggtgactttgatgaaaatgagtagattctttgttctgtttttctcatgtatttgctgtaattgctacccgaatgaattgtataggagaaatttgctcacacaccaatgagtgctattgattctttccagctactgcagaagttgcaaattctccacccaagggtgtaaagttgtttaacatatgtttgttatcaatatcatattatattggttaaat

SEQ ID NO: 15086 - DNA, 926 bp, Glycine max
  Clone ID: LIB3051-011-G5_FLI
aacatttctaaagctccttctcctctcaatatctcatggcaaacgctcttgaagtctctgctctcaatcgcatcaagctgcatcttttaggagaactctctcccctcacccaatttcaggaaccaaacacaacctccctctgttcccaatcttcaacttccgattcattcaccacagttgaccaaatcttctccgaattcctcgatttcccaactactactacttcttccacagaacaaaaccagttttctgcattcgagtttgagccaaaacccgaaataattgagccacaattggaattcagttttccaaccacacgctgcaaatcgagtcgaaggccgtcgctgcaaatctctctcccgaagaagaccgagtggatccaatttggagagcccgaggttaccgaaacggtgtcgcagagtaacccgaacgcggaagagaagaagcactacagaggagtgcgacagagaccgtgggggaagtttgcagcgggagatccgggacccgaacaagcgcggctccagggtgtggcttgggacgttcgacacggctatcgaagccgccaaagcctacgaccgagccgcgttcaggcttcgcggctccaaagccatcctcaacttccccctcgaagccggcgccgatgaccgcaaacgccaaagggaagagaaggtggagccggtgcttgaagtcgtcaagagagaaaagataggggaatccgacgttagtcttattaagaataatcctttaacgccgtctagttggttagggttctggggtagtgatgcaaacggaatattcaccgtgccgcccttgtcaccgttatctccccacccggcgttgggttttccacagcttatggttgtgtgaaatcattttttttcttctttccttgtcgaatatggagataatttattcatttatttatt

SEQ ID NO: 15087 - DNA, 687 bp, Glycine max
  Clone ID: LIB3051-014-A8_FLI
ttccttgccttctacaaattctaatgcaattcaagaaccagttgctagagacattcatgggacctcagctaagttggaagagccgaaggaatccgagtgcaaagttcagactgatctggagctagattctgcaaagggttccgaaattgaacttgctaagtcggggaaacctatagatttagtggaagaggaagatgcatgcccaatctgtttagaagaatatgatgcagagaatccaaaactcgcaacaaattgtgaccatcattttcaccttgcatgcattctggaatggatggaaagaagtgaaacttgccctgtgtgcgatcaggatttggttttcgaccctcccattgaataatacatcaacataggagttcaaatatactgtgtagtgtttgagaagcgaggttacaaagtcatgagtttaatatgatagcaacccgaacttatggctgtattttgattgtttcgttttctgagttttctgggtttattccattttttactcagagtccctgcgttgcagcatacaggaaattaaaggaaatattctctgtttataatttcatcatttagaatgtttttaagtgatagccggatactacatgcgaaaacagcggtcgatatgatttctcttgtggattgtaagacttttgttacattgtcaaagaatggtaggatgttctc

SEQ ID NO: 15088 - DNA, 737 bp, Glycine max
  Clone ID: LIB3051-015-H7_FLI
ccagcgtccggcaccttgcagaatcaattttctctctcaatcgtctttcatggctcgtaccaagcaaaccgctcgcaaatccaccggtgggaaggctcctaggaagcaactcgccaccaaggctgcaagaaaatctgcacctaccaccggtggagtcaagaagcctcatcgctatcgtcctggaactgttgctcttcgtgagatccgaaaataccaaaagagcacagagcttctgatccgcaagctcccctttcagcgtcttgttcgtgaaatcgcgcaagacttcaaggtatgttctaaattcaaaaccaaggttttaaatattggttgcggtcctgttgtggtttcattgagaccgttgatattgcagcaaatcactgacattttttgttgatatcgttgccaatgtgaccgatatgattccagactgatttgaggttccagagtcacgcggttcttgcgcttcaggaagctgcggaggcttacttggtgggtttgtttgaagacaccaacctttgtgcgatccacgccaagagagtgaccatcatgcccaaggacattcaactcgcacgccgcatccgtggagaacgtgcttaggcttataataatgataatagcatagttgtcgccttttcgttttgcaatacatttcttgtttcttagggttttagtgttattttccagtttgttatgttttgtatagaagatagatatatcaacagcaacagcttcttacc

SEQ ID NO: 15089 - DNA, 785 bp, Glycine max
  Clone ID: LIB3051-016-F12_FLI
ggatggaagtgatgcaattctccttggagcagagaccctgcggggacaataccctgtagagaccatttctatagttggaaaaatatgtgctgaggcagagaaagttcataatcaagatttgtattttaagaaggctgtcaaatatgtgggagagccaatgagccatttggaatcaattgcttcctctgcggttcgagcagctatcaaggttaaagcctctgttattatttgcttcacttcatctggaagagctgcaagattgattgctaagtacagaccaattatgcctgtcatatccgttgtcattcctcaactgaagacaaatcaactccgatggacattcaccggtgcttttgaggctaggcaatctcttattgtgaggggtctttttcctatgctggcagatccacgacacccggctgagtctaaaagtggaacaaatgaatcaattttgaaggttgctttagatcatggcaaggcttttggcatcataaagccacatgaccgagttgttgtctgccagaaagtagctgactcgtcagttgtgaagattcttgagctcgaagattgattggttcaatacaacttatgtgtcatttgatgcatcataataaaacttcttctcaaccttttcattctagcgtttgtgtttcattgaagtacaataacaaacacataacattgagatacatattgtagagtgggaaagagacttttttgtttgattgtttttttaataggcaatcacagttttgagctataaataatggtattggtatggaaat

SEQ ID NO: 15090 - DNA, 1009 bp, Glycine max
  Clone ID: LIB3051-016-F9_FLI
gggacctcaaagataagtgtaggattggatcagggcctcagaatgagtggtatttcttcagccataaggacaagaaatacccaacaggaaccagaacaaatcgagcaactacagctggtttttggaaagcaactggaagagacaagtccatataccacactaattccaagaggattggcatgaggaaaaccctagttttctacactggtcgtgctcctcatggccagaagactgattggatcatgcatgagtatcgccttgatgaagatgatgctgatgttcaagaagatgggtgggtggtatgcagggtcttcaaaaagaaaaaccaaagccgaggtttccaacaagaacttgaagaagaagagcacttaaccacccacatgagagcaagtggtccatgccaggttctagagcagaagcatcttcacatgcaaggaggaccatatgatcattacaactttgatgggacaatgcacctcccacagttgttcagtccagaatcagctattgcaccacctacaaattcttccttggccttatccatgaatgccatggacatccttgagtgctctcaaaacctgttgaggctcacaaccactggctgtggacttaatcttatgcagcaacaacaagaagagaggttcagtggtgactggtctttcttggacaagctactagcatcacaccatggcatggatcaaagcaaatgtaaccctcctactaatcatcatgctgcaactgctgtgggcacttctgctcaaaaattcccatttcattaccttggctgtgacaccacccatgatatcatgaaattttccaagtaggaagggatattgcattttaatgtgttattatacttaaggtgatcatgaggtgagaaatatttggtttctaagtatgtgtaatatgtagcaccttgttagatactcattgagattccactcattaatttagttatttcttgagtgtcaattgtatatatgtctatgatatcttttacgtttaatta

SEQ ID NO: 15091 - DNA, 1240 bp, Glycine max
  Clone ID: LIB3051-016-G10_FLI
cttcaatttattcatctctgacaccctcttaattctgcttccagttcctctgagtgatgggttcaaaacccgtggttgattttgagaatgtaagtgggagcaggatgacggataggcctttctttcaagcgttggagaaggaagagaactgtgatgaggattacgaggggtgtttccaccaaccggggaagaaaaggaggctcacaagcgaacaagttcagttccttgaaaggaactttgaggtagagaacaagcttgaacccgaaaggaaagtccaacttgcaaaagagcttggcttgcagccaaggcaagttgctatatggttccaaaaccgaagggcaaggttcaagaccaagcagctagaaaaagactatggcgtgttgaaagctagttatgacagactcaaaagtgactatgaaagtcttgttcaagagaatgacaagttaaaagcagaggtaaaagaaattaagaagaaaaaagagagagacacacacaacacatacttacactcaattttgcttttgtgctttatgctactagtactacttgctttaataaagtgcaatctttattatttatcccactaatgggttaatgattggattggcacaaaatttttgttactgacaggtgaattctctggagagcaaattgattcttagagataaagagaaggaggagaattcggatgacaagtcatctcctgatgatgctgtcaattcttcttcaccccacaacaacaaggagcctatggatttattaattatttcaaaaaatgcaacaacaacaacaacatctgaaaatgggaccaaagtgttgtcaccactcccactccctattatggtaacatgctgcaagcaagaagatgccaactcagccaaaagtgatgtccttgattcggatagcccacattgcacttcattcgtggagcctgctgattcctctcatgcctttgaaccagaagaccactcagaagacttctcccaagatgaagaggataaccttagtgaaaaccttttgatgaccttcccttcttcttgttgcttacctaaggttgaagaacactgctatgacggccctcctgaaaactcttgtaattttggcttccaggttgaggatcaaaccttctgtttctggccctattgaaccaaaccaaccaaccaaccgctagcaatgttttaaaaaactttgcagttgtaaccatgtactagaaagcaataaaaatggtattgttacttct

SEQ ID NO: 15092 - DNA, 925 bp, Glycine max
  Clone ID: LIB3051-018-H3_FLI
gagagagagagagagagacagatctctctcaaggggtttaattgcagagatcttttgcgtttctcaatataagtgaaagagtagacagagagaaagagaagatcaaaagagctaaccctggctccctgaatatcttctcgttttttatctgaatcacgctttagtttgtctcttagctttgttttcgtttgatcccatgcccctctagctaaactcgtttgtcttctatgccaccttcagactgatcaaaacaaaacaaaacttgtttttttcgctatcttcttctccctttgaggaaagcataaataaaaagcgatagaaagggatcgatagaaagagtcttgtggagtagctctcactgtaaagatgggtactggttggagaagagccttctgcacccgcgaccctgcatctaccatatcggataaacatcccggaagcccaagcccgagcccaagaacctgcactcgattgggttttctctctggtggtagcaacccttccaccccacgcttgcgttgcacaacaaaagcggaaactgcttctcaaacagttacattaagtgatagtcccagagttcaaagcaagaacacccccagagcaacgaaatcaccatcagtctcaaatccaacttctccacgctcccctctcaagctctccctcttcaagaacagcttcaaattcagggtatgtcatgcttctttcatctttttaagattcccatgtatggagtattcaatgattgtgatttgttatggttgagcagagtagctgtggaatttgcttgaacagcgtgaagacaggacagggtacggcgatatacacagcggaatgcggtcacgcgtttcatttcccgtgcatcgcagcgcatgtacgcaagcatggaagcttggtgtgccctgtttgcaaggccacgtggaaagac

SEQ ID NO: 15093 - DNA, 1374 bp, Glycine max
  Clone ID: LIB3051-019-B12_FLI
tgtcgatgtcagttccatgttcatagttaggaaaaacggcaaaacttcactgcacaatgctgctaggtatggtgtccatcgtattgtaaaaacacttattgctcgggatccaggaatagtatgcatcaaagataaaaaaggtcaaactgcactgcatatggcggttaaaggacagtgtacttcagttgtggaggagatattactagctgatccttctattttgaatgagcgagataagaagggtaatacagctcttcacatggctacaaggaaatgccgttcacagatagtgggccttttgctaagctattctgctgtggatgttaatgccatcaacaagcagcaggaaacagccttggatttggcagataaactgccatatggagattcagctttggaaataaaggaagcccttgcagaatatggtgctaagcatgccaggtatgttggcaaagaagatgacgcaatggaacttaaaagaactgttagtgatataaagcatgaggtgcagtcacaacttatacaaaatgaaacgacacgacgacgggtttctggtattgccaaggagttgaagaaacttcatagagaagcagttcaaaacaccattaattctgtcacattggttgctgtactttttgcctcaatagcattcttagccatcttcaatttgccgggtcaatatataacggacgaaggaaaagagattgggaaagctaaaatagccgatcatgttagtttccaagtcttctgccttctgaattctacatctcttttcatttctcttgccgttgttgtagttcaaattactttggtagcctgggacacaagggctcaaaagcagattgtgtcggtggttaacaagttgatgtgggctgcatgtgcttgcacttgtggtgcttttctagcaatagcttttgaggttgttggaaagaaaacatggatggctatcaccatcacccttttgggggtacctgttctagttggcactctagcaagcatgtgctactttgtttttcgacaacatttcggcattttccgcagtgattcccagagacgcatcaagagagcaagtggaagcaaatctttctcatggtcttactctgcaaatatatcagatttggatgaatacaattctgacattgagaagatctatgccctgtgagtcaagaatcaagagaaatgtttcaaccttttaactgaaactgttatactactgccaagtgataatgttagctcaccgggatttcatcattcatcttgagtttgcagtttttggtttcaggctgtatgtgattataattaataatcaaaacttgtagatttatgtatatgtaataaaaataatatgaaagggaagtccactacttaagtttg

SEQ ID NO: 15094 - DNA, 1018 bp, Glycine max
  Clone ID: LIB3051-019-C12_FLI
ccaccctcctggacccgcaggcctgggagagcctcaagtttcccgtgatagcgaagcctctcgttgccgacggcagcgccaagtcgcacaagatggcgctcgtgttcacgcgcgacgcactgaacaagctcaagccgccgatcgtgctgcaggagttcgtgaaccacggtggcgtgatcttcaaggtgtacgtggtgggcgagcacgtgcgctgcgtgaagcgcaagtccctccccgacgtgtccgacgaggagaaggcgctcggcggcgtttccgaggacctgatgtcgttctcgcaggtctccaacctcgccaccgtgaacgactgcgacggctattaccgtttgatgcatctcgacgacgacaccgaaatgccccccgacgccttcgtcgtcgacatcgctgggggcctcaggcgcgccctcaagctcaacctcttcaatttcgatgtcataagagacgctcgatacgggaaccgttatcttatcattgatatcaactatttccctgggtacgccaaaatgcccggctacgaggccgttttgacccagtttttctgcgaagtaatgctcaagaagaaacagcaagaggaacaacagcaagaagagggtaacgctcctaaggagaaagaggaatctcttcaagcttgagataattttgtcacacagatgttgttctgtcggtgtcggtgtttggtggtttttgggtaacccgaatttccccagtggacccattggttggcacgagttgcaaatttcgatttagggtgcagttggtacagtagggttgtttgtggctagttttttttaaccctcttcaacaacatgtatattcctttcaccattgctctctggagataggtaccttttcaaataccctcaacatttaggaaagttgtattttgcggcttaagattaccaagctagaaactgtttactttgtgttttttttactcaataacttcatttttcccattttgccaaattctattctcattttggattatcttgctttgttt

SEQ ID NO: 15095 - DNA, 1259 bp, Glycine max
  Clone ID: LIB3051-019-E12_FLI
ctctcagagaggaaagatggcatttttgtggtcagatctgatgcaacaagggtaagcagccaggttctgaaggctggagctcgtaagcatgaattgttagttactaatgcagttgcaacaaaggaaggccgtcctgcggcttctacatcaaaatctgggcatgaacttctcctttttgaggccctacgtgaaggtttggaagaagaaatggagagggatccttgtgtatgtgtcatgggcgaagatgtaggtcactatggaggatcctacaaggtgactaaaggtcttgccacaaagtttggggaccttagagttttggacacccctattgctgagaactccttcacgggcatgggcattggggctgccatgactggtctgaggccagttgttgagggcatgaacatgggattcctacttctggcatttaaccagatctctaacaattgtggcatgctccattacacatctggaggccagttcaagataccaatcgtcattcgtggacctggtggagttgggcggcaacttggagcagaacactcgcagcgattggagtcgtattttcagtcaatccctggaatccagatggtggcttgctcaaccccttacaatgccaagggcttgatgaaagctgcaatccggagtgagaaccctgtgattcttttcgagcatgttttgctttataacctcaaggagagaattccagatgaagagtatgtattgtcactcgaagaagctgaaatggttaggcctggggagcatgtcacgatattaacctattccaggatgaggtatcatgtcatgcaagctgctaagacactggtgaacaaagggtatgaccctgaagtaattgatatcaggtctttgaaaccattcgatcttcacacaattgggaattcggtgaagaagacacatcgtgtgctaattgtggaagagtgtatgcgaacaggtggaattggtgctagtttgacagctgctattactgaaaatttccatgactatttggatgcccctatagtatgtttatcctctcaggatgtgccaactccttatgctggaacattggaggaatggacagtggttcaacctgctcaaattgtgactgcagtcgagcagctctgcaagtgatttctacaaaacactagcaattaggatatggtttttggtaaagctattgtgcttgttaaattaagcttgaattttcattataattttctcttttcctattatttctgaagtctaaagcccataacttt

SEQ ID NO: 15096 - DNA, 1111 bp, Glycine max
  Clone ID: LIB3051-025-B1_FLI
gtttatgactgctgtgaagcaaaactacggggaaaaagtccttgtacagtttgaagactttgcaaatcacaatgcttttgagttacttgctaaatatgggacaactcatctcgttttcaatgacgatatacaggggactgcatctgttgttctagctggagttgtagcagccctaaaactcattggtggtacattgcctgagcacacattcctcttccttggtgctggagaagcaggaactggtatagccgagctaatagctcttgagatgtcaaagcaggtgatcaagccaacagttttgattggatcatcaggagtgggaagaacatttacaaaggaagtagttgaggctatgacttcaaacaatgataaacctctcattctggctctctccaatcctacctcacagtctgagtgtacagctgaagaggcttaccagtggagtgagggtcgtgcaatttttgctagtgggagtccatttgatcctgttgaatacaagggcaaagtttatgcttctggccaggccaacaatgcttacattttccctggctttggtttgggtttagtaatctcaggagcaattcgagtacatgacgatatgcttctagcagcttcggaatccttggctaaacaagtgagtgaggagaactacaaaaatggcttgatttacccaccattctctaatatcagaagaatttcggctaatatagctgcaaatgttgctgccaaggcatacgaactgggcttggctacccgtcttcctcgtcctcagaatcttgtgaagtgtgctgagagttgcatgtatactcccgtataccgcaactataggtgaatgaggcggcttctggctctaacaaggatgtgtttcgtgtatggtgtcttattgtgcttttatgcacattcacgaataaacaattttatgcttcaaccagtgtttttctattatgaaatccttatttcatctaatgttacttatgtcgatgacaatggttattaaaatccataatgactcaagtcgtttcatttgccctggctgactttggtttgttttaaccaattgcaccatgtacttgtaataagttagtaatatctcaaatctatctatccgaat

SEQ ID NO: 15097 - DNA, 805 bp, Glycine max
  Clone ID: LIB3051-025-H10_FLI
ccagcgtccgcgacaacctcggctcagtgtctctctgcactgcaaaacccctataacccttcccttcctcgcacttcattcttttatttcatttatttataccctcttcatgaaaaattaagggaattttcagagagagagagagggagagagtagttatggaaggagaagaaggaggaattgcaacaaagaagagagggaaagagggtgaaactgagacgacgcgctacaaaggaatcagaatgagaaagtggggcaagtgggtcgctgagattcgagaacccaacaagcgttcaaggatttggctcggttcttactccacgcccgtcgcggcggcgcgtgcttacgacaccgccgttttccacctccggggcccctctgcgcgcctcaacttccccgagcttgttgccgcggagggccccgccgccgacatgtccgcagcctccatcaggaagaaggccaccgaggtcggcgccagagtcgacgctctccaccgccagcacccccacgcgctgcctgctggagaattcgccgaccgggttgaccttaataagatgcccgaacccgagaattcggattgtgactactgggacagggattaggagtgttgtttagttgttaatttggagtttttcaaaaacaaatataaaattataaccttgttttaattaattttttttttattggggaaaaggggttagagggcacagcaatggcctatgatgccagggagttgggttgaaaaagagggagtgagccatgttaaccactcaagtaattataatattataatagctactattct

SEQ ID NO: 15098 - DNA, 1151 bp, Glycine max
  Clone ID: LIB3051-027-C4_FLI
ggatggtcttgtgttccgtgaaaacttttctattagatcatatgagattggtgctgatcgtaccgcatctatagaaacagtaatgaaccatttgcaagaaactgcacttaatcatgttaaaagtgctgggcttcttggtgatggctttggttccacgccagaaatgtgcaaaaagaacttgatatgggtggttactcggatgcaggttgtggtggaacgctatcctacatggggtgacatagttcaagtggacacttgggtttctggatcagggaagaatggtatgcgccgtgattggcttttacgtgactgcaaaactggtgaaatcttgacaagagcttccagtgtttgggtcatgatgaataagctaacacggaggctgtctaaaattccagaagaagtcagacaggagataggatcttattttgtggattctgatccaattctggaagaggataacagaaaactgactaaacttgacgacaacacagcggattatattcgtaccggtttaagtcctaggtggagtgatctagatatcaatcagcatgtcaacaatgtgaagtacattggctggattctggagagtgctccacagccaatcttggagagtcatgagctttcttccatgactttagagtataggagagagtgtggtagggacagtgtgctggattccctgactgctgtatctggggccgacatgggcaatctagctcacagcgggcatgttgagtgcaagcatttgcttcgactggaaaatggtgctgagattgtgaggggcaggactgagtggaggcccaaacctgtgaacaactttggtgttgtgaaccaggttccagcagaaagcacctaagattttgaaatggttaacgattggagttgcatcagtctccttgctatgtttagacttattctggtccctggggagagttttgcttgtgtctatccaatcaatctacatgtctttatatatatacaccttctaatttgtgatactttggtgggtaagggggaaaagcagcagtaaatctcattctcattgtaattagctactgctgtattctctctttctgctgctccatatttcatttcatctctgattgcgctactgctaggctgtcttcaatatttaattgcttgttcaaaat

SEQ ID NO: 15099 - DNA, 1378 bp, Glycine max
  Clone ID: LIB3051-030-A2_FLI
agaacatacaccttttctcgtggcccgagcactgccgtacttatttgactagggtggctgcctgcaggatgaggcatccacaatggcaaaccaacactccagggaatgatatagctgatgaagagtctttcaatgactcactaaaggatgttcaggacatgtcccttaggctctcaattgatgctgacttagcaggtttaagttctggacccgacatgcaagaccaagtgaagcgtctcctaagcaggatgaagaagccagattctggtggttcaaatgacactgatggtgggaataagatgcctgacaatgtaactgggaaatatcctctactgtggagaagacgtcggttgattgttatcgcactagatttatatgacaacaatggagctcctgataagaagatgatccaaatagtgcaaaggatcattaaagcttctcaactagaccctcaaaatgcaagagtttcaggatttgctttgtcaacagctatgccaataagagaaaccatagagttcctcaaatcaggcaacattcaagtaaatgattttgatgttttgatttgcagtagtggtagtgaagtttactatcctggtacttacacggaagatggaaagcttttgcctgatccggattatgaagcgcatattgactatcgttggggttgtgaaggtcttaagaaaaccatttggaatcttatgaatactgctgaaggtgaagacaaaaaatcttccagccccattgtggaagattcgaaatctagcaatgctcattgcatctcatacaaaataaaggatctcagtaaggcaaagagagttgatgacttgagacagaagcttcggatgcgaggcctacgttgtcatcctatgtactgcaggggatcatctagtatgcaggttattccactccttgcatctagagcacaggcactcaggtatctctttgtccgttggggactgaatgttgcaaacatgtttgtctttcttggagaaactggggacactgattatgaagagttgatttctggaactcacaagaccataatattgaaggatgttgtgtctaatggttcagaaggaatacttagaggtccaggaagctaccatagagaggatgttgtacccaatgagagtcctcttgttgcaagcattagtgaaacaactgaggacaagattgccaatactttgaaggaactatcaaaatccggggcaatgtgaagtgctaaactactaggtcaattcttctttctttctttttttttctttctaaaatagtattaatccgtttacctttacaaatcacaaattgaaaaatgatgtaattgtatgctattgtgaagcatagaatctagcaaaaactatatatggcttattttgtc

SEQ ID NO: 15100 - DNA, 413 bp, Glycine max
  Clone ID: LIB3051-030-G5_FLI
atctgcttctgggagcaacttgtaggaggatttaatagatgttttcacttcaaattgttaatgcactcaggatgatgagtccttgacagttctttcctgcaaacatctgtaccatcctgagtgcattaacaattggttgaaaataaacaaggtttgcccagtttgtagtactgaggtatctgcttctgggagcaacttgtaggaggatttaatagatgttttcacttcaaattgaagaaaatttatgctaagttgggggctaatatcccttgttctaatagcatttccacattagggagatagtctgtgctattgtttccagctccttcattttaagtgtaacatgtaacttttggaacctgctctctagattgtctttattttaatggaaaatgaatggcatttaagtggcc

SEQ ID NO: 15101 - DNA, 1884 bp, Glycine max
  Clone ID: LIB3051-031-A9_FLI
catggccgtatctccaattttgttgttgttggctatcttctctctcatttatggcaatggtattcttcccattgaagctacccaccatgtttacagaaatcttcagactctatcttctgattcctctgatcaaccttatagaaccgcttaccatttccaacctcccaaaaattggataaatgaccctaatggaccaatgaggtacaaaggactttatcatctcttctaccaatacaatccaaaaggtgctgtttggggtaatattgtgtgggcccactcagtatcaaaggatcttgtgaattggacccctctagatcatgccatctacccttctcaaccgtctgatatcaacggttgttggtcaggctcagccacaatacttcctgggggcaaaccagccattttatacacaggaattgaccctaataatcaccaagttcaaaacttagccctacccaaaaacatgtctgacccattacttagggaatgggttaagtcacccaaaaatccactaatggcaccaactagtgctaacatgatcaattcaagctcatttagggatcctaccactgcttggctaggcaaagatgggtactggagggtgctgattggaagcaaaatacacactaggggtatggcaattttgtacaagagcaaaaactttgttaattgggttcaagccaaacaacccctacattcagctgaaggcactggaatgtgggagtgccctgatttctatccagtgctgaataataaaccatcatcaactattggtcttgacacatctgtgaatggtgataatgttaggcatgtgcttaaggttagtttggatgataaaaaacatgatcattatttgattgggacttatgacattgccaaggatatcttcactccggataatggatttgaggatagtcaaactgtcctaagatatgactatggaaaatattatgcctcaaaaaccatttttgaggatggaaagaacagaagggtcttattgggttgggttaatgaatcctcaagtgtttcggatgatatcaagaaaggatgggctggaatccatactattccaagggccatctggcttcataaatctggaaaacagttggtgcaatggccggtggtggaacttgaaagcttacgtgtgaatcctgtccactggcccaccaaagtggtcaaaggtggtgaaatgcttcaagttactggtgttactgcggcacaggctgacgttgaaatttcatttgacgtgaatgagtttggaaagggcgaagtattggaccaatgggtggatccccaaattctgtgtagtagaaagggtgcagccgtaaagggtggtttgggaccctttggcttgctagtttttgcttctcgtggcttgcaagagtacacggcagtattctttagaatattcagataccaaaataaaaatttggttctcatgtgtagcgaccaaagcagatcctctttgaataaagataacgatatgaccacctatgggacttttgtggacatggaccctcttcatgagaagctgtcactaagaactttgattgatcactcagtagtggagagttttggaggagagggaagggcttgcatcacagccagagtatatcccacaatagcaattaatgaaaaggcacaactatatgctttcaataatggaactgccgccgtcaagattacaagattgagtgcttggagcatggagaaggcaaaaataaactgataccaacaattaaagaggaacccaatataggattaatgataaccaatatttgtgttcttttattagtgccaacaaattttattattactgtactactataaccatagtgcttgttattcaggttaaaagcaataatttgataagaaaataagaac

SEQ ID NO: 15102 - DNA, 2373 bp, Glycine max
  Clone ID: LIB3051-032-B6_FLI
gttgctctctcttccgcggagttcaaccactgctccaacggcctctttctctctcttcccttcctctctcctcagacccacccttttccacttgttaaggtttctctttgcagcagatcaagtgacttgggagaagggagaaaagtggtcctgagttctgactggttcagattcatggtatcgtgtgccatatggtgtgtgttttctttgtcaaatataacgtcgttaagcttgttcaaagattttgactctgaaatggaaggttttgttgtgtaagtgagaaaaaacaaaggttgacctttgttttattttggtgaagaggctggttctgtgtcttgaactgcaggtttaacaattcaacaagagtattcaacaagagttttgttgaggtaagcaaattgagtagttacttgttatatttcttggtttgttgaggagggagggaattggtatggctgttgccaatagcaacagcagcaatgaaccttgtgcttcatacaattgttacaaagtagcaggcttgactgagaccatattggacataagtcacatctctaatttaaaggatcggtacattctcggcgagcaattgggttggggacagtttggtgtaataaggacatgttctgacaagttgacaggagaggttttggcctgcaaatcaattgctaaagataggttggttacttcggatgatttgaagagtgtcaaacttgagatagagataatggctaggctatccgggcaccccaatgttgtggatctcaaggcggtttatgaagaggaaggttttgttcacctggtgatggagctttgtgctggaggggagctgtttcacagattagagaagcatggatggttttcggaatctgatgctagggttctctttaggcaccttatgcaggtggttttgtattgtcatgaaaacggggttgttcacagagatttgaagcctgagaacattctcttggcaacaagatcttcctcatctcctattaaattggcagattttgggcttgcaacctacatcaagcctggtcagagtttgcatgggttagttgggagtccattctacatagctccagaggtactagctggtgcatataaccaggctgctgatgtgtggagtgctggtgttattctttacattctgttgagtgggatgcctccattttggggaaagactaaatcgcgaatttttgaagccgttaaagctgcctccctgaagtttccatcggaaccttgggatcgcatttctgaatcggctaaggatttgatcaggggaacgctctccacagacccatctcgaaggctcactgcccgagaggttttagatcattactggatggaatgcaaccaaacaaatcctgaacagctaagtgaatgtaaaatccgaaattgtgaagaatggaatgctggtggcagctcattctctgcctctttaatgtccaggagtcaggacatcagttttggtgccagctcacctacttgtgacgctcaatcacctacattcacttgcagatcatcattttcctcttttttggtggaaccagtcactccatgtctagtttctggtgggttttcattcaagagtgcaggcgattcccctgatttggaattttgttctcccgttccctcaatgcttagcttttcattcctcagccccagttctgttgttgagcaaaagagttgtaaattagagtgctcagctaacatggcagatgtaaatgcaattgctggagaaacaaacttgggaaaattgcttatgctacaagattctcctctttgcgttggacgtgaggttaaagaaacggatcgcaagcctgtagaggccaaaagggcaagcggaatgaatggacataaggtattgggaatccacagcaagagaaacaggacaattggactaggtgagtgtgagcaacttgaccttatggtgactgaatcagtcattcgttggtcatcatgcactcaactacctacatctttgagatcatctcttgtctgctaagcggatagaagacttgacttgttaatcggattgcttcatgccgtgcctaaattgcagcatacttgacgcaaattttgctcagctaacgcattgtatatgttttccttatttgcgttgttgttaatgttaactgtcttctggctggtgcaaagttttgtttagttttggtagtggcttaatggtgtgtctgattgagaagtggtactatctaatttctcactttcttgtttttcactttttctcctccttttttccgtctcatgttatttgccttgagtgtgagtaaaagcctgacggcattcattcagcctggattgtaaatgaagttgatcttgatgtatgctccagttgtcttaaaaaaaaac

SEQ ID NO: 15103 - DNA, 1299 bp, Glycine max
  Clone ID: LIB3051-032-G11_FLI
attttcttctactttatcctcatgaagcaactattgaaaacatatatcatcattgggagagggtgtgccttgttgacattggagaacaagctgttattcccgaaggcatcagcaagcatgtgcacaggagcagatattttattgcaggggggatagcaggagctgcttctcgtacagcaactgctccacttgatcgtctaaaggtggtcttacaagttcagactggacgagcttctattatgccggcagtgatgaagatatggaaacaagatggcttattagggtttttccgaggtaatggattgaatgttgtgaaggtagctccagagagtgccatcaagttttatgcttatgaaatgctgaaaaatgtaattggagatgctcaagatggcaagtcagatattggtactgcaggaagactttttgcaggtggtatggctggtgcagttgcacagatggctatctatccaatggatcttgtcaaaactaggctacagacttgtgcttctgatggtggaagggttcctaagcttgtcacacttacaaaggatatatgggtccatgagggacctcgggctttctacagagggcttgttccatctcttcttggtatgattccttatgcagggattgatctcactgcatatgacaccttgaaagatctatccaagagatatattctttatgacagtgatcccggtcctctagtacaactcggatgtgggacagtttcaggtgctcttggagctacttgtgtctatccgctgcaggttattcgtacaagcattaccatgattctcagactgcaggcacaacctgccaatagtactagtgcttacaagggaatgtctgatgtattctggaaaactctcaaggatgaaggctttagaggtttctacaaggggctcattcctaatctcctcaaagttgtgccagctgcaagcattacttatatggtttacgaaagtatgaagaagagtctagatcttgactagagtgtcatagttaaactagctaatttcaaatattataaagtcttgaattgttgatgatgacgaaaaaagaacagagattactagtcctggtaggaactattacaaatagtcattcttctgaggatatcttaaaacacgattttgtagtcagaaagtttttccccatgcttatctgaactaaaaaattgagaaattaggttgtattctagatataccaagttaataggtgtcatccttttcaatctgtacttttcccactatttcctatagtcaaaagtgaaggcacataattgtgtttctcctc

SEQ ID NO: 15104 - DNA, 577 bp, Glycine max
  Clone ID: LIB3051-032-H11_FLI
gggtgtattcctgatgataagtttggtgggttcaaagatgtgggcaccaatgtgtcttgtgttgtttcaaggagggacatggcaacccagatgagcccacaggggatgtgcaggtagatgaacacttaccgtgacaagatggtccaagaaacatagggccttattcactggctgaggctcagaacaagtcaaaagctggaaaaaagaaaaagtaagcactcaattgtcaacttgggatgtttctgaaacgccaaaacctgccccaaaggcaaaaagtgaggaagccaaaatctctgcatgggagaacttgcaaaaggcaaaagcggaggcagcaatacggaaactagagatgaaattggaaaagaggcgagcatcctctatggataagattatgaacaagcgtatattggcttagagaaaagctcaggaaatgagaagttcagttccacacaaccaaactgatcgggttgtaagaacttcacacaaggcttcatgatttcttagaaccagccagatgcgttctttgagtggttgtttgacttgccatgccttttaagcattctttcattggtttggg

SEQ ID NO: 15105 - DNA, 568 bp, Glycine max
  Clone ID: LIB3051-032-H7_FLI
gaaaaattggaatggttaccagaagggtttgaggagagaattttaggtcaaggaaagggtttgatcataagaggttgggcaccccaagtgatgattttggaccatgaatccgttggagggtttgtgacacattgtgggtggaactcagtattggagggggtgtgtgcaggggtgccaatggtgacatggccaatgtacgcagagcaattttacaatgctaagtttttgacggacatagttaagattggggtgagtgtaggcgttcaaacgtggattgggatgatgggaagggaccctgtgaagaaggaaccggttgagaaggctgtgaggaggatcatggttggagaggaggcagaggaaatgaggaacagagcaaaagagcttgctcgaatggcaaagcgtgctgtggaggaaggaggatcttcttacaacgatttcaactcattgatcgaggatttgaggtcgcgtgcctgttgatgattgttgtgtcatgtatgcatgtagacttaggacggtttgtgggaaattgtgatgatcgatttgctaataatacccgcggaagttgctt

SEQ ID NO: 15106 - DNA, 1505 bp, Glycine max
  Clone ID: LIB3051-034-E1_FLI
gataatttcttcctacttaacaaaaagatagtaagagccatacggtatcttatcccataggtcaccatgatccttccattagaagttgcaataacgtgatagaaatggctttgagacactttcttttatggctagctatatattctgaacccgatcccccctcacaagacttttaaatcacacaattcttttttttttttattgtgtatccaattccaaattcacccgtaaaataccttcctttgtctcaccagccatatgtgtatgatggaaggagatgagaatattcaagcatcaacaaagggaaaaaatgtggaaagcttcaccagcttggaggcaccaaggaagaaaagcaagaagatagaaaacaagaggaggtttagtgatgaacagataagatcactagaatgcatatttgagtcagagtcaaagcttgagccaaggaagaagatgcaactggcaagagatcttggccttcagcctcgccaagttgccatatggttccaaaacagaagggcaaggtggaaatcaaagcgcatagagcaagagtacagaaaactcaaagatgaatatgacaatttagcatcaaggtttgagtccctaaagaaagagaaggactctttgcaattagagttgcagaagctaagtgatttggtggtgacatctcaagatggtggaagggaagacaaggatggcaaagaaaacagcatagaagatggtggctcaggcagtggatacagcagttggaagcctgaagcaaaaaaaccaaggttttcaaatgatgagggtttggaggagagaataggtgtgtactcagatgaccaaaatgagaatagcatcataaggggtgttgagaaatctgaggacaaaggacaccaacttctcagaatggatgatcatgatcatgcagatatgccattggcatcacttgaaaaatggtatagtggtgtggaccctagtggcatcttggaccagtcatgtagcagttctcaatggctagatttctggacttgaaaaaggagccacactttgtgctgcatctgcatgtgtgatgttttttgtttcctccaagagaagaaggaacaaagattggttgattggttggttggctcttgtgctgccaacaagttcaaaactcaaaatattccagcctagccaagaaactcgagggaagttttgtaggcttgatttgataggggagagaattaagatagtctcactcaattcaattgtgtagagatttggaaaaacaaataatgtgcaatgtctctgtttgttcatgcttgcatgcctttttcctttcccatccctttgtttgtgttctttcttcttcttttcttttcccacttcaaggggttagttaatctagaacctctttatatttcataaaggggtctcttttttatcactttagcttatttccatattaacaagtgtgatccttatagtacgaccaggacacacaaaaataaaatgaatgaaaggtgtgaatgagatattgctcg

SEQ ID NO: 15107 - DNA, 1530 bp, Glycine max
  Clone ID: LIB3051-034-G7_FLI
aaccctacccttctcagttgcagagccatgtctcactccgacagcagcaagaagaagaagcagcagcagcgtagcaagcacgaaggaggaggaggagaggaagaatcgaaagacgaaggcgggttgatgatcaagccgcagagcttcactcccccaatcgacacctcccaatggcccatcctcctcaaaaactatgagcgtctcaatgtccgcaccggccactacacccccatcccctccggctactcccccttgaagcgccccctcgccgagtacctcaaatacggcgtcctcaacctcgacaagcccgccaacccttcctcccacgaggtcgtcgcctggatcaagcgcctcctccgcgtcgaaaagaccggccactccggcaccctcgaccccaaggtcaccggcaacctcatcgtctgcatcgaccgcgccactcgcctcgtcaagtcccagcagggcgccggcaaggagtacgtctgcatcgcccgcctccactccgacgtccccgacgtctccaaggtcgcccgcgccctcgaaaccctcaccggcgccgtcttccagcgtccccccttgatttccgccgtcaagcgccagctccggattcggaccatctacgaaagtaagctccttgagtatgaccctgataggcacttggttgttttctggatttcctgtgaggctggcacctatgttaggactatgtgtgtgcacttaggcttgcttcttggtgtgggtagccacatgcaggagcttaggagggtcaggtctgggatcatgggggagaaggataacatggtctccatgcatgatgtcatggatgctcagtgggtttatgataattatagggatgagacttatttgaggagggttgttatgcccttggagattcttctgactagctataagaggcttgttgtcaaggattctgctgtcaatgctatttgttatggtgctaagttcatgattcctgggttgcttaggtttgagaatgatattgatgttggggaggaggttgtgcttatgactaccaagggtgaggctattgctcttgggattgctgagatgactactgctgttatggccacttgtgatcatggggttgtggccaagatcaagagggtggtcatggatagggatacttatcccaggaagtggggcttgggcccgagggcgtccatgaagaagaggcttattagtgaagggaagctcgataagcatgggaagcccaatgagaagaccccccaggagtggcttaggaatttggttttgccaactggtggggatagtgtgattgctggcttggctgctgcgccggaacctgaggatgacaagattcagaagaaggagggagatggggaagggaagaagagaaagaagcatgaaagcacagatagccccgttgctgttcctgctaagaaggtgaaagtggatgaagtggaagaggttgaaaagcaagaaaaggtgaaggtgaagaaggtagatgaagagactgtggaggttgaagttgagaagaaggagaagaagaag

SEQ ID NO: 15108 - DNA, 1541 bp, Glycine max
  Clone ID: LIB3051-035-E3_FLI
aaactactgcctgcaaggatgctgaaactaagaagtatgtttcagaattgaatgctgaggaggatgatgttgatggcaatggagatgaatgtcgcttgtgtggcatggatgggaccttgctttgttgtgatggttgtcctgctgtttatcattcaaggtgtattggtgtgatgaagatgcatataccagaaggggcatggtattgtccggagtgcaaaatagatatgattgggcctactattgcacggggaacatcacttaaaggggctgaagtattcggaaaggatttgtatgggcaagttttcatgagtacttgcaaccacttactggtgtatgtttaacttcttttgtgtttcttccactccttcatttgttatgctggatgattctggctcaatgtcaacagtgatggcttttgtcttaaatactacaatcagaatgacatacctagagttctccaagtcctttatgcatctgagcaacatagacctatatacaatggtatttgcatggcgatgttagaatattggaatatttcagaaaagttcttacccatttgtgtcagtagactaactcctatggtcgaagaagagcataaagctgttagttcggtgaaggaagaatacagtttaatgtttgggaatgggatttgtggtgataatttggtgccatctcttgatgcttcattggttacaactcgaagtcctgctcctggaagcagtggcaatgcaagaactactgtgaatctgaagcttaatgaggaaactgcaatggattcgactgtttcaactgttaaccatcatcactctgacccaaagtgccaaaattctgttaataggtcagctgcagtaagccctgtcaagtgctccttggtaagcagacaatttaataattatgggcacgcaaatgacgtagggttgcctatgaatttgtctttgcaaactaaaggcgaccaatctggttttggaaagtgcaaaggcagtttaactaatgattttgtgtacatgggttgctcctataaaccacagtcatatattaattactatatgcatggtgatgttgctgcgtctgctgctgctaacctggccgttctttcttcagaggattctagatcagaaggtcatgtgtctggcaacttggggaaagcaacatctggaaacacttatttgctagcaaaagcattctcccaaacagcttcacgcttcttttggccaagttctgaaaagaagcttgtggaggttccaagagagaggtgtggctggtgcatttcttgcaaagcctctgtttcaagcaagaaaggatgcatgttaaatcatgctgctataagtgccaccaaaagtgcaatgaaaatcctttctggtcttgctcctgtaaggagtggagaaggaatcatccctagcattgcaacatatgttatgtatatggaggaaagtttacgtggcttaatagttggaccctttctgagtgaatgttatagaaagcattggcgtaaacaagttgaacgagccaaatcatttagtgatataaagccccttttactc

SEQ ID NO: 15109 - DNA, 1192 bp, Glycine max
  Clone ID: LIB3051-036-D11_FLI
ggaagattgagagaggtgttgccttcccgacatgtgtgtctgtgaacaacactgtctgtcacttctctcctcttgccagtgatgaaacagtgttggaagacggtgatatagtgaaaattgacatggcttgtcatatagatgggttcattgctgctgtggctcacacccatgttcttcatgaggggccagttacaggacgggcagctgatgctattgcagcagcaaacaccgccgccgaagtggctttgcggcttgtaaggccaggaaggaagaacaaggatgtaactgaagcaattcaaaaggttgctgctgcgtatgattgtaaaattgttgagggtgttcttagccaccaaatgaaacagtttgtgattgatgggaataaggttgtgcttagtgtatccaatccagatacaagggttgatgatgcagagtttgaggagaatgaagtttatgcaattgatatcgtagcaagtactggagatggcaagcctaagctgttggatgagaagcagacaactatttataagagagctgttgacaagagctatcatttaaagatgaaagcatctaggttcattttcagtgaaataagccaaaagtttcccatcatgccattctcagcaagggctttggaagagaaaagagctcggttaggtttagtggaatgtgttaatcatgagctcctgcaaccttatcctgttctgcatgaaaagcctggtgatgatgttgcacatatcaaattcactgtattgctaatgcctaatggatcagatcgtgtcacatctcacccactccaggaattgcagcccaccaaaacaatagacgatcctgaaatcaaggcatggctagcattgggtacgaagacaaagaagaagggtggtggaaagaagaagaaaggtaagaagggggcagaagctgaaccaatggaggcaacaaatggtgctacaccccaagagcaagattgagacaaaaaccatagattttgctttttgatccctttcaattttggcacatttttcaccaagttgtatctgcttgattgtgaatttagtacagccttcggacacccaatgttaataggaatttgatttccttggctattgtacttgacctgaatgctgtactcctgattaagcataaatatgcttaattgttggaaaatatatcaaatttaaaaccccaattttgtgtt

SEQ ID NO: 15110 - DNA, 985 bp, Glycine max
  Clone ID: LIB3051-037-C4_FLI
gcgaagaagtagagaacaaagaaagagagagagaattgaatgtgaatggggaatcagaagcagaagtggacgcaggacgaagaagatgctctcatcgccggcgttgaaaagcacggccccggaaagtggaagaacattctcaaggatccccaattcgcccctttcctcacttcccgttccaacatcgacctcaaggataaatggcgcaatttgagcgtcagcaacggtgctcagggctccaaagaaaaatctagggttcccaagcttaaagccctccctgctcctcctgctcctaccgccactcctcagaacgccgctcctgctctgcaaaacgcagcatctgatgtcactcccccagatgcttctcagaatgaccaagatgccaaaaaccctccaaggtataatgcaatgatttttgaagctctatcagcgctgaaagatagtaatggatctgacatgaatgccatcattaaattcatggagcaaaaaatcttcaggtaaaccaaaattttagaagggcattaagtacaaagttgaggaggcttgttagtcaagggaaacttgaaaaggtacaaaatggttacaaggtgaaaaaggaagcctcctcggggacaaaatcaccttcaccaaaaccaaaggatgtccggccaccacaaccacaacagcaatccccagcttctgtcttaatgactaatgacacaataaaggaagctgcggatactgcagcctacagagttgctgatgctgaaagtaaatcatatctggctgcagaagcagtaaaggaggctgaaaaaaatatcattgctggttgaacatagtgattcaatgttacagctagcaaaagatatatatgaacaatgttcccgtggtgaaattatcctcttggcttaagatggtctaagtaaggtctataaatagattcgtcctgatgttggtttctaaatgtaaaattttgttgatacaatgaaatactattttaactttt

SEQ ID NO: 15111 - DNA, 1929 bp, Glycine max
  Clone ID: LIB3051-037-C9_FLI
atccatcaccctttctttcattctgttgggaaatggaagtcacactttcagcgtgcaagtccattagctcgccttctgttcccgtcgcagctttatttgcggggaaagcaggaactaagagttcgcaatgcagttttttagctggagcaaacaaagtgaggtttcctaggcaagtcggtcaagttagccacgttcgcaaacagcgccaaacgcgtcactgtggtgctctccacgcgacttgcagcggtgacaagatcctgatcgcgaatagaggcgagattgcggttcgcgttattcgaaccgctcatgaattggggattccgtgtgtggctgtgtactccaccattgataaggacgcccttcatgtcaaactggctgatgaagctgtatgcatcggcgaagcgccgagtagccagtcgtacttgctgatcccgaatgttctgtcggctgctattagccgcagatgcacgatgttgcatcctggctatggttttcttgcggagaatgctgtgtttgttgaaatgtgcagggaacatggaatcaactttattgggcccaaccctgacagtattcgggttatgggtgacaaagcaactgccagagagacaatgaagaaagcaggtgttcccaccgttccaggaagtgatggccttttacagagcacagaagaagctattaggctggcaaatgagattggtttccctgtgatgatcaaggcaacagctggtggtggaggacgtggcatgcgtcttgctaaagaacctgatgagtttgtgaagttgttacagcaagctaagagtgaggcagctgctgcatttggcaatgacggggtttatttggagaagtacattcaaaacccaaggcacattgagttccaggttcttgcagataaatatggtaatgttgttcactttggagaacgtgattgcagcattcagaggcgtaatcagaaactgcttgaagaagcaccatctcctgccctgacccctgagttgcgaaaggcaatgggagatgcagcagttgctgctgctgcatctattggttacataggtgttggaacgattgagtttcttttggatgaaagaggttccttttactttatggagatgaacacacgtatccaggttgagcatcctgtgacagaaatgatttcctcaacagatttgatagaagagcaaattcgtgtagctatgggagaaaaacttcgatacaaacaggaggatattgtcctcagaggacattctattgaatgccgtatcaatgcagaagatgcttttaagggatttagaccagggccaggtagaattacagcatacttgccatctggaggtccatttgttagaatggatagccatgtttatcctgattatgtggttcctccaagctatgactcccttcttggaaagctgattgtatgggctccaacaagagaaaaagcaattgaacgcatgaaaagggcacttgatgacactattatcacaggagttcctactacaattgattatcataaacttatccttgacatagaggatttcagaaatggaaaggttgatactgcttttattccaaaacacgaggaagagttggcaatgcctccgcagaagatggtactcgctaacagggtgaacgaactagctggttcaactgcctgatgaatatgattgtgtgatgtcagaattgctttttgtaatcgccgtgttgtcagtgcctcgaagtgaatgttttaatgaaattttgataattagtctcgtacattccttttcttcacataattatattgtaaaatcaattaattcatgtttgatttcatcccaaatattattgcaaggaattaagaataggtccttgcatttttttcggaagtcatagttgtcacaatggttggtttagaggatcttgtattaagagctcgatgctagatacagtaat

SEQ ID NO: 15112 - DNA, 1526 bp, Glycine max
  Clone ID: LIB3051-037-H9_FLI
cggacacagaaccgagcttgcagcagcgatttctcatttcatttttcacacttcaacaatggcgaaaaccttcaaatacatcatcctcggtggaggagtttccgctggttatgcggcgagggagtttgccaaacagggcgttaagccaggggagttggctatcatttcgaaagaagcggtagcaccttatgaacgtcctgctctgagcaaggcttacctttttccagagtcccctgctagacttcctgggttccatgtctgtgttggaagtggaggagaaaggttgcttcctgagtggtacacagagaaagggatagagttaattcttagcacagaaatagtaaaggtagaccttgctgcaaaatctctgatcagtgctggaggagaaacattcagttatcagattttgattgttgcaactggctcaacagttataaggctgacagatttcggtgtagaaggagctgatgcgaaaaacatcttttatttgagggaggttgacgatgctgacaaattgtacgcagcaatcaaggcaaagaagaatgggaaagctgtggttgttgggggaggatacattggtctggagcttagtgcagtgttgaaactcaacaatattgatgttaccatggtctacccggagccttggtgtatgccacgactttttacggctggtatagctgaattctatgagggatattacgcaaataagggtgtaaatatcattaaaggaactgttgctgttggattcacttctaattctgatggagaggtaaaagaagtcaaactaaaggatggcagggtcctggaagctgatattgttgttgttggtgttggaggaaggcctcaaacagtcttagtcaaagggcaggttgaagaggagaagggtggaatcaagaccgatgctttcttcaaaactaatctctccgatgtatatgctgttggtgatgttgctactttccctttgaaattatacggtgaattgagaagagttgaacatgttgatcattctcgcaaatcggctgaacaggctgtgaaggccatcaaggcagctgaggaaggaaaaacagttgaggagtatgattaccttccatacttctattcccgttcattcgatctgtcttggcaattctatggcgacaatgtcggcgacacagtgctattcggagacaacaatcctgcgtcttcaaagccaaagtttgggacatactggattaaagacgggaaagttgtcggggtctttctggaaggtggaactcctgaagaaaaccaggctattgctaaagttgctaaggtccagcctccggttgcggatgtaaatcaacttgctaaggaaggcctttcctttgctagtaaaatataatggttttatttgggaaggataaaaatgcttggtggtttgcatagattgtatctgacaggctttattttactctggtttatgcattactgtgttttttcgtttgatgtggttgcaagggatattatataatatatatatatgttttgccgtatctattccatttctc

SEQ ID NO: 15113 - DNA, 2832 bp, Glycine max
  Clone ID: LIB3051-038-E10_FLI
ctctcatgcttttttccacttgcaaactccaaattcactctgacagtttttgcagctaattaagaagaacttaacagacatataaacatagtgatcgttatgtctacgcaaccaaagcttggtcggattcccagtatcagagaccgagttgaagacactctctctgctcaccgtaacgaactcatttctctcctctccaggtatgtggctcaggggagagggattttgcaaccccataatttgattgatgaacttgacaacatccctggcgatgatcaagcaatagtggatcttaaaaatggtccctttggtgaaatcgtcaagtctgcaaaggaagccatagttttgcctccttttgtggcaatagcagttcgtccaagacctggtgtttgggaatatgtccgtgttaatgtctctgagctcagcgtggagcaattaagtgtttctgaatatctcagcttcaaggaagaacttgtagatggaaagattaatgacaattttgtattggagcttgattttgagccatttaatgccacatttcctcgtccaactcgctcagcatccattggcaatggtgtccaatttctcaatcgccacctttcatctattatgtttcgcaacaaggattccttgcagcccttgcttgatttcctccgagctcacaaatacaagggccatgctctgatgttaaatgatagaatacaaaccatttccaaacttcagtctgcattggccaaggctgaggattatctctctaagcttgcacatgatacactctattcagagtttgaatatgtattgcaaggaatgggttttgagagaggttggggtgatactgctgaacgggtattggaaatgatgcatctgctattggatattcttcaggctcctgatccttctacactagagacttttcttgggagagtaccaatggtattcaatgttgctatattatctcctcatggctactttggacaagccaatgtcttgggtttgcctgacactggtgggcaggttgtttatatactagatcaagtgcgtgcccttgaaaatgagatgctccttcggatcaagaaacagggacttgatttcactccaagaattctaatagttaccaggttaatacctgatgcaaaggggacaacatgcaaccagcggctagaaagagtcagtggtactgaccatactcatattttgcgagttccattcagatcagagtcaggaactctccgtaaatggatttcaaggtttgatgtgtggccttatctagagacttatgcagaggatgttgccagtgaaattgctgctgagttacaagggtatcctgatttcatcattggaaactacagtgatgggaatcttgttgcatctttattggcttataaaatgggagttacacagtgcacaatcgcgcatgcacttgagaagacaaaatatccagattcagatttatattggaagaaatttgaggataaataccacttttcatgccaatttactgctgacctaatagccatgaataatgctgattttatcatcaccagtacataccaggagattgcaggaacgaaaaatactgttggccagtatgagagccacgctggttttactcttcctgggctctatagggttgtccatggcattgatgtttttgatcccaagttcaatattgtctctcctggagctgatatgtcaatatatttcccctactctgaaaagcagaacagacttacagccctgcatggttcaattgaacagctattatttgctcctgagcagactgatgaatacattggtttattgaaagacaagtcaaagcccataattttctccatggcaaggctagacagagtaaaaaacataactggattggtagaaagctttggtaagaacagcaaattgagggaactggtcaaccttgtcatagtagctggttatattgatgtaaagaagtccagtgacagagaagaaattgcagaaattgagaagatgcatgagctcatgaaaaagtataacttagttggtgattttcgttggattgctgcccaaacaaatagggcacgtaatggggagctgtatcgctacatagcagacacacaaggtgctttcgttcagcctgctttctatgaagcttttggacttacagttgtggaggccatgaattgtggactccccacttttgctacttgccatggtggtccggctgagatcattgagcatggtatatcaggattccacattgatccttatcaccctgatcaagcttcacagctattagttgaatttttccaaaagagcaaggaggacccaagccattggaagaaaatatctgatggtggtcttcaaagaatttatgaaaggtacacgtggaagatttattccgaaaggcttatgactttggcgggagtttatagtttctggaaatacgtttccaaattagagaggcgtgaaactcgacgatatcttgagatgttctatatcctcaagttccgtgatttggcaaattctgttccgctagctaaggatgatgcaagttaactagctatataatttcaccaaaggcttgacagcagacataataagagtcatttatgtaaatataatagtctgcttctcgtgttttgaaatctagtgaggcgacctagaggagtttcatggaagacttgtcttgtctatgttaacttcgattatgtaagagatggcgagcactggttgttgaatttggatgtctcttgttttcgtttgattagtagtcatcaatgatatagacctggaaattacctgtgactgaggattgttatccttactgatgggtaagaataaagcattatg

SEQ ID NO: 15114 - DNA, 883 bp, Glycine max
  Clone ID: LIB3051-039-A12_FLI
cggtaggttacatactcctggccatggctatgccaggttccctatacattgggtctattttagttggcatgtgttatggagtgaggcttgccattacagtccctacagcctcagagttatttggactcaaatattatggtctcatctataacattctcatccttaaccttcctctcggttctttccttttctctggtctgcttgctggcatactctatgatatggaggcaactacaacagagggaggaggcaacacatgtgttggaggtcattgttacaggctagtctttattgtcatgactggagcatgcattgttggattcttcttagacattctgttgtcaatcagaaccaagaatatttacaccaagatttccacgagcaagaagcccaagaaatccttaggaacatcaaataggcagtgattcagaatggtatgacattcctgggattgatgaactttatgctcaagtgatatctcagtatccgtcagcaaggtgacttgtcctatctgatagttaaaactcatttttccaataaaggagggccatttgtttttaattccatttaggcctccatgtactgttattattagttttttttatgatgtgggatcagagagaattctttttgttccatatgaaaataagtgtatttagtatcgtgagagtttttttgatagattaaaatatcacgctgtgttattattagctgtttgttcgtaccagtcagtgttatttggctaatagcgatagtcactagtctgtccaaagtttgcaagtggccatcctaatgttgcaatctttgacattgtaccatgtgttatgtgttgtattgtattggcaatatgttcaatgaaggtggcagtagatgcaattgatgc

SEQ ID NO: 15115 - DNA, 645 bp, Glycine max
  Clone ID: LIB3051-039-B6_FLI
gttcatctcttgtggaggaagacaagcttagccttgcaactacacttctcgaaaaggccaaggctaaaggggtttctttgttgcttccaactgatgtggtcatagcagacaagtttgctgctgatgctaacagcaagactgtgccagcatcaagcatcccagacgggtggatgggattagatattggtcccgattccatcaagacatttggtgaagcattggataagacccagaccgtcatttggaatggaccaatgggtgtttttgagtttgataagtttgccacaggaacagaggccatagccaagaaactggcagagctgagtgggaagggagtaacgaccatcattggaggaggtgactctgttgccgctgtggagaaggttggtcttgcagacaagatgagccacatctccactggtggtggtgccagcttagagcttcttgaggggaagcaactccctggtgtccttgcccttgatgatgcttgagtaaacatcactagttcctctgtaatttgtgctttatattattattatggttggatttcagccaacagtggattgaggtacaatgagagagctcttgttgctcctgtagaggcttaatataggttaggtttcgaaataagagggttttgtggcc

SEQ ID NO: 15116 - DNA, 753 bp, Glycine max
  Clone ID: LIB3051-040-A1_FLI
gaaactttttcacccccttgataccgcttcaattcaccaatggcaagtcgaggaaaaacccagggatctggcacaaccaaaaagggcatctcccgaagcaacaaagctggtctccaattcccagttggtcgtattgctcgatacctcaagattggcaagtatgctgaccgtatcggttctggcgctcccgtgtatctcgcctctgttcttgaatatcttgctgctgaggcaatttttcttaatcgcctttgatttttgttttcgtgtgttgtcattggatttagggtttataaattagggcttattttcctaaagtttagtggatggttttggtttaatgatcaaccttgaataattgaaatgataaatttactttaatcaatattaattacttttttgaaaggtttatatcacacttggtgtgttcaggttttggagttagcggggaatgccgcaatggacaacaagaagactcgtattatgcctcgccatatccaattggctgttaggaatgatgaagagttgagcaggcttctcggagatgtgactatcgccagtggtggtgtgacacctaacattcacaacatgttgctgcctaagaaggttgggacctcgacctcaacctttatgggtcctagtgccgatgatgacgacgcttaaatgttttcccccaaaagtttgacccatgtttcccttctgtaaaatgggtcctttattgaataatactaaatgtcaagattgacataatataat

SEQ ID NO: 15117 - DNA, 1473 bp, Glycine max
  Clone ID: LIB3051-040-F12_FLI
tttccacttgttcttcagcaaactcacaaccacaacccaaccaacccacctgaactactgaacaacaacctcttcttcttctctctctctctttagcataatcattcatcaccacacaagagaaaaaagaaaaagaacaaagaacaaataaacctttttttttttataaaaaaagaaagaaaaggaaataaagttttttgttttttcgatgaaccagaagttcatcggaaagccgccggcgacggtggacctggatcggatgccggagcgtgggtcccaccaccggcgttcccactccgacacctccttccgcttcgccgcgaacttcgacgaccttctcctcttcgacccctccgacttcgacatctccggcctcccgtcgccgctccctctgccatctccggtctccgccggcttggttccgatgtccgtcgactccgacgagtccggcaaacagccgaggccggccggggcgtccgccggcgggcacctgcggagtctgtcggtggattctgacttcttcgacgggctcgggttcggcggcgacgagagaggcgccgggaaaggaggcggcggcgagcggagggtggggcaccaccggcacagcaactcgatggacgggtcgtcgacgacgtcgtttgaggcggactcggcgatgataatggacggtgtgaagaaagctatggctcctgataaacttgctgaacttgctcttatggatcccaagagagctaagaggattcttgctaacaggcaatctgctgcaagatccaaggagaggaagattcgttacacaagtgagttggagaggaaggtgcagactcttcagactgaagcaactaacctttctgcacagcttaccatgcttcagagagacactacagatttgactacagagaataaggagctcaaactgcgtttagaggctttggagcaggaagcacagcttagagaagatctcaatgaggcattgaaggaagaactgcagcgccttagggcacaaagtactcgtttgggtgctattggtggtaacccttcttttggtgggatattcaaccagttggcttcccaattagccatgcaacagttgtctaattctgcaccccatcagcagacacaacaccagccacaggttggcatgcctcctcctccctctggacagaaccaccctaacttcatggacttcaatcagcagaagtaactcataatagcagtagcagtaaatgattgattacatgaatgtataactggtgagacttgtgaagggtatattgtgcagttcagtgtctttagtcctgtgttgtttatcttcagctctaggatgtgtactttacgcagttctaggttagaagcgcagcctctgaaatgttgtgttatagctcttgggtgaatgaagttaacataaatatgtagaaagacttgttgataatactatagatggtgaatgaagtttattaattagcttctggaatt

SEQ ID NO: 15118 - DNA, 614 bp, Glycine max
  Clone ID: LIB3051-040-G5_FLI
cggaaccaccgtttctctctcacggtgctgccactgtcactcttctctactttctgcttcccagattctctatttttgcgcgtaatcgaatgtggaactttgcatcgaattgcattgctggaactgtgggactaaaaaatgattcaaagcctactcactctgcttcagaatgttctgatgatgagacttctgttataggcagagaggaagggctggaatgcccaatatgctgggaatctttcaatattgttgaaaatgtgccctatgttttatggtgtggccacaccctttgtaaaaattgtatcctcggactgcagtgggctgttgtgaaatttccaacactgcctgttcaacttcccctttttatctcctgcccatggtgcaaccttatgtctttccgtttagtttaccggggaaatcttaaattccctcgcaaaaactactttcttctttggatggttgagagcatgaatggtgatagagggaaatcacattcacctttctgtagcgataatcaacaacactcaattaaagacaatttaaccacgggaagccaagtaagccatggaaaccttcggaggggtcaagtttgccacccagagacattgagttcc

SEQ ID NO: 15119 - DNA, 758 bp, Glycine max
  Clone ID: LIB3051-041-C3_FLI
gaaaaaatgggcagattatagtgcctgttttttaccatgttgacccaacccatgtacgccatcaaacgggtagctatggacatgcttttgcaatgcacgaacaacgttttgttggcaacatgaacaaggttcaaacttggcggcttgtgctgggtgaagtagccaatatatctggctgggattgcttaaccacaagggtggagtctgaactagtagagaaaattgcaatggacatattacaaaagttggactctattacaagcgggggcctagaaagacgcatagcaacgtacaagcaaatggcacagcaaaagctagaaaagtcactgaagacgagtaacatgagagacatggaagacttgatcacgacactgctccaacttggggagctgaaattggagaaggccatgcgcactgatgattcgagcgtttgggatgacctaatggcaacgtacgagcgtgtattgcagcttaaacaggacaagtggatgcgaacgtttaataccaaagacatggaggacttagtagctacaaggcagcatgttatgcagattcagagggagcaatccaatcgtaagatcgggttccgcggtatatagacgcagatttaagttgaatagattttgggtagtgtgtgctaattatgatttatcaataatattcataatcatatgtatcagaattctcaaatgcatgtaaccgtaacaaattgtggccatacatcatagaattcaaagtagaggagaggagtgacattc

SEQ ID NO: 15120 - DNA, 530 bp, Glycine max
  Clone ID: LIB3051-041-D12_FLI
aagaaaatctgcacctaccaccggtggagtcaagaagcctcatcgctatcgtcctggaactgttgctcttcgtgagatccgaaaataccaaaagagcacagagcttctgatccgcaagctcccctttcagcgtcttgttcgtgaaatcgcgcaagacttcaagcaaatcactgacattttttgttgatatcgttgccaatgtgaccgatatgattccagactgatttgaggttccagagtcacgcggttcttgcgcttcaggaagctgcggaggcttacttggtgggtttgtttgaagacaccaacctttgtgcgatccacgccaagagagtgaccatcatgcccaaggacattcaactcgcacgccgcatccgtggagaacgtgcttaggcttataataatgataatagcatagttgtcgccttttcgttttgcaatacatttcttgtttcttagggttttagtgttattttccagtttgttatgttttgtatagaagatagatatatcaacagcaacagcttcttacc

SEQ ID NO: 15121 - DNA, 660 bp, Glycine max
  Clone ID: LIB3051-041-D6_FLI
tgcttatactaactaactcttcttgagaaactctttctcacacgccaagagtaacatgggatttccagtggggtacacagagttgatgctgccgaaggtgtttctgcaggtgctatccgtattgggcttgataagaaaactcatcaccgtcctcttgtgctacatgggcttccacgatttcttcgaatccgacattgcgtggccggagagggcgccggaattccagtcggtgtgggcggtgctcataagggaaatcctaccggtggtgaagttctcggagatggagatggagatggcggaggcgccggagagctgcgcggtgtgtctgtacgagttcgagggagaggacgagatcagacggctgacgaactgccgccacatattccacagagggtgtctggaccgttggatgggatacgatcaaagaacgtgtcccctgtgtcggacacccttcataccccaccatatgcaagctgccttcaatgatagactttgggctgcttcagggattcctgatttctattacaatcatgaatgactctagggaaaaaaaatcctagatttggggacgggagtgttctgtttaggttgttgagtatgtgttcagtgttcaatgttcgtgtaaatattatacaaaatggaaagcggagaattgttgtt

SEQ ID NO: 15122 - DNA, 2144 bp, Glycine max
  Clone ID: LIB3051-045-B9_FLI
atcgtaacaagatcacatttgttttgttttgtgttgtttgtgttgttgttgtgttgttgatctcataataacaacatggagggtgagaacaagaagtacatcacatctgaggagctgaaggagcacaataagccaggggatttgtggatttcaatccaagggaaggtttacaatgtttcagattgggcaaaggaccaccctggaggagaggttcccttgttgaaccttgcaggccaggatgtgactgatgcattcgtagcataccatccaggctcagcatggaagtatcttgatcccttcttcacagggtaccacctaagagatttcaaggtctcagaggtgtcaaaagattacagaaagcttgtgtctgagtttgtcaaaatgggtctttttgagaagaaagagcatgttactctttacacactgtcctctgttgctgtcatgttttcaattgttgtttatggtgtcatagggtgcagtagtgtgtgggctcatcttggtgctgcccttttgttgggcttgctttggatgcaaagcacttacgtgggtcatgactctggccactatgaggttatgtctagccctggctacaacaaattggcacaaatcctttgtggcaattgcatgactgggataagcattgcatggtggaagtggactcacaatgctcaccacatctcatgcaatagtcttgactatgatcctgatctccagcacatacctgtctttgccgtgtcgacacggttcttcaattcaatcaaatcttgtttctatggaaggaaattggtgtttgattcattatcaaggtttctcatcagctaccagcacttcacattctacccagttttgtgctttgcaagggtcaatttgtacctccagactttgttgctgttgttctctaggagaaaggtgccagatagagcctttaacataatggggatccttgtgttttgggtttggttccctctgttgatctcttcactaccaaattggggagaaagggtcatgtttgtgttggccagttttgctgtttgttcaatccagcaccttcaattttgtttgaaccatttctcagcagatgtgtatgagggcccaccaaatggcaatgactggtttgagaagcaaactggtggcacattggacatttcttgctcctcatggatggattggttctttggtggcttgcaattccagcttgagcaccatttgttcccaaggcttccaagggcacaattgaggaaaatctcacctttggtgattgatctttgcaagaagcacaatttgccttacaggagtttgacatttgttgaggccaatctttggactcttaagaccctcaggactgctgctcttcaggccaggaatctcagtaacccttcttcccagaatttgttgtgggaagcttttaacactcatggatgatttttgtgaaaagattgatgatcatcaatcaagtttctctcttttttttcccacccttttgaaaagcttttaatcaacatcttagttgtcaatttgttagatctcacatttcttaattgggcatggaatttttaatctcccttttcttgggtaaggaataaaatgatgatcacttgttattatgcaaaattcatatcagattcagaggctattctggtgggttcagcaagaaatctattacttggttaatctcccttttcttgggtaaggaataaaatgatgaccacatgttattaagcaaaattcatatcagattcagaggctattctggtgggttcagcaagaaatctattacttggttaatctcccttttcttgggtaaggaataaaatgatgaccatatgttattatgcaaaattcatatcagattcagaggctattctggtgggttcagcaagaaatgtagtacttggaggagcgcaactcggatgacttgttttggggtactaattgctttgcttattttatgtttttatgattttgtatttgtattcttttatggtgaattttttatgatattgttgtaaacccaacatatgtagaagaatcttttcatttaggtgtgcaacttcgtgctgagtagtttactacgaagttgggtccacccgtggttgcttccacgtgaaaatttcgtacataataatacttccaaattcgtgttg

SEQ ID NO: 15123 - DNA, 988 bp, Glycine max
  Clone ID: LIB3051-045-D2_FLI
ccagcgtccgcccacgcccgtccgtaaaaaacagagcaactactcaattcttcactctgtttccccttaccttacacactctaacacatggattcaccttcctccttcttcaactcaccctcttccggtttctgctccgaatcttcctctccggaagccttctcgtgggaagggtacctacccttcaacgagaacgacccggaggagatgcttctatacggcatgatcgccggcgcgacaaccgaggagcactccggcgagagggcgagctcggaggagagtgctgcagcacggaaggagaagtcgtaccgcggcgtacggcggcggccgtgggggaagttcgcggcggagataagggactccacgcgccacgggatgagggtgtggctggggacattcgacagcgccgaagccgcggctctggcttacgaccaagccgcgttctccatgcgcggctcggcggcgattctcaacttccccgcggagatcgttagagagtcgcttaaagagatgaactacgctcatgatgattccaacaacgaagaagggtgctcccctgttgtcgctctcaagaggaaacactctttgagaaggaaaattaacgtcaggaagaagaagaacaacaataacaatagcaaactacaaagtagtaccgtagacaatgctgtcgtgtttgaagaccttggtcctgattacttggaacagctgttgatgtcctctgatcatcatattcccaccaccttctgattcatttattcctcaattgcaattcagatctcaaaaaccttataaatatccattgcatagtttctacctagggtttttgtgttagtagtgttaattccttcttcttctttgttcttttgtttttgtaaggctaaaatgcttaggtcatgtttggatgacagatttgaacttcttttcagttcttatctttttttctttgtttttgtttttgttttcctactctgggagaattttcttcttt

SEQ ID NO: 15124 - DNA, 1594 bp, Glycine max
  Clone ID: LIB3051-045-F2_FLI
caaaggttgttgtttgatttactcacatcatcaagaagggagagccaacttttagtgtccttgtgtcaagattcttgctcggaaaagcattcccaataccagtttatctgtcactgctgccaattattggtggtggtgcactagctgcagtgactaagctcaatttcaacatgattggcttcacgggggctatgatatcaaatttggaatttgtctattgcaatatattctcaaagaaggggatgaagggaatgtctattagtggaatgaacaactattcttgtttttccataatgttactgtcaattctcacaacttttgccattgttgttgaggaccccaaggtttgggctgcaggctggcaaacaaatgtgtctcaaattggtcccaattttgtatggtgggtagctgctcagagcgtcttctaccacctgtacaatcaagtcccatacacgtctcttgatcagatttctcccttaacatttagcattggaaacacaatgaagaggattttggtcattgtttcttccatccttatctttcccacgcttgtttagcctatcaatgttcttggtatcgccattgcaattcttggtaccttcctctattcacaggtgcattctcctctccctctaaattgactatgttttttgtactccgagaatcctaagtgagaatcctaagggacaacatgctttgtgcactgacattattattttttgtttctttttccatctatatctatttttatataaagtaaattaaaaggattatagaaatgagtttttttggtggtggatccatcgtgggattatgatgtaagtgttgttcttgtccttttactgataggttgatttatgtttagtatgattaaattatgaggtaaaccaatgctacgacatttccttcaggaattaaggctctggctgattatgttcacaacaaaggtttactttttttcttctgactttcgagtgaagaaagaaaagtcactaaatacttcattggccttccttcctttactttttgttttatttttggaaaattagtgctttcactatacttatcattattattgttttacttgtatcccattaggatcgtacaacttgtgtttggagacttccagatctagtatcattagttgtatttaaagggcataaaagaggaatttggtcaatagatatgcatatgtggggatttctttccccttctcccaagggttaaaagagtttgcaatcttgtctggtccaaaaatgtcaatgaactagtaagcacacatggctattcccagaactacataattgtttggagatacccctccatgtcaaaggtgatggcaccatccttaacgctcgaaaggcataagttcatggccaatttgaggaaaatgtttcatgaggttgttgttgttactagtgatggaactaatgatggccctacatagcagcaactgaggtttatgtctcttgtgtgctattatgataattctggcagttacgagttgttttagttttgttaattgtcatgtatatcattaatgctttatattgactttattcatatttttatgagatcaaattataattttgat

SEQ ID NO: 15125 - DNA, 599 bp, Glycine max
  Clone ID: LIB3051-046-C8_FLI
gaaaactacagctaattgccgagaaagagacaaaaggagctgtttattgcttgaatgcatttaatggtaaattgcttgctgctattaatcaaaaaattcagctgtataagtgggtgctccgggatgatggtacccatgaattgcagtctgaatgtggacatcatgggcacatcctagcactttatgtgcaaactagaggagattttattgtagttggtgatctgatgaagtcgatttccttgttaatctacaaggtaaattttaaactgttgtgacactagtttctgtctggttttgttaaatttcaactgttgtgctgcttatcgttttggatgaataactgattttttgtatatataatgagtacaccatgttcttttggaatgataagttgttccttattgatagcatgaagaaggtgctattgaggaaagagctcgtgactacaatgcaaattggatgtcagccgttgaaattgttgatgatgacatatatctaggtgcagaaaacagttttaatctgttcacagttcggaaaaatagtgaaggtgccactgatgaagagcgaggtcgtcttgaagtggttgcctttcccttttc

SEQ ID NO: 15126 - DNA, 2005 bp, Glycine max
  Clone ID: LIB3051-047-D12_FLI
ctttccctcgttttttaagagagagaaagtagagagagagagaaacacaactgctttgccaaaccttaatttcagggcacttccaagctaacaggaccagttgttgttccctttttgtgttgtttgattcagcgatttctggttttcgttttttttctttctttgttacaaggagagttcgatgtctttaagttgaataacttgttgggacatatttgactcggtgcttttcttttggtgcttgcctcatgggaaacagtgaggatgagaaatctgttaagactggaagcccttcttcttcacctgcaacaactgatcagaccaaccaacctaatattcatgtctatcctgattgggctgccatgcagtattatgggccaagagtcaacattccaccatacttcaactcagctgtggcttcaggtcatgctccacacccatacatgtggggaccaccacagcctatgatgccaccttatgggccaccttatgcagcattttattcgcatggaggggtttatactcaccctgcagttgctattgggccacacttacatggtcaaggagtttcatcttcacctgctgttgggactcattcaagcatagaatcaccaaccaaattatctggaaatactgatcagggtttaatgaagaaatcaaaagggtttgatgggcttgcaatgtcaataggcaattgcaatgctgagagtgctgagcatggagctgagaacaggcagtcacagagtgtggatactgagggttacagcgacggaagtgatggcaacactgcaggggctaatcaaacaaaaaggaaaagatgccgagagggaacactgaccactgatggagaagggaaaactgagctacaaaatggtccggcttccaaagagacttcatcttccaaaaagattgtgtcagctactccagctagtgttgccggaacattagttggacctgtagtttcttcagttatggccacaacactggaactgaggaacccttcgactgttgattctaaggcaaattccacaagtgccccacaaccttgtgcaattgtgcctaatgaaacttgcttacagaatgagcgtgagctgaaacgggagaggagaaaacaatctaaccgtgaatctgctagaaggtccaggctgaggaagcaggccgagactgaagaattggcacgaaaagttgatatgttaactgctgagaatgtgtccctgaagtcagaaataattcaactgactgaaggttctgagcagatgaggatggaaaattctgcattgagggaaaaactgagaaatactcaactgggacaaagggaagagataattttgagtagcatcgagagtaagagggctgcacctgtaagtacagaaaacttgttatcaagagttaataattctagttctaatgacagaactacagagaatgagaatgatttctgtgagaacaaaccaaattctggtgcaaagctgcatcaactattggatacaaatcctagagcagatgctgtggcagctggttgaaaccagtaactgcactggctgattatgcaattttggcatattacaagcccaaaattacagcttggtgctaacagttttcagagggatggatcagctgaattttacaatctaaatccatctatgtagaccagaactaattctttgcttgtcagtttcttaggacataaactctgtattttactagatttcacacaattggatgacaactttaaaagtttgtaaatcgaagagtattagggatttagtttagacttttaagagagggttgtctgccgctgtataattggttatgcattaactatattggtgtgaactttctaatgggatcttagtcaaggtattctgactttttgttagttttggttttgtatactttaaagcaattcctcatgttgtggctgtggttgccttttaccatgtgtttgttaccacttagtgtgcatttggattgaattaattttagaaatgttaatctgaatgat

SEQ ID NO: 15127 - DNA, 1215 bp, Glycine max
  Clone ID: LIB3051-047-E6_FLI
aaacagcaacgagcaaacaaaagaagcaatgatgatgaatgtcatagggctgagtctgagtctggtgttaacttcactggcagcagcgagcaccatcgtcaaagaagggcacagagttgtcgtggttgaatacgaccaaggtggccatcagaacaccaaaatctcaatatcaccagaacaacctacgcatgctaatcttaaagatcccatttgcgacgcctatggaaaatgcaagcacaaaatcgtggatgcaatggagaagtctcaagaggtcatccatgagaagaaggacgagattgccgccaacaaggaggcagcacgccaagttgctggtaaaaccaaagagagagtgtatgataaagcccgtcatgtccacgaatacgcccaaaacactgtagaaacagccaagaaccatattgcctgtaacgtgtcaaacgccaaagatgcattcaagcgtctaatagcaggatctttggagaggcagagccttaattctttgatgggggtggctaacatgttggggttttccacggcttatgggatgtgtgtgtgggttacgttcatctccagctatgtgcagtccagggctatggcaaggcaacaatttgcagtggtgcagagtaaaatatatcctgtttatttcagggccatgtcttatagcatcggggtcgctttattcgcccatgtcttggcccatagaaacaccttgctctccaacaagtctgacttattgcaagcatataatcttctggcctcccttgtcacacttttcttcaattctctttacttggagcctcgggccaccaagttgatgttcgagaggataaagatagaaaaagaggaaggaagaggcagatcagaagatgtgagtagcagaactaaagagccagcttccacgaccgcagaccaggatgcagtcagaacaaggataatcaagctcaatgacaagctcaagaaactcaattcctactcctcattcctcaatatcctcaatctcatgtctcttacttggcatctcgtttatttggctcaacgacttccccatatttgctaaaccaaatactacgttccttttgtcttttctactaatcacttgttttctgtgtttcttttctgtttctatcatgtttgttgatatttgcaaatacttcagtctctagatttttgtatcttttagctttgggaacaatacagtgtttaccactccctgtattt

SEQ ID NO: 15128 - DNA, 1044 bp, Glycine max
  Clone ID: LIB3051-047-H7_FLI
tccagtgggcctccctcattcaggctctcgcctccaacaaaacgggcccaccgggcccacaccttcgtataaccgcattgtcccgcaccggctccggacgccgctccatcgccaccgtccaagaaaccgggcgccgcttagccgccttcgccgcctcccttggccaaccgttctccttccaccattgcaggttggagcccgacgaaacgtttaaaccttcgtcgcttaagctggttcgcggagaggctttggtttttaactgtatgctaaacttaccgcaccttagttaccgcgcgcccgaatcggttgcgtcgtttttgagcggagccaaagcgttgaagccgaggctggtgactttagtggaggaggaagtggcctccattgttggagggttcgtggcgcggtttatggattcgctgcatcactattcagcggtgtttgactcgctggaggctgggtttccgatgcagggccgggccagggcacttgtggagcgggttttcttgggcccgaggatagtgggctcgctggcccggatgggggaagaggaggaaagagggtcgtggggggagtggttgggtgcggcggggttcaggggagttccgatgagcttcgcgaatcattgccaagcgaagctgttaattggtcttttcaacgacgggtatagggtggaggagttggggagtaataagttggtcttggattggaaatctaggcgcttgctctctgcctcgctttggacttcttcctcccactcagattaattttcctttttaatttctttgactccataaatggaaacaaaatcagaaactgtatcttttacacttttagttgtacttcccatttatagtagttttagttttaggatctttgctaacacgacagtgacctacctagcagtcctagaaaaattccaacacttctcctaacatgttttctttctcacagatctttttctctctgatgaaatcttgatgaacttcattatatttacgataaattagtgaatgtttagaaattcagtacaaaatgatttctatc

SEQ ID NO: 15129 - DNA, 823 bp, Glycine max
  Clone ID: LIB3051-048-D3_FLI
atttttttggtaattgaccttacaggatcaaaaaattggattggaaaactaacagtacttgggccaagtccattggcacattggtatcaatcgctggagccttaataattactctgtacaaaggccaagcagtcataaagaatcatccatcaaataaattgttccccaaaaaacatgtttcatctgaacaatttgactgggtattaggggcagtgttgcttgcgggtcatagctttgttctctcattgttgttcatagttcagacatggataatcagaaattaccctacagagcttgtgatagtgctcactcgcagtacattagttgctatgctatctatcccaccttcactgatttcggtaacagatccaaaagctttgagattaggatttgatgtgaatttgatagctattgcattccaagcaatttttggtgtatcccttcgaagtattgttcatatatgggtcatgagcaagaagggccctctctatgttgcaatggttaagtcaattggaatcatctttgcggtcatcatgggaattgcatttcttggtgactctatctatcttggaaggcatacgtttctttcatgtcttaatcatatgaaaaattggagtgtgcttggagcagccattatttgggggaaaagccaagagcaagcaaaggaagagtgtgaagtctatgatgactcggaatcatactcacccgttgtccctcttttgaagaacaagagaatggaggaatagaatcatagcaatcatttaatttctctagcttcaatataaatgtctcatgtaatattttgaaaacaaattgaattaat

SEQ ID NO: 15130 - DNA, 1032 bp, Glycine max
  Clone ID: LIB3051-053-A7_FLI
tttgctttggttgtcgggtgactgaaggatatggaatgacagagagtacttgtattataagtttcattgatgagggtgacaaacttggtggtcatgttggctctcctaatctagcctgtgagataaaacttgtggatgttccagaaatgaactatacatctgatgatcagcccaatccccgtggtgaaatttgtgtcaggggtcccattgtttttcggggctatcacaaagatgaagcccagacgagagatgtcattgatgaagatggatggctacatactggagatattgggacgtggttacctggtggtcgtctcaaaattattgataggaagaagaatatctttaagttggcacaaggcgagtacattgctcctgagaagattgaaaatgtatacgccaaatgcaaatttgtggcgcagtgctttgtatatggtgatagcctaaattcttctttggtagctgttgtctcggtggatcatgataacttgaaagcatgggctgcttcagaaggaataatgtataatgatttggcacaactttgcaatgattcaaaagtaagggcagctgtcttggctgagatggatgctgctggacgagacgctcagcttagaggttttgaattcgtaaaagctgtcactttagtgctcgaaccatttacgttggaaaatggtctgttgactccgacattcaaggttaagaggcctcaagcgaaggaatattttgcaaaagcaatatctgatatgtacaatgagctctcaagaactgatgtttctcagaaaacgttgtgaaaattgagggtctccaccccatccccatttaccaaccacaacataaaagagagaggtaaacaaagactgtgactcatactcatcgtaagcaacatagcagaagcatccaatgggaacgatcttgcaacttattattttaaaaagcttacggtccgttaagttcaagttcacttatgccatttttataattttttcttctgaatgttactttagtttttaatttaatatattcatttctatt

SEQ ID NO: 15131 - DNA, 1165 bp, Glycine max
  Clone ID: LIB3051-054-H6_FLI
agggccattgagcttgagaatcttccctatggtttgtctcaaaaacctgctgttttaaaggttagggattggtatgtggattctttccgtgatctcagagccttccccaacatcaagaatgtgaatgatgaacaagatttcactgaaatgatcaaggccatcaaagtgaggcacaacaatgtggtacccacaatggccttgggtgttcagcaattgaagaaacgtatggatccaaagattgtttatgaagatcttgttgagattcatcagtttctagaccgcttctacatgtcaaggattggaatccgtatgcttatcgggcagcatgttgagttgcacaatcccaatcctcctccccatgttgtgggctatatacatacaaaaatgtctcctgtggaggtagcaaggaatgccagtgaggatgcacgtgctatatgttgtcgcgaatatggaagtgcccctgatgtgcatatttatggagatcctgattttacttttccgtatgttccagctcacttgcatcttatggtatttgagttggttaagaactcactgcgtgccgtacaagagcgttttatggattctgataaagttgcacctcccattagaataatagttgctgatggaatagaggatgttaccataaaggtctcagatgagggaggtggaattgcaagaagtgggttgcctaaaatttttacatatctatatagtactgcgagaaacccattggatgagcattcggatcttggaataggtgataatgtgacaatggctggatatggatatggtcttcctattagtcgtctatatgctcggtattttggaggtgatcttcaaataatctctatggaaggatatggcactgatgcatatctccatttgtctcgtttgggagattcacaagaacctttgccctgaaagtacttttcagtcagagttaccttaagtaactcactaacattgtgctaaggaaaacacttgttagaataaaaaagtactatttgctgtcaatttttacattctaataatttgacagatttcctgtaaatatgtggtacataagattgtgcatggtgatgccccccttctttgccttcagatccagctttgggaatttgtcctttttatcttctgaaaaaaaatgaatatgctcttttatcct

SEQ ID NO: 15132 - DNA, 511 bp, Glycine max
  Clone ID: LIB3051-055-G5_FLI
agagtttagtggagatgagtataaatctgcaaaagttgatcccatagctcagttttccaagccagtggcgtctcatatgaacaaagatcatgctgaagataacaaagtgattgtgcagcattggacctcagttccagtggactttgccttcatactagatttggatagtcttggtttcaatgttaaggctggttatcagggtgatactttcaagcttcgtgtacctttccctcgatgtgcagaagatagaaaggatgtgaagactctcattgttgagatgcttcaagctgctaggcctaaagttgattgatcacttcacagatcaatgatgaacaggtgctcctagaatcttcatataatccatcaattcaattcatgtgtttcagcctccaagatttgtcattttttcttcattctgagattagttggctatgccttgcaactagatattcatataccacataattattaacactatttatgccaaataaatacttgcatacgtattggt

SEQ ID NO: 15133 - DNA, 1341 bp, Glycine max
  Clone ID: LIB3051-058-F12_FLI
cgtcaccaaacaaacattcattcattccacgcttccattctctctctaaatcgcattaccttcttctatctccttagttcccggcgagttcgtgcatcggagcctctaaatcgcattaacatcatcgaatcaaaccttccttctctttctcaactccagaatctcgtccttgtgagagaaaaaaaaaaagttagttagggttacgcacagttaattaattatttaataatagaaaaatgagctttcaggacatcgaggccggccggtccttcgctgcccgacgcaacctcatcaacggcaaacaagaccccacgcaggcggtggcttccggcatctttcagatcaacaccgccgtctccacgttccagagactcgtcaacaccctaggaacccccaaggacacccccgagctccgtgataagctgcacaagacgagactgcacattggacaattggtgaaggatacttcggctaagcttaagcaagctagtgagattgatcacaatgttgaagttaatacaagtaagaagatagcagatgcgaagcttgcaaaagattttcaggcggtgttaaaagaatttcagaaggctcagcgtctttcagctgagagggaaacagcttacactccttttgttccacaaggagctcttccatccagctatacagccagtgaagtagacattagttctgataagactccagaacagcgtgcccttcttgtggaatccagaagacaggaagtattattcttagataatgagattgccttcaatgaggctatcattgacgaaagagatcaaggtattcaagaaattcagtcgcaaattggtgaagtaaatgagattttcaaagatcttgctgtgcttgtccatgagcaaggagcaatgattgatgatattgggtccaatattgagcattcccatgcagcaactgtgcaagcaaaatctcaacttgccaaagcttcaaagacacaaagatcaaattcatctttgacatgcttgcttttggtgatatttgggatcgtgcttctaatcgtcatcattgttcttgctgcttagtccaaaactctcgattctattatgaatcaaatgctctatatactaagctgcagataagatctccctcgctgatgactacagagtggtgatttaccagatctcacatatgaccggaatttgtctcatcaggtttcagtacatgacgtgggaatattaacattagtgtctcgttatttcgttgtgggtatatgttctacttggggctttaaggatgtatcacaacctgcctgttgtgtaagttatctttttggttccttaataaaagatatatattaaattgttc

SEQ ID NO: 15134 - DNA, 1115 bp, Glycine max
  Clone ID: LIB3051-059-E10_FLI
gaaatatggggagagtgaagcttccgatcaaaaagattgagaacacaaccaataggcaagtcactttctccaagaggaggaatggactcatcaagaaagcttacgaactttctgttctttgtgatgttgatgtggctctcatcatgttttccccatcaggaagagccactttcttctctggcaacaaaagcattgaagaaattctagaacgatatgttaatctttcggagggtgaacacggaaggatgcataataaagagcacattcaaaagttgcttagtaagttgaaagatgaagctggtcaaatatgtcaagcccctagctcaatgacttcagattcccaaattgaggatcttcgaagagaaattttcacttgcaagtctcaattggaagagatggagaagcgactaaggatatttgaaggtgatccttcagagatcacaacgctcagcgaggctgaatatcgtgaatatgtccttcgggatactctaaaacaagtgcaactgcgaaagtgtgttttggaggagtacaattctcatgccactcattctccacaggtacatgctgcaaaaactgtagatgtaaatggatttatttccagagcctcaaagaacccagtagattggtttccacagggagatccactacatgtccagactctgaactttgcgaatgtttatgacactgctcttgtcagagatcaacaatcacatcattgcacggttgttgatatgttaacaccaacttcgacccttctgcattccgcaaacatggatctgaatggccaaatgaatccgaggagtagtttagacgctggcattagtaatacattacatccccagtttggacaagctattcacaccaattcgtcctcttggcagcatcttaatcctttaggtacttactggagttagataatgtggcttgattttgttatttattttcatttaaggatactttagacggctactctttacattcttgtaatttaagttgacttatgcaatacaaaccctagtggtcattgatctcatttctctcttctattctggttgggtatatgtattttgatgatcagatcatgaaattaatatagtcgtcgagattataggttt

SEQ ID NO: 15135 - DNA, 431 bp, Glycine max
  Clone ID: LIB3051-059-G8_FLI
caacttatcacacaactcggtttcatattgcatagtgagagagttacgtacgaggatgtctgacattgctatgctggtggctgaggagtacgagaggagggtcaagagtttaagaaagtccggtggtggaactggagccggggaatttgacatggtttcttgtgtttcggtgatagtgtcgaggctcaaggaaaagaaacaacttctgcaatgggttttggagcccaagactcaagtcgctatggctgcttccaacagcttcttctctgcttaaacaattcattcattcatcaactcctctggactctggtgtggttggtgtcattcattgttgcaacgaattgttatctagtttccatcttctatttttcatgaaatattgtacatagctatgttttggattcaaatcaaaggcaaagcaatttgtgttt

SEQ ID NO: 15136 - DNA, 1351 bp, Glycine max
  Clone ID: LIB3051-061-D12_FLI
caaaactcatcatcaggaatgaggcctccaactctcaacattttcccctctaagcctatgcatgtagagccatcatcatccaaggccaaggctaacatagagctagtttctccacaaacaagtggatcaaagaggccatcagagccgtcgatggagttggccaaccctcgaaacgaaactgcttctgcccctcagccacccaaacctgtcaagcgagagagcaaccgcaaaggtccaacgtcaagttctgaacatgaaggacctaaaacaccagatcctaagacactcagaagacttgctcagaatagagaggcagctaggaaaagcaggcttaggaaaaaggcatatgttcaacaactagagtcgagtaggattaggctgaatcagctggaacaagagctacaacgtgctagaactcagggcatgttcttgggtggaggcgcacttttgggtggagagcaaggccttcctgtcactatgaatactattagcacggaggctgcaatgtttgacgtagaatatgctagatggcaagaggagcaccaccgcatagtgtgtgagctaagagctgcagtgcaagagcaccttcctgaaaacgagcttagactgtttgtggacaattgtttggcgcattatgatcaagtgatgaacctcaagagcttagtggccaaaacagatgtgttccatcttgtttctggcacgtggaagaccccagctgaacgttgcttcatgtggatcggtggtttcaggccatctgaactcatcaagattattgtgcgtcaaattgagcctctcacggagcaacaaatattgggcatatgtggattgcaacaatctacacaagaagcagaagaggctctctcccaagggctcgaggctcttaatcaatctctctcagacactataacatcagattctcttagttatcctcccaatatggctaactatatgggacagatggctgtagccatgaacaagctctccactcttgaaggtttcgtgagacaggctgataatcagaggcaccaaaccattcaccgtctgcaccagatcctaacaacgcgtcaagcagcaaggtgttttctggccatagctgagtacttccatcgtcttcgagccctcagttctttgtggctggcacgccctcgccaagaataggctcagtactccctagctctagctagctatatatgcatgcccttaacttatatatatagcttcttaatttctctttaattataaattaaatgttatatctctcttcatcactcctctctcccactgcatcatgggctgtatagatacagtgatatatagacagatcattaatatagaatttaatgttaacaac

SEQ ID NO: 15137 - DNA, 821 bp, Glycine max
  Clone ID: LIB3051-063-B11_FLI
tttctctcttctctctccacccaaaccctaactcccgaccctgttcccctctcgtatccgtcatgaaaggaggaaagtccaagaccgaatctaagagagccgatcccaaacttgctgtgaataagaagggagccgccaccaaggctaggaaacccgccggcaaggggaaggcagcgaaagaccctaacaagccaaagaggcctccaagtgctttcttcgttttcatggaggagttcaggaaggtattcaacaaagaacatcctgaaaacaaagcagtgtctgctgtgggcaaagctgctggagcaaaatggaagaccatgtctgatgctgaaaaagcaccttatgtggcaaagtctgagaaaaggaaagtggagtacgagaagaacatgagagcctataacaagaaacaggcggaaggtcctactggtggggatgaagaagaatctgagaagtctgtatctgaggtgaatgatgaagatgatgatgaggaaggcagtggcgaggaagaggatgacgattagagaatggactgataattgcatttatgtaggttctgatgattttgatcatctgttgtaggtggtctggtcatttcctgataaacatatttcttgcttccaaaaaatatttccctgctccctccgtaaattggttgtctttccaaaacgtgaatagtttaaagaagggagttctttatttgtacttctaaatccaactgtttagttaaggggtgtttatctcttgtagagcttttagtttgatttagagttttcttgttgaaatctggttaagtttgtatcaatataattggcttatcattc

SEQ ID NO: 15138 - DNA, 997 bp, Glycine max
  Clone ID: LIB3051-065-G8_FLI
tgggaagcctgggtgaaaagcaaagtcaattgctgctaaagattgcttataaacatttctttcttccacgtttgatatgttctggattttgatctgatctcacactagacacatcaccatacttttctttgcaaaagaaggggaaggttgcacactaactccaatgaaagaaaatgttcttccacccgtgactgtaaatttccagcaaggacttggccagaagtttaaacagccagctggaactggtattgatttttcaacatttgaggagtctgagttattgaaagtaggggacatggatgtctatcctgttgcaattaaagcagatgcatcctccagcgaccatgatgaatcaaaatcaaatgaaactccatcatccggtagctcaaactctcagataactcaagcagtgtttgagaaggagaaaggagaattccaggtgaaggttgtgaagcagatcttatgggtaaatggaatgaggtatgaactgcaggagatatatggtattggaaattcagtggagagtgatgtggatgggaatgacccaggaaaagagtgtgttatatgcttgtcagagcctcgggacacaactgtccttccatgccgccacatgtgtatgtgtagcggatgtgcgaaggttttgaggttccagacaaatagatgtccaatctgcagacaaccagttgagaggctattggagatcaaagtcgggcctgagcctgaggaatgaagattcaatgttagtgacacaacaagcttcctgtacagtccaactgttatagctaatacttttctcttactttatcaggtttttccaataatcccacaaaatagaaattggaatttatgtatgacattatgtttgacatgtacagcaggctggcattgcacctgacttgtattattgtataagccaatgcctccgccatgcttgtttggttttacttctaatttttatgtggctttcccttctgaatcatatttagatgtgtttctc

SEQ ID NO: 15139 - DNA, 1012 bp, Glycine max
  Clone ID: LIB3051-068-G8_FLI
taattaataataattagtatctattcaagtatcaacaatataagcaatatattgctgtggctaaagctcgatattaatttcgtggtttgttaatataggttcaacgttgtgctgatgatagaaccattttggttacaacatatgaaggcacgcataaccatccactgccacctgctgctatggccatggcatcaaccactacagctgctgctagcatgttgctttctggatcaatgtccagtgcagatggaataatgaacccaaatttgctagctagagcaattcttccttgctctacaagcatggcaacactctcagcttcagcaccattccccactgtgactttggacctcacacacaaccctaacccattgcaatttcaaaggcctggtgccccattccaagtacccttccttcaagcacagcctcagaactttgggtcaggagccgccccaattgcacaagcacaagcactttataatcaatcaaaattctctggtcttcagttgtctcaggatgtaggatcttctcaattagcaccacaagctcctagaccacccttacaaccaagccaacagccctcacttgctgacacagtcagcgccgccgcctccgccatcaccgccgatccaaacttcaccgccgtgctcgccgccgccatctcctccatcataggcagtgctcataattcaaacaacaacaacagcaacaacaacacaagccggactaccattagcagcttttcaggaaactgaacattttctttttgggttcaattttttggttaatattgttattattccttaaactttttatttttgtacatgggtactataagggaaaatgaaaccataaatgttcatattctttttagtccatgtcttgggagggatatatatgatatattagatcagaaaaaaatgttttttgtatcaatttctctttgaataattaatattgttgtatatttgattaaaaagttctctagggagtaaatagacaaatggtaatt

SEQ ID NO: 15140 - DNA, 1257 bp, Glycine max
  Clone ID: LIB3051-069-A2_FLI
attaacacactacgcgtgcaaagaacctctgctctcctcttgcttttgatagagaagaaagaagcgagaagatgtcagacgcgttctgcagcgactgcaagaggcagacggaggtggtgtttgaccactctgccggcgacacggtgtgctcggagtgcggcctcgtactggagtcccactctatcgacgagacctctgagtggcgtaccttcgccaacgagtccggtgacaacgatcccaatcgtgtcggcgggccctccaaccccctcctcaccgacggcggcctctccaccgtcatcgccaagcccaacggcggcggaggtggcggcgagttcctctcctcctccctcggtcgctggcagaaccgcggctccaaccctgatcgcgccctcatcatcgccttcaagaccatcgccaccatgtccgacaggttgggactcgttgcgaccatcaaggatcgggcaaatgagatatataagagggttgaagatcaaaagtctagtagaggaagaaatcaagatgctttattggctgcttgtctctacatcgcttgccgacaagaagacaaacctcgtactgtaaaggaaatttgctctgttgccaatggggccacaaagaaggaaattggccgagctaaagaatacatagtaaaacaactgggtttggagaacggtaatgctgtggagatgggtacaatacatgcaggggacttcatgaggcgattctgttctaatctttgtatgaataatcaagctgttaaagctgctcaggaagctgtgcataaatcagaagaatttgatataaggaggagtcccatttcaattgctgcagcagttatatacatcataactcagctttctgatgataagaaacctctcaaagatatatcacttgccacaggcgttgcagaaggaacgattaggaactcctacaaggatctttatccccatgtttccaaaataataccaaattggtatgctaaggaggaggatttaaagaatctttgcagcccttgaattgtagagcaaaatattaccatccacatttaaatagttacaagttataatgtcattagagcattgtgtttctaatgtaactgaactgcttattacaaagtgccttttttttagttgtcattcattgccgtcaatcgcaccattttttaaactctcctaatttgattactcgttgggagcaaggcaacaacatacaaagtatgaatttctcgtttctggtaaaacgttagagttatttttt

SEQ ID NO: 15141 - DNA, 285 bp, Glycine max
  Clone ID: LIB3051-075-G2_FLI
ctttacaactttgtatatccctgtaaggtgaattttggcatcatttttaacaagtatacactcgaccaaatgtccaaatccatgggagatgggaatatgcaagtatacacacatcaatacctcttcacaggtgtcacaattctttaactggtgccacctttacaacatgcatgttggtatatgaatttgttttacactgacgattatttgttacatgtgatttctgcaaatttgtgtacagtttgattttacgatatatacaacgactctactatgtgttactcc

SEQ ID NO: 15142 - DNA, 2197 bp, Glycine max
  Clone ID: LIB3051-077-E3_FLI
tgcacctgtgaggtctagcaagcaagaacaaattcacaattccattgtgtctactttgcttgctttgatggatggccttgactctcgtgggcaagttgttttaattggagctactaacaggattgatgctattgatggagccttacggcgccctggtagatttgaccgtgagtttaactttcctctgcctggttgtgaggcacgtggtgagatattagacattcacactcgtaagtggaagcatcctcctccaaatgagctgaaaaaggaacttgcagctagttgtgtaggttactgtggtgctgacctgaaggctctttgtactgaagctgccatccgtgcattccgtcaaaaatatccacaggtttatactagtgatgacaaatttgtcattgatgttgattctgtcaaggtagaaaagactcattttattgaagccatgtctaccattactcctgctgctcataggggagctattgtgtactctaggcctttgtctctagtagttcaaccatgtcttcagagacatttagagaaagccatgtgtagtatatctgatattttccctccagcttcaattacatcagagttgaccaaactttcgatgctctcctacgggtctgcaattccacttgtgtatcggcctaggcttctgctttgtggtggtgaaggtacagggctgtttaacaggatcatcttggccctgcggttttacatgagctggaaaaatttcccgtacattcattaggacttccatctcttctgtcagatcctagtgcaaagacaccagaggaggcattggtacatatatttggtgaatctagaagaacaacaccatcaattctctatttaccacaatttgatgtttggtgggagactgctcatgaacagctccgggctgttctcctgactttgctagaagaattaccatctgacttgcctatcttactgcttggtacatcctcagttgcactttctgaagttgaggaagtgcctacttccattttccctcatcgctcagtttatgaagtgaatatgccatgtgccaaagataggactttgtttttcaatgttttgatagaagctgctatgtcaatattgttggagggaatcaacaagaaatctcaagacaccggatgtctcccagaacttcccaaggcaccgaaattggctagtggtccaaaagtatctgagctaaaagcaaaggtggaagctgagcaacatgcacttcgtagattgcgaatgtgccttagagatgtttgcaaccggattctgtatgacaaacgatttaatgccttccattatccagtgacagatgaagatgcaccaaattatcgttcaattatacagaacccaatggacgtggctaccatcctgcatcatgttgataatggtgactatattacaagtgctgcattcctgcaggacatcaatctcattgtttccaatgcaaaggcttacaatggagaggactacaatggtgctaggattgttagtagagcttgcgagctccgtgatgcggtgcatgggatgctctcacagatggatccagcactggttgcatattgtgaaaagattgctagccaaggtggcccagttcagttgtctgatgaattaggggattctacattccctgctactcctgttgtgctgctgggtcaaagtactagaatgagtgctcgacttcgccatgtccaaccagaagttaatatgaatcagagttacgaagtattgaagcgaactaagaagatcgctgaagtgcatgcagaagacaagtcacaagaagattcggtacccccaaagtcttcccaggagcatcaagccaatgacacaaattctgaaaggctggaaaatgtgtcaattgaaggagatttgcatggaacttgtacaaataaccttgctgatggcaacagtcctgatgatgtcacaatgctagatggtgaattttcaggagaagtagagtctgtcaagcagctttttgtgaagcgtagtgaaaattacagcattccacaacttgaaaggctttacacgagagttatgaagggcgtgtttgaaaccaaaaataaaggagtgaatggggatcttaagtcttcggttttgaagtttttgttgaattttgtagaggatgatgcaaatttctaattactgggtttttcttctcctccaatgatttagaaaaaggaaagatttttactgt

SEQ ID NO: 15143 - DNA, 693 bp, Glycine max
  Clone ID: LIB3051-080-B6_FLI
gacgccaatgcatccattcgggaaagtgaacggtgcagggtttgagtacatgacaccgcggaggtcaaacttggcgaacatggggcatgtggtgataacggagtcggagctggggccgtcgccatcggaggtggcggcggcgatcgcgaggaagccggtgatcgacgagggggagaattcaacggtgggagggtggagcttggacgcggagagcgtggaggggctgcagtcgaagctggagaggtggcggacggacttgccgccggtggtcgatcgcggcgaggtctcgagctacccaacgacgagcaccaccaagacgagccggcactcgcggaggcacaccgacggcgggagtactgggagtggcttgttctcatgctttagtaacatatgtggtgttgagtgctacgttggttgcggcggtgaccctaaaggaaagaagaaccgcatccgcagtcgccgcactccctcagcggatgacagttccagtcttctctaactacccacaccaatatgcattgtggagccaacatgggaatatttgtggcaatggactatgctgtaataattttattcattctttgttattccatcatctgtttttgctactccatcttttgtcaattgtaagacatgtcagtttaattcgttgggactccacaatacaacataaggctatacacatatttcctt

SEQ ID NO: 15144 - DNA, 368 bp, Glycine max
  Clone ID: LIB3051-082-G12_FLI
ttttatatgtacaatattaggattggatttgctatgattttctatgaacttattaacaaatcgaattggtcttttgcagctttgccccatatgtctgaccaattcaaaagacatggccttcggatgtggacatcagacatgttgtgaatgtggacaagatcttcagtcgtgtcccatctgtagaagccccattaacaccagaattaagctttactaggcggcctcttccgttgtgaattaattattttgttgtgtaagctaaaattctttgatttttttaaccttctctggttgtatacaaacgttagatcagctgtgtctattgatgaaaaatggtacaacaaaaaaatatccaaaccaattaaatt

SEQ ID NO: 15145 - DNA, 1335 bp, Glycine max
  Clone ID: LIB3051-084-A12_FLI
tagagaaataaaaagagaaagccgacagcacatagatagagagaggaaaacgacttaatattctttttccttgagacctgaaggggctaaggaaaattagaaggacacacaagtataaaggcggtgaaataaaagagaaagacaagaagaagacatgggaagaccaccttgttgtgacaaagaaggggtcaagaaagggccttggactcctgaagaagacatcatattggtgtcttatattcaggaacatggtcctggaaattggagggcagttcctgccaaaacagggttgtcaagatgcagcaagagttgcagacttagatggactaattacctgaggccaggaatcaaacggggcaacttcacagaacaagaggagaagatgataatccatcttcaagatcttttaggaaacagatgggctgcaatagcttcataccttccacagagaacagacaatgacataaagaactattggaacacccatttgagaaagaagctgaagaagatgcaagtaggttgtgaaggtggtagctttggagaagggttttcagcctcaaggcaaatccctagaggccagtgggaaagaaggctccaaactgatatccaaatggcaaagagagccctcagtgaagctctttcaccagagaagccatcttgtaatttatctgcctcaaactcaaacccttcagatagtagcagctccttctcttccacaaaaccaacaacaacacaaactgtgtgctatgcctcaagtgctgacaacatagctagaatgctaaagggttggatgaaaaacccaccaaagtcctcaagaacaaactcatcatctgtgactcagaactccttcaacaactttgctgcagcaggtgctgatactgcttctagtattggagcaaagggaccaccaagcagtgctgaattgtctgaaaacaattttgaatcattgtttgattttgatcagtctttggagtcttcaaactctgatgaattctctcggtcattgtctcctgaggccactgttttgcaagatgaaagcaagcctgatgttattggtgcagaaattatgccattctctttgcttgagaaatggcttcttgatgaggctggttgccaagagaaattagttggttgtggtgatgatgccaagtttttctaagttgggttcattttgtgacatatatgagactgtggaattttttattttatttcataagttataggtagggcctcatcaattaatcttcgctttggccttagagagagaagtttttcaagcctttggtgctagacgtgtatatgttaataactattgaaattatgattattgttatc

SEQ ID NO: 15146 - DNA, 547 bp, Glycine max
  Clone ID: LIB3051-084-A8_FLI
caacaatattcaatctcatacacagaaaaatgggtgctttggatcacatctctgagctctttgactgctcccacgccagctccaagctcaagaagaaacgcaaacaattccagacggtggaggtggaagtgaagatggactgcgaagggtgtgaaagaaaggtgaagaaatcggtggaaggggtgacagaagtggaggtggatcgacagggtagcaaggtgagtgtttcggggtacgtggaaccctcaaaggtggtttcacgcatcgctcaccgcaccggccttacgtgaaatcgttatgtgaatctgatgtgaacaccacaccacaccacacctcatcctgtcttattggttagtttctctttccttttgtttttctttttcttgtatcatatcgtagtagcaaaaaaaaaaaaacaacataaaagtaaaataggtcacctgttcatgaggggaacgcttttggcaatggacatgtatccttaatagtgatgttttatttatttataatgtcatgttgggaaatttgatatctttgtattgtaatt

SEQ ID NO: 15147 - DNA, 576 bp, Glycine max
  Clone ID: LIB3051-084-E4_FLI
tgatctggtaccttactattaggtctggtttaagtcgattatagtgctccatatatgctgtaatttattgtctttgactttgttatcttttattcacattcttgtatttccttttatgcaggaaaatgcagatatcaggggccactgatctagcttctaagggacagggtgcatcagatagcagtagtgtaaaggttaaaagtgaatttgatgatgcctttcaaccagatgtgaagattcgctgtctatgtggaagtagattggaaacagagaatttggtcaagtgtgatgatgcaagatgccatgtgtggcaacacatcagttgcgttattattccagagaaacctactgaaggcatcccactagttcctgataaattttattgtgaactctgtcgtctcactcgtgcagatccattttgggtttcagtggcgcccctttgcatcctgtgaagttgaccacaaccagtaatccaactgatggaaacaacccagtgcagagtgtggagagaacatttcaactgactagagctgacaaggacttggtatcaaaaccagaatttgatgttgaggcttg

SEQ ID NO: 15148 - DNA, 1503 bp, Glycine max
  Clone ID: LIB3051-084-H7_FLI
tcgcgatctagatagagtggagccatctaaattatcacagattccttgcaagttgattgagaaagacatgcacaaaggcaacaaaggtaatcatgatgtggaacagcctgctggctctctaaaggcatgttcttcagtatgctttgtcacatccaagtgtagaatttgtggggataccacatgccattgtgtaattcctagcaattcaatacaggtgtcatcagatatatcatctgaaggatctgaaggaggggatgtaattacacgtggtgctgattctttgagacagaattgcccgactaaatgtacttcacctattgagaagaaatctgatcctgattctgatggggctgtaagttctttggacagtgaacatgtttgtcctagttctcagcatgtaactcctactactgatgcctcttctggggaagtatggagcacacctgttttgcctgtccagctttctcctaaaaaggctcttcgtgctgctatgcttaaaagccgctttgcagataccattttgaaagcacagcaaaagacccttcttgatcatggtgataaaggtaatcctcaaaaaatgcagcaggaaaaggagaggttggaaaggattcagcgtgaagaaagagctaggatcgaagcccaaattaaaattgctgaagctgctgctagaatgagggccgaggaagagtcaaggcagcggagagaaaaggaaagagaagctgctcgagcagctatagaaaagatgaaaagaaccgttgatatagaacataatgtggagattattaaagaacttgaaagtttgagtggatgcacgctatcttataaagccgtgggctgtagaaatggctacaaagttgcattggagacattggataaacctcagtttgagaacccattggagcggcttggtttatttatcaaggaagactttaccgcagatgaagatgaggaggttttgaacggaggctttgaagaaggggaaatttttaactgcatgaaggtgtattcagttctgccagcgctaactgtttatatcctttagacagggaaacagacaattattgtaaatgcacatattgtttggaatctagtcttttgactatatctgccttaattacctcttgtctgggaattaggtaactacacgcttgcaattttgttgccaatgatctaatcttgggcattcctttgtgttcagatacttgtgtctttttgggcaaggaatctctatgccgggacagcatgtcaagactttttctcccagtttccttaattgtttcagattcgcttttatcatgctcatcttcacacttccatttccgacctaagtctttccattttctgtcaaatattttgctgagttcctttgccatcaaatgaacatcattactgggaggattatatttcatagcatttgagaaggtcagtctgacatcagctgcaaactcctcagtgccagaataaatatttttctccagcttagatttaattgtgcccaaatcc

SEQ ID NO: 15149 - DNA, 1279 bp, Glycine max
  Clone ID: LIB3051-088-C3_FLI
cccaaaccaatcagtgggtgccgcggggaagtggttttcccatgatgtcacgttttatgcatgcgccttctcccgttctgtcttcttcgcatcctcatttgggagttggccacaagagagagcgtgaagatgacactggcgctggtgcgagtggaggtgttgctattgcagcagcttcttcacaaacgcaaacacaagagattgaaagtgctggcggcgacaggaggaggagatacaggggagtgaggcagaggccgtgggggaaatgggcggcagagattcgcgatcctcacaaagcggcgagagtgtggcttgggacattcgacactgccgaggctgcggccagagcctacgatgaagccgcattgaggttcagaggtaacagagcaaaacttaatttccccgaaaacgttgtaccggttccacctcctcctccggttcccgatttaccggcaagtgcggtagccggttccgattccatttccggttccggttcagtggtggcaggtttttcgccgacgctgatgcagggagcgccgtttcagggctcctctgcttttctgagagattattgggggtattctcagctgctgaggagtacaggggacttccatggactcgaccagtggttctttgattctcaaatggcagcgtttcaatcttcttcatcgtcgttgttgccatcgccgccgccgccgtcgttttcgccttcctctgcttcgtatcctctgttttcttccagccagcaaatggggattttccggccgccgggagagcagggtcatggcggagaagacggtggtagtgggtcagagttttcggagcttccaccttcgacgtggtcagataccagtggctatcctcctccaccacctggttgacatggaatacacatttttttctttattctattttttctctttctttggttaaagaaagaacaaggctttcttctgtttatttattttaatttatctgtttttgcttttttagattatttggagtccagttcactgaatttttatgtggttttgggttaaactgttactatttgctgctgttatttgaataaatactatttgaagagtagggagtagggaatgggaggttggaggatgcatgataaaggctttaagcctttgaggtagatacgaatggagtttaagtggtacgaggcagcactttgaagaattgtttagagataaagacaaagcagtacttaggttggaagctgagtttattccagattatcaactcaatggatttgatgttaacattt

SEQ ID NO: 15150 - DNA, 1349 bp, Glycine max
  Clone ID: LIB3051-092-C4_FLI
gatccaaatccaagtacggttgggttggagagaaaatgcgtccctgctgaaaacaccaaaccctaaaacgcgaaaagggttctaagaatttgcgaaggaaagagctagcggagatggagattcactacagtaacagctatttcgagaggcgccccatcctcaagtccaaggctgccgctgtcaaatgggtcaaagaatgaggataccttgaagaccttgaaagaaaaggtaaaagagccttcagtgccagagccagaacctgagccaactactgaagtactttttctttgcagctatgatggctgtggaaagacattcatagatgctggtgcattgaggaaacattctcacatccatggagagaggcagtatgtttgtcactacgatggatgtggaaagaaatttctggatagctcaaagttgaaaagacattttctcattcatacaggggagagggattttgtgtgtcctcatgaaggctgtggtaaggccttctccctggatttcaacttaaggtctcacatgaaaacacattcccaagagaactatcatatctgcccatatccagattgtggaaagagatatgctcatgaatacaagctaaagaatcacattgcatctcatcatgaaaagaatgcatccgtggatgtgacaaagtacactactcccccttcagagaagcaaacaaaaacttctaaaccatctggaggggcatatggttctgcatcatctgaccgtccctatgcatgtccctatgatgggtgcgaaaaggcatacatccatgaatacaagcttagactccatttgaagagggagcatccggggcttatggctgatgaaaatgcagagcatgctcaggctaatgttgacaatgaaatggatgaagcaagtgaccatgatgcctatgttgcgaaacgatcaaatggtaaaattcagaagcagagtaagcctaaaccaaacctcaagttgcctccttccaaaattgcaaaacgcaaactgtccactccctctttaactgtaaataaaaattcttggcccgtgaaagatgaacctttcgatgaagaagatagcgaagaaacagaagaggatcgtgacaatgttgaagatggttggagatatgcaggaggaaacaatgaagatgatgatgaggaaacagaatatgaagactgaatcagttatggcatcctctatgaaacttaccttttccaagaaatatattttctcttctacaaaaaaatttcagttgtctcttttttatttggctgaggaaatgacatcttgtcaaactgtgtgttgctgttacaagcattaggaagaatttatataaataaaatgcgatttaaaatgct

SEQ ID NO: 15151 - DNA, 1525 bp, Glycine max
  Clone ID: LIB3051-098-C8_FLI
aacctcttcatacacacaccttctttttcttccttttctttctatatatagtgacaaagaaaattggtgttgggtttgatttcgatggagaattattccatgttgttctctgtttccaattcctcaagctacccaattggagttggaagctctcaaattggttatagtggtcaaagctccaatgcgtttcttggtctaaggcctagtaatgaattagctagtgatgatcatgagaagagacaaggtggtggtgatggcaatatgttaatgtctcagatcagtggtggtagcattaatgtgagtgatgagttaggtggttcgggaaatagtaacaataataaaaagaaaggagagaaaaaggttagaaagcctagatatgcttttcaaacaaggagccaggttgatattcttgatgatggttaccgatggaggaagtatggccaaaaagctgttaaaaacaacaaatttccaaggttagttgtttcaactttatttcatgttattgcattttttttttgtctaaaaagaggaatcaaacgcagatatcaatagtagagaatttagaataattcattcacactattcaaccagacctccagaatctaccgaactactagacctttcttgattgatttcatgctgtttgttgttgatcttgtttagttttcgcttctgctgcttctgcttcatcttgtttagtttttatcttgtggcaatggcgcctgctaagtttgacttggaaaattgatacgtgtgtaaattgtacaaagaatataacaagaccccaccatggttcttatcggtttgaattttgaattaagaatagaaaaaagcgaggttaattcttgttgagttcatactgggcaataatcaattgaaaacacttttctagctgcgcagtcttgcttcaattgttttttgttagtttaggataaatattttctaaaggggaaagaaagtatttattacttgatcttctttttttgctatttgcagcggctttcttcttcattcctattttctctagctgtcttttcttcggtcaaatcaaaagagaaaaggaatagaacaagaacgaaattaacctgtgtatgcatccctgcgtgctcgagatatatatatatatatatatatatatatatatatatatatatatatatatatatatatatatatatatatatattgtacttatacactatacactgtgcatgtataattttttgtataacaaagagagatagaaaaatcaagtctaaaggaagatgatttatgtgatgaagaaagataaaaaaataacaaaagaaaataatgccataattcatataattctaattaaaagggttcataagagacaattggatatatatgcatatgctatgttcctttaaattttatggaaaccattgttcttctgtaataaataatccagtccaaactcgaagaaactacatggtggatgaaatattcaacaaacccataaactttcgtctacatatgcagaatatctagacgatcgatgata

SEQ ID NO: 15152 - DNA, 320 bp, Glycine max
  Clone ID: LIB3051-101-B10_FLI
ggaagggctgttgttgtccatgctgattctgatgaccttggaaaaggtggtcatgagcttagcaaaactactggaaatgctggtggcagagtagcttgtggtatcattggtctgcaaggataaactaatcacatgaggttggaaccgtgctttagaattgtggaataaagtagcacccatttaaacccgtttggttaggtccggtctgtgtacggctgaattctgtgttttgcttgtatcgtatctgagggttatatgtagacacttgatgcttaatcaaattgttactttgcctgaagtatgtgttagtggttatcctt

SEQ ID NO: 15153 - DNA, 1884 bp, Glycine max
  Clone ID: LIB3051-103-B11_FLI
tcagatctttctctcactctccaacaatcgaaatccaaaaccctaccaacaccacactcaatcgaaattcttcattctcttctcatcgatggggcagaagtctctgatctacacgttcgtgtcgcggggaacagtgattctcgcggagtacaccgaattcagcggaaacttcaactccaacgccttccagtgccttcagaagctccctgccaccaacaacaagttcacctacaattgcgcacacaccttcaattacctcgtcgacaatggctacagttgggagtgtgataaagagtccagaaatatctggtcttgtccctactctacttaaggaactttgtcatcctaatgagcatacaaaatattcctttaatattcttcttcaagcttttaataatgttttcagttgtggtatcacttgctaaacaatgggcatttgaagaaccttatgtggagacaataactagtgaaaatgttttgacatggccacatgtggttgggaagtcactattgataaagtctttggttaagcattacacgaagcataatttgcccgatgtgagaggtctaattaccatcatatcagggaagcaaaggcaggtgcagtttgcagtttgtggaatgtccaaatgatatcaatggcatgatagatgccgcgaagtttgacgatttaacacttcttcttatcgatggaagttatggtttcgaaatggaaacctttgagttccttaacatattgcaagttcatgggttcctgagggtcatggtcaaaaggcaaatgtgtcattaggagctctaggtgatgaacatggcacaatttaatgagtagtaatgctaagaatgttgaacagaatgacaaaatagaagctttggataaatatcagcctgggactggttctgatgaagatgaagatgcaccaaatagtactgctaagaatggagtccacttgcaagaacatattgattttcatgatggaagatggaggagaagagcaatatttgaaaatgattgtgtagtcaataaaattaatgtttgtttatttgggtagaaatggagtgaaaaagaaataggaagaaggttttagaatttgagttaggagtaattggcgtaaaattttttagtttgataaaaaagatttgagtttgaatgttaaatactgaaaattaagttatagcacatacctaattaagaaccttttttttatccgagtagctgaaatcttcaatataattggattgtccttttataggcattattgggtggatattgggtagatatatcccttgcagagcacaattaattgtaatggaatacttataagtgattgagaggaaagagagagatttcatacttgagactcatatttatatatatatgtaagtttgggtagaaaagtaagctaaacaattaataaagtttgatgcgtaagtagagcagacaactttgaaaattggggcaaatatacttttctactttctatatttctttttttgtatctaactccgtccttggccatctccgtattgcagttcctaagaggttcaggcttgcaaaggacacaacatttggacaaaggcacttgaataagtggagtcagtcatcaatttccttatggatggaattaatgaaacattgggcttaatccggattttggttgtggacttgaagagggcaaataaagcagcgcttaccttaattaatttctaattaggaaatttcgcaattttattttatgttgttcagtgtttatttcgttttgggccagagtattgtaatagggcccagtgactttgagtgactctttttaaatagcttccttgggattcgtggagggcattatgttatgctattttcattattcagagctttggttttaggttttc

SEQ ID NO: 15154 - DNA, 2258 bp, Glycine max
  Clone ID: LIB3051-106-A7_FLI
aagaaagaagcatcataaagcaatacacttttttcccctcattctaccttccttcaccttcttcttcgttgcggtggtgccctagattttctctatccctttgatcgttcctgaattaccagcccccggccctcgctctagggtttcccatggattccgaggacgatatgcacgacgccaacgatgtggagtccctcgacgacgatttctacagtggcgagaccgaggaccctcccatggattactacagtgactacgacgacaacgccgacgattacttcgacgacgccgacgattctgaccggattgagtctcgccgccccgagcaaaactttaccatattgagggaactggatatccggcaaaggcaggaagacgacatagctagagtagcggcagttctttccatacctcgggtttctgcgagcatcctacttcgtcactacaactggagtgttagtaaggtgcatgatgcttggtttgctgatgaagatcaagtccgaaaaacagttggtttgttggagaagccagttttccagaattctaatactagagagcttacttgtggcatctgttttgaaatgtatcctcgtgcacgggttgaatctactgcttgtggccacccttactgctattcatgctgggcaggatattttagcacatcaattaatgatggtccgggatgtttggtgctgagatgtcctgatccctcttgtggtgctgctgttggtcaagatatgattaatcttttagcatctgatgaagataaacagaagtatgaccgttatcttctcagatcttatattgaagacaacaagaagaccaagtggtgtcctgctccaggttgtgaatatgcagttacttttgatgctggcagtggaaattatgatgtatcttgcctctgttcatatagcttttgctggaactgcacagaggaggctcaccgtccagtggactgtggcactgtgtcaaagtggattttgaaaaatagtgcagaatctgaaaacatgaactggatacttgctaactcaaagccatgtcccaagtgcaagcgaccaattgaaaaaaaccaagggtgcatgcatatgacatgtactcctccttgtaaatttgagttttgctggctatgccttggtgcatggtcggaccatggtgaaaggactggtggattttatgcttgcaatcgttatgaagcagctaaacaagagggagtgtatgatgaaactgaaagaagaagagaaatggcaaagaattcgttggagagatacacacattattatgagcggtgggccagcaaccaatcttcgaggcaaaaagctcttgcagatctacaccaaatgcaaactgttcatattgagaagcttagtgacacacagtgccagcctgaatcacagcttaagttcataacggaggcctggttacagatagttgaatgcaggagggtgctgaaatggacatattcatatgggtactatttacctgagcatgaacatgctaaaaaacagttctttgagtacttacaaggtgaggcagaatctggtttggagagacttcatcaatgtgctgaaaaggaactacagctattcctgaatgctgatggcccatctaaagatttcaatgactttcgaaccaaactagctggattgaccagtgtaactagaaactactttgagaatttggtgagggcattagagaatggtttagttgatgtggatagtaatggagctgcttccagcaaagcaacgagctcaaaaaatgctgcagggagcagcaaggggagaggaggaagaggaaaagcgactattcgaactatatccagcagaatgactgatgataatcattggtcttgtgagcactgtacctatgccaatgttaagtctgccaccacatgtcaaatgtgcaatcaacagcgtcgatgaaacttggatccttaattagaaatccatgtcttctgcctaaggccaatgcaccaaaagctgaaatggagtccttactcatagttatatcatatgctggctccttttttaaggctacttactgtgaaagggggctaagtcgcgtaagggttatcctccttgcactcctattgaatacatcccaatttaatgtatataatgtctcatctttaaaatttccgtatggggtttatgcaacaggcttctgtaactgaatatcttatacagcacatgctggagatgaacacaaatgtgcttgtttgtgtcctgatttcttctagtaaatctctatgcagcttcttt

SEQ ID NO: 15155 - DNA, 771 bp, Glycine max
  Clone ID: LIB3051-107-E10_FLI
tccactttcactggaatcacaatcctgaaacaaaaacatcttagcatttaacatactactagacaacatgaccaccacattggaaagaggtttctcggaagagcaagaagctctggtggtgaagtcatggaatgtcatgaagaagaattctggagagttgggtctcaagtttttcttgaaaatatttgagattgctccatcagctcagaaattgttctcattcttgagagattcaacggttcctttggagcaaaatcccaagctcaagccccatgccgtgtctgtctttgtaatgacctgtgattcagcagttcagctgcggaaggccgggaaagtcactgtcagagaatcaaacttgaaaaaattaggtgctacccattttagaaccggcgtagcaaacgagcatttcgaggtgacaaagtttgcacttttggagaccataaaagaagctgtaccagaaatgtggtcaccggctatgaagaatgcatggggagaagcttatgatcagctggtcgatgccattaaatctgaaatgaaaccaccctcctcttagactccagtttaagcagttcctttccttccctctcaattctcaaattgttatattaataaaagtgagaaagtttaggcttgtgcttttattttgtgtgaatgtaatatactttgtgtacgtagacttggctattgggagttgctaggttgggaagtgtttcgcattcaacaattctgtagttgaaggtgattaaatgaattatagctatttgtttcttt

SEQ ID NO: 15156 - DNA, 2447 bp, Glycine max
  Clone ID: LIB3051-110-D8_FLI
gcgcaacgctcggggaaaggcgcgtggggtggtttaatagtatcgaacggccatgcatgccgaatcctcctacactcactcacacacacaccaccctctctctctctctctctctcaaataaaatcgtatcacacactttctttctttcttccttctctcacactgacatcaccaaagttttcctttcgttttcgttttcattctctcgccagcgagaagaagaagaatcccctgcagccgtgctctctctctctctctctctctctctactcctcctccgttgatcatcatcatcatccatggcggttcctccgtcggtcgccgccgctccggcgtcgctctacgtcggcgacctccaccccaacgtctccgacaaccacctcgtcgacgcattctccgacttcgagagcctcgcgtctgttcgcgtctgcaaagactcctccaccggcaaatccctctgttacggttacgtcaacttcgtttcccctcaagacgcaattcgtgcaatcgagctgaaaaataactccacgctgaatgggaaagcgatgagggtgatgtggtcgcgtcgcgatcctgatgcgaggaaaaatgctatagggaacttgtttgttaagaacttacctgaatcgatagataatactggactacaagatatgttcaaaaaatatggcaatattctgtccagcaaagtcgtcatgtctgaggatgggaagagcaaaggatacggctttgttcaatttgaatcagaagaatcttcaaatgttgccatcgagaagctgaacggctctactgttggtgataagcagttatatgttgggaagtttgtcaaaaaaagtgatcgcattttgcctggccctgatgctagatatacaaatttgtacatgaagaatttggacctggatgtttcagaagcaacactgcaggagaaattttcctcttttgggaaaattgttagcttggttattgcaaaggacaacattggaatgtccaagggttttggctttgtgaactatgataacccagatgatgctaaaaaggcaatggaagcaatgaatggatcaaaattaggttctaagattctgtatgtagccagagcacaaaagaaggctgagcgtgagcagatcttgcaccaccaatttgaggagaagcggaaggaacaaatcttgaaatacaagggatcgaacatttatgtgaagaacattgatgaccatgtaagtgatgaagaactgagggatcattttagtgcatgtggcattataacttctgcaaaaattatgcgagacgacaaagggataagtaaagggttcggctttgtctgcttctccactcctgaggaggccaataaagctgtgaacacatttcatggattcatgtttcatggtaaaccactatatgttgctcttgctcagaggaaagaggataggaaagcacaattgcagctccagtatgcacagcaagtggcaggactatctggaccatcaactgccattatccctggtggatatcctccttactactatgcagctactggtgttatttcacatgtgcctcctcgagctgggctgatgtatcaacatctgccaatgaggccaggatggggggctaatggctttgcactccctgctagatcattccaacaatcaccagttcctgcagtttctaacaataccaggcagcataggcaaaacaggggaaggttgaatgggaatccaatagcacagggaaatactcactctgttacttatttaccacaagcccagcagatttctcagccagtgatctcttcaagtactcagcagagaaccggacaggctaagtacttacctagtggacgccagcgtgacatggaaaaaggatctggatcctcatctagtggttcaaactctggcagagggtcccaggggtcagaaatgctgcatagcatgcttgctggtgctgctcctgagcagcagaaagagattctcggggagcatctttacatgcttgttcataaactaaagcctaccctagcagccaaaataacagggatgcttttggagatggacaatggagaattgctgcttctcctggaatcgccagagtctctttctgccaaggtggaagaagctgtccaagtgcttaagaactctaagaccaaagtttctggccaggacgtacttcattcaaatttcctttcagctgaggttgcagttaactgaaagactttaacctgatgattcttgtttgagtatagatcatgaagagcttgaagcctccaagaactcagaaatttgagacatgagttttgacatcaatgattactttagtgtttcttctacagtatatttccttatgaaaaatgactttctgttttcttggcttaggtctgacaaaaattgttggtgactataaaaatcagggacaaattttttttttcggattttgattacatggattaacttcgatg

SEQ ID NO: 15157 - DNA, 1800 bp, Glycine max
  Clone ID: LIB3051-111-E7_FLI
aaaatactataatatatatcattgtctgtcttttgttttgaaccattttctgcctataaatactcatacattcgacgtttttcaaaggtgagagccaccctttttctcttacaagctactagaacaccgtttgctttgctctcccttcattttgcaaaacctctgggtatctaactctgcagccatgggaagtttggaagttgaatcaacaaatggtcacacctcaagtcctcacaaaaaaactgaaaaatcggagagagagaggagaattgatgagtggcttccaattacttctaaaaggaatggaaaatggtggtattcagctttccacaatgttactgccatggttggagctggtgttctcggtcttccctatgccatgtcagagcttggatggggtccaggtgtaactatacttatcctctcatggatcatcaccctgtacacactatggcaaatggttgagatgcatgaaatggttccaggaaaacggtttgatagataccacgaactgggccagtatgcctttggtgaaaagctaggcctttatattgtggtgcctcaacagcttgtggttgaaattggggtgaacattgtgtacatggtcactgggggaacatcattgaagaagttccatgatactgtgtgttcaaactgcaaaaacatcaaattaacgtttttcattatgatctttgcctctgttcactttgtactgtcccatctccctgacttcaactccattactggtgtatccttggcagcagcagtcatgtccttaagttactctacaattgcttgggtagcttctgtacataagggtgttcaagaaaatgtacaatatggttacaaagctaagagtacttcagggacagtgtttaacttctttaatgcccttggcactgtggcttttgcctatgctgggcacaatgtggtgctagaaattcaagcaacaatcccatccacaccagagaagccatccaaggttcctatgtggagaggagtggttgttgcctacatagttgtggctatatgctacttccctgttgctcttattggctactggatgtttggcaatgaggttgattctgacatcctcatctctttggagaaaccaacttggcttattgcaatggctaacttgtttgttgttattcatgtaattggaagctatcagatttatgcaatgccagtgtttgacatgattgaaacggtgatggtcaagaaattgaatttcgaaccaagcagaatgcttcgttttgttgtacgtaatgtatatgtggcattcactatgttcattgctattaccttcccatttttcgatggtctcctaggattttttggagggtttgcttttgctccaacaacatactttctcccctgcatcatgtggcttgcaatccacaaaccaaagagatacagcttgtcttggttcattaactggatctgcattgtgcttggcctatgtttaatgattttatcacctattggaggattgaggacaatcataattaaagccaagacctacgaattttactcttgaactctttctcctcttgactcagtcatggaaagttaactatatggaaatgtgtgtgatttatcataggtcgctctttaatttactattgcaaaagattgcttgtatagtattgcgtgttggtggaaggggaaattattcccacggaatctcatgaaagaggaatttctagatgtttttttcctttggcattttcattataggaatgtaccattttctctttgctctacattattctcgtaatgatacctattttgtaaagc

SEQ ID NO: 15158 - DNA, 980 bp, Glycine max
  Clone ID: LIB3051-112-G10_FLI
caatatttgaaggttgtgttattctgaaagagaagatagggagggcggtttggtttggtgcaaatggattccttagaagacagcggctgttgggattttctcgattactctttcatcgatcaagcgccccctgatttcctttggtccaataacaataatagtgtgagcaccgaaattgacattccaggtgatgctgttgcttgtcaagagaacaccaagaagaggggacgcaccgattcatgcttcaaggcgggatcaaaagcttgccgtgaaaaattgcgaagggagagactcaatgaaaggttctgtgacttgagctctgttttggagccagggagacctgtgagaacagataaaccagctatacttgatgatgctatcagagtcttgagccaacttaaaaccgaagcccaggagctcaaaaaaacaaatgaaaaattactagaggaaataaaatgtttaaaggcagagaaaaacgaactacgcgaagagaaacttgttctgaaagcagataaggaaaggattgagaagcagttgaaggccttgcccgttgcaccagcagggtttatggctccacctgtagctgctgctgctgcagcatatcaagcaggggtgaacaagatggccgtatatccaaactatggctacatcccaatgtggcaatatcttcctcaatctgtcagagacacatcacatgatcatgagctcaggcctccagctgcatagttgtttctattattgttgcactttggataattatttaacatttgcgaagtattgacatgtaaatattgtcatcgtttcgattatttatttttattttttacttagtataatgtgctaaaaataggttttcaagtaatctatgatggcaatgacatgaaaactctgtcgatgtacattgcaaattgcccagttcttcacttcttagtagctcgctaaattcaatactaaatttattgaaagttttattttatgag

SEQ ID NO: 15159 - DNA, 1325 bp, Glycine max
  Clone ID: LIB3051-115-C4_FLI
aaagaactagctagctggagtctgagaactctagcatgtactagtactactcctacattcctccatcttcctttgtactattttttttttaaccataaaagcaagagcacaaagatggtgagagctccttgttgtgaaaagatgggtttgaagaagggtccttgggctcccgaggaagatcaaatcctcacatcttacattgacaaacatggtcatggcaattggcgtgccctcccaaagcaagcaggcttgttaaggtgtgggaaaagctgtagactccgctggattaactatttgaggcctgatattaaaagagggaatttcacaattgaagaagaagaaactatcattaagctgcatgacatgctggggaacaggtggtcagcaattgcagccaaattgccaggaagaactgacaatgagattaaaaatgtttggcacaccaatttgaagaagaggctgctgaaatcagaccagtccaagtccaaaccaagttccaaaagagccattaagccaaaaatcgaacgttctgattcaaattccagcatcataactcaatcagaacctgacaattttaatttcagagaaatggacacaataacatcatcagcatgcactacttctagtagtgatttttcatcggtcacggttggtgacagcaaaaatatcaagagtgaagacacagagtctacggaaacaatgcctgtgattgatgagagcttttggtcagaagctgcaattgatgatgaaacccccaccatgtcatcatctcagtctttgacaatctcaaatgagatgcgacttcaatacccttttgctaactatgaggaaactttccagcagggtcatcatgcttatgattcaaactttgatgatggcatggatttctggtatgacatatttaccaggaccaatgattcaatagaattgctagagttctgaagttttcatgtgacacgttgaacgagggcattattgaatttggcagatagagtagtttaaatggcatggtataacttgaatttgaccgttacaacaaaagggtacgataatttctggtgtggggacagcattatcaccagctgcaagatctagaggcataatccattgacaaagaaactagccagggtaatgcgaaaggctaatgaatgatatgtaatgtacacatgtaatcaagtagtgaaacactgactttctttctttttagtggaaaacagcaatgctctaacatttttgtattttacaaattagagtttaattaggctagagttacttgattgtaatatcaataaatgatgtattatgtgaattattccaaaaaattt

SEQ ID NO: 15160 - DNA, 602 bp, Glycine max
  Clone ID: LIB3052-001-H2_FLI
ctatcagcatcctccatctcttcatcagaagatccaaaatcatcatcatcagaatcatcatcagagtggtgatgaagatgatgatgaagagacccctcccaagaaggtggatctgggaaagaagagacccaatgagtctgcatcaaaaactccagtttcttccaagaaagccaaaaatgctactcctgaaaagactgatggtaagaaaggtggacatacagcaactcctcaccctgcaaagaaaggcggaaagactcccaacagcgaagccaaagccaagactcccaacagtgaagccaaagccaagactcctaagtctggtggactctcttgcaaaacctgcagcaagtctttcaccaatgaaagtggtctgcaacaacataacaaggcaaagcatggtggtcagtgatatttttgctgttggttatgactcattcatgtattatttttggcttatgtaatagagtgagtttcctaaggacgttaggcatctgtccttgtttttcggcccagtaaaccgtggtattgtggtagtgttgaaggtgaatgcatgtttgataagtttttgtttgaaattttaatgggaacttcaattattgtct

SEQ ID NO: 15161 - DNA, 1155 bp, Glycine max
  Clone ID: LIB3052-008-G7_FLI
gctcgaccagatgcctaggagattctatcttgctgggaaccaagagcaagagtttctaaaatatcagcagcagcagcaaggaggttcccaaagccagaaaggaaagcaacaagaagaagaaaacgaaggaagcaacatattgagtggcttcgcccctgaattcttgaaagaagcgttcggcgtgaacatgcagatagtgagaaacctacaaggtgagaacgaagaggaggatagtggagccattgtgacagtgaaaggaggtctaagagtcacagctccagccatgaggaagccacagcaagaagaagatgatgatgatgaggaagagcagccacagtgcgtggagacagacaaaggttgccaacgccaaagcaaaaggagcagaaatggcattgatgagaccatttgcacaatgagacttcgccaaaacattggtcagaattcatcacctgacatctacaaccctcaagctggtagcatcacaaccgccaccagccttgacttcccagccctctggcttctcaaactcagtgcccagtatggatcactccgcaagaatgctatgttcgtgccacactacaccctgaacgcgaacagcataatatacgcattgaatgggcgggcattggtacaagtggtgaattgcaatggtgagagagtgtttgatggagagctgcaagagggaggggtgctgatcgttccacaaaactttgcggtggctgcaaaatcccagagcgataactttgagtatgtgtcattcaagaccaatgatagaccctcgatcggaaaccttgcaggggcaaactcattgttgaacgcattgccagaggaagtgattcagcacacttttaacctaaagagccagcaggccaggcaggtgaagaacaacaaccctttcagcttcctggttccacctcaggagtctcagaggagagctgtggcttagagagccctttttgcatgtgctaccacacttttgtccttttgggctctagctagtgctggtagcagtaaataagaatgaataaaagaaacaaaggcttagatgccctttgttaagtgtagaataacgggtatagtaactatgtacccttgtgtaatgagtcactcaagtacctatgcgggaaaagcataaataaaagaagaaattccaat

SEQ ID NO: 15162 - DNA, 1815 bp, Glycine max
  Clone ID: LIB3052-011-E8_FLI
ttgtttttttgttgagaagagagaatggctgtggcgtcgtcatcatcccttatcacgttgaaggtgaaaccttgcattttcgggtctcctcggagatccgcggtggttcggaattgtgcgaagtcaacggcggggacaatatcgacgagttggagcctggacagctggagggcgaagaaggcgcttcagcttccggagtacccagatgcgaatgaattggacctagtcctccaaaccctctcttcttttcccccaatcgtcttcgccggcgaggcgaggaatctggaggagaagctcgctcaggctgccatggggaacgcttttctccttcagggcggtgattgcgccgagagcttcaaggaattcactgccaacaacatccgtgacaccttccgtgtcatccttcaaatgggtgtggtcctcatgttcggtggccaaatgcccgttatcaaggtggggagaatggcaggtcaatttgcaaagccgagatccgattcatttgaggagaagaatggagtgacgctcccgagttacaggggtgataatgtgaatggcgatgcatttgacgcggcatctagaatccccgatccacagaggatgataagagcctactgccaatctgtgtctactctgaaccttttgcgggcatttgccacgggaggttatgctgccatgcaaagggttaatcaatggaatcttgatttcatggagcatagtgaacagggagacaggtaccgtgaattagcccatagagtggatgaggctcttggcttcatgaatgttgctgggctcacagccgaccatcccatcatgagtacaacagacttttggacctcccatgagtgtttgcttctcccttatgagcaagcacttactagggaggattctactactgggcttcattatgattgctcagctcacatgctatgggttggggaacgtacccgccaacttgatggtgctcatgttgaattcttgagaggagttgctaatccacttggcatcaaggtgagtgataagatggttcccgatgaacttgttaagctgatagatattctgaaccctaaaaacaagcctggaagaattacagtcattgttagaatgggagctgagaatatgcgagtgaagcttccacatcttatcagggcagttcgcagagcaggtcaaattgtcacttgggttagtgaccccatgcatgggaacaccattaaagctccatctggacttaaaacccgctcttttgatgcaataagggctgagctgagggcattctttgatgtgcatgatcaagaaggaagctacccaggaggggttcatttagagatgacagggcagaacgtgacagaatgtgttggaggctcaaggactattacttatgatgacttgagctcacgctaccacacacattgtgatccaaggcttaatgcttctcaatctctcgagcttgcatttaatattgcggacaggttgcgcaagagaaggctcaattcaactcgatcacttggaatttagacaagagggggtctgtcttcctttgtacctggatcacaatactggtcaaacatgtgttgagttttcttgagcacagtgaacaaatactctactgggagccactctaccgagtttcataagaacttaaaatagtcggcacaattaatagttgtgctgtatgagtgttacaagacagttcaaaacactgcaggtgtatgtacttgcaagtttgcacttttaagtttggagatagtacgtgtgtagtatttatgctcgactcgagtaaatgagtaataaataaagtttcaaggtacaacttacatc

SEQ ID NO: 15163 - DNA, 2291 bp, Glycine max
  Clone ID: LIB3052-012-B3_FLI
gtggagagagaaatagagagagaggggaaacagatgggttaggctgaaaagggagttggtataacattgttggtttggtttagtttagtttcctcggtagagagggctcttttttttattttggtggtgatggaagtgggaaaattgaatggcaggaactttttcaagaggctgaagcaagtttcagagtggtggcagttgcacaagcaacaagaagagaagaagagtggaaagaaacaaagctgggagtgcaaggaatcaacaacccattaggaataagtgcaaagcttcattaaaagctggaagaggaaaatcacaacaggggtctgactctggatcctcacaggaatcatcatcatcatcatcatcttctgcagcaacaacaacaaccacctcatcatcctcatcctcaaaatctgattctaaattcaataagacatgtaacagaccaagaaggagaaaaccaagaagaccaagaatctcattctcatcctcaccaattccatatccaattccaacctcttcatcatcaacaagaacaacaacaacaacaatcttacacaggtttagacacggagatcttaaacccactccaaccaccgaagaaacggtcttgcctaccgcctcttccgccgccaccaccgccgccttcgtcgcttgcttcatccgaacatgcaagaaaaatgggagagctacaacaccatcaacaacaggcagcagcagcagcagcaccgtcgagagcggcgatgagaggcgtcggcggcggcgagattgtggaggtgcaaggcggccacattgtccgctccaccggacggaaggaccgccacagcaaagtctgcaccgccaaaggccccagagaccgccgcgtgcggctggcggcgcacaccgccatccaattctacgacgtccaggaccgcctgggctacgaccgccccagcaaggcggtcgactggctcatcaagaaagccaaggcggccatcgaccagctcgcggagctcccgccatggaaccccactgccacctcaatgcaaccacgacagctgccacaagaaatcgtccactgcgagaacaaatctctcgcgatggacgattcaatgaccgctgccttcagtagccgcggcgaaagcaacgctttcgcctcccaccaacaagtggaggataatgaaaatgctaacaacattagcagcagcagcggcaacaaatacaataccggttctgggtttctgcccgcgtctttggacactgacaacattgcggagacaatcaagactttctttcctgtggaagcgacctcgacgtcgtttcagagttacccgccggcgccaccggatttagggcaccaagatctgcggctctcgttgcagtcctttcaggaccctattatgcttcaccaccagcctcatagccaccaccaaccggttctctttgccggaaccgccgccgcggcgctcgacttcgacggcggttccggctggtcagagcacctgcaccagcaccagcaacagaaccaccactcggaggaacagcgattgctctatgctggtggtaacagtggccacggcggtgggtttgtgttcaacacgccggcgccggtgcaggtgccggcgtttggccagtttttttctcagaggggaccccttcagtccagtaacaccccttcgattcgtgcttggatagacccttcggtcgatcaccaccaccaccaccatcactacctatcacagttgatccaccaaggatccgtcgccggtggcggcggattctccggcttccgcattcctgcacgaattcagggtgaagaggaacacgacggcgtgtccgacaagccgtcctctgcttcctctgattctcgccattgatttgaaaaacacacatcaaaaaccccaactttgttctccctcagggtttgtggggttgcattgaagatggttcaattgatggagagaacatgattttggaagatcatgatgaatggattttcaagctacaacgggaattcaagaaaatctgaggtggatattcaggttttccaatccctcggtttgttatgctttttatgttcaacttatgtttttcatgcttaatttaactaggactaggagtattgtgtttcttttgtttcttctgtattggagtgctatgtttcttttgtttcttctgtattggagtgctatgtttccctttgttaagtgattgtgtcttctttgtacttcttcagtttcgagtttcttgtagtgatctgaaaaacatgcaaattcaataaaagagctagtttgctctagttattgtat

SEQ ID NO: 15164 - DNA, 1143 bp, Glycine max
  Clone ID: LIB3052-014-G7_FLI
atcaccaccgtcaccgacgctcaagccaaggccgccggcgggcgtggccgtgcctacgtcaccttcctcgccggaaacggtgactatgtgaaaggtgtcgttggcttggccaaaggtctgaggaaggtgaaaagcatgtaccctctggtggttgcagtgttacccgatgttccagaacatcaccgaaacattctcacctcccaaggttgcattgttagagaaattgaacccgtgtaccctcctgagaatcagacgcagttcgccatggcatattacgtcatcaactattccaagctacgtatttgggagtttgtggagttcagcaagatgatatacctagacggtgatatacaagtgtttgacaatattgaccacttgtttgacttgcctgataactacttttatgcggtgatggactgtttttgtgagcccacttggggccacactctgcagtatcaaatcggatactgccagcagtgccctcataaggttcagtggcccactcactttgggcccaagcctcctctctatttcaatgctggcatgtttgtttatgagcccaatctggatacctaccgtgacctccttcaaactgtccaagtcactaagcccacttcctttgctgaacaggattttttgaacatgtacttcaaggacaaatataggccaattcctaatgtctataatcttgtgttggccatgctgtggcgtcaccctgagaacgttgagcttgaaaaagttaaagtggttcactactgtgctgctggatctaagccttggaggtacacagggaaggaggaaaatatggagagagaagatatcaagatgttggtgaagaagtggtgggatatatatgaggatgagactttggactacaacaatccattcaacgtggataggttcactgcggcacttttggaggttggtgaagtcaagttcgtccgtgccccatctgctgcttagagtgtctttggaaatcaagtgtgatccaagtacataggataagatatacagacccatacatcattaagttttatgtgtttttaaagtgtttagaggacctttttatgtgtcccttttttcttttttctttttcaattctgccattgtaaagcagtgaaataccatgtccttaattttatt

SEQ ID NO: 15165 - DNA, 1254 bp, Glycine max
  Clone ID: LIB3052-015-C9_FLI
tgtacctaacactgctgatggatataatagttccacatccaggttttgctacgttaactctgtggataaacatttggtgaaaggaaagatcgttctgtgtgacggaaacgcgagtcctaaaaaagttggggatttgtctggggcagctgggatgcttcttggagccactgatgtaaaagatgctccattcacttatgcactgcccacagctttcattagtttaaggaactttaaactaatacattcttacatggtttcattgagaaattcaacggccacaatatttaggagtgacgaagacaacgatgattcacaaacccctttcatagtttcattttcatctagaggtccaaatccacttacaccaaacactctcaagcctgatctcgcagccccgggagttaatattctagctgcatggtctccagtctatacaatttcagaatttaaaggtgacaaaagagcagttcaatacaacatagaatctggcacttcaatggcttgtcctcatgtatcagctgcagctgcatatgtcaaatcatttcatcccaattggtctcctgctatgatcaagtctgcactaatgaccactgccacaccaatgagtcctactcttaatcctgatgctgaattcgcatatggcgcgggtctaattaatcctcttaaggcggcaaatcctggtttagtgtatgatattagcgaagcggattatgtcaagttcttgtgtggagagggctatacagatgaaatgcttcgagttctcactaaagatcatagtagatgcagcaaacatgctaaaaaggaagctgtatatgaccttaatctcccatcattagctctttatgtaaacgtctcatctttcagtcgtattttccatagaacagttacaaatgtgggattggcaacgtctagttataaagccaaagtggtatctccatctttgatagatattcaagtgaaaccaaatgttctgtccttcacatcaattgggcagaagaagtcattctccgtcataattgaagggaatgtcaatccggatatactgtctgcttctctggtttgggatgatggaacttttcaagttagaagccccattgtagtgtatggtgatacataatttagtgtcattaattttttctttctaaagtcaaaatctagattatatgtttcatgaagattagtcgggactagagataaataatagtccgagaccatataataaattgaattaagatttatcttaattagttaaac

SEQ ID NO: 15166 - DNA, 676 bp, Glycine max
  Clone ID: LIB3052-016-E11_FLI
gaaatatcattttccgagacaatcccatcttccatttccatcttcaatatttcttctcatcgagaagcttcgcgaacgaaaacaaagaaccctagacagatccattccatagccatgtcaggtgttggccctctatctcaggattgggaacccgtcgtcctccgcaagaaggctcccaccgccgccgccaagaaggacgagaaagccgtcaacgccgcccggcgctccggcgcggaaattgaaaccctaaaaaagtataatgctgggacaaataaagcagcatctagcagcacttcattgaacactaagaggctggatgatgatactgagaatctagctcatgagaaggtaccaactgaacttaagaaggctataatgcaagctaggatggacaagaaactcactcaggctcagcttgctcaactgatcaatgagaagcctcaagtgatccaggagtacgagtcagggaaggccattccaaaccagcagataattgggaagttggaaagggctcttggagcaaaattgcgtggcaagaaataaattaaactaatgctatggttttgcatgtagcttggtttacatatcactaactcactatgggagtgttatgtgtttgctcgctaattgtgtaatatgtaagacaattaaatggttgtgaggacctgtggctttc

SEQ ID NO: 15167 - DNA, 720 bp, Glycine max
  Clone ID: LIB3052-017-G2_FLI
gccgcgaccccatctattccaacaagcttggcaagttgtttgagattaccccagagaaaaaccctcagcttcgggacttggatgtcttcctcagtgttgtggatatgaacgagggagctctttttctgccacacttcaattcaaaggccatagtggtactagtgattaatgaaggagaagcaaacattgaacttgttggcattaaagaacaacaacagaggcagcaacaggaagagcaacctttggaagtgcggaaatatagagctgaattgtctgaacaagatatatttgtaatcccagcaggttatccagttgtggtcaacgctacctcagatctgaatttctttgcttttggtatcaatgccgagaacaaccagaggaacttccttgcaggttcgaaagacaatgtgataagccagatacctagtcaagtgcaggagcttgcgttccctgggtctgcaaaagatattgagaacctaataaagagccaaagtgagtcctactttgtggatgctcagcctcagcagaaagaggaggggaacaagggaagaaagggtcctttgtcttcaattttgagggctttttactgaataagtatgtagtactaaaatgtatgctgtaatagctcatagtgagcgaggaaagtatcgggctatttaactatgacttgagctccatctatgaataaataaatcagcatatgatgcttttgttttgtgt

SEQ ID NO: 15168 - DNA, 1882 bp, Glycine max
  Clone ID: LIB3053-001-F1_FLI
ctaccttaaagatattggtgtgaagaagggagatgccgtaattatttatttgcccatgcttatggagcttcccatcgcaatgcttgcttgcgcccggattggtgctgttcattcggttgtatttgctggtttttctgcagaagctctttcccagagaatcattgattgtaaaccaaaagttgttattacttgcaatgctgttaaaaggggccctaagcctatctatctaaaagatattgttgatgctgcaatcaatgattcagcccaaaatggggtctctatagataaatgcctagtttatgaaaacccattggcaatgaagagggtagataccaaatggaaggaagggcgtgatatatggtggcaggatgtcattcctcaatatccaactacttgtccgttggagtgggttgatgcagaggatccactttttctactctatacaagtgggagcacaggaaaacctaagggtgtcctccatacaactggtggttacatggtgtacactgcaacaacatttaagtatgcatttgactacaagccgtctgacatctactggtgtacagctgattgtggttggattactgggcacagctatgtcacttatggacccatgctcaatggtgcatctgttattgtgtatgaaggggctcctaattatcctgatgctgggagatgttgggacattgttgacaaatataaggtgacaatattctacactgctccgacattggtgcggtctctcatgcgtgatggtgatgcgtttgttactcgctactcaaggaaatctttacgagtcctaggaagtgtaggtgagcccataaatccaagtgcatggaggtggttttacaatgtagttggagattcaaggtgccctatctctgacacttggtggcaaacagaaacaggtggcttcatgataactccactaccaggtgcttggccccagaaacctggttctgcaactttccctttctttggagttcagcctgtcatactggatgagaaaggtgttgaaatagaaggggagtgcaatggatatttgtgtgtgaagaaatcatggcctggggcattcagaactctgtatggtgatcatgaaagatatgaaacaacatatttcaagccatttgccggatactatttcagtggtgatggttgcagcagggataaagatggataccattggctcattggaagagttgacgatgtcatcaatgttagtgggcatcgaattggcacggcagaagtggaatcagctttagtttcacatccgcaatgtgcagaggctgctgtggttggtgtggagcatgaggtcaaaggacagggcatctatgcatttgttacagttgtggatggtgttccttacagtgaagaactgcggaaggaccttgtactcatagttcgaaagcagataggagcctttgcagcacctgataaaattcattgggcacctggccttccaaaaacaaggagtggaaagataatgcgaagaattctgagaaaaattgcgtctcggcagctggatgaacttggagatacaagtacccttgcagatccaaatgtggtcaatcaacttatagaacttgcagattcttgaagccccaaactttgtattattataggtatgagaaatgctagtaacacactccagtgtacttttttttaacgcactcttcattattagttaaagtttattggaaattacaataatttatggacatcactacttatttaatgatccttattcgtgattttgtagtttctaataaattttaaactttagtagagtgaattagaaagaatatattagagaaagtgttgttagtattccttgtaaaggtataatagccaatgagaagtgaggacaaattttgccttgtgt

SEQ ID NO: 15169 - DNA, 751 bp, Glycine max
  Clone ID: LIB3053-002-D8_FLI
tactcaagcattttcttccaatcttgaacccaggtggatcttcaatctctctgacatacattgcttcagaaaggatcattcctggatatggtggtggtatgagttctgccaaagctgcactggagagtgatacacgagttcttgctttcgaagcaggaagaaagcgcaaaattagagtcaatactatatctgctggtccactgagaagtagggctgcaaaggctattggattcattgatatgatgatcgattactcatcagccaatgcacctctacagaaagaactatcagcagaggaggtgggcaacacagctgccttcttagcatcacctttggcatctgctatcactggtactgttctatacgttgacaatggtctgaatgctatgggtgttggagttgacagtccaatatttaaagatcttgacattcccaaggaccagcattaagtggaagctaccccacaaaagctagtgtcaccagaattagcatagcaatggcaatatttttgtttcactgtagctagccatcttcaagttctgcgactcctaccttcttcccaacaagatagtgcaggatccactttgagcatttactttgctttttgtaggctatttttcagagttttccctcagacttttgaacatttcttttttgcaatgttctcagaagtgcaggccacatgattatgaatgtaagaggatctttacattgatcaatgcttatttgagatgtttcgtaataaaactgt

SEQ ID NO: 15170 - DNA, 1011 bp, Glycine max
  Clone ID: LIB3053-002-E12_FLI
ttgcaagcatcataacatctcgcaaaagtgcaagcaaatcagaagaagacatgctgcagtgcttcattgactcaaaatacaaagatggtcgctcaacaacagaagctgaagtgactgggcttctcattgctgcactttttgccggtcaacacacaagctcgattacctccacttggactggggcatatctgctgtctaacaaccagtacctttcagctgtgcaggaggagcagaagatgttgatagaaaagcatggggacagagttgatcatgatgttttggctgaaatggatgtgctgtataggtgcatcaaagaagctttgagactccatcctcctctaatcatgctgatgagaagctcacacactgattttagtgtcacaacacgagaggggaaagagtatgacattcccaagggtcatataattgccacatcacctgcttttgcaaacaggctaggtcatgttttcaaagaccctgataggtatgatcccgatcgatttgctgtggggagggaagaggacaaggtggcaggtgcattctcatacatttcatttggagggggcagacatggatgccttggggagccatttgcatatctgcagataaaagcaatatggactcatctgcttaggaattttgagctggagttggtgtcaccttttccagagatcgattggaatgccatggttgtgggagtgaaggggaaagtgatggtccgatataagcggaaggagctttcagttaatcaataggaccacataattcagtgtctggcatgattttattttaagcagttattgttagtcttttctggttcagcttctgtcaaagttcgttgtttatttggcaatgaatatctagaatcttgattttgatttttttttcttctaattctattaagtgattttaacttatttttgtttgtgtatttgatgctactatgatgcaattagttacttgggttgaagtgaaatggtcagagtaaaatgttgcatgggatatttgaac

SEQ ID NO: 15171 - DNA, 593 bp, Glycine max
  Clone ID: LIB3053-002-F2_FLI
gtggacactaaagagtttgaatccatgcaggccttatcaagcaagaaagacaatcatgacatattcattaaactgggatctgataaagataagcgaaaagaggcttttgagaaggaagaaaaatccaagaagtctgtgagcatcaccgagtttctgaagcctgctgagggggaagcatactataacccaggacgtggtaggggccgtggccgtggttcacgaggcggaggcggttaccatggaagtgccaccaacaatgcacctgctccatccattgaagatcccgggcatttcccaaccttgagtgccaagtgaggccttcccagaacccttttgacatatctctgtcctattttcaattttgggttctcttatttgaacttaagcaggaaaggaactatggtaattggatttcctggattagaaggttcatttaattttatgccttaaaagtgtaaatttaggttgttcttcatacggtcatgtatcccttgaagcctgttcctccttgtgctttatttttaccgcgtttgatattttgggggaatatggtcggggtaagacataaatgttgttgagttccctttcttcat

SEQ ID NO: 15172 - DNA, 563 bp, Glycine max
  Clone ID: LIB3053-003-C11_FLI
attcctgcagaaaaggtgcgtgaaataatgttgattgcttctgtctctgctaagtctgctgaaatgaagagtgggatacccttgacttcattcattcccaaaagcccttcttcttcacagggaaactctactaatttgccttcaccacaatcagtcaagagttccattcgcaggctgcaagatgaatttccactagcccgaaggcaatcacttcaaagatttcttgagaagcgaataaacaggttggctaacagatccccttatgccttaacaaaaaaagtgattcacaacatagacaacaacttttctcctgacgacacgccagattttggttccttgaacttgaactttctttaaggcaactagtgttggttctgctctatgtgaagtggtactttctggaatagcatttgcatgcatgtagaaccaaagaaactaatataactatgttattgctctcgagaccatattttatgcctaattagtgaacttgaatgtgtcaactatcacatgaaagttgggttattttggattataatgcgtagaaaatattcattatgctc

SEQ ID NO: 15173 - DNA, 253 bp, Glycine max
  Clone ID: LIB3053-006-C8_FLI
gtagatcctgactaccagcataaccgagggaaggaagtctataataatcatagatcatgtcaataaatgaagactgtgaaacttctctctcgtgctagttaagagagttttcatttacctaggctgaaatgtgaaaataatttgtaggttgtagcttaatttagtctcttgtggtttctcacttcagttgtagtattgtcatttgtcgtgcttcaaacagaacaacaaattgtgaaataaatgaattttgtct

SEQ ID NO: 15174 - DNA, 210 bp, Glycine max
  Clone ID: LIB3053-007-D1_FLI
gttgtagtggggtttcaggaaccctatgatgtcatattttatttttttagggtccttttactagagacactgtggaagaaaagtatcttatatatttttcttctggctttatatgtacctctcaagaaatcctatatgctgcttatggatgacttgttattgtgttgtatttacatgatgaatacatactctgcatttgaatgctttcgt

SEQ ID NO: 15175 - DNA, 1379 bp, Glycine max
  Clone ID: LIB3053-009-G5_FLI
aagcaatatagtttgtttaattgttgcttcatttctattgtgtgaatggcatttgggaagttcattatgaatataggggtagtggcaatggttctgggtttatggattcgggttggatttgcacaacaagtaccttgctactttatttttggagactctttggtggataatgggaacaacaaccagcttaactcactggctaaggctaattatctcccttatgggattgacttcgctggtggcccaactggaaggttttccaatggaaaaaccactgttgatgtagtcgctgagcttttgggattcaacggttacattcgtccatatgcaagggctagaggccgagatatacttagtggagtcaattatgcttctgcagctgccggaattagagaagaaactggacagcaactgggaggccgaatcagttttagagggcaggtgcaaaattaccaaagaacagtgtcccagatggtaaatttactgggagatgagaacacaactgcaaattacctgagcaagtgcatttattcaattggaatgggtagcaatgattaccttaacaactatttcatgcctctaatctattccagcagcaggcaattcacaccacagcagtatgctgacgtgcttgttcaagcatatgctcaacaactgaggattctgtacaaatatggggcaaggaaaatggccttgtttggtgttggtcaaataggttgcagccctaatgcactggcccaaaacagcccagatggtagaacatgtgtggcaagaatcaattctgcaaaccaattattcaacaacgggttgagatctcttgttgatcaactcaacaaccaggttccggatgcaagattcatctatataaacgtttatggtatctttcaagatatcttaagcaacccatcttcctatggatttagggtcacaaatgctgggtgctgtggggtaggaaggaacaatggtcaagttacatgtctgcctctgcaaaccccatgcaggaccaggggtgcgttcctgttttgggatgcatttcatccaactgaggctgccaataccatcattggtaggagagcttacaatgctcaatctgcatcagatgcttaccccgttgatatcaatcgcttagctcagatctaaagagggtcttgtagtggccataagctgtgccgtgataactataattgtaatgtttgtgtagtcttcgcatctttttcttgttcaggttttaaatgtttgtgttcagaagtctaagtgtaatttggcataaaaattttggttaagaaatttgcatattttttagtgagtactacttgttggctgatgttatgtatattttcatccaaagtgaataaaatgacaagaaattgtttgctttc

SEQ ID NO: 15176 - DNA, 478 bp, Glycine max
  Clone ID: LIB3053-010-F6_FLI
gatctcttgcgaaaaatgatctgtagggattcttctagaaggttctccgcagaacaagccttgagacatccttggatcttgagtgcgggtgacacggcggaactcacttgagaatgtagctagagagagacatgacctaagttacatggtgcagtgtagctaattttgctccttttgtcttttctctctactgtctcaataaggtggtctactcgtggtggcagaggaaggaacggaacagagcacgcttctgtagatttttgttttgttttaggaatcttatatctgagactctgtatgagtcgagagaatcttgtttttccactctcggtgattttctctctgtgtagtagaaagtgagaaagtgggtgatctcccagactctctcccccctagtagaaaggagtttgtttgctgatatccttctggttttttgtatctgtaaatcataaataaacaataattttgaatggtgttt

SEQ ID NO: 15177 - DNA, 1046 bp, Glycine max
  Clone ID: LIB3054-011-C11_FLI
gtatgttcagttcttggtctcaagtttcatcttgggctgtagactgtagcaaacaccatgaccaccaaggttccaaaatccgtatacgactttgttgtcaaggatgctatgggagatgttgtagatctctccttttacaagggaaaagtccttctgattgtcaatgttgcttctcaatgatatccttaatctgtgctgtgtttgttacttcttctttttttttccctgattgtgccttctaattaatttaaagccttgatattttcatcttttctattcttttcagtaactactctcaccgctaatgttataaatgttgagaaaatttacaatatgtttgggattgagacagcggcttgaccaactccaattatacggagctgaatcaattgtatgacaagtataattgttggtcgtattcaacagtaaccatgataactttactgtttatctttgtttctttctgttgtcttataagtatatgactggttttgtaaacttaattaggcctggagattctggcatttccatgtaaccaatttggtaagcaagaaccagaaagcaatgataaaattgtggattttgtctgctctggcttcaaatctgaattccccatctttcataaggtaggttgctattctgctaaattttgttaagaaccgtgacaatacatgcacttgtattacatatctgtttccttcgttcttgtgctatattgaagtgaatggggacaactctgctcctttgtacaaattcttgaagtcgggggaaatggggaatttttggtgatgatattcagtggaacttttccaagttcgtggttgataagaatggacaagtagtgggtcgctattatcccaccacttctcctctcagccttgagcgagacatccatagcttctgggaatttcctgaaggcaaaaagataatttcttcctgagctcattatgctgctcccttatgtggtggcaatgtaatgcaatatgcacaaactaatgcttaatcttacggacatcatatataccatgtcccatgacttcgtccat

SEQ ID NO: 15178 - DNA, 813 bp, Glycine max
  Clone ID: LIB3055-001-B7_FLI
ctaaaattggagtgattgagtcacttttagaaaaagttgacatccttcttcttggtggaggaatgatcttcacattttacaaggcacaaggtctttcagtgggttcatcccttgtagaagaagataagttggatcttgctacatcactacttgcaaaagccaaggaaaagggggtgtctctcttgttaccaagtgatgtggtgattgcagacaaatttgctcctgatgctaatagcaaggtcgtgccagcatctgccatccctgatggctggatgggattggatattggtccagattctgttaaatcattcagtgaagcattggatactacccaaaccatcatatggaatggaccaatgggagtgtttgagtttgacaagtttgctgttggtacagaggctattgcaaagaagctggctgacctcagtggaaagggggtgaccacaattattggaggaggagattctgttgcagctgtggagaaagtaggagttgctagtgtcatgagccacatatctactggtggtggtgccagtttggagttattggaaggcaaagagcttccaggagtccttgctcttgatgaagccgtcccagtcgctgtgtaagacacttttcatcttggaaaattttcccatcctcaggtgtcagtgttgtcaatcttgtaaaagagcatatgttgtaggacccttcgaagtctgttagtgtaaattttatcttgcttgagttattattggcttcacacataaattgcgtgtaactgtaaaccctggctgagagccataaattcaaataaatcttttagttgctggc

SEQ ID NO: 15179 - DNA, 1467 bp, Glycine max
  Clone ID: LIB3055-001-C10_FLI
gctgcaaaagttgacgagtatgctcgtggcatgatcagtggttctggatcatcactttttgaagagcttggactctactatattggtcctgttgatggtcataacataaatgatcttgttgccattctcaatgaagttaaaagcactaacacaaccggtcctgtattgatccatgttatcactgaaaaaggccgtggatacccatatgcagaaaaggcagctgacaaataccatggggttaccaagtttgatccaccaactgggaagcaattcaaatccaaggctaccactcggtcttatacaacatactttgctgaagctttgattgcagaagccgaagctgacaaagacgttgttgcaatccatgctgctatgggaggtggaactggcatgaatctcttccatcgccgtttcccaacaagatgctttgatgtggggatagcagaacagcatgctgttacatttgctgcaggtctggcttgtgaaggtcttaaacctttctgtgcaatttactcatcattcatgcagagggcttatgaccaggtggtgcatgatgtggatttgcagaagctgcctgtaagatttgcaatggacagggctggattagttggagcagatggtcccacacattgtggttcttttgatgtcacatttatggcatgcctgcctaacatggtggtgatggctccttctgatgaagccgaacttttccacatggttgccactgcagcagccattaatgatcgacctagttgtttccgatatccaaggggaaatggcattggtgttcaactaccaactggaaataaaggaactcctcttgaggtaaagtcaggattatatccccatacacatcctcgtagagactattaggaatagttttgcaaatccatttgatgtttttgttatcatattgtatcagattgggaaaggtaggatattgattgaaggggaaagagtggctctcttgggctatggatcagctgttcagaactgtttggctgcagcttccttagtggaacatcatggtttgcgtgtaacagttgctgatgcacgtttctgcaaaccactggatcgttccctgattcgcagcctggcaaaatcacatgaggttttgattacagttgaagaaggatcaattggaggatttggttctcatgttgctcagttcatggcccttgatggccttatagatggcaaattgaagtggaggccaatagttcttccggatcgttatatcgaccatggatcacctgctgaccaattgtctttagccggtcttacaccatctcacatagcagcaacagtgttcaacatactaggacaaacaagagaggcactagaggtcatgtcttagaaatattaaggggttcaatttttcactttacacgatgtacaatgcataacatgattcaccacgtgtaatataatatgaaaaagtaatgtaatactgtgaaattttgaagt

SEQ ID NO: 15180 - DNA, 1206 bp, Glycine max
  Clone ID: LIB3055-002-G6_FLI
gtttcttcaggtcgagtagatttgccaggctccaaggtattcagtgtgctatggctgggaagaatgcttatttgagattcacttgtagcacgggtgatgccatggggatgaacatggtttccaaaggggtgcaaaacgttcttgattttcttctgaatgatttccctgacatggatgttattggcatttctggaaattattgttcggacaagaaacctgctgcagtaaattggatcgagggacgtgggaaatcagttgtttctgaagcaattatcaaagaagaagtggtgcagaaggtattgaaaaccaacgtgtctgccctggtggagcttaacatgctcaaaaaccttgctggttctgctgtcgccggtgctcttggtggatttaatgcccatgctagtaacattgtttctgccatctttatagccactggccaagatccagctcaaaatgttgagagttcccattgcataaccatgatggaagccgtcaatgacgggagggaccttcacatctcagtgaccatgccttccattgaggtgggtactgttgggggtgggactcaacttgcatcccaatctgcttgcttgaatttacttggtgtgaagggtgcaagcaaggagtcaccaggatcaaactcaagacttttggccaccattgttgctggatctgttttagcaggagagctgtctctgatgtctgccattgcagcagggcagctagtgaacagccacatgaaatacaacagatcaagcaaagatgtaaccaaaatatcatcatcttgaggtcagggacatggttgcagtcattaattctggactctagaataaaaaaattgagggtaagcggatttagggaaggaaaatggagaaacattagattagattgttggcatccacgtttggctctgcattgctgtctgtttagatcttttattatttggagagaggaaagtagagttatgctctagatcttccctgtccccttctggatcatttcttcttttcattgcttcttctgccgagccattcagtgggtgttaacactttttttctcctcaaccaagacatttgacgtgttatattctaattctttttcccctatataatatgcttagcatatctatcattgtagccgaatgggttgatgaatattctcttcttgtccgctagtgcccgtcaattaagcttgagatcccattgtctt

SEQ ID NO: 15181 - DNA, 1032 bp, Glycine max
  Clone ID: LIB3055-002-H9_FLI
gtgtctatgcaaagttctggaatcaacccctaaggtccccccactccttcaaaaatcctctcttttatcctacaacactctaatcatcgtcatcaaccacctcctccatcctcccccagtaacaacacaacataacattcagagaaaaacaaaactatcatacccacatggatttgcaatgaaagtgagagagtccaattatgcgaacgctttgtgatgcttgtgagagcgccgcggctatagttttctgcgccgctgatgaggctgcactttgtcgtgcctgtgatgagaaggttcacatgtgcaacaagctagctagtaggcatgtgagggttggtcttgctagtccaagtgatgtaccacggtgtgacatatgtgagaatgcacctgctttcttctattgcgagacagatggaagttccctttgtttgcagtgtgatatgattgttcatgttggaggtaaaagaacgcatggaagatatcttctgttcaggcaaagagttgagtttccaggagataaatctagtcatgctgaaaatccggcttcacaaccattggaaccaggtgaggctaaaagaggacaaaatccacttcccaaactaaaaatgggagagaagcaacaaaatcacaagatgcctatggttccaacgccaggacctgatgctgatgggcatgccaagatggaaagtaaaatgattgatttgaacatgaagcctaatagaatacatgaacaagcatcaaataatcagcccataaatggcgcaactaggcaatgcagttctgacaggatcctaaaccaaaaatctaccaatggcaaaagcttcgttttgttctcgtgcatgctagtcacaaggatgacatactctattaatatcctatatattctggcaaatgaggcaccagaatcctttgaggagtttgttcgcctacgtaggaacttaatttggtagttcaacacatcatattctgttctgcaaagcattgttaactgtatatctatgacccctttcaatgaattgtgtgttgactttt

SEQ ID NO: 15182 - DNA, 1023 bp, Glycine max
  Clone ID: LIB3055-003-G2_FLI
gcatagaagagaggttgaaatgaaggtagctcccatcgtggttttcttgttcagagacacagagggtttcgcctccgccatctcacaagctctccatgccaacccttcctcctccttcacccgccaagaggacttcttcgagctctcattggaggcttatggaatcaaacatctcaaaacatctgggagcgtttctcacttcgttgatgatcacggtgcttacaaggtgacaattgtggctatggagcattatgagccaccagtactagcttgtgctcttaatgaggttcttaataaaattactgaagataaatcttccttgatacctacacttttggtaccatttttggtggaatcatccaaggttaaagggcacagtaaatccctaagatcagatgaaagcaaacctttaatatttggtacaaagattggtcaaaatacagacataatgcaggccttactcaacaaaacccaggagccaccatcttctttgggggttcaacatgaaacttttgcatgttttcttcactttgttcatgtaatgcagttaccaaccttttttctaattggacaagctagtcaatatttggacaataaatccaccaagcagcatgagatacttcatgcaataggtgagattttggctagcactacaggtctgcagttttcagaagatagagtggtctggaatccgaaaaaggcatcaggggaaagcaaggagccatggcgtgcattatacggttgaatcatgggttacgtgcaaacatggaaccagtgttttcatgggtctggttctcagaaccattgttttttctgtaataactgtccttaaacattattataaattacctcccccctgccccctctcctaagtatcttagttgtgtaatgtatgtgtcaatgggatgaatgtgccatagcaggtagcttcatgttcttggtgtacatgtgggtttattttcattcacctgtccaaaaggttagctgaatatgtttaactgtttatgctatgcatcacattgt

SEQ ID NO: 15183 - DNA, 1025 bp, Glycine max
  Clone ID: LIB3055-004-D2_FLI
aacaatcttagaaataaacctacatatccaaccctcatataaatacgccattaccctacaaccatatattatacacatagctagacatggtgaaaccagccatggctagtgttgattcttcttccttttcttcttgtaaaaatgattcattttcctctaactacagcattgatacttgcaagatgtacaaaggggtaaggaagagaaaatggggcaaatgggtgtccgaaattcggcttcccaacagccgtgagcgcatatggttggggtcctatgacacccaagtgaaggcggccagagcatttgatgtcgcactttattgcctacgtggcaaaagtgcgagtttcaactttcctgacacacctcgacacttggaaattaatatggtgttaccatgtgacatacaacaacaacctctctcccatccggagattcaagagatagcctcgaagtttgcgaacaacgaccacgtccctttggaggaggagagtgcttttcaagaacaagaacaagacccctcgatggagtcacaaagtgacgagtctaaatctgccaatacaataacggagatgagcaacttccctaatatttatgatggtggaactcatactaatgtacaagtggatcaattacaaggggattgggacagcatggattggacattttttaacatgttggatgacttgaatggctcggattttggcctctatttggggccagacaagttgcacccgggtgagtttttgtgtcccactcaagctccaatgctttttcatgaggatgaaattgaaggtgatgatgatcatgatgctttttctaaccattccttactttggagttggaacttttgattcacctgcaaattaacttagataccctctactttgcataagtttcaactagtaaataattactagcaagcaagcctctctattatgtttttttgtagccatttatacatggctgtttctcaattataatagttaggctatgactagagtttatgtcaaatggaccataaagac

SEQ ID NO: 15184 - DNA, 1658 bp, Glycine max
  Clone ID: LIB3055-005-A2_FLI
ctcagccgcatcccccaccactttctctctcctccactccgccaccccttcctcctcctccaccgccacctccgcctccccctccccctcgcgcgtgcagctcacctcctccctccgcgcccgcccgctgcgccgcctgggcttcgccgcggcggacccgctgctcgcggcgagtgtagcggcgcgcgtggcggcggtgagaggaggaggaaagggcgcgaggggggtggtgtcgatggcgaagaagagcgtgggggacctgagcgcggcggacctgaaggggaagaaggtcttcgtcagggccgacctcaacgtcccgctcgacgacaaccagaacatcaccgacgacaccagaatccgcgccgccattcccaccatcaaacatctcatccaaaacggcgccaaagtcattctctccagccacttggggcggccgaagggtgtcactcccaaatacagcttggcgcctcttgtaccccggctttctgagctcattggtatccagattgtcaaggccgaggacagtattggtccagaagtagaaaagttggtggcttctcttccagatggaggtgttctccttctagaaaatgtgaggttttacaaggaggaagaaaagaatgaccccgagcatgcaaaaaagcttgcctctctggcagatctgtatgtgaatgatgcatttggtactgctcacagggcacatgcatcaacagagggtgttactaaatacctgaagccatctgttgctggttttcttttgcaaaaggaacttgattaccttgttggggcagtatcaaaccccaaaaggccatttgctgccattgttggtggttccaaagtctcatctaaaattggagtgattgagtcacttttagaaaaagttgacatccttcttcttggtggaggaatgatcttcacattttacaaggcacaaggtctttcagtgggttcatcccttgtagaagaagataagttggatcttgctacatcactacttgcaaaagccaaggaaaagggggtgtctctcttgttaccaagtgatgtggtgattgcagacaaatttgctcctgatgctaatagcaaggtcgtgccagcatctgccatccctgatggctggatgggattggatattggtccagattctgttaaatcattcagtgaagcattggatactacccaaaccatcatatggaatggaccaatgggagtgtttgagtttgacaagtttgctgttggtacagaggctattgcaaagaagctggctgacctcagtggaaagggggtgaccacaattattggaggaggagattctgttgcagctgtggagaaagtaggagttgctagtgtcatgagccacatatctactggtggtggtgccagtttggagttattggaaggcaaagagcttccaggagtccttgctcttgatgaagccgtcccagtcgctgtgtaagacacttttcatcttggaaaattttcccatcctcaggtgtcagtgttgtcaatcttgtaaaagagcatatgttgtaggacccttcgaagtctgttagtgtaaattttatcttgcttgagttattattggcttcacacataaattgcgtgtaactgtaaaccctggctgagagccataaattcaaataaatcttttagttgctggc

SEQ ID NO: 15185 - DNA, 1369 bp, Glycine max
  Clone ID: LIB3055-006-A5_FLI
gcaaactttatcgactggaaggttcagcaggtgtacaaaaagacttactttctcagtctctaaatgaaacaaatctaaagatttggaatttatcttatggaacagaactggcatggaggaggctacacaatgcaaaggcacttatagttcttgacaatgttgaagaagataaacagcttaatatgtttactgcgaatagaaagaatctgttacgtgaacgccttggtagaggaagcatagtcattataatttctagggatcaacaaatattgaaggcacgtggagcagatcttatttaccaagtgaagccattggatgacaccgatgctcttcgattgttttgcaaaaatgcatttaaaaataattatattatgagtgattttaaaacgttgacttctcatgtactatcacattgtgaaggtcatcccttagcaattgaagtattgggctcatctttgtttggtaaagatgtctcttattgggggagtgcattggtttccttaagagaaagtaaaagtattatggatgtgttgcgaataagttttgatcaattggaggatacacacaaggaaatatttctagatattgcatgtttcttgtacgatcatgatgtgatatatgtgaaggaaattctagattttcgtggatttaatcccgaatacggcctacaagttctcgttgataaatcacttataaccatgcgtaggatagttgaaatgcatgacgttttgcgcaatttgggcaagtatattgttagagaaaaatcaccttggaatccatggaagtggagtaggttgtgggatttcaaagatctcaacatagtttcgttggataataaggcaacagaaaatgttgaggccatagttcatgaagaagactatgacattgaaaaagactctgacttagaagaagactctaacttagaagactatgacttagaagactctgacttagaagaagactctgacttagaagactatgacttagaagaagactctgacttagaagactatgacttagaagaagactctgacttagaagactctcactttcttccaacagtgagggtggatgctctatcaacaatgagtaaccttaaacttctcaaatttagatacgctggctacgaaatcaattattcaggaacacttactaagctttccaatgaattaggatatcttacttgggtaaagtatccttttgagtgtttgccaccaagttttgagccggacaaacttgttgagttgattctacctaaaagcaacatcaaacaactttgggaagatagaaagataatatcaattattattattattatttttctatattgttttcatttaaataaacaaataaaaaggcaaactttctt

SEQ ID NO: 15186 - DNA, 756 bp, Glycine max
  Clone ID: LIB3055-007-C3_FLI
cttcaacccctctctctctctccaaaacgccaaaccaaaaaatggctcagaaggccgagaaaaacgacaccgactttaaggtccccgaaaccatcatcaccccctgcaccaccaccaccgccacctcgattaccgaaccttctagattcttcgacgcaaccacccccgccacgtcatcgcgctcccccaagcgatccctccccctcgacgacgaatctcagacggaccaaacggcgtcgtcggagcccaaacgcgtcgtgagccgctgctcctgctgtcggcggcgcgtggggctcactggattccggtgccgctgtggcgacctcttctgcgccgagcaccgctactccgaccgccacgactgctcctacgactacaaggccgcagggagagaggccatagcgagagaaaaccccgtcgtgaaggccgcgaagatcgtcaaggtctgaaaaccctaaatcggagaacaaaaatctcccaagagatcgaacaaatcgctgagaagaagaaggggataacacgaaacgacgtcgtttccacgcgatcgcggttcggtgattgattgattaattaattaattaattactcgcgtcgcgtcttttctccgagacgcgactcggcgcgtgggtggaaatctgggaatttgtataatttctaaatttttatgcctttttttgtttaatttgggttggaaatttataaattattatcgtggttgttatgtgaatcagtggaatgaatggtttttcgttgcct

SEQ ID NO: 15187 - DNA, 1872 bp, Glycine max
  Clone ID: LIB3055-008-E8_FLI
ttctcctcctacaccaacaaaaatggcaccttctccacaagaaatcatcttccgatccccactccccgatattcccatccccacacatctcccattgtactcttactgcttccaaaacttgtcaaagttccatgaccgtccatgcctcatcgacggcgacaccggcgagaccctcacctacgccgacgtcgacctcgctgctcgccgcatcgcctccggcctccacaaaatcggcatccgccagggtgacgtcatcatgctcgtcctacgcaactgcccgcagttcgccctcgccttcctcggcgccacccaccgtggcgccgtcgtcaccacagccaaccccttctacacgccggcggagcttgcgaagcaagcgacggccacgaaaaccaggctcgtcataacgcaatccgcgtacgttgagaaaatcaagagtttcgcggacagcagcagcgatgtcatggtgatgtgcattgatgatgatttttcttatgaaaacgacggcgttttgcatttctcaacgctcagtaacgccgacgaaacggaagcccctgccgttaagattaaccctgacgagctcgttgcgcttccgttttcttctggcacgtctgggctccccaagggcgttatgttatcgcataaaaacttggtcaccacgatagcgcagttagttgacggcgaaaacccgcaccaatacactcacagcgaggatgtgctactctgtgtgttgcctatgtttcatatctatgcgctcaattccattttgctctgcgggattcgttccggtgcggccgtgcttattttgcagaagtttgagatcactactctgttggagctcatcgagaagtacaaggtgacggttgcgtcgtttgtgccgcccatcgttttggcgttggttaagagcggagagactcatcgctacgacctgtcgtctattcgcgctgtggtcaccggcgcggcacccttaggaggggaacttcaagaagccgttaaggctaggctaccacacgctacttttggacagggatatgggatgacagaagcaggaccacttgccattagcatggcatttgcaaaagtaccctctaagattaaaccaggtgcatgcggaaccgttgtgagaaacgccgagatgaaaatcgtggatacagaaacgggtgattcacttccaagaaacaaacacggtgaaatttgcataagaggcacaaaggtcatgaaaggatatctaaatgacccagaggctacagagagaactgtagacaaagaaggatggttacacacaggagatattggtttcattgatgatgatgatgaactcttcattgttgatcggttaaaggaattgatcaaatacaaaggattccaagtggctcctgctgagcttgaagcattgttgattgcccacccaaacatttctgatgctgccgttgtaggcatgaaagatgaagctgcaggggaaattccagttgcatttgttgtaaggtcaaatggttctgagatcgccgaggatgaaatcaagaaatacatttcacaacaggtggttttttacaagagaataggtagagttttcttcacggactctattcctaaagcaccctcaggcaaaattctgcgaaaggtattaactgcaagacttaacgaaggtttggtggtggccaattaggtccataattgtgacagaggaaaatcgtggctgttttacttaccgtaccacaggcccttcctgttgtggtttttgttccaattttatatctcgttatcaatatatatatataatatgcaagtattgcatgaatttattcttgtgtaacttataatgttgtatatattggagaccagactctgaattacagcatgaacacattaaaattc

SEQ ID NO: 15188 - DNA, 653 bp, Zea mays
  Clone ID: LIB3059-015-C7_FLI
cctgtatcggcgctctccaccgccccggccccttcctccaccagcgcgccgccgcctcggtccacttcctcgcgccgcacaggaagacccgaccgccccccgcgatgagctggcttgggaagctgggcctgagcgggcttggaggcagcccgcgcgcgtcggaggcgtcggcagcgctggcgcaggggcccgacgaggaccagcccgcgccggggaacgagttcgcgcaattcggcgccggctgcttctggggcgtggagctcgcgttccagcgcgtgccgggagtcacccgcacggaggtcggctacagccagggcaacatccacgatccgacctacgaggacgtctgcaccggcaccacaaaccacaacgaggtcgtccgcgtgcagtacgacccggccgcctgcaagtacgacgacctcctcgacaccttctgggcgcgccacgaccccactactcccaaccgacagggcaatgatgttggaacacagtataggtcagggatatactactataacccagagcaggagaaggcggcaagagagtccctggagaagcagcagaagcttctgaaccggaagatcgtcaccgagatcgttccagcgaagaggttctatagagcagaagagtaccatcagcagtacctggagaag

SEQ ID NO: 15189 - DNA, 499 bp, Zea mays
  Clone ID: LIB3059-022-B8_FLI
tgattgctgcacaaacaaaagcaattgctgagaagatcaaggactggagcaacgtagttgttgcctatgaaccagtttgggctattggaactggtaaagttgccaccccagctcaggctcaggaagtgcacgcctccctgagggattggctaaagaccaatgccagccctgaggttgctgaatctactaggatcatctacggaggctctgtaactgctgcgaactgcaaagagctagcagcacagcctgatgtcgatggttttcttgtcggtggagcttctttgaagcctgagttcatcgacatcatcaacgcggccaccgtgaagtccgcttaagatgctacgctgaagacgaacatactttttttttgctcaactgtgctatgtaagctagtagcttttgcgcaggagcagagactgttttgcctgcccccaacttctagcttgagcttgctaataatgtttacctctggacgtatcaataatggtgcttatgtatc

SEQ ID NO: 15190 - DNA, 1087 bp, Zea mays
  Clone ID: LIB3059-022-H4_FLI
cccttgcccatgccattgctaatgagactggcgtgccgttctataagatctccgcaccggaagtcgtatctggggtgtctggagcatctgaggaaaacatcaggggcttgtttcagaaggcctatcggactgccccctcgattgtatttattgatgagatagatgcgattgcatccaagagggagaatctacaacgagagatggaacggcggatagttactcaattaatgacatgcatggatcaattccaccagaatattggatcgggaagtagcaatttggaagctgaatcatctgaaaagaaacctggttatgttattgtcattggagccacaaataggcctgatgctgtggaccaagctctgcgaaggccaggcaggtttgaccgagagatatcacttggtgttccagatgagaatgcacggaaacaaatactgaagatgcttactcagcatctccgacttgaaggcgaatttgacttgttcaagatagctagggcaacaccagggtttgttggtgctgacttgaaagcattagtggataaagcaggaaatctagcaatgaagagaataattgatgaaagaagggctcggtgttgcattgagcaggacggtagtagcaagcatgactggtggagacaaccttgggatgaaagtgaggtggacgaactacatattaccatgaatgactttgaggaagcagcaaaaatggttcagccatctttgagaagagaagggttttcttctgtccctggtgtcacatgggatgatgttggaggtcttgattcattaagaaaagagttcgaccgctgcattatccgttgtatcaagcaccccgaagactatgaggtatttggagtgaatatgcaagctggcttcctgctgtttggacctcctggttgcgggaaaacactaatagcaaaagcagtggcacatgaggcaggggctaactttattcacatcaaggggcctgagctattgaacaagtatgttggggagagtgaatcggaagttaggaaaatattcactcgtgcacggactaactccccatgcatcctgttttttgatgaggttgatgctttgacaac

SEQ ID NO: 15191 - DNA, 251 bp, Zea mays
  Clone ID: LIB3059-044-G11_FLI
aaatttactctgtcctgcctcttgcggtgttcagtgctgtgcttgcttgcttgttgctagttgctttgctacccaataatctgaatggaaggacgtatgtgatgtgcctgctgaatagttcctagtccttgcatacactgctgtgctaccacatgacatgatgtactcgtgtgtgtgctttggttgttgtgtaattccatgaccatgatcagtaatctgaataaaaaatattggagatgtgcttgcttcct

SEQ ID NO: 15192 - DNA, 1226 bp, Zea mays
  Clone ID: LIB3059-044-H2_FLI
ggagccgtgctcgcatgtgtgttaagcccagccaacacaagtcaagtcggagcccgcaggtgtcgacaccgcgcgccgggagccggaagaagggtggaccatgagcgcgaccgggcgagccccgtgcggcctgccgcgcatcggcctgggcacggcggtgcagggcccgcggccggaccccgtccgcgccgcggtgctgcgcgccatccagctcggctaccgccacttcgacacggccgcgcactacgccaccgaggcgcccatcggggaggccgccgccgaggccgtgcgcacggggctcgtcgcctcccgcgaggacctcttcgtcacgtccaaggtctggtgcgccgacgcgcaccgggacagggtgctcccggccctccgccggacgctcagcaatctccagatggaatacgtggacctgtacatggtgcactggcccgtgaccatgaaggccgggaggttcacggcccccttcacgcccgaggactacgagccgttcgacatgcgggccgtgtgggaggccatggaggagtgccaccgcctgggcctggccaaggccatcggcgtgtgcaacttctcctgcaagaagctcgagaccctgctctccttcgccaccatccctccggtggtcaatcaggttgagatcaacccggtgtggcagcagcggaagctgagggagttctgcagggcgaagggcatccagctatgcgcctactcgcccctgggcgccaagggcacgcactggggcagcgactcggtgatggactccggcgtcctgcacgagatcgccatgtccaagggcaagaccgtggcacaggtgtgcctgaggtgggtgtacgagcagggcgactgcctgatcgtgaagagcttcgacgaggggcggatgaaggagaacctggacatcgtggactgggagctgagcgaggaggagaggcagcgcatcagcaagatcccccagcggaagatcaaccagggccgtcgctacgtctccgagcacgggccctacaagtccttcgaggagctatgggacggcgagatatgatatgagtaaacgttacgtcggcgccccgctaggcggctgccttgcgtgacggagcaacgagctccccgttgtgacagtgagcggctgcttttgtggttttatgccgtgccatctgtgcaacaaaaagtgatgctttagtgtcacagtatgtgtgaaataaattaaaaaggattttctagtt

SEQ ID NO: 15193 - DNA, 798 bp, Zea mays
  Clone ID: LIB3060-003-A9_FLI
ccacgcgtgccgcacgcgaagaaaaggagatagagtacaggttacagagaggcagagagcaaagatgtgtggtggtgcgatcctcgccgagctcatcccgactacgccggcccgccgcggcggcgcggcgtggcccgccggcaagtgcaagcggcggaaggcggacgacttcgaggccgcgttccgggagttcgacgaggactccgcctccgccgccggggcccccgccagccgcaagcgcgcccgcgccgccgacgccgtcatcgacctcgaggaacaagagcagcgcccggccgcggcggccctgaagcacgaggccgccgagtgctccggatccgacgcgctcccggacttctcgtggcagggcgtgtcggcggcctacgacgagccccccgcgccgcgcccggccttcgacttcgaggcgcggccggagagcgccgcggacgaggcgtcgccccgggcctccgactccgagtcggacgcgctgttcgactcgctcctcttcggcgaccagttcgccttcttcgacgccggcgcgtacgagtcgctggacagcctgttcagcgccgacgccgtgcagagcaacgccgccgcggcggcggaccaggacatgccgctgtggagcttcgacgacggctgcctcgtcgaggacaacctctcgttttaagcttcggcgactgctgctgtgtcttgagttttgtaaattacgacctgttttttttttagtttctgctcatgtatatctgtatcgatgccgatggtgagctgaatgaaatcatccttgtccggaaggaaaac

SEQ ID NO: 15194 - DNA, 2364 bp, Zea mays
  Clone ID: LIB3060-003-B1_FLI
ccatcaggttagcaagaccaacaaatgcaacactgatacgttcccttcgaagttcgaacccacctcccatggccaccgtcgactgccccctgccctctcccgcggacctcgacgacaacggattcccggctctaccctcctcccccgctgcctgtagcagcggcttcgcggaggatttctaccgcagcggcaccgactggtcctccttacgcgcccctccgccgctggggccgcccagaagggcacccggtgtgaaggagagaggaggcggctcggccgtgcagagcagcctcttccaggcgtgggggatcgagaagccgcggcgggacgggcgtggggctggggattcatcgcttgtgcagaggagcctcttccaggcatgggggatcgagagaccgcagagggagggtctcggggctggagattcctccccctcctcctccctatccggttctttgttggcaaggaagcggaggcgaggaagcactgaggaggagcgggtggcggccaagaagcccctcgcgtgccccttctacaagaagattcctggcacaccattcacggtggatgcatttcggtatggacaagttgaggggtgctcggcctatttccttagccactttcatcatgaccattacggtggattaaccaagaaatggtgccatggtcccatctattgttctgcactcactgcacgcctagtgaagatgtgcttgtcagtaaattccgactatatctgtcctttggagcttgataccgagtatgtcatagagggagtgacagttaccttgctggaggccaaccattgccctggtgcagctctaatccacttccgactaagtgatggaaagacctgtctccacactggggattttagagcatcaaaaactatgcaatcgcatccacttctccagagaggccgagtaaatttggtttacctggacacaacatattgcaatcccaagtacaagttcccaccccaggaggatgttattgattttgttgtgagaaccactcgaagatatctaaagaaacaaccaaaaaccctcattgttgttggggcatatagcattgggaaagagaatgtgtatctagcaatttcccaagctttagaggcccatatatacactgatgcatcgagaaggcggattctctactcatttggctggccagatttgtccaaaaggctatgttcatgcaatcaaagttcatcacttcatgttctgccccttggatctataaatcatgagaacttgaagaagtacttggagactcttaatggaagattcctagctgtgctggcttttcggcctacaggttggactttctctgaggcaactggaaagcatcttgacctaataaaaccaagctctaatgccaatgtaacaatctatggtaggatttgttggttatactgataatacttttcctctcatttattgctaatgaatggtcaataagaacccaaactattccgaacaagatttttttagtataaacagtctggacttatcctttgtcaaatatagactgagtttattgatctcctgaatttaaaactcggctgtggagggaaagatcggtctcccggtattatattaagaagagaccgaaatatggtcccggccgagaaaattcccgaaccttggcccctcatcattagcgggccgtcaccgcccactctgcaacggcccaaccggagggtaacgcgcaagacgtaacccagaagcggacggagcacaacgaggggattttttaaccaagcccgaaatttgcccccgagggggatcgaacccgagacctggaggtgtgccttatagcgagcattcaagtttcactgagcttagggattttgtgatgtttctgaaacctcaaaagataattcctactgttaatgttggcaatgcgacaagccgagataaaatgcaagcacatttccgggaatggctgaagagcccgtgataaatatatcctgatcatgttttttctatatcggcgtcaactcgactccactcaatgaggtacggctgtataccatccttacactcagttcactataacgcctcttttcttcactttatttgttggacttcaacgaatgttgattcttttatgccagtgacacagtcatggtacggaaaagaagtggatatatttttaaaggttggtttgcttggtactaaaaatgctatgtttagagtaccacttttcccaacattattccgagattcgttttgtggaacttatctcatttgagaggtaaatgtattgtttctcgcttgtctggcatttctttgcaagggaactgtaagatgaagaaatattgatttgaattactgtttatcaaaacccattatcagcaac

SEQ ID NO: 15195 - DNA, 2313 bp, Zea mays
  Clone ID: LIB3060-003-B11_FLI
ttggaagtgggaggtgggtatccttcctccactgtcctttttcatctctctctctctcttttctctctctaaaagactttgctaattggcctgctagccggtctccctcccccggcctctttccctttcagctggaggagatagatgagagagaggatcagaggaagcaggaaggagagagggatatataggccggtgtcttctgtagagagagagattgagagcaaaagggaaataaaggagctctcgcaggcactcggtactgacatgagtgatctcatgctcttgataccttggtactcttacatcaccccttcttcaccttcttcttgttcttgctcatccctcctctccggccctctcttcctcctgcctctctctagctaggacgatcttcaacaaccctctccccctctaattctctttccccatatagagagaataaaggagagagagaggcgaaggcaggcagctaattttcttttgttcaagggaaaggacagcacgtgccggagctcataagctggtagctgcatcagttcctgaggcaaaaccacctgcttacgatcttgcagtcatcatcacgctattagttgaggataatttcgcgcacaagagcacgacaagccgagatttttgggggcgtcggcgtcgacctgtaggcgatggcggcgtactaccacggtggcgccggcacggacatccaggccagcaccgacggcctgcagacgctgtacctcatgaacccgagctacgccggcggctacgctgacgacggcggcgcgtccacgccgggggcggccaacatgatgctcctcaactcggccgtgaccaccatgacgccggcgtccttcgcgcaccaccaccagcagcagtcgccgccggccgcgcagcagcacttcgtcggcatcccgctccaggtccaggcgccgccgccgtcgggctacaacctgtggaccccggccatggctggcggcgccgcggacatgtcgccgcaggcgcaggcgcagactcccggcgccgcgggtgctgctggggtcagcgccgtgctcagcctgtcgtcccgcgaggcgccgccggtcaccgtggccgcggtggccgcctgcaccgacgagggcaagtacctgggcgtgtcggccacgccgcaggggcagatggtcatgagctccaagtacctcaaggccgcgcaggagctgctcgacgaggtggtcagcgtcagcaagggcgtcgaggacgctaagacggccgctgccgccgcgaccaagagcctggccgcggtgaagaagaaggaggactcggagggcgcgtcaggtggcggcaccgacgacggtgccggcgcaaagagcggcggtggtgccgcgccagagatgtccacggcggagcggcaggagatgcagatgaagaagagcaagcttctcaacatgcttgacgaggtggagcagcggtaccggcagtaccacgggcagatgcaggcggtgtcgtcgtcgttcgaggcggcggcgggggccgggtcggcgcggacgtacacggcgctggcgctgcgcaccatctcgcggcagttccggtgtctgcgggacgcgatcgcgtcgcaggtgcgcgcggcgagccgggcgctgggcgaggacgcggacgccgccgtcgccgggggccgcaccgtggggtcccgcctccgctacatcgaccaccagctccggcagcagcgcgcgctgcagcagctcggcatgatgcagggcggcgcctggcggccccagcgcggcctccccgagcgctccgtctccatcctccgcgcctggctcttcgagcacttcctgcacccataccccaaggattcggacaagatcatgctcgccaagcaaaccgggctcaccaggagtcaggtgtccaattggttcatcaatgcgagggtgcggctgtggaagcctatggtggaggagatgtacctggaggagacaaaggaccaggacgctggaggcggcggcaacgacgagggcaagtccggtggcggcggcagcaagagcagcgacaccgtcgacggcgtcatgccgagggcggacgtgatgtccaagtccgcggtgcgcgtgggaggcggcggggcgggggcggagagcgcgtccaccaacaagggcatccatggctcctccctgctcgagctcggcggcggcgatcaccagcagtcccacgcggggttctacgacgacgatgaagacgacggcgacgacgtgatggggcggaggctcaagaaggcgcgcggcaacgagccggcgccggcgttccaccacgtgcacgacatagccacgctgcacgcgcaggccg

SEQ ID NO: 15196 - DNA, 1076 bp, Zea mays
  Clone ID: LIB3060-008-H4_FLI
catgatgtcgccatggattactatggcaagcgcctagctacatcctcctctgataatacaataaagatcattggcgtaagtggaacctcacaccagcagcttgcaactttgagtggacaccagggcccagtatggcaagtcgcatgggctcatcccaagtttggttccatgcttgcatcctgcagctacgacggccgagtgatcatctggaaggaaggaagcaagcctgatgaatgggcactggtacacacctttgctgagcacaagtcctccgtgaattccatcgcgtgggcgcctcatgagctgggtctatgcttggcttgtggttcatcagatgggaacatttcagtcttcactgctcgttctgatggaggttgggataccacgcgtattgatcaggcgcatccggttggtgtgacctcagtttcttgggctcctgcaatggcaccgggagctctaatcagcgcggggtcttctggtcagtttgagtatgttcagaaactcgcttccggtggctgtgacaacacggtgaaggtgtggaagctcaacaacggcagttggcggatggactgtttccccgccctacagatgcacaaggactgggtgagagacgtcgcgtgggcgccaaacctgggccttccaaagtccaccatcgccagcgcctctcaggatggaacagttgttatctggacagcagcaaaagaaggcgagcagtgggaaggccggttgctgtatgatttcaggacccctgtgtggaggctgtcgtggtcactgactgggaatatactggcggtgtctgacggcaacaacaatgtgaccctgtggaaggaagctgtggacggcgaatggcagcaagtgacgactgttgagccataggtctctagagttgtccctcgtctatattgccttaatacttgtagtttttgtgtacctatggccctgtgtgggtagcaagcaggccacggtgcatgactacttgagacgtgatttcaggctcgggcagaagtgaaaaatgaacttgttgtatatgtggagcattctgtttctcgattcagtgccttttctttcccatggtt

SEQ ID NO: 15197 - DNA, 1417 bp, Zea mays
  Clone ID: LIB3060-009-A6_FLI
agaagggaaccgaaaccaagcaacccaatccaaaccagacaagcaaggaatcccccgatggctcatcgcgttctcctcctcctctctctcgcgtcggccgccgcggttgccgccgccgtcgacgcggaggacccgctgatccggcaggtggttcccggtggagatgacaacgatctggagctgaacgcggagtcccacttcctgagcttcgtgcagcggttcggcaagtcctacaaggacgccgacgagcacgcgtaccggctgtccgttttcaaggccaacctgcgccgcgcgcgccggcaccagctgctggacccgtcggcggagcacggcgtcactaagttctccgacctcacgccggcagagttccgccggacctacctcggcctccgcaagtcccggcgcgctctcctcagagaactcggggagtcggcgcacgaggcgcccgtgctccccaccgatggtctccccgacgatttcgactggagggaccacggcgccgtcggccccgtcaagaaccagggttcgtgcgggtcgtgctggtcgttcagcgcgtctggagcgctggagggtgcgcactacctcgcaactggcaagctggaggtgctttcggagcagcagttcgtcgactgtgaccacgagtgtgattcatcggagcctgattcatgtgattcgggttgcaatggtgggctaatgacgacggcattcagttatctccagaaggccggtggccttgagagtgagaaggattacccttacactgggagtgatggcaaatgcaagtttgacaagtccaagattgttgcttcagttcagaacttcagtgttgtgtctgtggacgaggctcaaatttctgctaacctcatcaaacatgggccattggcaatcggcatcaatgctgcctacatgcagacatacatcggaggcgtgtcatgcccatacatctgtggcaggcaccttgaccatggtgttctccttgttggatatggtgcttctggtttcgcccccattcgcctgaaggacaagccttactggatcatcaagaactcgtggggcgagaactggggggagaacggatactacaagatatgcaggggttccaacgttcgcaacaagtgcggcgtcgattccatggtctctaccgtgtccgcagtccacgcctcgaaggagtagactctggtcagcggtgataatcgtgattccatatattgtagaactataatccctgctagtaatccatttgtgctgtttatgtatcgaaggcagcaaagatgtgtgaagcggcaatgggatgcttgctgtaaggtaatatgtttggcttgctaggcatgctacacgctatttggatgtagcaacgttatcaccagctgtatacgctttttaatcgccaacatttgaataatatgtacataacatt

SEQ ID NO: 15198 - DNA, 1643 bp, Zea mays
  Clone ID: LIB3060-018-A10_FLI
agccctctcttccattccagccttcccaggccagctgcaactactggctcatcaccagaaaccagaacgtacgccggcaacccatctccctgaaatggccgctgtggagccccggcagttcgggcgtctggagccgggctcctcgccagtgcgcgtggccacgaacggcgccaaggcgtaccctcctccggcaagccacctcccgcggcgcgctgactcccctgtccgcggctgcagcttccctcccctcgtctccccgccgcgcaggctggacgacgcgtcggacgacgaggacgaggagcaggaggactggcgagagctgtacggctcgcacctgcagctggaggtggagcccgcggtgcaggacgcgcgcgacgaaggcaccgcggacgcgtggatcgagcggaacccgtgcctggtgaggctgacggggaagcacccgctcaactgcgagccgccgctggcgcggctgatgcaccacggcttcatcaccccggcgccgctgcactacgtgcgcaaccacggcgccgtgccgcggggggactgggcgacgtggaccgtggaggtgacgggcctcgtgaggcggcccgcgcggctcaccatggaggagctggcgcgcgacttccccgccgtggagatccccgtgacgctggcgtgcgcgggcaaccggcgcaaggagcagaacatggtgcagcagacggtgggcttcaactggggcgccgccggcgtgtccacgtccgtgtggcgcggcgcgcgcctccgcgacgtgctccgccgctgcggcatcgtgccccgcaagggcggcgccctcaacgtgtgcttcgagggcgccgaggacctccccggcggcgggggatccaagtacggcaccagcgtcacgcgcgagtgggccctggacccgtcgcgggacatcatgctcgcctacatgcagaacggcgagccgctgctgccggaccacggcttccccgtgcgcgtcatcatccccggctgcatcggtggccgcatggtcaagtggctcaagcgcatcatcgtcacccccgccgagtccgacaattactaccatttcaaggacaaccgcgtcctgccgtcgcacgtcgacgccgagctcgccaacgcagaagcgtggtggtacaagccggagtacatcatcaacgagctgaacataaactcggtgataacgacgccggggcacgacgagatcctgcccatcaacagcattaccacacagcgcggctacaccatgaaaggatacgcctactccggcggcggcaagaaggtgacgcgggtggaggtgacgctggacggcggcgagacatggctggtgtgccacctcgaccacccggagaagcccaacaagtacggcaagtactggtgctggtgcttctggtccgtcgaggtggaggtcctcgacctgctcggcgccaaggagatcgccgtgcgcgcatgggaccagtcgctcaacacccagcccgagaagctcatatggaacctcatggggatgatgaacaactgctggttcaaggtgaaggtgaacgtgtgccgtccgcacaagggcgagatcgggctggtgttcgagcacccgacgcagcccggcaaccagcccggcgggtggatggcgcggcagaagcacctggagacggcgg

SEQ ID NO: 15199 - DNA, 1132 bp, Glycine max
  Clone ID: LIB3055-009-G7_FLI
gtgagcttccagttgtattcatggacttaccggagaagcttttctttgcagcatttctcattctttcagtggccattgatggaacgcaggcagacaccatggtcactggcactgtcttctgtgaccaatgcaaagacggacagagatcccttttcgattatcctattaatggtgcaaaagtaactctgtcctgtgctgacagtaatggacaaattacaatgtcaagagaagaaacaacaaactggtttggaagctatacaatgaggttcgatggcgcacccgacttgagtggttgttctgcccatgtctcgggcagtggtcaagggtcaacgggttgtggtgaagtggctggtccttcacaaaatccaaaactcatgtttaggatgtttgacatggagatgtatacagtggattctctccttgctcagcctgcacaacccatgcagtactgttctacatcttccaacccagtcccagcaccagacacaccaaccaagcctccaccacatttcaatctacctccagtaccaggatttccgccattgccgccattgccacccctgccacccctgccatcactaccacccctgccatcattgcctcccctgccatcactgcctcctctgccaccagtgatttttgcagaagcttcagcatgtccgtcagagaagtggacactgccagaatacaaatgctactggaggggtgtgaacggggacacaaaagtagcagtggcatttggaatggttgcggcgaggagatacggaacagacattacactgtggcatgggttgaaagggagaggagacccttacaggactcttctcagagaagggatcacagcacttcttaactcctataacagctttcaattttcttatcatccactcggcgtcgtccaacacatgaatttggctttgatgggctccactaggagtgtcctgcttactgctctacgcttcaagagggccaattctggtgctggaaatgtcacctgcaaattcaccacttgcaaataattactaatttataggcttcttcctttatatctagcacgtttaattagaaaggattattttgggggaaataatcccattaaaaatgcacaatagaaaattgaatattcttgtat

SEQ ID NO: 15200 - DNA, 970 bp, Glycine max
  Clone ID: LIB3055-012-B3_FLI
ggaagagagggcgtaagccggcgaacggaagagaggaaccattaaaccatgttgaagcagagagacagaggagggagaagctgaaccagaggttctacgcgcttcgtgctgtggttcccaacgtgtcaaagatggacaaagcgtcactcctgggcgacgccatatcttacatcacggagctgaagtccaagcttcagaccctcgaatcagataaagatggaatgcagaagcagctggaaggtgtgaagaaggagctcgagaaaacaaccgagaacgtttcttctaatcacgcgggtaatagtagtagttgtaacaacaacaacaagttgtcgaatcagaagttaattgacgtgttggagatggacgtgaagatacttgggtgggacgcgatgataaggatccattgcagcaagaagaaccaccccggggcgaggttgttgacggcattgatggagttggacttggacgtgcaccacgccaacgtaaatttggtcaacgatatgaccatgctacaagcaacggtgaagatgggaagtaggttttacacgcaggagcagcttcgtgcggctctggcggctaaggttggggatgcacgatgatgttggctctgcactttgcggcagcgtttgagattatgtgtgtgtttgtgtcgtgttattagctagctagctctttgtaagttgtgctgctctgggatattttaagccttcccggtagctgtttctgtaaaattataagctttttttctttattgggtagcttagtattgaattttgaggtaatcaaattgggaagctccatggagtagtagaactagctagggacacttttcatcaaatctgtgggtggagtggagatagcagcagctatatgtggaaataggggtaattttatctgttttagattgtgtatatattataataatatcataaatgtgaacagcatcatgcaagttctcaatattattatt

SEQ ID NO: 15201 - DNA, 353 bp, Glycine max
  Clone ID: LIB3055-013-D7_FLI
caacagtgctgtcatagtcggtctcttatcaagtttagttaccacgtcttctgccgttcaatcctttacctaagctgtagcttcctatccgtcctgagttgcacttgttgacgtagatttatgttttttgttgctttattcacttcccaatccttacaaatgaagtgttgtcaaaagcacgaaacataatattgtaacgatatgcatgattgtatgagtgtaaaccctgaggtttggataggtttatcgtgaatatgtacgggtgtagtttgctttggcattattagctcagcaggtgtggagctattttgttgtagtatgtagagcaaatctttaaaatttattattattat

SEQ ID NO: 15202 - DNA, 1675 bp, Glycine max
  Clone ID: LIB3055-013-G12_FLI
aaattgctatgctatgctaagctaagctggaaagaaaaaaggccctctgagtgagtgagagtgtgtggttaaagaggagaggaagaagagaagaggaggcggtgcgcaccttagcatggattcctctccgtcatcttctctctcctctctcgcttcgtccccacggcaccatcgtcctctctccaattgagaaaggcaccgattcccattctcattctcactctggctgacataaaggcaacccttgcctctctctcttccatcgatttcaatttctacggcaacaggaaaagcaagaagaagaaggccaggctctgctttggtttccgccgcgtcaaaatgctgtggctgatgagattctcgggcttcttctccgccgcaatgctcgtcattctcctctccccctccctccaatccttccaccccgccgaagccatccgctcctcccaccatctcgacggcctcctccgcctccctccgccgcgcctctccttccgccccgccgctccattccgcaatgccgccgacggtaaatgcgcctcctccgttcccacctccgtctgcgacccctccctcgtccacgtggccatcaccctcgacgtggagtacctccgcggctccatcgccgccgtccactccatcctccaacactcccagtgcccggagaacatcttcttccacttcctcgtctccgaaaccaacctcgaatccctcgtcaaatccaccttcccgcaattgaacttcaaggtctattacttcgatccagagatcgtccgcaacctgatctccacctccgtcagacaagccctcgaacaacccctcaactacgccagaaattacctcgctgacctcctcgaaccctgcgtcgagagggttatatacctcgactccgatctggttctcgtcgacgacattgccaagctctggagcaccagtctaggttctagaaccattggcgcccccgagtactgccacgccaacttcaccaagtacttcaccgcagggttctggtcggacatgcgcttcgccagcgcgttcgcggggcggaggccgtgctatttcaacacgggcgtgatggtcatagatctggtgcggtggcggaaaatcgggtacagcaagaggatagagaggtggatggagattcagaagaacgatcggatctacgagctgggttctttgccgccgtttctgttggtgttcgcgggacgcgtggcgccaattgagcacaggtggaaccagcatgggttgggtggcgataacgtgaaggggagttgccgggacctgcacgctgggcctgtgagcctgttgcattggtccggtagtggcaagccctggacaagattggactccaagcacccctgtcctcttgatgcactttgggctccttatgatttgtacggacacgctcactgattagcctttgccttctccctgctcgccggtaaattcccttctctgtcacttctgttcatttaatttaattctcattccgcccaatttttattttttcttattattttcttccctcttctcttctctttactatcaacagacagatcagatattttacttcacccatttttattagtcttcgttacccaggccatttgtattctacagtatcttctattttgtgcttcgtgctctggaaataaataagataataaaataaagg

SEQ ID NO: 15203 - DNA, 1296 bp, Glycine max
  Clone ID: LIB3056-002-C2_FLI
attcaattctgttcatcctttgcttcccaaagaaagagaaaataaaaagcaatgggtagccttgaagcggaaagaacaacagtaggattggcagcaagagacccttcagggattctctccccatacacctacaatctaagaaacacaggccctgatgatgtttacataaaagttcactactgtggaatttgccattctgatctccaccagattaaaaatgatcttggcatgtccaactatcccatggtcccaggacatgaagtggttggtgaggtactggaggtggggtcagacgttagcaggttcagagtgggagagttggtgggagttggactcctcgtaggttgctgcaaaaactgccagccatgccaacaagacattgagaattactgcagcaagaagatctggtcttacaatgatgtttatgtcgatggaaaacccacgcagggtggctttgctgaaaccatggtcgttgagcaaaagtttgtggtgaaaattccagagggtttggcgccagagcaagtggcaccattactgtgtgcgggtgtgacagtgtacagtccactggtacactttgggctgaaagagagtgggctgagaggtggaatattggggcttggaggagtgggacacatgggggtgaagatagcaaaggcactgggtcaccatgtgactgtgataagctcttctgacaagaagaaacaggaggcacttgagcaccttggagctgatcaatatcttgttagctctgatgtcactgccatgcaggaagctgctgattcacttgactacatcattgacactgtgcctgttggtcaccctcttgagccttatctctctttgctcaaacttgatggcaagttgatcttgatgggtgtcatcaacacccctcttcaatttgttagccccatggtcatgctagggaggaggtcaatcacgggaagctttattgggagcatgaaggagacagaggagatgttggagttctggaaagagaagggtctgagttcgatgattgaagtggtaaacatggattacattaacaaagcctttgaaaggttggagaagaacgatgtgagatacaggtttgtagtggatgtcaaaggcagcaaacttgttgattagtaaaagaaagtataccagcacgacacccgcaacatccatccatcatcatcaagagtctggaaaagtttttcattgaactaaagctgtgtttgtttattaaaaagagtgctctgttttctctgttttggttacacgccgttcattaaaatatttgatatcaaattctcgtgg

SEQ ID NO: 15204 - DNA, 1201 bp, Glycine max
  Clone ID: LIB3056-002-E4_FLI
ggaatttttagcccaggtttcaatggtatcaaggctgaagcatgaaaattttgttcagttgcttggatattgcattgatggaacctcccgtattcttgcttatcagtttgcatctaatgggtctcttcatgatattttacacggcagaaaaggtgttaaaggagcacagcctggtccagttttgacatgggcacaaagagtaaaaattgctgtaggggctgcaagaggacttgaatacttgcatgagaaggctgatccacacattattcaccgggacatcaagtcaagcaatgtgctaatctttgatgatgatgttgctaaaattgcagattttgatttatcaaatcaggctcccgacatggctgcacgtcttcattctactcgtgtccttggaacctttggttatcatgctccggaatatgcaatgactggacaattgaatgctaagagtgatgtatacagttttggcgttgtccttctggaacttctgactggaaggaaacccgttgatcatacactaccacgtggacaacagagtctggttacttgggctacaccaaaactcagtgaggataaagtcaggcagtgtgttgatacaagactaggaggagaatacccacccaaagctgttgctaagatggccgctgttgctgcactgtgtgtgcaatatgaagctgatttcagaccaaacatgagcattgtagtcaaagctcttcaacctttgttgactgcacgacctggacctgccggtgaaacaccaaattaatctttgtatcactttctctctatatttgtgagtatgtgcacaagtgtgcatgcaaaatataagagactgcttcagaagctggtggtaaattgctcagacatgactctatatcccattgtttacactgcattcattttgttcataatccatgaggttctttgcggttttcttgcttttattcattttattgtatttgctttctctattttttcccccttctatccttttacttctgggatgattgtcatctttacgatgaagtgttgggaaaaactacaaaacagaattgtgtatactcaaagctaagagcaagtcaatggactatctctactggaaacagttattcaccaagagccgttcttatcagattgattcttttaattttttcttaaactgtttgtcaaattgagacttgtataaattactcataatttc

SEQ ID NO: 15205 - DNA, 1124 bp, Glycine max
  Clone ID: LIB3056-003-D6_FLI
ggtgttcatctttcccccactgacatttcttctcagcttccaacacagaaccctgatgcacccgttatgttggaccgcattttgcggctcttggcttgctacaatatcctttctttttctctccgtactctccctgatggcaaggttgagaggctctatggtctcgcccccgttgctaagtacctggtcaagaccgaagatggtgtctccattgctgctcttaacctcatgaaccaggacaaagtcctcatggaaagctggtactatttgaaagatgctgtccttgaagggggtattccatttaacaaagcatatggaatgacagcctttgaataccatggaacagatccaaggtttaacaaggttttcaacaaggggatggctgatcactccacaatcacaatgaagaaaattcttgagacctacactggctttgagggtcttaaatctctggttgatgttggtggaggaactggagccgtagtcaacatgattgtctcaaagtatcccactatcaagggcattaattttgatttgccccatgtcattggagatgccccatcttatccaggagtggagcatgtcggtggagatatgtttgtcagtgttccagaagctgatgctatttttatgaagtggatttgccacgattggagtgatgagcactgcttgaagtttttgaagaactgctatgaggcacttccagacaatgggaaggtaattgtggcagaatgcattcttccagtggctccagactctagcttggccacaaaaggtgtggttcacatcgatgtgatcatgttggcacataatccaggtgggaaagagagaacagagaaagagtttgaggctctggccaaagggtctggattccaaggtttccgagtcctgtgctgtgctttcaatacctacgtcatggagtttctcaaaaaggtttaagttctttggcgtggattcataagttgcatttgagttttgactttgagactctgcatgtggtgctacttacaaaagctttcccggaaaaatgtaaatttctcttaattcattaggaaaagaataataaacaagttcaatgtatactgccttttatataataacaagtttcatactgtggtttatac

SEQ ID NO: 15206 - DNA, 1409 bp, Glycine max
  Clone ID: LIB3056-004-C1_FLI
caaacagaaaatggtgaactccggcagcgaagacttggcgacccatcagcttcaacaggctataactgaacagcttttcaaagctgcagagctgatcgatgccggtaatctggaactcgcgcatgggatattggcgcggctcaatcaccaactttctcccattgggaagccttttcagagggctgctttttatttcaaagaggccttgcaattacttctccatccaaatgccaacaacagttctttcaccttctcacccactggccttttgctcaagattggtgcttacaagtcattctcagaaatctcaccagttctgcagttcgccaatttcacttgtaaccaagcactgcttgaagctgtggaagggtttgatcgcattcacataatagattttgatattgggcttggtggacagtggtcttctttcatgcaagagttagcactcaggaatggcagtgcacctgaactcaagatcactgcatttgtgtcaccctcccaccatgatgaaattgagctcagtttctctcaggagagtttgaagcaatatgctggggagttacacatgtcctttgagcttgagattctgagccttgaatctttaaattctgcttcctggccccagccacttcgtgactgtgaagctgtagtggttaacatgcctattggctctttctcaaattacccatcatatctacctttggtccttcgctttgtgaagcagctcatgccaaaaattgtggttacattggatagaagttgtgatcgaactgatgcaccatttcctcagcatctgatttttgcacttcagtcttattcagggctgcttgagtcacttgatgcggttaatgttcacccagatgtccttcagatgattgagaagtattatcttcagccatcaatggagaagcttgtcttgggtcgacatggtttgcaggaaagagcacttccttggaaaaaccttctcttgtcatctgggttttcaccattgacctttagtaactttacagaatcccaggcagagtgtttggtgcagaggactcctagtaaggggttccatgttgagaagaggcagtcttcccttgttctttgctggcaaaggaaggatctcatctcagtttcaacttggagatgctaagcagagccattttgcacctttgaactaccaatttaattttaaattctaaagtgctacataacttacagcttctattgatctttcttgcttgaatttgccttgtctatggttctatgctaattgtctgtttttaggatttattattttcagttaaggaagggaagtgaacatattaattagcaactgaatgacgatttatgagcgtgatatgcagtgtattattataaataggggcattctatatatgcattttgtcctgttttaattgcct

SEQ ID NO: 15207 - DNA, 1100 bp, Glycine max
  Clone ID: LIB3056-007-B12_FLI
ggaatttccaaggtaccccaattggtgtttcaatggataacacccgtttagccattgcatcaattgggaaacttatgtttgcccaattctctgaacttgtaaatgacttctacaacaatggtttgccttcaaatctaacagctagtcgcaatccgagcttagattatggattcaaaggtgctgaaattgcaatggcatcctattgttcagaacttcaataccttgccaatcctgtcaccaatcatgtccaaagcgctgagcaacataaccaagatgtgaactctttaggcttagtttcttcaagaaagacagctgaagcaatagatatattaaagcttatgtcatccactttcttagttgctttgtgccaagccattgatttgaggcatttggaggaaaacttgaagaacactgttaggaataccgttagtcaagtggccaaaagagttctcacagttggcatcaatggtgagttacatccttctaggttctgtgagaaagacttgcttaaaattgttgatcgtgagtatgtctatgcttacattgatgacccctgtagtgcaacctaccctctgatgcaaaaattgagattagtcctagttgatcatgcattacaaaatggtgacaaagaggtgaattcaagtacctcaattttccaaaagattggtgcctttgaggaagagctcaatgcccttttgccaaaagaggtggaaagttctaggattgaagttgagaatggaaatcctgccattcctaaccgaattaaggaatgcagatcttacccattatataagtttgttagagaaaatttgggtacaactttgctaacaggagagaaagtcaagtcacctggtgaggaatttgataaggtatttactgcattgtgtgaagggaagttaattgatcctttgttggactgtctaaaagagtggaagggtgctcctctaccaatatgctgagaggctgctaccttttttcgtaagaaaaccaaaatttacttttcattttcctatgatgtatgtttttataaagctattggacatgtatttgaaactgttataggaatttgtatttcaatttaatatatgttctttatctgt

SEQ ID NO: 15208 - DNA, 1063 bp, Glycine max
  Clone ID: LIB3056-008-B4_FLI
cagatggtatcatcctcgctcgtggaaatttagggatagaactcccacctgagaaggttttcttattccaaaaggctgctatttacaagtgtaacatggttggaaagccagttgttgttacacgtgttgtggactctatgactgataatctaagacctactcgtgctgaagcaacagatgttgccaatgcagtgttggatggaagtgacgcaattctccttggagcagagaccctgcggggacaataccctgtagagaccatttctatagttggaaaaatatgtgctgaggcagagaaagttcataatcaagatttgtattttaagaaggctgtaaaatatgtgggagagccaatgagccatttggaatcaattgcttcctctgcggttcgggcagctatcaaggttaaggcctctgttattatttgcttcacttcatctggaagagctgcaagattgattgctaagtacagaccaaccatgcctgtgatatctgttgtcattcctcaattgaagacaaatcaactccgatggacgttcaccggtgcttttgaggctaggcaatctcttattgtgagaggtctttttcctatgctggcagatccacgacacccagctgagtccagaagtggaacaaatgaatcaattttgaaggttgctttagaccatggcaaggcttttggcatcataaagccacatgaccgagttgttgtctgccagaaagtagctgactcgtcagttgtgaagattcttgagctcgaagattgaatgattacaacttatgcgttatttgatgcataataataaagattcttgggcttgtgtttgataatcggagcgatatccagttttgaaatcaagcatggtgtgctgatctttcggctacttatgttgtttaatagtaaaccatccgaattcgaaaacgaaattgattatcttctaatgaattttatgctgaaaagaaaagtatgaattataagacactttgtaaacactgagtgtgccagataaacttgtgagattattttagcttaatcatgagttcaaagtatacaattgtgttg

SEQ ID NO: 15209 - DNA, 2113 bp, Glycine max
  Clone ID: LIB3056-008-C11_FLI
gttgatagtagctctgctgtcgggttgggtttcgggaagaataaggttagggagatggttgtcgggagggatgatctttgggttgtcgggatttccgggattggtggttccgggaaaaccactcttgctagagagctctgcaaagatgaccaagttagatgttatttcagggataggattttgttcctgaccgtgtcgcagtcaccgaatgtggagcagctaaggacgaatatttgggagtatattatgggcaacgagaggttggatgcaaattacatggttccccaatggatgccacagtttgagtgcagaagcgaagctcgaactctgattgttttggatgatgtgtggacactctccgtggtggaccagcttgtgtgtagaataccaggttgcaagtttcttgtggtgtcaaggcctaaattccaaacggtgttgagttatgaagtggaattgctgagtgaagaggatgccctgtctttgttctgtcaccatgcttttggacagaaatcaattcctttagctgctaatgagaatttggtcaagcaggttgtgactgagtgtggaaggcttcccttggctcttaaggtgattggagcttctttgcgagatcaaactgagatgttttggttgagtgttaaaaacaggctatctcagggccaaagtattggggaatcccatgaaatcaatctgattgacagaatggcaatcagtatcaattaccttccagagaagatcaaggagtgctacttggacctgtgttgttttcctgaggataagaaaatcccccttgatgttctcatcaatatatgggtggaaatccatgatattcctgaaacagaagcttatgccattgtggtagagctctccaacaaaaatctcctcaccttaatgaaagaggctcgtgctggaggcatgtatagcagttgctttgagatctcagttactcaacatgatgtactgagagacctggcccttaatttcagaaaccgtgagagcattgatgaacgccggctattagttatgccaaaacgggagaatggaatgcctaaagagtggttgagatacaggcacaagccatttgaggctcagattgtttcaattcacacaggtgaaatgaaggaagtggactggtgtaatctagaatttccaaaggctgaagtgctgatcattaatttcacatccactgaatacttcttgccccctttcatcaatagaatgccaaatttgagggcattgataataataaactacagtgcaacatatgcttgccttcacaatgtttcagttttcaagaacttgtccaacttaaggagcctctggcttgaaaaagtttccacccccgagttatcaagcattgtcttggaaaacttgggaaaattatttattgtcctgtgcaaggttaatgacagtttggtggaaaaagaagtagacttggctcaagtcttccctaatctctttgagctcactcttgatcactgtgatgatctaacccaattgccctcaagcatttgtgggatgaagtcactccagaacttgagtctcaccaactgccacaatttgactgaattaccagttgaactagggaaactaagatctctagagatcctacgtttatatgcttgtccttatctgaaaacacttcctaatagcatctgtgacatgatgagattgaagtatattgacatttctcaatgtgttaacttgacatgcttccctgaaaagattggtagattggtaagcttggagaagattgacatgagggaatgctccatgattagaaatgtgccaaagtctgcagtgtcattgcaatctctgaggcttgtaatttgtgatgaggaggtatctgggatttggaaagaggttgccaagcctgataatgtgcatattcaagtatcagagcaatactttgatttggactggctcaaagagtgacatatatgtgtctatgtttttgtgatattttactttctaatttgatgtttttttttcttctagatcacacggatcctccattagaggtaatactgtatgactattatgaacagaactttccaatttgatgtgaatacttgtacataacttctatttgaagtggaaattatctttttcc

SEQ ID NO: 15210 - DNA, 3049 bp, Glycine max
  Clone ID: LIB3056-009-E10_FLI
gtcgaaaccgtggctataccctgctccaacctatcgaactatagaaaccttctgggtcaccgatgaagacgcacccggccctcgctgtggccacaccctcaccgccgttgccgccaccaagactcaaggcccccgcttgatcctattcggcggcgcaaccgccattgaaggaggatcttcctctgcccccggcattcggttagcgggagtcactaataccgtccattcctatgacgttcaaagtagaaaatggactagtatcaaacccgccggagagccgccgtctcctcgggctgctcatgctgctgctgcagttggtaccatggttgtttttcagggtgggataggtccagcggggcattctaccgatgatctctatgtgcttgacttgaccaatgataaatacaaatggcatagggtcgttgtacaagggcaaggacccgggcctcgctatggccatgtaatggacctggttgctcagagatatctagtaactgtcagcggaaatgacggaaaaagagttgtatctgatgcttgggcttttgatactgctcaaaaaccttatgtgtggcagaagctgaacccagaaggtgacagaccttctgcaagaatgtatgcaactgctagtgcccgctcagatggaatgtttttgctctgtggtggaagagactcttctggagctccactagcagatgcctatggactgctcatgcataggaatggccagtgggaatggacccttgcacctggagtttccccttcaccaaggtatcaacatgctgcggtttttgtcggtgcacgattacatgttacaggtggtgttctcaggggtggacggtccgtggaaggtgaagcatccattgcagtattggacactgctgctggggtttggttagatagaaacggcattgtgtcctcctcacgctcaaacaaaggtcatgattatgacccttctttggagcttatgcgtcgttgtcgtcatgcagctgcagctgttggtgttcatatatttatctatggtggtttaagaggagatatactactagatgatttcctagtggctgaaaattcgccattgcagcctgacattaattctcctgagagagcttcacctgttacaagctccaaacaaaatcaatctaacttaaattataatgtaacaacaccaaatttggatggtggaccagatattccttcatctggtggctcaggcatggacaaaaattccttggagaaactgagggaagcatcagctgctgaagctgaggcagcgagtgctgtctggcaagctgtgcaggctatatcaagtaatcctgctgaagaaacatctgtgtcagatgacaactcacaagctgtggaaacagtttcagatggaagtgatacagagggagatgtccgccttcatcctagagctgttgtagttgcgaaggaggctttaggtaacctaggtggaatggtgagacaattatcgctagatcaatttgaaaatgaaagtagacgcatgattcccgtaaataatgatttgccatatcctacgaaaaagttcaccaggcagaaatctcctcagggtttacataaaaagataatttcaactttgcttaggcctcgcaactggaaagctcctgcaaacaggcggttcttcttggattcttatgaagtgggtgaactttgctatgctgctgagcaaatatttatgcatgaaccgaccgtacttcagctgaaagctcctgtcaaagtatttggtgatcttcatggtcagtttggtgatttgatgcggctatttgatgaatatggatttccttctactgcaggagacatcacctatattgactacctgtttttgggagattatgtcgatcgaggacagcacagcttggaaaccattaccttgctacttgctcttaagatcgaatatcccgagaatgttcacttgatacgtggaaaccacgaagctgctgacataaatgcactatttggttttcgtattgagtgcattgaaagaatgggtgaaaatgatgggatatgggcatggacacgattcaatcaactttttaactatcttccattagctgctcttattgaaaagaaaattatctgtatgcatggtggcattggaagatcgatcaattcagtagaacagatagagaagcttgaaaggcccataacaatggatacaggatctattactttaatggaccttttatggtctgatcccacagagaatgatagtgtagagggtttgagaccaaatgctagaggcccagggcttgttacttttgggcctgatcgtgtcacagaattttgtaagaaaaataaattgcagctcattataagggcccatgagtgtgtcatggatggctttgaacgatttgcccagggacaattaatcacccttttctctgcaactaactattgtggaactgcaaacaatgcgggagctatactggtagttggtaggggtttggttgtagttccaaaattaattcatcccataccacctccccttcagtctcctgagacatctcctgagcgtgttatggatgaaacatggatgcaggagcttaatattcagaggccaccaactcctactcggggtcgacctcagccggaccttgatcgtggctcactagcatatatatgatttgattcacgacttgaataaatactgcatattcgggatttttcatcatcgcttgatatcctgccaaccaaaagttctgtttctaaacctgtcattgttggcagaatacatattttgtactagattcttctttagttgcagaaaagcaaactctcattagcatgcaaatagcttgagagagtgcattattttatgttagccaattagcgaatggcttgtggagattggttttactaggcacgggacatggataaagtggaagagatgctagtggcttctccccctcaacatggggatggataacttagtcagggaataccgatgtttggtatatatattgtatcatagagaaatatatatatatatatatattttttcctttatataaatgttcataacatttagatc

SEQ ID NO: 15211 - DNA, 1833 bp, Glycine max
  Clone ID: LIB3056-010-G10_FLI
aaactcatttctcatctcaatcaatccaatggactctcccaacgctttgtctaccgctccggcagcgggtagtaggaagaacgcgacgctaatttgcgtcccaataatgggagaatcagttgaaaagatggagattgacgtggacaaagcgaaagccggaggcgcggaccttgttgaaattcgattggattctttgaaaacctttgacccctatcgagatctcaacgctttcattcaacaccgttctttacccttgttgttcacttacaggcccaaatgggagggtggtatgtatgatggtgatgaaaataaacggctggatgcacttcggttagccatggagttgggagctgattacattgacattgaacttcaggtagcacatgagttctatgactctatacgtgggaagacattcaataaaaccaaggtcattgtttcatctcacaactatcagcttactccttcaattgaggatcttggtaaccttgtagcaagaatacaagcaacgggagcagacattgtgaagattgcaacaactgccttggacatcactgatgtggcacgcatgtttcaaataatggtgcattctcaagttccatttattggacttgttatgggtgatagggggttgatttctcgtatactttctgcaaaatttggtggatatctcacttttggtacccttgagtcaggagttgtttcagctcctggtcaacctactcttaaggatctattgtatctatacaatttaagacaactggctcctgatacaaaagtatttgggattattggaaagcctgtcggtcacagtaaatcacccatattattcaatgaagtcttcaagtcaattggtttgaatggtgtttatctatttttattggtggatgaccttgccaattttctcaggacttactcttctacagattttgtgggattcagtgttaccattcctcacaaggagacagcacttaagtgttgtgatgaggttgatccagtggctaagtcaataggagctgtgaattgcattgtaagaagaccaactgacgggaaattgattgggtataacactgattatgttggtgctattactgcaattgagaatgggttacgaggtaaacataatggtagtagcacaactatttctccattagctggtaagctgtttgttgttattggggctggtggtgctgggaaggcacttgcttatggtgcaaaagcaaaaggagctagggttgtgattgcaaaccgtacctatgaccatgccagaaaacttgcttatgcaattggaggagatgctttagcccttgctgatttagataattaccatccggaggatggtatgattcttgcaaacacaacatcaattggaatgcaacctaaagttgatgagacgcctgtttctaagcacgctttgaaatattactccctagtttttgatgctgtctacacgcccaagattactagactcttgaaagaagcagaagaatcaggagccactattgtaacaggattggagatgtttatggggcaagcatatggacaatatgagaatttcaccggattaccagcaccaaaggagctcttcagaaaaattatggaaaactattgaagagtgatcgttatctttgcaacacaatcaaagaatctaatggcgaggtactttaaagtgtttaggatgtgaatgaggaggtatcctccccgttctacttccaatttttcaaagtcttgttaattgaaatcaacaaatgattttgtatctcaattagagtgtatttggatagagaattttaactgaggagactaatttatcagagaatttaaatttttttt

SEQ ID NO: 15212 - DNA, 1347 bp, Glycine max
  Clone ID: LIB3056-012-A6_FLI
ttaataacatgaagaaagggcttagacatggagaagcatctccacttcttgataaaattgtgtttgacaaggtaaagcaaggtttagggggtagagtacgtcttattttgtctggagcagcacctttatctgcacatgtggaaggttacttacgggtggtgacttgtgctcatgtcctacagggatatggtctgactgaaacctgtgcgggaacctttgtctcattaccaaatgaaatagaaatgcttggaacagtgggccctcctgtaccaaatgtggatgtttgcctggaatctgttcctgaaatgggatacgatgccctagcaagtacaccaagaggagaaatttgtgtaaagggaaaaaccttgtttgcagggtactacaaacgtgaagacctcactaaagaggttctgattgatgaatggttccatacaggggatattggagagtggcaacctaatggaagcatgaaaattattgatcggaagaagaatatatttaagctttcacaaggagaatatgttgctgtcgaaaacctggagaatatttacggtcaagtttcttctattgaatctatatgggtttatggaaacagttttgaggccttccttgtggctgttgttaaccccagtaagcaagcacttgaacattgggcccaagaaaatggtatatccatggacttcaattctctctgtgaagatgctcgagcaaaaagttacataattgaagagctctcaaagattgcgaaggaaaagaaggtgtttttttttacttagtttactttgcttatcattattctaatttgttatatttggagtatatgtctgtagcttgataaaatttctcctcaatctaaagttgctttctccaacaatcaagattcttttaattcacatacaatatacttttcaaataaacaataactttttttggcaataatattaacatgaaatattttgtctggtcttgcactggttttaaatgatcttatcctatatgtaaacgtttttgtacaagtgcatttcctgaagctttgtgggatgatgatgtatttggcagttgaaaggttttgagtttataaaagcagttcaccttgactcaattccatttgacatggaacgtgaccttatcactccaacatacaagaagaagaggccacagttgcttaaatactatcagaatgccattgacaacatgtataagagtggaagtaaacccagtgcctgagacctgatttgggagataatttattttctgtatgtgatggtgtttgtctccgttcaattgtttccttttggtgactgtatatacgctgagtagttatatatggatacgtcatttattttg

SEQ ID NO: 15213 - DNA, 894 bp, Glycine max
  Clone ID: LIB3056-013-F1_FLI
gaaagagacttactggggaaatgtgaatccaattggtgagaggagctgttacgatgaagggaaaaggactgcggagacgttggccatggattatcatcggggtgctggtgttgaggttcgtattgctcgaattttcaacacatatggaccccgcatgtgtttggatgatgggcgtgttgttagcaattttgttgcacaggctattcgtaaacaaccattgactgtatatggtgatgggaagcaaacaagaagtttccaatatgtctctgatttggttaatgggctggtggctttgatggaaagcgaacatgtgggacctttcaacctgggtaacccaggggagtttaccatgttagagcttgctcaggttgtcaaagaaacaattgattcaagtgctacaatagaatacaaaccaaatactgctgatgatccacacatgaggaagccagatattagcaaagccaaggaactgctgaactgggagccaaaaatccctctgagagaagggttgcctctcatggttaatgatttccgaaatcgaattctgaatgaaaacgaaggaaaagggatgaaataagcataatagcaaaccctgtatgtatatggagatgagcttgtctccttcatttttttgttcttatttgcggtcagcatcaacagaaaaattctggcaacacgtcacttttgtaagaagatatacctactgctggcctttttacatttaatcatttatgcttgcttagcacacaattgatgtatttgttaaattttgaaagaattatttcagtagtttttcttgtccattgtatcgataaaaagttgtagtatttgatattttggattctggtatcttgagaatatatattttttagaatattgtgaatctccttattt

SEQ ID NO: 15214 - DNA, 582 bp, Glycine max
  Clone ID: LIB3056-014-C12_FLI
cgctagtgcgtaggatcagctgaacgttatcggatacacaaactccaggtcgaaaaaggggtgcctctggtgttgtggtggagaaaactgtggagaggaggcagaagaggatgattaaaaatagggaatctgctgctcggtcacgggcaagaagacaggcatacacacaagaactggagattaaagtttcacgattagaagaggagaatgaaaggcttagaagactaaatgaaatggagagggcattgccatctgtgccaccacctgagcctaagccaaagcaacagcttcgcagaactagttcagccatcttttgatatcttaattgcaatgaattcctaattcttgcccatgctatcacatcacatagctctcatgtgcattatactcccgcctcttcaagtttggttatagatgggaggctattgtttgtgatgctatcagttctccccagcttgctctattctactaatgtttacctcttatgtatattttgattacaacttaagctgctctataaatatacttactctaattttgggcccatttgtgggaattatgaaattataagtcttacttttt

SEQ ID NO: 15215 - DNA, 437 bp, Glycine max
  Clone ID: LIB3056-014-G8_FLI
cgaaaactgggttaacatgcactccttgacagactcgatgaagtcggctactgacattaacatatctcttcctgatagttgatgatcaacctgcagtctccctgtcaacattcatgattgaactctttgtttaatggttccagtgttgttctatatggcgtagtttccactctttttcaaacctattatgatctttttttgcctatgactgtagggcgaagtagctgactagtggtgtaagttgcagctaggtttctataattttctttgcctaccagagcatctgattcctcggctgattaggtagatgctgcaatgtgcagtgttattatgagtaggctaatttggatgtaatcacaactgaatttgttggatcttttgtctcaacctagccatttattattatgtcacgagtatagacttgttattttctctat

SEQ ID NO: 15216 - DNA, 821 bp, Zea mays
  Clone ID: LIB3059-001-B11_FLI
gtcgacctcggcaacaagcccgaatggtttctgaacatcagcccagagggtaaggtgcctttgttcaacggtggagatggcaaatgcattgctgattctgatgtaatcacccaagtcattgaggagaagttcccgactccttctctggtcacccctccagaatatgcatcagtgggatcaaagattttcccagcctttgtcaagttcttgaagagcaaggatgctagtgatgggtcagagaaggcgcttctggatgagctgcaggcactggatgatcatctcaaagctcatggcccctacataaatggggagaacgtgtcagcgactgatcttagcctggggccaaagcttttccacctacagatcgcactggagcatttcaaaggctggaagatcccagaaaacctaaccaatgtccatgcctacaccaaggctcttttcagccgtgaatcttttgtcaagactaagccatccgaggagcacgtgattgcgggatgggcgcccaaggtgaatgcataagagccttgtgctttggtgctacctggtggactccatccatttatcttatcagtctttgtcagtggtgtggataggtgtcaagtctgtagcctagatgcatgattcagttggaattatgcagtgccgtgtctcgagtactcagttctggctgttgcggttgtgcatcttaccttctgttgctggttttgtttgaggccatgggcatctcttggtcctatgctgtgagagcgctgtaatgtgggtaccaaataatggagctgcttttatgcttgtggtgtggattctgttgtgccttgctttcc

SEQ ID NO: 15217 - DNA, 819 bp, Zea mays
  Clone ID: LIB3059-001-D10_FLI
ttgcgggaaaatggtcacaagctcctatagcttctcttcttcccccatacctctcaccagcgttgtcttcagtatgtgaaaacccaattcttcaaccctacaggatccaacaggcaatcacagcaggcatcttacctttatcacccttgttcctccaacaatcatcagccctattacatcaattacctttggtgcatttattggcacaaaacatcagggcacaacaactacaacaactcgtgctagcaaaccttgctgcctacgctcagcaacagcagttacctttggtgcaattgttggcacaaaacatcagggcacaacaactacaacaactcgtgctagcaaaccttgctgcctactctcagcaacagcagtttctgccattcaaccaactagctgcattgaactctgctgcttatttgcaacaacaacaactactaccattcagccagctagctgctgcctaccaccagcaatttcttccattcaaccaactggcagcattgaactctcctgcttatgtacaacaacaactactaccattcagccagctagctgctgtgagccctgctgccttcttgacacagcaacagttgttgccgttctacctgcacgctgcgcctaacgttggcaccctcttacaactgcaacaattgctgccattcaaccaacatgctttgacaaacccaacagcgttctaccaacaacccatcattggtggtgccctcttttagattgcttatgagttatagttcaataataaagtttttttgctgatgtttgtggcttcccaaaaataagaaagtgcatttctagttt

SEQ ID NO: 15218 - DNA, 736 bp, Zea mays
  Clone ID: LIB3059-001-G10_FLI
gggagaactcgacaccatgaaggtgctgatcgttgcccttgctctcctggcgctcgctgcgagcgccgcctccagtacaagcggcggctgtggctgccagacaccaccgtttcatctaccgcctccgttctatatgccgcctccgttctatctgccgccgcagcagcagccgcagccatggcaataccccactcaaccaccgcagctaagcccgtgccagcagttcggatcctgcggcgtcggcagcgtcggcagcccgttcctgggccagtgcgtcgagttcctgaggcaccagtgcagcccggcggcgacgccctacggctcgccacagtgccaggcgctgcagcagcagtgctgccaccagatcaggcaggtggagccgctgcaccggtaccaggcgacatacggtgtggtcctgcagtccttcctgcagcagcagccgcagggcgagctcgcggcgctgatggcggcccaggtagcgcagcagctgacggcgatgtgcggtctgcagctgcagcagccaggtccctgcccttgcaacgcagctgccggcggtgtctactactgaggaaactatgtactgtagtaataatgtaatggagccgctgactagctacctatagctagttcactcgtttagcggcgatgagtaacggagtgtcacccatcaccatgggtggcagtgtgagcaatgacctgaatgaaccattgaaatggaaaggaataatatataggg

SEQ ID NO: 15219 - DNA, 722 bp, Zea mays
  Clone ID: LIB3059-002-A5_FLI
ggcgaaccaagcagaccacaacaagaagaagcgtagtcgtcgccggaaggaaaggcgcggagcaagatgtcgtggcaggcgtacgtcgacgagcacctgatgtgcgagatcgaaggacagcatctcagcgccgccgccatcgtcggtcacgacggcagcgtttgggcgcagtccgagagcttccccgagttaaagcctgaggaggttgctggtatcataaaggactttgatgaacctggtactcttgcaccaactggtcttttcgttggaggtacaaagtacatggtgatccaaggtgaacctggagttgtcatccgaggaaagaagggcactgggggcattactatcaagaaaaccggcatgtccttgattattggtgtctacgacgagccaatgactccagggcaatgcaacatggtggtggagaggctcggcgattacctgatcgagcagggcttctaaaagttcgtcatgttctgttttggtcatttgggcaccaaagtttgcgcctcatttggttctgtaatccgtgagctcgtgcatgtacttggcgtattgcatgcagtgaataatttagcttgggtttgtttgttgggggcagtgttggggacggatttggattggggtttatgcttggcatcgcgtcgtatcgaaactcagctgctgtttcgctgagtaatgtacatttccctggtaatggtacttgtggactctgatgcttt

SEQ ID NO: 15220 - DNA, 518 bp, Zea mays
  Clone ID: LIB3059-002-G4_FLI
cacaggaagcatcttgacagcagtatcgatttcgttgggaggctcgtcttcggatttgagaaagggccttcgatgcttgaggctgttagaacctctggtcaaccattagtcgatgactgggactgtttgaagaggatggtgcggattttcgagtcccagtgtggttcacttactcagtacggcatgaagtacatgagagcgtttgcaaacatctgcaacagtggtatatctgagatgaaaatgagggagtcgagcatcagcgcttgcagcagctacaactcggcgaggtggagcccgatggctcggggacacagtgcttgatggtaaagatcaaatagcaaagccccccgaggtctgctgccccatgtccctgtgagcgagctcgtatcatctggggactgtggacccatcgacggttgtacatatcatgcacttgtgctcgtgcctatgtaaagtagtaataccaactcaactctgatcttcatccaagtaccgaaatgattaaaagatcagatgtg

SEQ ID NO: 15221 - DNA, 874 bp, Zea mays
  Clone ID: LIB3059-002-G5_FLI
gcgaatcgtgttatgtcgataccgtgatggggtctcttaattagcgcatcgattcagactcgtttgggcaatctgaagatgtttagggatcaacattacctttgtgtacctttgtggcctatggttcgtggatgcacagggatcaatataagtacctttgtgccccatggttcgtggatcactgtgcatgtgttcttccgcgtctttgttgttattttggctccatctgtatgatttaacaaaggaaggttcattagatgggccacatttacacactgtttatccacacgggtccactgatactcttccttttgccaccatgggctctggttctcttgctgcaatgtcagtgtttgaatcgaagtacaaagaaggccttactagggaggagggaatacagattgtgtgcgaagcaatctgtgctggtattttcaatgacttgggtagtgggagcaacgtggacgtctgcgtgataaccaaggggaagacagaatacttgagaaaccaccagttgccgaatcccaggacttatgctagttcaaagggatacagtttcaccaaggggcagactgaggtactgtcttcaaaggtcacacttctaaagcagaaggttgaggtcgccgagggtggtgatgctatggaggagtgatcttgcatcctgcattcatacaagcatattctgaatctgtgtaactttgcttagtggatcagctagaacaagaaaaaagaaaatttggagatctttgctgtactcgctggaccaaagccagggttcttatgctaaatgtgtttctaatgtttggcacattttaaattgcttgttgtttccgaatgtttaaaaccggtgaaggtatggtatttgcttggagatgtt

SEQ ID NO: 15222 - DNA, 962 bp, Zea mays
  Clone ID: LIB3059-002-G6_FLI
gtaattgacatagaatgtggcacaccagttgaagttggtggatttgatttgtcaaagtcaaaaaataagatggtatgctctagcatggatagcatcatggaccctggcgatggaatacatacggatgttattcctgttgttcaagatggctacagccttgcattttcagattttctcagttctgatataccatgctacccgtcaatgcaatcagatcttcatgctggaataagtgccaacgactcagagggtattaccgttatggatgatcctatatatgggtctctcgctgatattggtttcatggacatgtgggggcagcccactcaagactacgacaaattcttctaggctgccgccgaaggcccaagttcatgaatttgacaaggaaaattagttgagttagctcagtacaggcgacaataaatagatcgggttatatcagataaattagttgagtttagcagcaagatcggccgggccaatgcagcccgcctctccgacttgtcctcggacagaaggtttggattggatggagccacccgttggcccgtgaccgtcctggccgcggcgcaaggtcgcagccgccatgcccaataaggccttagttcggtttgagatggattaaagagatccacctctaaccgaacaagccgacatggaggaaagtcctaagccgacatggcgacacagccgcaggatttacggtgcctcgtctcatctgccaccgtcttcgtccggccctagcccctagcacagcacgtagccggacttgtgtccaccaaagcatcagttgtaattagttgcagtccatgataattcttaatcccgttgttagcccgactgtggagataatttgcaatagttgaccacctgatttgttcatgacagcagtttaaaactggattaacgtagacataggcgctactagatgacggacatgcgtaaaaggtgcgttttgc

SEQ ID NO: 15223 - DNA, 669 bp, Zea mays
  Clone ID: LIB3059-003-A7_FLI
gtgctgggcaagaaaagttcggtggccttagggatggctactacattcatggtcagtgtgccatcattatgtttgatgtcacttctaggctgacatacaagaatgttccgacatggcacagggacctgtgcagggtctgtgagaacatccccattgttctttgtggtaacaaggttgatgtcaagaacaggcaagtcaaggccaagcaagttacattccaccggaagaagaacttgcagtactatgagatttctgccaagagcaattacaactttgagaagcccttcctttacctcgctaggaagctggcaggggatcagaaccttcactttgttgaagctgttgctctgaagccaccagaagtgcagattgatatggccctgcagcagcagcatgaagctgagcttgcagctgccgctgcgcagcccctccccgatgacgatgatgacctgatcgaatagatatgttatacatggcccttgttgatgactcttgttaaaaatctgtggtggttcaatccttgttagagttaggcagtacctgaatgttctcttgatgtattcgaagagttgagaaggaagttaatgacatcattatcctgttggctgttgttgacttggggtttttggtgaacctgtccttgatcatacagaggtattgtcaggcagt

SEQ ID NO: 15224 - DNA, 629 bp, Zea mays
  Clone ID: LIB3059-003-E5_FLI
acgaagagctggaagaggaagaagcagatgtctccaacaagaggcagtgtgttagagttgaaaacggggaagctggggatgccaccgtagcagaggtggaaccaaacaacggcggcggcggcgggggcggggaccgctgaacagtgaacagcaccaccacgtttgtcgctaactcgctattttcacaacagcatcggtattggatttttgagcgttgtctctggcatttttcatgtattttagggctagtttggcaaattcatttttccaagtgattccgattttcctaaggtaaaatgaactaatttccttggaaaaatgaaaaaaaaaaatcactagtaaaaatgggattgccaaactgtcctttattagacaatttctgccgtactctactcggaactgaataactgaccagcttagttaaagttaaagcaggccaatgaatcgagcaatggtgacaggaactgatgaacagcgaagctcacgtttgtttctctttcgtatatgacagcattagtttttgttttccttttttcagcgttttctctggtatttatgtattttaaacaatttatgttgtgtatttggaactggcgatcttgttgctgtcattttactatagtgcgtcc

SEQ ID NO: 15225 - DNA, 1060 bp, Zea mays
  Clone ID: LIB3059-003-G3_FLI
agaagctgtggcttaaggttgctaaacatgtcatcgagcaagagaaaggtgtcaagagagagaatataaagaaagcaatagaattcctttcggagaccaataacttgttaaagattgaggatatcttaccattcttcccagacttcgtattgattgacgatttcaaagaggaaatatgcaaatctctgaaggactacaacagccagattgagcagctcaagcaggagatggatgatgccacacgtggggcagataatatcagaagtgatattggtgccctcgctcagagatatacagtaattgaccgtgagcaggattgtggggtttgccggcgcaaaatattgactgttggagggttgcaccaggtagggagaagctatacatctgttggacacatggcccccttttatgtgtttccctgtggacatgccttccatgcaaattgcttgattggacatgtgactcgttgcagtaaccaggtgcaagctgagagaatattggaccttcagaaacggcttagcttgatggacaggaaagcagcaaaagacaatggggcaagtgttaatggcgaacctattacgagcacaaccccagttgataagctgagatcacagttggatgatgctgtagcaagcgagtgccccttctgcggtgatttgatgatcaaggagatttcacagccgttcattctcccccaagagtcggatgaaaaggcatcatgggaaatcaaacctcaaccaacgcctcaaaagattctcccgatgaccatgtctatttgatgctacggacagtacagcctaagatggatttggttttaaatttttatattgtttttgacttttgacactccttttgaccatgttttaatcctttttatgttgtggtatatggtattcaatatcctactgctgttgggttatcttgttttatatttacccaacttgtaaccctagaacaatgtagtcatcaatcgcttaccttgtggttgtggttcttgtattggatgcatcgtgttggaacatctcggtacacttgttatttgggattgtttttttttctg

SEQ ID NO: 15226 - DNA, 434 bp, Zea mays
  Clone ID: LIB3059-004-H11_FLI
agcaagcaggggtatgctgggtctgtagaaaggtggtgggagtgcataatttgggaaggcttggagacaccttgcccaagacagttctctgattattggctttcagactgagaaacctctgaaactttacagccttgtgccgtcaacggactctagtgatgtcctgtgcagctgtgctctctcatttgtattgtaaattgtaatgcaaatctctagttcttgtgtatgttctcttgtcgccttgtagtagcgtggaaaccggtcgggggaccatctggaactttggatgataagcaataatattgtgtcatggcctagctttgcaggtccagttggacttttttaagtagtggacattttacacattatttttttgtaccccacaaatatatggtaagtagagagactctaactctcatcaagatgatgacact

SEQ ID NO: 15227 - DNA, 804 bp, Zea mays
  Clone ID: LIB3059-005-E4_FLI
ctgcagccctccatccacgaactcccgttctccatttacacccatggcggtgtcgatcgagctcaccaaggagtacggctacgtcgtgctggtgctggtggcctatgtcttcctcaacctttggatgggcttccaggtcggcaaggcccgcagaaactacaaggtgttctaccccaccatgtacgccatcgagtcggagaacaaggacgccaagctcttcaactgcgtgcagagggggcaccagaactctctagagtggatgcccgttttcttcgtcatactgctgctgggcggtctgcagcacccgaccatcgccgccggtctgggcggcatctacatcgtcgcgaggttcttctacttcaagggatacgccaccggcgttccggacaaccgtctcaagattggggggctcaactacttggcgttgcttgggctgatcatttgcacagcatctttcggcatcaacctgctcatcagggagatgctctaaactttgggtttatatgtgagctccaggctgggttaaccgcacaagttactcatggtctgagcatcaaaactttgtgatactagtcgtttggggttttatagtggagttatcgtttctttctttgtctgtgtgttgttagcaaaagaagtgtgcgtctgcgtcttatagctgtgatggaataaggagacagatgggttgaagcgtgaatcgtacagttcttgctgcttgtcactctctgatctggtttcgttgtagatgagatggttgttaatggtttgtgtttgaggcacgatccgccttattttctaccgatc

SEQ ID NO: 15228 - DNA, 479 bp, Zea mays
  Clone ID: LIB3059-005-F12_FLI
gccagcgcttagtcaactagccatgatgaaccctgccgcctacctacaacagcaacaactgctttcatctagcccgctcgctgtggccaatgcacctacatacctgcaacaagaattgttgcaacagattgtaccagctctaactcagctagctgtggcaaaccctgttgcctacttgcaacagctgcttccattcaaccaactaactatgtcgaactctgttgcgtacctacaacagcgacaacagttacttaatccattggcagtggctaacccattggtcgctgccttcctacagcagcaacaattgctgccatacaaccggttctctttgatgaatcctgtcttgtcgaggcagcaacccatcgttggaggtgccatcttttagattacatatgagatgtactcgataatggtgccctcataccggcatgtgtttcctagaaataatcaatatattggttgagatttatctcgat

SEQ ID NO: 15229 - DNA, 558 bp, Zea mays
  Clone ID: LIB3059-005-H4_FLI
caggcagcgagtgcaaccgcgagagcgatcagcgatgggctccttcttctcgaccttagtgacgccccctccggccgccgacgacccgaactgcgccgtggtggccgcgcactccaaggccacctacgacgagcagtgggcggcccacaagagcagcagcaagctgatggtgatcgacttctcggcgtcctggtgcgggccctgccgcttcatcgagccggccttcaaggagctggcctcccgcttcaccgatgccatcttcgtcaaggttgacgtcgacgagctcgcggaggtcgcaaggacatggaaggtagaggcgatgccaacgttcgtgctggtcaaggatgggaaggaggtaggccgtgtgattggggctaagaaggacgagcttgagaggaagatcaggatgttcgtcacgtcatcttcctcgtcctaacttagcagtgcatacactcccaccttcttactggtttctcgactccagtggttcacctgggacggggttgctgaaatggttcccttctctgaatactgaaaaatcaaaaaaagaagtatatg

SEQ ID NO: 15230 - DNA, 614 bp, Zea mays
  Clone ID: LIB3059-006-C2_FLI
cgagtccaagatcatcctcgatcgggagacgcagaggtcccgcggcttcggcttcgtcaccttctccacggaggaggcgatgcggaacgccatcgagggcatgaacggcaaggagctggacggccgcaacatcaccgtcaacgaggcccagtcccgcggcggccgtggaggcggcggcggtgggtacggtggtggccgtggaggcggcggctacggcggtggcgggcgccgtgatggcggcggcggctacggcggtggcggcggctacggtggcggcggcggctacggtggtggtggcggcggctacggcggtggcaaccgtggcggcggctacggcaactccgacgggaactggaggaactgagcggtggggcccgcgcggccaagttatcctgttcgctgccgtgatgtttaccctagtccagagggtttatcttcgttcgtctcgtgtttgttgttgcccatctgtgtttttgattgcaaggtcgctctgtgtcagttgttagtgctgtgttcatcctcggctccagcagacccatgcatcaaacagcatggactgcggatcgatggatgctgttacccccgtcaggctttattctaagttaatcttaagg

SEQ ID NO: 15231 - DNA, 623 bp, Zea mays
  Clone ID: LIB3059-006-G5_FLI
gggcgataaaggtatgttgcttgcccttgttgtttcaacaatcgccagccctatctttggtgcagtcattggtacaaaccatcagggcacaacagctgcagcaactcgtgctacctctgatcaaccaagtagctctggcaaacctttctccctactctcagcaacaacaatttcttccattcaaccaactgtctacactgaaccctgctgcttatttgcagcaacaactattaccatttagccagctagctactgcctactctcagcaacaacaacttcttccatttaaccaattggccgcactgaaccccgctgcttatttgcagcagcaaatactactaccatttagccagctagctgcagcaaaccgtgcttccttcttgacacagcaacagttgctgcctttctaccagcagtttgcggctaaccccgcaaccctcttacaactacaacaattgttgccctttgtccaacttgctttgacagacccagcggcctcctaccaacaacacatcattggtggtgccctcttttagattgcttattagttgtaattcaataataaagttttttggatgatgtatgtggccaaccagaaataagaagttacatttccagattct

SEQ ID NO: 15232 - DNA, 755 bp, Zea mays
  Clone ID: LIB3059-007-G3_FLI
aacgagcagttctgggtcatcggaggcgtttcggcgcatctgttcgcggtgttccagggcctgctgaaggtgttcgccggcatcgacacgagcttcaccgtgacgtcgaaggccggggacgacgaggagttctcggagctgtacacgttcaagtggaccaccctgctgatacccccgaccacgctcctcctgctgaacttcatcggggtggtggccgggatctcgaacgcgatcaacaacgggtacgagtcgtggggccctctgttcgggaagctcttcttcgcgttctgggtgatcgtccacctgtacccgttcctcaagggtctggtggggaggcagaacaggacgccgaccatcgtcatcgtctggtccatcctgctggcctcgatcttctcgctcctgtgggtccgcgtcgacccgttcctcgccaagagcgacggcccgctcctggaggagtgtggcctggactgcaactgaagtgggggcccctgtcactcgaagttctgtcacgggcgaattacgcctgattttttgttgttgttgttgttgttggaattctttgctgtagatagaaaccacatgtccacggcatctctgctgtgtccattggagcaggagagaggtgcctgctgctgtttgttgagtaaattaaaagtttttaagttatacagtgatgcacattccagtgcccagtgtattccctttttacagttgtatattagcgacaaaggacagattggttaggagtttgattc

SEQ ID NO: 15233 - DNA, 1386 bp, Zea mays
  Clone ID: LIB3059-009-A11_FLI
gccgtctgccttctgcgcctccatttcggcctctgtcccttgcaagttcaatctcacctccaaccatgggtaaagagaagtcccacatcaacattgtggttattggccacgttgactctggcaagtcgaccaccacaggacacctgatctacaagcttggaggcattgacaagcgtgtgatcgagaggtttgagaaggaggctgctgaaatgaacaagcggtccttcaagtacgcatgggtgctcgacaagctcaaggctgagcgtgagagaggtatcaccattgatatcgctctgtggaagtttgagaccaccaagtactactgcacggtcattgatgcccctggacaccgtgacttcatcaagaacatgatcactggtacctcccaggctgactgtgctgtccttatcattgactccaccactggtggttttgaggctggtatctccaaggatggccagacccgtgaacatgctctccttgcgttcacccttggagtgaagcagatgatttgctgctgcaacaagatggatgcaaccactccaaaatactccaaggcacgttatgatgagattgtgaaggaagtctcatcctacctcaagaaagttgggtacaaccctgataagattgccttcgttcccatttctggttttgagggcgacaacatgattgagaggtccaccaaccttgactggtacaaaggcccaaccctgcttgaggctcttgaccagatcaccgagcccaagaggccttcggacaagcccctgcgtctgcccctccaggatgtgtacaagattggtggtattggaactgtaccggttggtcgtgtggagactggtgtcatcaagcctggtatggtagtcacctttggtccaactggcctgactactgaggtgaagtctgttgagatgcaccatgaggcgcttcaggaggctcttccgggcgacaatgttggcttcaacgtgaagaacgttgctgtcaaggatctcaagcgtgggttcgtggcctccaactccaaggatgaccctgccaaggaggctgccagcttcacctcccaggtcatcatcatgaaccaccctgggcagattggcaacggctatgccccagtgctggactgccacacctcccacatcgccgtcaagtttgctgagctcattaccaagatcgacaggcgatctggcaaggagctcgagaaggagcccaagttcctgaagaacggtgatgctggtatggtgaagatgattcccaccaagcctatggtggtggagacattctccgcgtatcctcccctgggtaggtttgccgtccgcgacatgaggcagacggttgctgttggagtcatcaagagtgtggagaagaaggacccaaccggcgccaaggtgacca

SEQ ID NO: 15234 - DNA, 547 bp, Zea mays
  Clone ID: LIB3059-009-A8_FLI
gcgacatcccgcccaggggcctgaagatggcggggaccttcgtggggaactccacctccatccaggagatgttccgcagggtgagcgagcagttcaccgccatgttcaggcgcaaggccttcctgcactggtacaccggcgaggggatggatgagatggagttcactgaggccgagagcaacatgaacgatctggtcgccgagtaccagcagtaccaggacgccaccgccgacgaggagtacgaggacgaagaggaagaggagaacgtggcagaatagccatgacctccggtgccctttttcagggccaccgcatccgacaggttgtgtctctgtgaatgagtttgtttgtttcttttctctgcttctcgtggcttgcgtcatggattggtaattggttaagcttccgctggggttgcgcctgtgcttcgactgcgggcactgtaatgtaactactgtaatgggtcaaagtaggcttcacactggtggtgctggtctcctgtaattcctgacgagtatttgtagggagtgattttatcttcttcttt

SEQ ID NO: 15235 - DNA, 863 bp, Zea mays
  Clone ID: LIB3059-009-C6_FLI
cgcaacccgttcacgggcaagaggcagtggcttggcaccttcgacacggccggcgcggcctccgcagcctacctatccgcttcccggagcttcgccgacgagaagcgccgccgccgcgggcagcctgtgccctcttcctcaccagttccttcggcaagcgccaccccgacggcctcctcttcgtcgtccacctcgactgctccgttcgcgcacccgtcgccgtcgtctgttcttggacccgccaccaaggaggcgccgctgaacccgcagtccccggagctggtcgcgacaccaacgctcgtcctgccgtccgatgagtccgcggagctgccggacgacccggagttctaccaggaccttctccgcggcctgcagctgccagacatcagcccgatggacttccgtgccgggcttgacgctctggacgtctccgatgcgcccttcggcctggacgatgagcaggacctgctgcttggggacttcggggacgaggaactggagatcgacctcgacctcgacgatatcaacgacgtcttcccggagatgcctggctgcgacctcggccgcggcatggacgatttcctgcaaaccgttgatttctgcgtgtgaattaagtcagtgccttaatatgttagggttgatggtttgataagcgtgcttggaaggggggattgtcttgggtttttccctcgggcatttcagtctgctcgggcccaagatttctcttcttcccaaacagcacattagcttccggagaggtaattttgataggttacattatgttaagttatagtggttgtgttttttctgttatttggtaatgcttgtcaagacattatgaacaagtcattgagctgttacta

SEQ ID NO: 15236 - DNA, 1406 bp, Zea mays
  Clone ID: LIB3059-009-C9_FLI
tgatgttacatcattgggctcacttaatgacttcctgagtacttcaagatcacatgatcaatatttacagctccagtcagatttttccaaaacttccaggttccgtgcctcggctgctagtgcaattaagccaagctctgtctatcaagccagcctaagtccgagatctggcacttttaaagatggggtaccaagggcttcatgtgcaagggttgttgggagggacaagctgaagcgtcgtgtggaatggttaggcccgttaactgctccgcttgatacgaatcctttgacaatcaaccctgattctgccagtgagaagtgtgatgcagattgttcaaagaacaatgttagctcagttccgttggacctgcctctttcgtttcccctgttgccttctatttactcccttggcactcgtccggttcctgaggtttctttggagaaacagtttaagccttactattgctggtgcccaccatgcccatcatcgctgcaatacactgtcacccatttgcatctgccagctacacctgtagatccgttgcccctaccacctttgagttcactgctagcaagtgagcagccaccttcttcaacagtttctgtaaagctggatacaactgatctcccttcccttaatcttccgtccatactgcattcaccacttattcccctacatggtccacaagtgccaacattcacaccattgatgtccgatcccattgtgcatgtcccagtcattgatgtttgttcggcgggtcaggcctatctagtgagttgtgggccgtctataacttcagcagttcccctgctcccgagcttgaagcctctgctgccagaagcagagtcgttagtcgagagaagcgcaagggaaacactgatgaggctcatagcttcgacaccacctgcaagcaatcctctacctggaagtatatcctgggcgaataacaatgtgaagaagcatgttgatgtgtgtcccaatgaaaaagcatccggtacgtcttgtgttgctgctgtgtttggaagtgggattgcacacgctgaggatgaagttccaagcggaggtgattcacaagagccgtttgccgaatacgatggtaccagcaatgaatgtgatgtacatcattggcagaaattctagcttggctgcatcagcatggtaaatagggttttgaggattcgggggtttgatgtcctgtacgcagcagcagccttaaaagtttctgtgcccagccagcatctctatttggtttgcaaatgtaattactagtttgtactgtcttgtttttggcaaacttgctgcgagcctcgtgcttagtttggtttatttatttatgaactttaggcctgttcgaagcacccagtttgtaagaaaatggattatataaactgaagtgattccaaat

SEQ ID NO: 15237 - DNA, 520 bp, Zea mays
  Clone ID: LIB3059-009-D5_FLI
gcgcttgcgaggtggtatgcagatctttgtgaagaccttgactggcaagaccataaccctggaggttgagagctccgacaccatcgacaacgtgaaggcaaagatccaggacaaagagggcatcctccagctgcttgccagcgaagatcagacgctgctggtctggggggatgccctctttgtcctggatctttgctggcaagcagctggaggatggccgcaccctagcagactacaacatccagaaggagagcactctccacctggtgctccgcctccgtggtggtcagtaagccatggttcatttaagctgctgctgtacctgggtatctgcgtcgtctggtgccctctggtgtacctctatatggatgtcgtcgtctaataaacatctgtggtttgtgtgtcatgaatcgtggttgtggcttcgttggtttaatggacctgttgtgtcctctgtgttgtacccaaaactcttctgcagcagtatggcttgaatccttatgaagtttgatgtttgaac

SEQ ID NO: 15238 - DNA, 1390 bp, Zea mays
  Clone ID: LIB3059-009-E7_FLI
gtttttaccaaaacaattcttatagaagcggactgaaaagctggggcgtttggcagtccgcaacagattttggtggccggaagttgaaaaaagcccaaacaaacagggccacagtatggaaatcagtagctctgtggactgtggtcaggaaaaagaacagccaacaaataaacgtccaaggtcagaaagtactacagaatcaagcacaaaagcatccagggagaaaattagaagggacaagctgaacgagagattcttggaattgggtgccattttggagccagggaaaactcctaaaatggacaaaacagctatattgagtgatgctattcgtgtagtaggtgaattgcgtagtgaagcaaaaaagctcaaggattcaaatgagaatctccaagagaagattaaagagctgaaggtctatactatttcatgtggccaagttataaatggtgctgttcagatgggaggtggcacgtgatgtgttgtttaggcacttcatactattccattttcttgatttatgatccccttttccatttggtcattttttttcttatctagatttaattcatccagtcaaataacatgggaataattattagtacacctgtcattctccctccagtttgtggtttagtttattttgggttgcttgcattagcaactttatatccacataatgcgtttttttttcttaaatggttaaaccctgcagctgtataacaatatggacatttgtcaattcttttctctactgtatacacttctttgctacgtgttccataaaatatatagaggtttatgattcagcatctcatgtgctgcaaaaggctttggccttcgattttgctggttgttcatcagaaaaacaatctcaccctgaaatactttccttttgcaggccgagaagaatgagctgcgagacgagaagcaaaggctgaaggccgagaaggagagcctggagcagcagatcaagttcctgaatgcccggccaagcctcgtaccacaccacccagtgatcccagcctctgcgttccctgctccccaggggccagcagccgccgccaggcacaagctgatggtgcctgtgattggctaccctggattcccgatgtggcagttcatgccgccttcagatgttgacacctctgatgaccctaggtcttgtcctcctgtggcgtagaagcgtgcgaaatcctgttggaaagaggcgatgctgccctccattgattcaaatcttgatcggtccgcagtgttgctggtgtagttgattccagaactgaaggggatgttacatgtgtcggacggtgacatggggtgatctgatgacccctttgtatattatatatggtatggtataaataaattccgtgaccagaagctaatgtct

SEQ ID NO: 15239 - DNA, 2603 bp, Zea mays
  Clone ID: LIB3059-009-G11_FLI
gggccacctccctacggaggagacgacccccatctcaaggtcgaggtcgagggctcctctctctctaccatctccgttcgatcccatcgccccgccgccgccatggcgtttctcgcgcgggcgctgcggcagtccaactggcgcctgtcgtcgcgctgccccgccgtggccgcctcctgccgttggatctccccgaccgccgccgcgggatcgccggaggccggcgcggcggtggcgtctgccgacccggagctgcctccgccgcgggagcccgttggcggcgcccgcgtggagcttcctcctaacccggaggacgcgctcgaggtattcgtggatggccatgcggtgcggatccccaaggggttcaccgtgctccaggcctgcgaggtcgccggcgtcgacatcccgcgcttctgctaccatagccgactctccatcgctggaaactgccgcatgtgtctcgtcgaggtcgagaagtcgcccaagcccgtcgcttcctgtgccatgcccgcgctcccagggatgaagattaagacaaacaccccagtggcaaagaaggcaagggagggtgtcatggagttcttgctgatgaaccatccactcgactgcccaatctgtgatcagggcggcgagtgcgacctccaggatcagtctatggcatttggtgctgaccgcggccggttcactgagatgaagcgttcagttgtggacaagaatttgggtcccttggttaagacagtgatgactcgttgcatccaatgtacaaggtgtgtcaggtttgctactgaggttgctggagttcaagaccttggtatgttaggtcgtggcagtggtgaagaaattggaacatatgttgagaaacttatgacaagtgagctatctggaaatgtcattgatatctgccctgttggtgctcttacatccaagccatttgcatttaaagctcggaactgggaacttaagggcacagagactattgatgttactgatgcagtgggatccaacataagaattgacagcagaggacctgaagttatgcgtgttgttccacgtctcaatgaggacattaatgaggaatggatatcggataaaacacggttttgttatgatggtttgaagaggcaaagactaaatgaccctatgatccgtggtcctgatggcaggtttaaggctgtgacgtggtgtgatgctcttgcagttgttgctgaggttttgcatcaagttaagccggaagaaataactggagttgctggaaaactttctgatgcagaatccatgatggcactgaaagattttgttaacagaatgggttctgataaggttctctgtgagggaaatggtcccaatcctccagcagatctgcgatctaactacctaatgaatacgagcattgctgggcttgaaaaggctgatgtgttccttttggttggcactcagccaagagtggaagctgctatggttaatgccaggattcggaagactgttaaagcaacacaagcaaaggtgggctacattggtcctccagctgacttcaactatgatcatgagcatcttggcacaggaccgcagacccttgttgagattgcagagggtagtcaccctttctgctcagtattgcaatccgctaagaaccctgtcatcattgctggagctggattatttgaacgagaagaccaagttgccctattctcaacgattgagactgtagccaagaagttcaatgtgatgagaccagactggaatggccttaatgtcttgttgctccatgctgcacaggcggcagctcttgatcttgggcttgttgctaatcctgccgagagcatcaagtcagcgaagttcctgtatctgatgggagctgatgatataagcctggaaaagcttccagatgacgcatttgttgtttatcaaggacaccatggtgacaagggtgtctatagggccaatgttatcctgccatcttcagcattcagtgagaaggaaggcacctatgagaatactgaaggatgcacccagtggaccatcccagctgttccgacggttggtgatgctagggatgactggaagatcatccgcgctctttctgaggttgctggggctcagctgccttatgacagcctctcagctgtgagggaccggatcagtacggttgcaccaaatctagtacatgtagacgagagggagacacccacaatctctgcggaggttaagccgcctgtgaagcaacaagtcagctcgacaccattcaaagctgttgtggagaacttctacatgactgatgcaatcacccgagcttcaaagatcatggcccagtgcagtgcaaccttgctgaagaagtgaggttttgcacaccatcaagctaatcttctgcaaaaacagcttcttagtccctttttttttttacctttgctgagtttcagtgtttcaccacccgttgcttgttttcttgagaggtctgtgtataatttggactgcctctaggtttccagagcagcaaaacctgatcagtacatttccgcgttgtgtgagaagcagaacatactcaataagcttgttgctcacattgaaccatacaagtgccacaagcaaatgatttttgccttttg

SEQ ID NO: 15240 - DNA, 443 bp, Zea mays
  Clone ID: LIB3059-009-G12_FLI
cttcaagccacaccaaaccacactgcgacacacagtaggcgaggcgaaggagaggcaaggcggcgcggcgggcaagatgtttgacgatcaagacctgggcttctttgccaatttcctgggcatcttcatctttgtcttggttattgcgtaccacttcgtgatggcagacccgaagtacgaaggaaactgatgtcctctagtgcaaagatcctattatctgcaggccgaaatagggctatactgttagctaatgctagtgagatcgcttgacactttgagtgcatatcatggaagctggacatgcagttcctggcattttggttttgcccatgttttaatctgctgaattagtaaatcctggagaattcaaaagcgttttcaagtactgcagttggtggttgtttctggtcctagtgtatgcatgccagaatcttatgaataat

SEQ ID NO: 15241 - DNA, 905 bp, Zea mays
  Clone ID: LIB3059-010-A2_FLI
cgcggggagccaaccaggaggatgccctcgcgcgaattgaaaagctttcagaagtaaacccgatgcttggcttccgtgggtgcaggcttggtatatcgtaccctgaattgacagagatgcaagcccgggccatttttgaagctgctatagcaatgaccaaccagggtgttcaagtgttcccagagataatggttcctcttgttggaacaccacaggaactggggcatcaagtgactcttatccgccaagttgctgagaaagtgttcgccaatgtgggcaagactatcgggtacaaagttggaacaatgattgagatccccagggcagctctggtggctgatgagatagcggagcaggctgaattcttctccttcggaacgaacgacctgacgcagatgacctttgggtacagcagggatgatgtgggaaagttcattcccgtctatcttgctcagggcattctccaacatgaccccttcgaggtcctggaccagaggggagtgggcgagctggtgaagcttgctacagagaggggccgcaaagctaggcctaacttgaaggtgggcatttgtggagaacacggtggagagccttcctctgtggccttcttcgcgaaggctgggctggattacgtttcttgctcccctttcagggttccgattgctaggctagctgcagctcaggtgcttgtctgaggctgcctcctcattggcaaccggattgcctgctgctggtggatgtggtgatcaacagtattattacagagccatgctatgtgaacattactagtagcagtgctcataaaagctacaatcccatgtcctttttttccccagtcatgtaaaacttccaaactgctccatggttcaaaactctgttcttcaatacatcatcaattatcgatt

SEQ ID NO: 15242 - DNA, 711 bp, Zea mays
  Clone ID: LIB3059-010-E1_FLI
cagtgcgtagagaggatcgtcgaacagaacagcatgaagatggtcatcgttctcgtcgtgtgcctggctctgtcagctgccagcgcctctgcaatgcagatgccctgcccctgcgcggggctgcagggcttgtacggcgctggcgccggcctgacgacgatgatgggcgccggcgggctgtacccctacgcggagtacctgaggcagccgcagtgcagcccgctggcggcggcgccctactacgccgggtgtgggcagccgagcgccatgttccagccgctccggcaacagtgctgccagcagcagatgaggatgatggacgtgcagtccgtcgcgcagcagctgcagatgatgatgcagcttgagcgtgccgctgccgccagcagcagcctgtacgagccagctctgatgcagcagcagcagcagctgctggcagcccagggtctcaaccccatggccatgatgatggcgcagaacatgccggccatgggtggactctaccagtaccagctgcccagctaccgcaccaacccctgtggcgtctccgctgccattccgccctactactgattcatgatatttgggaaatctcctctatccatctctctctatctatatatgtaataatgcagtaagacgacacacattatcatgtgtggtatgaccaataatatatgcatggtcataataaagttttggttttaatgaatc

SEQ ID NO: 15243 - DNA, 1094 bp, Zea mays
  Clone ID: LIB3059-010-F7_FLI
gtgtgtgcacaggattcttgatcatttcttggcaatggaccaagcaaatggtggcgagtccccatgcttggatgatgtcatggcatccccatccttgacaccgatcacaagtgttgccaagctaattgacggctatcttgcagaaattgcaccagatatcaatttgaagcctcctaagttccaagctctggcctctgctattcctgaatatgcccggccactggatgatggcctttatcgtgccattgatatatacttgaaggctcattcctggctgtcagaagctgaaagggagcagttctgccggctgttggactgccagaagctctccctggaagcatgcacccacgccgcccagaacgagaggctgccgttgcgcgtggtggtgcaagtcctcttcttcgagcaactccagctaagaacctcgatcgcagggtgcctgctggtctcggacaacctcgaaggctccaggcctctgcggagcggcattgccacatccggcgaggctggaggctgggccacggctgtccgagagaaccaggtcctgaaggtcggcatggacaacatgcggacgcggctggccgagctggagaaggagtgctcgagcatgcggcaggagatcgagaagctgggcgggcgcgctggtaagggcggcggtggcgggtgggcctcccgcgtcgtgcctcggcgactgggcctgaaggtgaggtcgcagatgtgcagcgcccaggagggctccgtcagtgagcagcacaggagcatgagcgccaagctcgacaagctgcaggctaaggtgtcgaagcagaagaagcagctggccgcggatgcctgaagttgaggtttcgagactccggcttcatggcctgaccttgtaattttagcccggtatcaattgtttttgcctctcttttgttgcctgtgtagctgttaggcgaaacgtccgagtgcagtgtgtcggttcattcttgaaccgtggatggtaccaagaagaatgggagagtgtcctagctaagaacacgaacctgatgtgatcagttaatagtttgtgaccggtaaggaaaatgtcgcttgcttggttacttttgtgatctgtg

SEQ ID NO: 15244 - DNA, 1224 bp, Zea mays
  Clone ID: LIB3059-010-F9_FLI
attaaaaactgcaagataaaccattctgtagttggactccgatcttgcatatctgaaggtgctatcatagaggacagtttactaatgggtgcggactactatgagacagaagctgataaaaaactccttgccgaaaaaggtggcattcctattggtattgggaaaaattcatgcatcaggagagcaatcattgacaagaatgctcgaattggagacaatgttaaggtattccaaactgatgttccaacggtcaagaatattaatttagatttttccttaggatattacataatacttgatatgccattttgtcctcttatttttaacatttatttttgaaaatattaacttgaaaatatgaataggcttgcatgctcttttttaaatatgactgtctatacttatctttccctaattgcctgcataaattttcattcttcagttttgtctgtatttaactgaggtaatcaagatgaggttctgtttaccacaagataaaaaactgtcaacaagtcatatatcactttttattataaaaatacaaaataaaacctgaaatgcagagcttcatatcagttctttatttggctttccaatactgctcatgcggatgacattcaagttcaacccagaaagggctgccactatccagcaaaccttgctctgttatcggcattgtttgatagacctgttgcacttgactattcataaatcttcgcttgtcataggattaaacaggaaactttcattattagactttcctgccacaaattttctatggcagcggcatttctcatgagactcgatcttgtagatactcaatgctgacaatgttcaagaagctgcaagggagacagacgggtacttcatcaaaggtggaattgtcacagtgatcaaggatgctttactccctagtggaacagttatatgaagtgaacgtgcgacatgcagctgtgtgtctcgacattcgacaatgatcagcacctggttacatgcgtgatctgcagatcagtctgttggagatcatcggagcaataaaagtgtcatccaaggcattttttctttctttttgctcttttgtgtccttcaatgttgtagggtagaatgttgtagcagcaaatgttagttacatgttgaatcgacattgggggcctggatttggggatacatcatgctgtaaattgatcagtttaattaccatactgtgctgctttgagcgaagcc

SEQ ID NO: 15245 - DNA, 685 bp, Zea mays
  Clone ID: LIB3059-010-G12_FLI
aggagggcaccaagctaatattccagttgcaaaaggagcgctaggaagaggaagcaacgagccatggcctccggtggcccgaaacccaaactagcctacatcatcttgtacgtgagggacgtggagaaggccgcctccttctacgacgccgccttcggctacaccgtccgccgcctcgaccagtcccgcaagtgggcggagctggagagcggggcgacgaccatcgcgttcacgccgctgcaccagcgggagacggacgagctgtcgggggcggtgcagctgccggactcgtcggccgccggccggggctccgtagaggtctgcttcgcctacgcggacgtcgacgcggcgtacaagcgcgccgtggacaacggggccgtggccgtgagcgcgccggaggacaagccctggggccagaagtccggcttcgtgcgggacatggacggcaacatcgtgcgcatcgcgagctacgtgcgagagtagtcgcattccgctgcatcaccatcggtcgatcgatcagcctttcccatgcatgtctcgtatactacacgtctacacgtgtaccaaaaaaataaatataatcgttgtgcaggtcatgtttgtcttgggagaggtaggaccgtggaagatgtaaatggaaccgtggagcagtgaatacaaaaagcgccatctcgtccctgtttcc

SEQ ID NO: 15246 - DNA, 673 bp, Zea mays
  Clone ID: LIB3059-011-A12_FLI
cacaaggccacaatccaagccgaagaaccctaggcggtggcggcgcatcctgcataccccaccgtagtggcagcgagccagcgacctcgagtagcagcagaggctccgcaggggcgaaaaggtgtgaagcttccttcggagatcccagtagcagaagcaacgcaggcatcggcttgcgacaggagaggacggagatgacgcagaagcagaccctgttcaaggggcagagcaagaagaagactatccctcccaaccgccacggcaaggcgcctcatgttcgtaaaggaaagagagccgtcaagcccaccaagttcacaaaggacatggacgccgagaaggaactcaccaagttcatcaaccagtgcaacgaaataaaagctgcgaatcttgctagcaaagagggcggtgacctcaacatagtgaaggcggatggtgaggaatctaaatcaaagaaataggaagccagaaactgaaaacgagtgtgtgaaacgtgatgcgtggtaaactgttaatgcgatgtattctgctgaagaaaattcagttccgtatggctgggtagatgaacatgtttagcgcaaagtgacggtgtaactgcaaccggggtaatggcttgcaagttttgttctgtgccatctctatttctccaattattatattgatgaagtttgtgtgc

SEQ ID NO: 15247 - DNA, 716 bp, Zea mays
  Clone ID: LIB3059-011-B7_FLI
ctcttttccagttccagacctgaagaaactccgaccggccggtgggcggtggcggcagccggcaggatctgtgccgcgatggcgacgtcgaacacggcgcggatggaggacggcggcggcgacctgcggagcaccatcaagaagtggaatatcatctaccctgtctacctcaactccaagaagacggtcgccgagggccgccgcatcgccgctgccaaggcctgcccggaccccacctgcatcgagatcgctgactgctgttcgcacctcaagatcccccacgccatcgagttggataaggcgtaccctcgggatttcttccaggtggggagggtcagggtgcagcttaagaaagatgacggctcccccgtcaatcctgctattaaaacgaagaagcagctgatgatccaagtagcagagctagttcccaagcatcacggaaggacaaagaagcaggagccagcgcccaatcccggtggcagttcaaagaacacaaaaggcgggaaaaagaaaaagtgatgcagtatcattgtgttgttttttattctgttcgtcatcatacactaagcttctgtgaaaaagaaaaagtcttggacgttgttgttatgttgccattatgccatttttcatgtataagaacttactaagaatcttccattgactcggtaaaatgcaacataaaaaaatggcttcgctagattaaagggccctttgac

SEQ ID NO: 15248 - DNA, 489 bp, Zea mays
  Clone ID: LIB3059-011-C2_FLI
cgccggagttactaccccgagttacctcgctctctttgtcaggcacttctactcgcagctatcagccaatctcggagctggcgtccagttgcacaacggcgatgacctcgcctacagttttcgcgccaagaaggccgtcctgttcaaaccagataatgggttcctaggtctgaaccttaaagggcgcctacttaccgataaagagttgaagccgacgaagacaactggatccgttgaactggcatggaccatacttgacttgaaacagggccaagacgtaaggctcaaagttggttacgaattgtgtgacaaggtgccttatttccagctcagagagaacggttggacgctgaatgcttatatggatgggaaatgggatgttagatttgaaatgtgaatccacttgctcagtagtgttaccaattctacttgtctgtactgcacttggaactgttgatctggtaatatgcaaactggagagctttccat

SEQ ID NO: 15249 - DNA, 731 bp, Zea mays
  Clone ID: LIB3059-011-D11_FLI
gcgtgctccaccggtctctgcttcttggcgtcgattcctcctctctcagcctcttgttcttctggctcctcctgcttcctcatgatcaagcgtgtgtcctctgctccgtccttgtccagatggacgatccaatacaagcaattgggacatacaatatatcggagaagccacgttctggcctttgctagtgcagatgcaccacaaggcaaaagaagctcaggtgagaatgttgtgatggttgatccactggaagctaagcgcctagctgctaaacaaatgcaagaaattagggccaaagaaaagctgaagaggcgccgtcaagcagaagcgatcaacggggcattggcagtgataggactcacggctggattgctagtggaggctcagacaggaaaggacatcttagggcagctagctggatatctgacggctatttctagtttatttgggcaataacactggaccatggttggagatttatttttcacgttccacggccaggagaggtcttatctgaatcttatttgatggatccacccaatttttttgggagctgatcccagatggatgtggaatagcgcacccagacttgtatgttgatcaagcacgatagcatgggctgaacattagtatttctatgtagcacatcaatttctgacgatagcgcctgctaaagagcagttctattcatactcaaatgtgaaatgttgaagtcttcgagaaatcttttc

SEQ ID NO: 15250 - DNA, 986 bp, Zea mays
  Clone ID: LIB3059-011-D2_FLI
gacgctaaattcttcattattaaatcttacagtgaagatgatgttcacaagagcgttaagtacaatgtgtgggctagcactcccaatggtaataagaaacttgatgctgcctatcaagaggctaaagaaaaatcaagcgaaactcctgtttttcttcttttctctgtgaatgcaagtggccagtttgtcggccttgctgaaatggtgggtcgtgttgattttgaaaaaacagtagagcattggcaacaggacaaatggactggttgtttccctgtcaagtggcacattgtgaaggatgttccaaacagcttgctgaagcacatcattcttgagaacaatgaaaacaagccagtgacgaacagcagagatacacatgaggtgaagcttgagcaaggccttcaagtgcttaagattttcaaggatcatgtctgcaagacatccatactggatgacttcggcttttatgataatcgtgagaagatgatgcaagagaggaaagccaaacagcagcagtcgctgaaaaaggtcattgatgtgaagctgcccagcgtcaccgacatggagagaagtcctaaaggggagactggatcaacagaactcactggggttgggactgacgtcttgaacaaagagcgtttattaggcaaagcaggagagaaaaatggcgagaaaggaaatgatgtcgccccacaggacctgaaaacacaaactgagaagttggcgggtctaaatggctgttaatatttttcgttagctcaagccgttgacagtggtgtcggggtggaacctaaggctgtggtgggttgtttgaggaaattctgatgtcccattgagcttgtttcctatagttcataggagctagaggcttagctagttgcttgtgtttggtggtagtcatggtctgtgttctggcgtgtcaggtattttaggaatagaaggatgattaactgggttttgcaatgatggatcatgggttttgaggctgt

SEQ ID NO: 15251 - DNA, 701 bp, Zea mays
  Clone ID: LIB3059-011-E8_FLI
attctgacggccaaggggcagccagatgtcgccacccggctgttcctgcggaggctcaaggttgagctgaagctgccagtgctcgcgctggtggattctgatccatacgggctcaagatcttgtcggtgtacatgtgtggttccaagaacatgtcgtatgacagtgccaatctgacgacgccggacatcaagtggctcggtgtccggccgagcgacctggacaagtacagagtgccggagcagtgccgtctccccatgaccgatcacgatatcaaggtggggaaagagctgctcgaggaggacttcgtgaagcagaatgagggctgggtgaaggagctggagacgatgctgcgcaccaagcaaaaggctgagatacaggccctcagttccttcgggttccagtacctcaccgaggtctacctgcctcttaagttgcaggagcaggattggatttgagaactctccaatgctagatatcagtaatttccctagccaagataatgccctccgctcagtattttcaaggaccaaattggcatgaatgaagacttcgccatctagttaatcacatgtatttttgaacaccagctgttgtattatttatttctgctggagaactgttctgtggaaaacattgctgccagatatatgtgctggaatttgatacataacacaggtgatttagattggttgggcctctt

SEQ ID NO: 15252 - DNA, 1251 bp, Zea mays
  Clone ID: LIB3059-011-G2_FLI
gcaagcgtggaagacggcgagctatatggcgtgcaatcgcggcgtgaaggagcaggaggaccccagcgcggcgtctgcagccccagctccggcggctgtggctagggcgagggcggcgcggcctccgaggccaaggagccgcaaggggctcggcgtgcggcacctgctgaagccctgccgattccttgcagctgtccagagggcgaatgccagggtgagggaagcgggggaggcgaccctcgtggcagcgcttgcggcggcccaaaaggagagcgagagggagaacgaggtggtggccgatgtatgcggcgggtggaagagtgaggatggaagtttaaattgtggatactcaagcattagaggcagaagggtaaacatggaagacttctatgacataaaatcttctagagttgatgataagcaaataaatttttttggagtatttgatggtcatggaggtacccatgctgctgggtatttgaaacaacacttgtttgaaaacctcctaaaacatccagcattcattggtgatactaagtctgcaatgagtcagtcctataaaaaaactgacgcagatttcttggatactgaaggcaatattcatgttggggttgggtcgactgcatcaacagcagttttgattggcaaccatctgtatgtggccaatgttggtgattcaagggctgtactatcaaaggcaggcaaagctattgcactctctgatgaccataaaccaaacagaagtgatgagcagaaacggattgaggatgctggaggagttgttgtttggtctggaacatggagagtaggtggtatacttgcaatgtctagggcatttggcaatcgtttgttgaagcagttcgttgttgcagaccctgagattcaggatctagaaatagatggtgatacggagtttcttattttggccagtgatgggctctgggatgtggtgccaaatgagcatgctgttgcatttgtgaaggacgaggatagccctgaggctgcagcccggaagcttacggagatcgccttcaggcgtgggagcaccgacaacatcacatgcattgttgtagaattttgccacgataagatggttgatggttctcccccgtcaaccaataagagttgacttcatcattcgtgttttaattatcccagatttgctaccatgatgctgcgcctctcgaagtatggtctcatcattggttgtctattatgttcgtttatagtcctgccatgctgattttgttt

SEQ ID NO: 15253 - DNA, 587 bp, Zea mays
  Clone ID: LIB3059-013-C6_FLI
tcacggcgggcgccgacgtgctggtgatgccctcccgcttcgagccctgcgggctgaaccagctctacgcgatggcatacggcaccgtccctgtggtgcacgccgtgggcgggctcagggacaccgtggcgccgttcgacccgttcagcgacgccgggctcgggtggacttttgaccgcgccgaggccaacaagctgatcgaggcgctcaggcactgcctcgacacgtaccggaactacgaggagagctggaagagtctccaggcgcgcggcatgtcgcaggacctcagctgggaccacgcggctgagctctacgaggacgtccttgtcaaggccaagtaccagtggtgaaccctccgccctccgcatcaatatcttcggtttgatcccattgtacatcgcgcgtttgacggtctcggtgaagaacttcatatgcagtgacgcgccgctggggtcggtagcagtactatgggattgcattgagctgtgtcactatgtgctttcgacaggacagtagtgaaggttgtatgcaagtttattttttttcattactgatatttggaatgtcaacacaataaatgaagctcc

SEQ ID NO: 15254 - DNA, 786 bp, Zea mays
  Clone ID: LIB3059-013-C9_FLI
caggaaatgaccaaaagagaatacgtcgaagatcaagatgctgaagatcctgatgactttattatctcccttacaactcagattgcacgacgggatgaagaaatggctccttatatcacggaatcagaaaggaattacatatttggtgggatttccagtgttgctgctaatgcatcaataaaggcacttgctcaaatgaagtcaataaacttgttaggagtccagcaaatatgcaggaattcgatagctctggaacaggctcttgcagccataccttcaatagatagtgaagcagtccaacagcgattggatcgcgttcgaacgttctatgagttgttaaatttgccttttgagtctttgcttggattcatcgcagaacatgaatatttgttttctgctaaagaatacctgagtgttctaaaggtcaatgtgccgggtagagaaatacctgcggatgctgaacgacgcatctcacagattttgggtcactagatctaatcagacacaatggtgctatttttgactggttatgccttatgtgggctttggctaccaaatggttctccacctgtttccatggcggtgtttgtgtagatttagctggtttttgctatttagtaattttgtttccttttgtatttcacgtgatatattcttttgtatgtcttatcagttatcattgattgtaaatttgtagtgttccggataaaattttcattattgattattgtaaatgtgttatctgtctggatgcgatatttaataagctcatcagattcagtgtcc

SEQ ID NO: 15255 - DNA, 729 bp, Zea mays
  Clone ID: LIB3059-013-E7_FLI
gaccttcggcgcccgttcaggatccacatcttcccgagcgagttcttggttgacctcttcctcttcggaccacctccaaggctcttggtgtagcttgccactctcaccaatcaagttttcatgtctgatctcgacattcagatcccaactgccttcgatcccttcgctgaggccaatgctggggactctggtgcggcagcagggtcaaaggactacgtacacgtgcgcatccagcagcgtaatggtcgcaagagcctgaccaccgtccagggattgaagaaggagttcagctacagcaagatcctcaaagatctcaagaaagagttctgctgcaatggtacagtggtccaggacccagaacttggacaggtcattcagctccagggtgatcagaggaagaacgtctcgaatttcctcgtccaggccggcattgtgaagaaggagcacatcaagattcatggtttctgagcaaccgccgggtccatagcaaaccaaccctgcatgcagggccagcttattatatataatatctgaggtggagcatatctatctggctgtgtactgcaagcaggcctagtacgccgcctgcgcgttcctcctattacacatataggcccctccctgcgtgtatgcttgttaccgtcgtgtcgaaccttgtactacgaggctccatcgaacatcgatggcttgcttctttatcagaacatgtttgaataaacgctatttggt

SEQ ID NO: 15256 - DNA, 1409 bp, Zea mays
  Clone ID: LIB3059-013-F7_FLI
ggccaaaaagttgctcgcccagcagccagcgccttcaccagatcgagcaaaacagctcagctcagctcgacctaccactacctcccgcttggcgcctgggactggcaaccggcgtgcgcagaatgctgcccaccgggtgcaggtgcagcctcctctcctgcctccgccgcgacaagggcgaggcgggccgaaccgacccccgcgtcgcggacgagcccaccgcgtcgtcgctcggcaagggcagcgccgcggctcggcggttcgcgtgggccgagatcgagtccgtcacggcggggttctcgtccagggtcatcggccagggcggcttcagcaccgtgtacctggcctgcctctcctcctcccgcctcggcgccgtcaaggtgcagcgcagcagcgagcgcctccaccgcgccttccgccaggagcgcgacgtgctcctcgcgctccgacacccgcacatcgtccgcctgctcggatactgcgacgaacgagaggaaggcgtgttggtgttcgagtacgccccgaacggcgacctccacgggaggctccacggcagcggcggcaaggcgacgctgccgtgggcgcgccgcctggcggtcgcgttccaggtggccatggcactggagtacctgcacgagagccgcgacccggcggtggtccacggcgacgtcaaggcctccaacgtgctgctcgacgccagcctcgacgccaagctctgcgacttcggctccgcgcacgtcggtttctcggccgcgctgcagccgccggaggccgcggcggcgtccagggcgtcgtcggcacgcgcacgccccgaccccgtcgtgggctccccgggctacgtcgacccactcttcctccgctccggcgtcgccaccaggaagagcgacgtgtacagcttcggcgtgctgctgctcgagctcctcacggggcgggaggccatatgcgccgacacggggtgccgcctcgccgccgcggtgggtcctacgctcagcgaaggagaagtggccgacgtggtggaccggaggctcggagacgagtacgatgcccatgaggccgcgaccgtggcggcgcttgcgctgcggtgcgtcagcgagggctccgggatgcgcccctccatgacggaggtggttcgcgtgctccaggagaagacgaccgcgctgatctcagccgcggggtgcaggccagccggcaagatggattcttgagctgtattgttacttgttagacgaagactgtaaatactagctttgtttagagagagtataaggtgaagataatggctcttttcttttttactcaaagtggattagtagttgttgaattggattacgttgaaaaattgatgtcagagttcgttgtagatggtctgtagtgtctcgttaatccaatcgccaagttaatctttcccc

SEQ ID NO: 15257 - DNA, 459 bp, Zea mays
  Clone ID: LIB3059-014-C6_FLI
gggcgtgcacattatggcacctaatgctggtgagatcatccacgaagctgtcgtcgccttgcagtatggagcatccagtgaggacgttgctcgaacatgccacgcacaccctaccgtgagtgaagccctcaaggaggcttgcttgcaaaccttcgataaagcaatccacatataatttctcattttttgtgtccaaactccaaagtttgtggtaattttgggtctgttggaaaaaaggcccctgattgtcattttgtttttgtcggccatactgtgaattgaccctttgagttgtccatcttagcggggttttgtgcttccttggcttggtttatccatccaaataataacctgatactatgttttacattttatgcccatgaaccattgatggatatacatttctaaggttccagtaaccgcagtgttttgcgatgtttacatgtgactgttgctgtg

SEQ ID NO: 15258 - DNA, 614 bp, Zea mays
  Clone ID: LIB3059-014-E2_FLI
acgatggtgctcctcgagacactgagactctacggccctgtcatgctcatgctaaggaagcctacctccgacataaggctgggcagcctcagcataccgaaaggcaacgggatcgccatacccgtcccgttcctccaccgagacagagaggtctggggcgacaacgccaatgacttcgatccgttgaggtttcagaacggggtcacgaacgcggccaagaccccgcaggctcttctgtcgttctcgatcgggccgagggcatgcatcggccagaacttcgcgatgctggaagcgaagtcggtgatggccatgatcatgaagaagttctccttcacgctttcctcgagctacgtgcacgcgcctgtggattatatcacgctccagcctaagttcggccttcccatagttttgaggccactcccggatgtatgatgtgaaatggatctgtagcctgatagctgattttttttggggggtctaagtatgcataagaggtcagtattcaggacttggtttcatccgccaaacagtaaggctaaagaaccaaaacttgttgaaaactggtaactttctgggattttatgcccgtattatgtatataaatatataatgct

SEQ ID NO: 15259 - DNA, 761 bp, Zea mays
  Clone ID: LIB3059-015-A1_FLI
tgctagagcaaataaccaagcgaatttctccaatctaccttccccacttccacttcaagatcgatctgcatcacattgtcctccctatctccatgagtcacggcatcagcatgccttgaaaagggccaggggagctggaggtcggtttctcaattcgaagtcagatgacaaggaagagaactccgactcaagtcaaaaagagattcagaacggagttgcgccccaaaagggtggccaaccgtcaacccctccgtctcccaacggtgcgtcgtcagcttatcaggcgcctagtcgtgaatgatgattcggaactcacaactgaagagattttagtccctgacgctagttgtggcagcagctttgtacagtaagtgctagcgggcagcagcgaaatggtgtcatagaaaaacgttgacgagtcagacaggttttggagtcttggttttttttcctctgtttattttacctgtctgcaattttagtagctttgtgtcccttcccctggatagttttttggtcagcgcttaagaaagtttaagggctgatttgttgatcggggatcccgaggggatccatgggagaaaaatcgtcttgctattcaaaattgtattgtaaggggattcctcgcctatggatcctctcgagatccctaaccaccaaatcagccctaagtgtgtagcatattggtctattgtttgcttttgctttgacttggagatttgggagtggagttcataaccttaccggagatttgggagttt

SEQ ID NO: 15260 - DNA, 512 bp, Zea mays
  Clone ID: LIB3059-015-C5_FLI
accatctctggcttgctgtcctccgcgcgtcatctccatccctggcttgagaattgcattggagcaattgacggaacccatgtacctatcaccattgcagaagataaggctcctccttaccgaaataggaaagggtcactttcacaaaacgtgatgttggcatgtgaggtgaatgtggcgatgaagagatgggcttacagtgtgttaagtggaagcaacacatgaagcggacatggagaaggaagctggcatgacactaaaacgcataaagttgacttgtgacgttcatgttttagatgtcttattctactgccaaacttcctagtactccatttttatactatattgtctatctgtacgtgtgaatggagatgatgatattatgtgatgtgatgatggatggattagcttcgttgaatattagatgatattatgtgatgatgatattaaacgggcattgtagtattgatacatgcttcatatttctggatttttagtgatgttttattgtt

SEQ ID NO: 15261 - DNA, 1194 bp, Zea mays
  Clone ID: LIB3059-015-C8_FLI
actttggtcagttggtcttctctctcggatcgcggttggggggttgcggaatgggagcaaaggcggaggagtgtgaggtgccgccgctggctgcgaacgcggaggaggcagcttccaccaatcagtgcaccctcatcttcaaaggctgttccaacagcatggaaaaagtctacgccatcagcagtcctagtaagaaaagaaaatcacagtatgagctgagtgatccaaagttgctaccacttaaatgcaagtttcgcaaacggttatattgccaggatgatgagtctgcaaccacagaaagtttaggatatgatggtattttcatgaacaagacctctgggacggacatggtcagcatacctgaagaattggactcttgtgagaacactataagcctgttttgtgggtgcattgaagttgactcaaaaaatggaattcaggaacaatctttgagaaaaatgtttgagatccggacatctgcatccagtagctcgagcaacaatttttcatcagaggcttttagttcttcccatagcagcggcacgagagacactgacagctgggctatggacgatatagagcgtcatcatccatatgtgatgctgaaaccgcataatgacgaccttgaaaggatattcaacgtgcttgaacagtatgatgacctaatggaggacgaactaatggctggcgatgtttttggttctgctgctcaggtcatggatgaaaagctttactcgaatagcgttgacgattttcagattttgccaacaggtcagactggctatcacggtgagaagaagctaaccatcgatcaagaatttgagcagtattttgcgaacctcatgctgtaggatcgagtggataattttgtgacagaaatggcgttgcgacatccaaacatggtttgcttgctgagcaaagtggcgaaccttggctaccattggagctatcgttctatggtgctgtttggtaacataaatggtaatgataataattcacacctgagtaccaacgacccgagtaccaacggtaacaagtttaaataggtcgatattagttcttagtgtgatatctgattacgattggatttaaacaaacataatttaatgtttatcggttacttattacattacaaatatgtgaaccaaacggcacatatttgtacaccgagtcctatcacttaatgtaaaaaag

SEQ ID NO: 15262 - DNA, 823 bp, Zea mays
  Clone ID: LIB3059-015-G8_FLI
gcgagcccaacttgcacccgcaccaccaggctcacagccttacctgatccttgacaattctgctccctcgccgccgccgccgccgccgccgcccgcccgtcgtcgctgcgcttcggtacccgcgaagcaaggccccgcctcccgtgtacccgccgccgaagaagggagaggagcagatgaaagcggggaggaagaacctgcggcgggcgtgcgacgagggcgccgccgtcacgctcgccgagggagagagcatcatgcaggtcctcacgctgcgcggctccaacgtcatcgaggtgatggacggcgtgggcgtcaggtccctggccttgttccccgccaagttccagaagagcttctggatcaagaacgggagtttcgtggtcgtggatgccagcgggagggaccaggcgctggaatcggggagcaagatcgcgtgcgttgtttcgcgagtcctcttccacgaacaagttcgggccctgcagaagtctggtaactggccggccattttcaactcagctccgactccgaatgaagcttcagaggcgggagcagaagcacaggctgcccaggttgacgaggaaccagattccgatgaagaagacgacgatcttccaccacttgaggcgaacacgaacaggaataggccgtatgaattgtattctgattcagacagtggttctgacgcttgaaaagtaccaaggccatccatcctgtgcgttttgtctccaaggtattcgtgatgtgtgaatggaatggctggacctggatggctggattcatatgtgccatgtcatgtatgttagttagcatgctgttattctgc

SEQ ID NO: 15263 - DNA, 1288 bp, Zea mays
  Clone ID: LIB3059-016-A12_FLI
cgctactgcatctgcggctcatcaatccgtgcagtcccagagcaccccgtcttcccgctactcccgcaagggcgctcgtcgcttccttctccgggggcgtggcaggcaccttctggtagagcgagagcgagagcagcgccgccggcagttcgcgctatggcgtcccagcaggtgttccgggctcagcagcagcagcagcagcagttcccggctcagcagcaggagtcccagccggggaaggagcacgcgatggacccccggcccgaggccatcgtccaggactacaaggccgccaacaagctcaaggacaaggtggcgctcgtgaccggcggcgactccggcatcgggcgcgccgtgtgcctgtgcttcgcgaaggagggcgcgacggtggccttcaccttcgtgagggggcaggaggagaaggacgcggaggagacgctgcgtgcgctgcgcgacatcgggtccgagacgggcgcgcgcgagccgatggccctgcccgccgacctcgggtacgaggccaactgccgggaggtggtggagcgggtggcgtcggcgtacggcgggcgcatcgacgtggtggtgaacaacgcggcggagcagtacgagcgggagagcatcggggacgtgacggaggcggacctggagcgcgtgttccgcaccaacatcttctcctacttcctggtgtccaagcacgcggtgccgcgcatggagcccggcgcctgcatcatcaacacctcctccgtcaacgcgtacaagggcaacaagacgctgctggactacacggccaccaagggcgccatcgtggccttcacgcgcgcgctctcgctgcagctggccgacaggggcatccgcgtcaacggcgtcgcgccgggccccgtctggacgccgctcatcccggcgtccttcggcaaggagaaggtggagcagttcgggtcccaggtgcccatgaagcgcgccgcgcagccggccgagatcgcgcccagcttcgtcttcctcgccagcaaccaggattcgtcctacatgtctggccagatcctccacgtcaacggaggcgtcatcgtcaatagctagatacggaagctgttttgctgtcgtgtgatcgtgtccaagtccaagggaacaaagcgagtgtccgtgtgtaccagtcagtaccaggtagcagtgtcagtacgcgcacgcaggaaggcaaggcagggttcagttgtagcggtgtgtaatgctgtcagcacagcacttgtaaagaaggaacgtgtctgaataaatatgcgtccaagcatgaagacttcgt

SEQ ID NO: 15264 - DNA, 637 bp, Zea mays
  Clone ID: LIB3059-016-A3_FLI
atagaatgctaatgcaagcaattcttgaatcactgaaagactatgaacagtcgaatacaaaaaatgtgcaatccactgcatctgatcctgcatctaaagccaatggtactgtaaaagactgcaatggtgttgctgcagcagcattggagcaagatgcatcctcatttgatgctcctgacaagcatacgaatgtccccaacagtggagaaaaagtcagcgaagggcaaagtacagattgcaacgccggaaagagcagtgcttcggtctctgcttctggttcctcagagcccctggcaccaacacagatggtgaatggacaacctgcttcggtagactcccagaaagtgacccagaatgccaatggagaggatggcacaagagcaactttggtagttcagaagagccggacaggcggcctgatagaaaaatggggttccttcttcaagaacaacgactaaggcgaggaaagatagacgatgacacctttgacaatacgtgttccgttgtgttcatagtcatagaatcgccgttggctgatgtccagcttgattggttttacgtgtaaaatggaaaggaaacaggtgatttcaggacgttcgtgtgtatatagaaggaattgtagcgcccccattgattt

SEQ ID NO: 15265 - DNA, 651 bp, Zea mays
  Clone ID: LIB3059-016-A8_FLI
gaagaagatagacggatcctcccggtgaacgaacatgtcgccaagagagtggatccacgacggagactacaccccggtaatcgtggtcatgattttcattgtgctgctcacagtcgcgtccgtgcttttctcccattattgcgtcggggaccgggcgttcatgcgcactggttatgactttgaaggctatgtgatgcgcaagttcgccgtttgcgtcgacagtggccttcccaagcgggcacatcatgatataaagaatacaaaccctcatgaggttagggttgaggtcgtggaagaggtgcatgcatcagagccctctactcctgctcttcctcttgctacgcctgctcctcctactgctccttaccatgttgctacgggagcaagagcagaagaagtaccatcggcggccgaggaggagcaggaggaagatgaggactgggaggatgatggcgacgatgaggaatttgatttcgaggaagaaggagaccttctaaacctatgatctaggtttgcggaacttctagggtcctttaaaactagccttcatgtgtttcttaaaatatacccttttcaaggtattcaaggggcaacgaatctgatcatggaggatcgagaataatgagaactaaaagtgttgtcaatttcctt

SEQ ID NO: 15266 - DNA, 669 bp, Zea mays
  Clone ID: LIB3059-016-H11_FLI
gctcggctcggcgaacgcgatctgttccccaacctccgcagccgctccaccgtcctccactccggctgccgaatcgacccgccccgatccagatcaggagctgagggatggacgcgaacaggcgccagagtgggatccagcagttgctggctgcggagcaggaggctcagcaaattgtgaatgccgctagagctgccaagtcagcgaggctcaggcaagcaaaagaggaggctgagcgggaaatagccgaataccgtgcccagatggaggctgagtttcagaggaaggttgcagagagcagcggcgactccggtgcaaacgtcaagcgtctcgaggaagaaacggcggcgaagatcgagcaactcacccagcaggccgcaagcatctccccggatgtcattcagatgcttctgcggcatgtcaccaccgtcaagaactgaggagtgctgttcccgaactatgctcgcagacttgtaccgtcgatctatttatttttgtcaagagtgagagtggtgaggaataatatgcccgcttgtatccataattcctgttcgtaactacggaataagccgccgcagctttagcggcaaacgtgactagtactgtcagaacctaccattgttatttggtacaattggtaaataatattgttttaaactggatttttcg

SEQ ID NO: 15267 - DNA, 812 bp, Zea mays
  Clone ID: LIB3059-017-A9_FLI
gcagcagatgccttcacaagcgccacagttgctgcttcaacagcaggcagctttgcagtctagttatcagtcttcacagcaggcgatttatcagcttcagcaacagctacaactaatgcagcagcagtctaacctaaatcagcaaccctctgcgcaggttggttcatctgcagtttcttcaacatgtaactggacagagcatacctcccctgaaggttttaagtactactacaatagcattactcgtgagagtaagtgggagaagcctgaagagtatgtgctgtatgagcaacagcagcagaaactgcttttgcttcaacagcaccaacagaatatcgctgtacagcaactgcagtcaccgccacagggtcaatcacttccatccatgcaaccgattcaacagcttccccaggcacaaggacaaacacaaatgcatatgaaacagcaggaattaaattattctcaatttcaggcagctggttccattgatcccaacaggattcaacagggcattccagctgcgcaagaacgtgcttggaaaaattaagtctgcaggtcgcaataataaagcgctagtcaaagactggggaagtgtacaagcccttgtgctgcccaatttcagtgcctgcacagcctttcgccaacgctgatgagtgtaactccggatttagatttagactgatacgtagatggtagatcccgtatgtgtacattgttgcaacttaggtcatgtactcgtgtatatttttcagcgtgctgccgtgctggtgtccgtacctagttggtagatgtcgtcacttgtgttttatttt

SEQ ID NO: 15268 - DNA, 756 bp, Zea mays
  Clone ID: LIB3059-017-C11_FLI
cccgagggctgcggctacgagttccagatgcagtacggctccatcgggtggtcggtcggcgcgacgctcgggtacgcccaggcggccaaggacaagcgtgtcatcgcgtgcatcggcgacggaagcttccaggtgacggcgcaggacgtgtccacgatgctccggtgcgggcagaagagcatcatcttcctcatcaacaacggcggctacaccatcgaggtggagatccacgatggcccgtacaacgtgatcaagaactgggactacacgggcctggtcaacgccatccataactccgagggcaactgctggaccatgaaggttcggacggaggagcagctcaaggaggcgatcgccatggcgacgggcgacaagaaagactgcctctgcttcatcgaggtaatcgtgcacaaggacgacacgagcaaggagctcctcgagtgggggtccagggtctccgccgccaacagcaggccgcccaacccccagtgatgagcccgtcgatcggtctcgagcgttcctgcaatggcgcctgcgtctgcgtctgtctgccctgaaattttttcgggtcgtttactcgttttcagtcagttactcagtttgtccgtcttcgtcgagcagaactacatccctgctgagggaagctgccaatctttatcctacgatgataatgtctgcaatttcacttgcttccaattgagttctgttacaaatttttgcaacatttttttcccgcatcaataaaattcgttcgcg

SEQ ID NO: 15269 - DNA, 719 bp, Zea mays
  Clone ID: LIB3059-017-C12_FLI
cgttcttcggcttcattgtcacaaggttcgagttcgtcaccgtctagtacgactgtgcgagggaggaagaggcgaggagaagatgcagatcttcgtgaagaccctgacggggaagaccatcaccctcgaggtggagagcagcgacaccgtcgacaacgtcaaggccaaaatccaggacaaggaagggattcccccagatcaacagcgactgatattcgctggcaagcagctggaggatggacgcacgctggctgactacaacatccaaaaggagtcaactcttcatttggtcctcaggcttaggggtggaaccatgatcaaggtcaaaactctcactgggaaagagatcgagatcgacattgaacccactgactcgattgacaggatcaaggagcgtgttgaagagaaagaaggcattcctcccgtgcagcaaaggctcatctatgctggtaagcagcttgctgatgacaagaccgcaaaggactacaacatcgagggtggatctgtcctccatcttgtccttgctctgaggggtggttactagtctaaacctgatgaactagcagtcagataaactgttgtgttggctgcgaaatgtgcaggcctgatgttgaacttgcaaggagataataacaaattatcagctttgcgcctgtgcccagtggaaggggctgtcttccaagttattgtctgatatggaattgttccagattatcatg

SEQ ID NO: 15270 - DNA, 1347 bp, Zea mays
  Clone ID: LIB3059-017-D12_FLI
gcaccatctgccgactggtagcagagagaagagatagaccgagagagagagagagaatctgagactgagactggtagcagctgaagcatcggtgctagctagcttgggcagcaacatcacgatgtcgtccaactgcggcgaggatgagaaggagctggtgtgcgtgaccggcgccggcggcttcatcggctcgtgggtggtgaatgagctgctccagcggggttaccgcgtcaggggaacggcgagggaccctgcggacagcaagaacgcgcacctgctggctctggagggagccaaggagcgcctcaccctgtgccgcgccgacgtcctcgaccgcgcctccctgcgcgccgccttcgccggctgccacggcgtcttccacgtcgcctccccggtgtccaacgacccggagcttgtcccggtggcggtggagggcaccaggaacgtcatcaacgccgcggcggacgagggcgcgcgccgtgtcgtcttcacctcctcctatggcgccgtgcacatggaccccagccggagccccgacgccgtcctcgacgagacctgctggagcgactacgacttctgcaagcgaaccgacaacctgtactgctgcgccaagatgatggcggaggtgacggcggcggcggaggcgggcgcgcggggcctgcagctggccgtggtgctgccctgcatgaccacgggccccatgctgcagcagacgctcaacttcagcaccaaccacgtcgcgcgctacctcatgggcaccaagcgctccatccccaacgccgtcgccgcctacgtcgacgtccgcgacgtcgcgcgcgcgcacgtgctcgcctacgagcgccccggagccaggggccggtacctctgcatcggcaccgtgctgcaccgcgccgacctcgtcgacatgctcagggacctcttcccgcagtaccccgtcacggccaagtgcgaggaggacggcaagccaatggcgaagccgttcaagttctccaaccagaggctcagggacctggggctggagttcactccgctgaggaagagcctgtacgagaccgtgctgtgcctgcagcagaagggccacctgcctgtcatccaaccacagcagcgcgcgtacctatgatgtgaaacaaccgacatatataaacatgcatgcaatgaggcaaacgacacacacgtcagtggaagaacgagaagatgacataaggaattcgacaactttttattaagtgtatattcatgttacttttcagtatctacgggtgtattacgttttacgttcttaaaacaaaagcttttgctgttgtacaattatgatgcacaacatatatagacaagtcacttatgaat

SEQ ID NO: 15271 - DNA, 584 bp, Zea mays
  Clone ID: LIB3059-017-G12_FLI
ccttcccctacaccagaaaaatccccagttctttggtccgcgtcagagaggcggcggcgatgtctgggcgcggcaagggcggcaagggtctgggcaagggcggcgcgaagcgccaccggaaggtgctccgcgacaacatccagggcatcaccaagccggcgatccggaggctggctaggaggggtggcgtgaagcgcatctcggggctcatctacgaggagacccgcggcgtgctcaagatctttctcgagaacgtcatccgcgacgccgtcacctacaccgagcacgcgcgccgcaagaccgtgaccgccatggacgtcgtctacgcgctcaagcgccagggccgcaccctctacggcttcggaggctaggctaggcgcctcttcgtagtcggggactggttaggggacatgtctctgtgtgatgctttctgaggtagtattgctgcaatagctgtgtaatccatcgcttctgcaatgaagcgctttgaagcatgctacgtatgttgtgtctgtgggtgattgtatttctggtagtaacagtgattcttcctgaattttggataatacaagctcattcgcagt

SEQ ID NO: 15272 - DNA, 713 bp, Zea mays
  Clone ID: LIB3059-017-H3_FLI
gtcaaaggagaggaagatcatgtacactagtgaactggagaagaaggtccagactctgcaaacggaggccactacgctgtcagcacagctgaccctgctccagagggatacaactggtttaactgccgaaaacagagagctcaagcttcggttgcagtccatggaagagcaagctaaactgcgggacgctttgaatgaagccctgcgagaagaagtccagcgacttaagatagccgcaggacaagtcgggaacatgaatgggaaccccttcaatggtggactccagcagcagattccatcctatttcgtgcagcagcagcagcagcagcagacaccgtactttggtggccaccaggctcagcttcacaatcaaaatcaaaaccatcgtcaccagatctcgtcaaatgttgggcagacgctcagtggtcagtccctaaacgactccatggatttcatgtgaggagtacaatatcagggccagtattacatcgtataccgactgcagttcagcactgtaaaaaagatagctaatgtacaatgtatgcatgtgcctcattggtagtgtgtagttagctcttctttgtatcattattctgaaaatggctcgtgtatgtcaaaatgatgtctcttttcttctttgctggtttctggagtaatgtgttagactgactagctacctttaacaatttatgtaaatctttagcttttttttt

SEQ ID NO: 15273 - DNA, 1417 bp, Zea mays
  Clone ID: LIB3059-018-C2_FLI
ctatttttgatcacgtgattgaggccataaatgatgtcctaaaggggaacgaagctgatggtagattaccttattggttgtccaatacctctgcattgctatgccttctccaaagaaatctgcggtcaaatggattattcactaccccgtctcgtcgttctggtggagctctagggaagatagcacaaacattgaggtctccttcaaagtttataggccgcagtgatactctaccacatgttgatgcacggtatccagccatactattcaaacagcagcttactgcatgtgtcgaaaagatatttgggcagctcagagataatctaaaaaaggaaatatcacctcttcttaatgtttgcattcaggctccaaagtcaacacgtgggcaatctggaaaagcatccaagtcatctggagttggtgcccacccagcatcgaactccaactgggacaatatcgtcaatttccttgacttacttatggatacattgcgcgaaaattatgtgccatccttctttatacgtaaacttatcacacaattattctccttcatcaatatacagttgtttaacagtcttcttctccgacgtgaatgttgtacattctccaatggggaatacgtgaaagctgggctatcgttgttggagaaatggattactgatgtcacagatgagtttgcgggtacatcttggcacgagctcaattatatcagacaagctgttggatttttggttatacaccaaaaaagaaaaaagacgcttgaggagatcaagcaagatctttgcccgtccttgagtgttcgccaaatctatagaatatgctcgatgtattgggatgacaaatacggtacccaaggcatttcaaccgaggtggttgctgcaatgcgggagatggtcaacaaagatacccagaatcttgtgtcaaattccttcttgttggatgatgacttaagtataccattctctaccgaggatctatcaatggcaatcccgtcaatagattatgctgacgtcgatcttccagaatctcttcagcactatacatcagtacagtttctactaaggcagcaggatccacagcctgcccaatagaatgaatgtggtcagcctgccctgaagatctgtctgtcccctggttgtttctaccaaggcagcaggatccacagcctgcggcctgcccaatagaatggatgtggtcagcctgccctgaagatctgtctgtcccctggttttattggggtaacatccatctgcgatgttgtattgatgtttagagagtacctagtttggtggagtggacacaatttaaaagcaaccattgttgctagatgccaattcattggtgttcactccccaagtatttttcattgtacaggaaatgttgtaagtctgttgactagcgcaaaattagttatatc

SEQ ID NO: 15274 - DNA, 734 bp, Zea mays
  Clone ID: LIB3059-018-D2_FLI
caaattcgttccgtccaggcaaggaagaaatcgagcagccaaggagaggagaagatggctcgtacgaagcagaccgcccgcaagtccaccggaggcaaggccccgcgcaagcagctcgccaccaaggcggcgaggaagtcggcgccgacgaccggcggcgtgaagaagccccacaggtacaggcccgggacggtggcgctgcgcgagatccgcaagtaccagaagagcacggagctgctgatccggaagttgcccttccagcgcctggtccgtgagatcgctcaggacttcaagacggatctgcggttccagagccacgccgtcctggccctccaggaagccgccgaggcctacctcgtcggcctgttcgaggacaccaacctctgcgccatccacgcaaagcgcgtcaccatcatgcccaaagacatccagctcgcccgccgcatccgcggcgagcgcgcgtaggcgtatctcgcgcccggccccagtggcggcggagggatggaggagtgcaatttgtaactttatgctgtttgttcgcttttagacggcgcggcgaagaagtagtgtaaaaacggctttacaagtctattttgtgcggtagttcgtgtaggccgcttcgtcccgaagcgatcttggtaaaagactgatcattcgtgttgccaaacgacacaattcgtatttttttgtgtgccgtgtagaacacggtttgttgttattggaatggttcaccg

SEQ ID NO: 15275 - DNA, 626 bp, Zea mays
  Clone ID: LIB3059-018-G12_FLI
aagctgatgcggcctgtgtggatttgagggttcgttgcccgtacttttatgagctaggatgcaagattgttcctttggtgagtgacaatagcattggcctgttcttgcgatatgcattcaccagtaggtacaaagaggttctaagtaagtcccacagttcttccatgatgacagtgcccaagttcgttccacgccttacaaaagaagaaactcgggtgtttgaatctgccagagaatcgatgactggtttcaagaaatggcgagcaggtgggatgagactgcaaaaggcttccattcttggccggaagaggaagacaaagctgcctgaatgagttttaaggtgatgtgcgctgctttgatttgctagcaccgtgagcaaagagaaaagtgaatggcagattaaatctggatgtactatgatctgctgtacattgtgcacttgtgtacagcagctctgatcagtccgtcctttgtaaggaaaatgaacaccgtcttaaatcatgatatcatgtttggagcaggtgtcatgattttcagcagggtatcttgaatgagtttgaatcatgatatcctgtcttaaatttcacatgttctcaaaatttctgtttccttgagcttatcagctc

SEQ ID NO: 15276 - DNA, 615 bp, Zea mays
  Clone ID: LIB3059-020-A6_FLI
caacaacaacagtttctgccatcactgagccacctagccgtggtgaaccctgtcacctacttgcaacagcagctgcttgcatccaacccacttgctctggcgaacgtagctgcataccagcaacaacaacagctgcaacagtttatgccagtgctcagtcaactagccatggtgaaccctgccgtctacctacaactactttcatctagcccgctcgcggtgggcaatgcacctacgtacctacaacaacagttgctgcaacaaattgtaccagctctgactcagctagctgtggcaaaccctgctgcctacttacaacagttgcttccattcaaccaactggctgtgtcaaactctgctgcgtacctacaacagcgacaacagttacttaatccattggcagtggctaacccattggtcgctaccttcctgcagcagcaacaacaattgctgccatacaaccagttctctttgatgaaccctgccttgcagcaacccatcgttggaggtgccatcttttagattacatatgagatgtactcgacaatggtgccctcataccgacatgtgtttcctagaaataatcaatatattgattgagatttatctcgatat

SEQ ID NO: 15277 - DNA, 822 bp, Zea mays
  Clone ID: LIB3059-020-B12_FLI
gaaatacgatgctgctttgaactttacatgtgttgaattgcgcaccatggaccagcatgaggtataccctgaggcatttgcagatccagagggcctagtatggcaggtgctaaatgctgcgtgggatgctggtatacaagtggctagtgagaacgctctaccttgctatgatagggatggattcaacaagattttggagaatgccaaacctctgaatgacccagacggacggcatttgttaggtttcacctacctaaggcttggcaaagatctgtttgagagacccaacttttttgaatttgagcgcttcatcaagagaatgcatggtgaggcggttcttgatctgcaagtataagattggtagcatattgcatacacgtatacaagtgactgattggctcaggccttatggcttacatttttttcttcttttgctttgtgtttttaggcggtaatatcagctgatttttgagctgttaaatagagaactcgctgctcaatttttaactctagtcttcaagaaggaagacgagttgagttccgtataatcggtgaattcacatccttttgtcgccggcggctccacatgtgccatcatctcatggccatggcgcaatgttatgcagatgtagtgtgaaatccgaaaaacctaggcattctgctcatctccatctccatatcagcgtcaaatgctcaaattttttagttcaagtgactgctgatacgcatggaacaaaacgggaataagtgtctcgatcctactgtcttgcgtgtaatgatgttcaacaatgcagattgtgagtttggatctgttgagcacag

SEQ ID NO: 15278 - DNA, 914 bp, Zea mays
  Clone ID: LIB3059-020-C6_FLI
accaactagcaacatagaaagcacaatagtgtaccaacaatggcagccaaaatattttgcctccttatgctccttggtctttctgcaagtgctgctacggcgaccattttcccgcaatgctcacaagctcctatagcttcccttcttcccccgtacctctcaccagtgttgtcttcagtatgtgaaaacccaattcttcaaccctacaggatccaacatgcaattgcatcaggcatcttacctttatcacccttgttcctccaacaatcatcagccctattacagcagttacctttggtgcatttattggcacaaaacatcagggcacaacaactcgtgctagcaaaccttgctgcctactctcagcaacaacagttacctttggtgcatttgttggcacaaaacatcagggcacaacaactacaacaactcgtgctagcaaaccttgctgcctactctcagcaacaacagtttctgccattcaaccaactagctgcattgaactctgctgcttatttgcaacaacaactagtactaccattcagccagccagctgctgcctacccccagcaatttcttccattcaaccaactagcagcattgaactctcctgcctatgtacagcagcaacaactactaccattcagccagctagctgctgtgagccctgctgccttcttgacacagcaacaattgttgtcgttctacctgcacgctgcgcctaacgttggcaccctcttacaactgcaacaattgctgccattcaaccaacttgctttgacaaacccagcagcgttctaccaacaacccatcattggtggtgccctcttttagattgcttatgagttatagttcaataataaagtttttttgatgatgtttgtggcttcccagaaataagaaagtacatttct

SEQ ID NO: 15279 - DNA, 933 bp, Zea mays
  Clone ID: LIB3059-020-D7_FLI
cagaaacacaccaagcgaagcacattagcaacaacctaacaacaatggctaccaagatattatccctccttgcgcttcttgcgctttttgcgagcgcaacaaatgcgttcattattccacaatgctcacttgctccaagttccattattacacagttcctcccaccagttacttcaatgggcttcgaacacccagctgtgcaagcctataggctacaacaagcaattgcggcgagcgtcttacaacaaccaatttcccagttgcaacaacaatccttggcacatctaacaatacaaaccatcgcaacgcaacagcaacaacaattcctaccagcactgagccacctagccatggtgaaccctgccgcctacttgcaacagcagttgcttgcatcaaacccacttgctctggcaaacgtagttgcaaaccagccacaacaacagctgcaacagtttctgccagcgctcagtcaactagccatggtgaaccctgccgcctacctacaacagcaacaactgctttcatctagcccgctcgctgtggccaatgcacctacatacctgcaacaacaattgttgcaacagattgtaccagctctgactcagctagttgtggcaaaccctgctgcctacttgcaacagctgcttccattcaaccaactgactatgtcgaactctgctgcgtacctacaacagcgacaacagttacttaatccactagcagtggctaacccattggtcgctgccttcctacagcagcaacaattgctgccatacaaccagttctctttgataaaccctgtcttgtcgaggcagcaacccatcgttggaggtgccatcttttagattacatatgagatgtactcgataatggtgccctcattccggcatgtgtttcctagaaataatcaatatattgattgagatttatctc

SEQ ID NO: 15280 - DNA, 897 bp, Zea mays
  Clone ID: LIB3059-020-G1_FLI
cctccccaaaggcccaaacctatcgcccgtacgagactgcgccgccgttgccgtctcctcctccgtcccatcactctctgctcgcgcactctcacctgcccgcgccgtcttcgaccgccaccaagatgaacaaggagaggctcatgaagatggccggcgccgtccgcaccggcggcaagggcaccatgcgcaggaagaagaaggctgtacacaagacggtcaccacggacgacaagaggctgcagggcactctcaagagagtaggggtcaacaccatccctgcaatcgaggaggtgaacatattcaaggacgatctcgtcatccagttcttgaaccccaaagtgcaagcttccatcgcagcaaacacatgggtggtcagtggatctccacagacgaaaaagctacaggatgttctccctgggatcattaaccagcttggccctgacaacatggagcacctgaagaggattgccgaggagatgcagaagcaggtggctgctgccggtgcggcagcacaggtcaaggaagacaacgatgacgatgttccagagcttgttcctggagagacttttgaagaagtagctcaggagacaaaagcctgatcataggctctaaatagtgaaatgttactgcaccaatgctgtgaggtcatggttttcgtgtgatggcactcttcttcctcccctcctaggccagccccagccactctttgtgttcgctgttggaaacttttagtttctccatctcaagcttttacctaaggttgtgcatgttgagatgccatggaaatccattttgctgattatttggtttgtggtcggttcacaatattacatgtgcaccaggttttgctgggttatcactatataatgtttgtgtagtctacacaccgtgact

SEQ ID NO: 15281 - DNA, 607 bp, Zea mays
  Clone ID: LIB3059-021-A5_FLI
atccgctactccaccgaggtggacaacaccttcaccaaggcgctctgcgtggcgctgtccgtgatcgccgtgctcacggtgacggcgctgttcgtcaccacgctggtgcacgcgttcgtgctccggaagctcttccccaacgacatctgcatcgccatcacggaccacaagatgaagcccatcatggagctgcacgagagccatggcgaggacagcagcaccaacagcaacgacatcgagaccggcgccggtggcaaacagtgagggacgcgacgcctagctaggaagcatgcataagcaatgcacgcgcgcgcacacccaagtcgccgagcttcacgcacgccaagcgtggggggatgacgcgaccgagttcttgcttggattggattggatctttctataggattgcctacttggttcgatggcgcacgctgaggacctttgatggattgcatctattagttactctatctactactagtcagtagagaactacttgaatgtacagagtgggctacgttgtatgaaacgcggctgcttatttatcgtggaaacattatgcatgcagagtggctttaaaacttaagcatctcatcagttcctccag

SEQ ID NO: 15282 - DNA, 754 bp, Zea mays
  Clone ID: LIB3059-021-A6_FLI
gagaaaccctagaatggacagactacatgtcgctcgccttcacacagcacgtaagaacatgtagacatcttagcatgcacagcaacggaaggcggtgaaattgacaattaattgactgcatatccacccacccatgcaatgcaatgcatacattcatgcgttcaggtgatcacggagacgctgcggatgggcaacatcatcaacgggatcatgcggaaggcggtgcgagacgtggaggtgagaggccacctggtccccaagggctggcgcgtcctcgtctacttccgcgccgtccacctcgacgccgccgtccacgacgacccgcacgccttcaacccctggaggtggaaggagaggcccgacgtcgtggccatgagcggcttcaccccgttcggcggcggccagaggctgtgccctgggctcgacctggcaaggctcgaggcctccatctttctgcaccatctcgtcaccaatttcaggtgggtggcggaggaggacaccgtcgtcaacttccccacagtgcggctcaagcgagggatgccaatcgcagtgacgcccagaacctgctgaacgcaacgcaacttgccaggcaaaaccatactatacatttatactcaactaaagaggtgtgagaaataatacagtacatgcatgcatgtaatggagggcgaaattaaaagttggcacggcaaagaagctgctggtatgccaaaagttcagtttgcaaattatatagtttaattactattacact

SEQ ID NO: 15283 - DNA, 458 bp, Zea mays
  Clone ID: LIB3059-021-B11_FLI
tcagcccgcaggccgtcggcggcgggcagtgcccggcgctcgggtgccccatcaacctcaactgcgactgccctccccagaaccgcaccgccgagggcgccgcgtgccgcggcccgccggagtacttcaagaaccggtgcccgctcaccaggaccacgcccaccgacgtcgagcccgtgccgcagagctgccgcgccccgggggagctcaaggtcatcttctgccaggcgaccatcgtcacatgcggcggcgaagcagagcgcaccgtcctcgccgacagctagacagatcgagccgtccagctccattcgcctccaggctccgctgaatccttacagtaattgtcatgctttcttttgctccatgtgtttgttagctttggcttcgacgcgcgtgtactccggtggttttattttagaaatcagcagtgaagcaaaataattgtcttcggatatgtt

SEQ ID NO: 15284 - DNA, 743 bp, Zea mays
  Clone ID: LIB3059-021-B9_FLI
gtagggttaggaaggcggcggccagcggcgagagcgcgagaggaagagcaggaggaggggtcggccatgacggggaaggcgaagccgaagaagcacacggcgaaggagatcgccgcgaagatcgacgcggcgacgacgaaccggggcggcggcaaggccgggcaggcggaccggctggggcaggacaagggcgggcatgcgaagctggcgtgcccgctctgccgcaccccggcgcccgacatcaagtccatgcagatccaccacgaggcgcgccaccccaagctccccttcgagccggagaagctcctcaacctgcactcctccgcccccgctgctgccgccgccgccgccgctgccgccgccgctgccgaggccaccacctccaagcccaagcccggcgtccgcggcagcctcaagaagtaagcttgctgggcttggttggctcgcccgcctgcatggggcgcaattcccttcggtttcaatcccatccgccgacccgatctataatcaatcaaaccgccgccctccggcctggcggctgccgcagtcggcctgcggtgtactgttagtctgctgctgatttccgttgttatactgctggtacatgtgtcgtgtgatagatgtgtcaactatatatcaatctcgtcgccggcagctctggcatgtttgagtatgtgttgcttctctgtggtgccggcgacgatggctgctagtactgttaatgtgatcgggtctccttgaac

SEQ ID NO: 15285 - DNA, 865 bp, Zea mays
  Clone ID: LIB3059-021-E6_FLI
gggcttcatcatcaactgagattggttcagatatgaccatctctgacactactacatctgaagtcccggtccatgaaatacctccggctgtacttgatgtgcaggaagaagaagagattgtatccgccgctgtgcccgtttctgtgcacgatgtggctcctttgcagcaggcagagataggtaaagatgtaccaaaacatgttgaaaaggaggttgaggttccccaatggctgaagagtcttgctggtgaggaagcacaggactggagagcctttgtccgcactaggatcaatgggcatactgataggacctatactcacaagcaataccgccaccagttccgttccaaagctgaagtcaaactgtttgtggattccaatgggatgacaacgggcatatttaaaggaagaaaacttcaaaagaagaagatagctggtatggatgctcaaggtgctggaacaagtgaatctgctgggagaagagcgtctgcctaccatgctagacaaaagcgacgacgttcacttggccaccagctgagccgttctgacgaaaagatgcctcctggtttcatttagattcttaatgatataatatcaactttatttctagaggaataaataaaggtacgtacgtacttggaggaaactatgtgagaataattaagctaggtgaacaagggcacctgcaaacgttcattatatttgatgcttgctatgctatatatggcggcggaattgtgttgttagtcgtgtgtttgttatccctaattaaactgctggtcgtagaccttgtagcagcaatgttttgcattgtaaacccttattgtatgcttgttatccctaaattaactggcctgaacagtatg

SEQ ID NO: 15286 - DNA, 582 bp, Zea mays
  Clone ID: LIB3059-021-F6_FLI
ctcaaagccaagcaacagcagcagcttccctagcaacaccttgcccctgagctcatgggatccctgggccccacagtgagcttgagcatcatggccaggccaggcggccagcagccggcggagatggagaggaagaaggacagcggtgtcttcttcggtgggggctgcggcttccggatgccgctgcactacccgcgctacaagaaggcggactacgagagcatgccggagtggcgcgtcgactgcctgctccgcgagtacggccttcccgccgacggcgacgtcgacagcaagcgccgcttcgccatgggcgccttcctctggcccgaccagtactgatccaaccaaacaaagctcagcgctagctagctgcgtgccggccgtgatctcgtcatatttagaggatcagctgcatcagttatagcgagacctaattgatcatctccatcgatcgtatacatgttaccatcgttctgcttgtagttgtagcggccggacatgctgcattctagtatatagctggatcgcgcgctgtatagtgtagtatgtctatgaaataaaagaaatgttgtttattttatc

SEQ ID NO: 15287 - DNA, 996 bp, Zea mays
  Clone ID: LIB3059-021-H5_FLI
gttgatgatggagaaactttccaatggagtaaggttacaacaacaattaacaaccttatccttggtcgagtatattgccatcaccatggcacaatgaacataagtgggaatagacgatattcatgcaaactgacgtttaaagagcagtctttccttgatcggaatcctcgccaggttcaaggagttgtcaacgatgctgatggaagcaaggtcgcaacattgatggggaagtgggatgaaagtatgcattatatcatcaacaatgatgcctccaagaccaactcccatggttcacatgagggttctggtgccactttgctatgggagaaaaacgagcctccagtcaatcccactcgctacaacttgtccacatttgcaataacattaaatgagttaacaccagagctcaaggagaagctgccaccaacggattcaaggctgagaccagatcaacgtcacctggagaatggggagtacgagaaggccaatgctgaaaaactgcgtctcgagacacggcagcggatggcaaggaagatgcaggagagtggctggaaaccaagatggttccaaagggacagcgaggatgggacataccgctacgtcggaggctactgggaggcaagggagcagagaccatgggttggctgcaatgacatatttggtaacttgtctagcagcccaaagctgccgccatccgggtctcaatactagctagctcaagtatatagggggtgtaagggcatagtttgtaggtgttgacatcgcattaatcacttgtggtacataattgagaggggtttctctcgtttctgttgtgttaagctgtgagctaacatgcttctgtcgatactaggagctgacatcgcattaatcacttgtgtttagctgtgagctaacatcacttgtggtacactcaaatcatttgtcacattgaagccaaggacattcagacttaacccaagcttttgtcgatactagaacgcgagaaatattgcc

SEQ ID NO: 15288 - DNA, 850 bp, Zea mays
  Clone ID: LIB3059-022-A11_FLI
aagcaacatagaaagtggaatacagtagcaacaatagagcaacaatggcggcaaagatattttccatccttatgctccttgctctttcttcatgtgttcctaacgcgaccatttttcctccatactcacaagctcctatagctgcccttcttcctccataccttccataactgaccgcttcagtatgtgaaaacccagcccttcaaccctataggctccaacaagcaatcgcaacaaacaacttacctttatcacacctgttctttcaacaatcgccagccctatctttggtgcagtcattggtacaaaccatcagggcacaacagctgcaacaactcgtgctaccagtgatcagctaagtagctctagcaaacctttctccctactctcagcaacaacaatttcttccattcaaccaactgtctacactgaaccctgctgcttatttgcagcaacaacaactactaccattcagccagctagctactgcctactctcagcagcaacaatttcttccatttaaccaattggccgcactgaacccctctgcttatttccagcagcaaatactactaccatttggccagctagctacaacaagccccgcttccttcttgacacaacaacaagtgcttccgttctaccagcagtttgtggctaaccccgcaaccctcttacaactgcaacagttgctgccctttgtccaacttgctttgacaaacccagcagccttctaccaacaacacatcattggcggtgccctcttttagattgcttattagttgtaattcaataatgaagttttttggctgatgtatgtggcctcctagaaataagaagttatatttcc

SEQ ID NO: 15289 - DNA, 736 bp, Zea mays
  Clone ID: LIB3059-022-C8_FLI
cagtcgggtcttctaatggagacactcattgatatcacacccaaggatccactccctgcaccttcagtaggaccacttgacccagactgcaccaaagaaggtttgattctctgtgacaaagagaggatgaaaggacagcaaggtgtaagcttagatgcattggtgggaatatttacccgactaggtagagacatggaggagattggcgttagcaaaagctataagttggctgaaaaggttgcatctataatggaagaggcacaacctcttcttacacggattgaggatttagctgaagaaatgcaacctttgctctctgaagtccgtgatagtgatctgctgaaggatgtggagactatagctaaaggcctggccgacgcgtctgttgacctaagaaggctgaagtcgtccatgctcaccccagagaacacggatcttattaagcagtctattttcacccttatatttaccctgaagaacattgagagtatcagctcggacatctctgggttcacgggtgatgagacgacaaggcagaacatcaagcttctgatcaagtctctcagcaggctattatgattgtttttcaatgtgcagaacagaatgatggattgctttgctttgctttgctttgtttgagacaggaattgatgctggtagagtagggtgactgtgtgtgtcttggtggcacagaggtgtaggaagagtagcagctaattaatgttccacaaggttt

SEQ ID NO: 15290 - DNA, 677 bp, Zea mays
  Clone ID: LIB3059-022-D7_FLI
gccgtcgctgccctacggttcagatcttcgtcgtcatcttctccggcaacgagcacccaaagatggtggtccttcaaccagatcggttcctgagcgagctgacgtgcatgtacgagcggagcacggagaagggctccgtctgggtcaccatgaagcgatcaactctcaagggcaaggcacagttgcggaagatggagaataaggggcaggaggtagagcacaggtgcctcatccgcgcctccaatggcaagaagaacatctccacctcggtttctctaaaggagtacacaaagttccaagcttcatacgcaacagttcttaaggcccatatgcatgctctgaagaaaagggagaggaaagacaagaagaaggctgcagatgctgagaaggcaattgagaccgcacccaagaagcagaagaaagcatcttcaaagaaatcttcagggtccaagtcataaggcgctcacagaactcagtgtgtcttctcctttatgttgtttaccgccagactaattagagtgtcgtgaagttttacttatctggtttttattcgaattcgtgtctggaagatgaaagcctgtgaatacacctttatagagccgtgtcatcgatgctaacattttttgaagcagagttttgaggtgaatgtgaagcgcagtgctgccctgattgccatt

SEQ ID NO: 15291 - DNA, 1157 bp, Zea mays
  Clone ID: LIB3059-022-E6_FLI
cccgaattcccgatctccggccgacgccatggcagccccctccgcggccgtcataggggtgctcgtcctcctcgtcgtgggggcctcgggcgcgcgcctcccaggccgcggcagcaccacccggggagctgcgctgccgcgcgggggagcgccggccacggcggtgttcgcgctgggaagcttctggcggtcggaggcggcgttcgggtgcctccacggcgtgatccgcacctccgtcggctacgctggcggctccaagtccaaccccgagtaccgcaacctcgccgaccacgccgagtgcgtcaaggttgagtatgatccccggttgattcactacaggcaacttttggatgtgttctgggcaagtcatgacccacgtgaggtgtttgggcaagggccagatgttggcaaccagtatagatctgtcatcttcactaatggaaccatcgaggccagattggctggtcttagcaaagaaaaagaacaagctaaagaccgtagcagcgttgttaccacacagatccaaccattgggggtctttcatcatgctgaaccagaacatcagaaatttgaactgaagcgtaaaccgttcctcttgcaattgattgggaatttgccggaggaggagctcctgacatcaacactagctgcaaaactgaatgcatatgccgctgagctctgccctgtgaatacccaaaagagaattaactccaagattgatgaggtcacaaagaaaggatggcccattttaagggacatttaactctttctagcttttggactgaaaccgatcgatgcaatgtagacacagaagaggtgcatgattttgcaaagaagatttttaggaatatttcagctgttcgccactgccatgatgacctcaatcatccattcttcattttgctcacaaagattatatagttggtcataacatgtcgttgtgttactatatttgtaacgcatattcatggttcgaagcttactcaacagacaactttttttcgtattgtttgtttttcatttatgaaaatatagatgttttgtttttatttaataggtattgtgcatgttgtgactgatgttgtactagtaaattgctcgcgcaaagtactgttaaattgaagatcatgctaacatgtgtaccaactatttcgctg

SEQ ID NO: 15292 - DNA, 656 bp, Zea mays
  Clone ID: LIB3059-022-F3_FLI
gtttgacactcataacaagaaagtcagtatgaaatatgatggatattttagaagcataaaccatagtagttgttggtacaaaaacgatacttttattttagcagcacaagcaactaaggtattttatttgcaagacatcaagaattctggaagctggaagattgttcaaaaatttacacataggcacttgtggtgtgtggctgaaaatgacattgatgaaagacctagttcctcaggactatcataccaagatgatacatgtgttggttctgaagtgcaagttaatgaaggagatatggagataactggacatcaggatgctgacgaatctattaatgtcagtgcaagtgtggttgatgaatttcgggtgcaacgagaagaggaagtggaagagtatgagacaagtgacaatgaagatgaaactggatggcaatatgctagtgacaacgaagaatcaataactattgtcaatgacgatgatgatttcagcgataacgagtagcatgttttttgtttgatctgagagaagttaactctatgccgtattttgtttgatttttaagaagtgaactggctactgttatttgagagaagtgaactgtatgctacaatttgtttgatttttaagaagtgaactagctactgttatttgagag

SEQ ID NO: 15293 - DNA, 614 bp, Zea mays
  Clone ID: LIB3059-022-F4_FLI
gctctcgccgctgctggcgggcgtcgggcagctgtacctgaacaacaaccggttcaccggcgaggtccccgcgcggctggtgcaggagctggtgggctccggcggcctgcaggtgctgtacctgcagcacaacttcctgacgggcatcgcgatatcgccgtcatcgtcgctcccctccaccgtctcgctctgcctgatgtacaactgcatggtgccgccggtgtacgcgccgtgcccgatcaaggccgggtcgcagaacacgcggccggcggaccagtgcccggagtggaggggctgagcctgatgtcggggtgagcttgatcgtgtctcagcaacgccagtgccaatgccggatcgcctccgatcaccggttgggaatagcgggaaagcagaactgaaggtcactgattctttgattgatttgggtatagttacaggcaagtaagtgccttaataatccggatttacaggtgtgtgtttgtttagttggtgtatgtgcgtttgtgtatctctctgtgctgtatagtgagcagtactccctcccggagcttctatggcactgccgcatgatgacgctgtctgcatctgatgatggatggtgttagtaagaggcc

SEQ ID NO: 15294 - DNA, 1092 bp, Zea mays
  Clone ID: LIB3059-022-G1_FLI
cagcttctgcttgctctggggggaaggagagagagagagagcgagagagagatctagtagagaggctagtaggtggtcctcgaacgaagatgttggcggtgttcagcgggcaggtggtggaggtgccggcggagctggtggcggcgggcagccggacgccgtcgcccaagacgaaggcgtcgcagctggtggggcgcttcctggccgcgtccgagccggccgtgtccgtgcagctcggcgaccacggccacctcgcctactcccacaccaaccaggcgctcctccgccccaggtcgttcgcggccaaggacgaggtgttctgcctgttcgaaggggtgctggacaacctgggtcgtctgagccagcagcacgggctgtcaagcaagggcgccaacgaggtgctcctcgtcatcgaggcctacaagacgctgcgcgaccgcgcgccctacccggccagcttcatgctcgcccagctcaccggctcctacgccttcgtcctcttcgacaagtccaccaactccctgctagtcgcatccgaccccgagggcagggtgccgctcttctgggggatcaccgccgacggctgcgtcgccttctccgacgacatcgacatgctcaaaggctcatgcggcaagtcgctcgcgccgttcccgcaaggctgcttctactccaacgccctcggagggctcaagtgctacgagaaccccaagcacaaggtcaccgctgtccccgccgacgaagaagagatctgcggtgccactttcaaggtggtggaagggtctactgtcctgacggcgctgcactgatctatcatcatcaggcggaggcgatgcgatgatgatgcagaactttgtacatgcgttggtggatggtggtgtaacatagtggctgccaacaagtcatgctcatgcaaaccgatgaatctatctctgtatcatcgatctcggttgcttgctagtccagactccagacatggctatatatatatagctggtgctaataaataggagtataatcgtcatatcgatcggttgcgtgtggaatgccaatcatgtgtgtaatctgttggcaaataacaaacctctgttcctc

SEQ ID NO: 15295 - DNA, 900 bp, Zea mays
  Clone ID: LIB3059-023-A1_FLI
caaacactaataattcagaaggatccctggctggtgctgtctgggatgtattccgcaggcaggatcttccaaagcttaatgaatatctagctgttcatcgggaagattgtgcagctagatgtcaagcagtgtcttctgttaagtatcctatttatgatcaaactgtgtaccttaacgattatcataagaaggtgttgaaggatcaatatggaattgaacccttcacattccaccaacatattggtgaggctgttttcattccagctgggtgtcctttccaattgaaaaacctccagtccacggttcaattggctctcaattttttgtcacctgagagtttgccagagtcagtccggctgtcccaagagatccgttgcctgccaaatggtcatcttgcaaaactgaagatgcttgaggtaaaaaagatctccttatatgcagcaagttctgctgttagagaaattcagagaataacccttgatcccaagttcaatcttgatgctagttttgaggatcaaaatttgactagggcggtttcagagaacttggcaagagtaaacaaacggaaggtatcttgcagttgagattgtgggggcctggtgaaattatgacatgccattcagaagattgaagtagatatagtgcttgtacatgtattatattgtgtcatatgaaaggaacacattctaattcttattgggttagacattgactttacctgtatattgtgggttaggaagagtaacagttaagctcctgagaacaagataaaaaggcgctggaaagctcatgtagaattgttagcacaataatctctgttggtagcatctgaagaataattagaccgaaattgttacattgtgaacacagggttcaagattcaaatactacattttcacc

SEQ ID NO: 15296 - DNA, 1095 bp, Zea mays
  Clone ID: LIB3059-023-B6_FLI
caaaagcacactctgttcggcttgccttgtcctttttccttgccatatggctaccaagatggtcctgtgtcgctttgtagccctcgcggctgtcgcctgcctcctccgccctggcgcgcccgtcagagctccaccgcaagctctccgggtggtccgacgacgcgggcgcgacgtggtacggcgcagccaccggcgctgggagcgacggtggtgcatgcgggtaccagaacgccgtcgaccagccgccgttctcgtccatgatcgccgccggcagtccatccatcttccagaacggcaagggctgcggcgcctgctatcaggtgaaatgcaccgggcacgcgtcgtgctccggcagcccggtgaccgtggtcctcaccgacgagtgccccggcggcgcgtgcctggacgagcccgtgcacttcgacctgagcggcacggcgttcggagccatggcgaaggacggccaggcggaccagctccgcggcgccggacacctcaagatccagtacactcgggtgccgtgcaactggcgagggctggacatcgcgttcaaggtggacgccggctcgaacccgaactacttcgcggtgctcatcgagtacgagtccggggacggcgagctggagtccgtggagctcatgcagcgcggcggcggcggcgggggggcgtgggcgccgatgcagcagtcgtggggcgcggtgtggcggtacaactccggcgacaccctgcaggcgcccttctccgtccgcctcacctccggctccggcaggacggtcgtcgccagcaacgtcatccccgcggggtggacgcccggcgccacgtaccgctcggtcgtcaacttcgacaactaacgaggacggacggacggaccgaaataacggcacgcccgcccgcccgcccgccggccggccgccgggatggccgtgaaaggcgtggcgctatagcttttagtttatgattcgagctgtgcgcgggtgcctactatgccgacgacgctactgtactgttgcgtgcgtgacatgtgcaaatccgcgcagtcaccgtgtaccgccggaatggcgtgtgtttctttgaataaaataaaggctggaccgg

SEQ ID NO: 15297 - DNA, 1143 bp, Zea mays
  Clone ID: LIB3059-024-F3_FLI
ggatgcgcacaatgaaagaagacttcattatgctttgtctgcaacagttttgcaagcactgccaccatcctatcctatctggcaaaagttgggtttgcactagctgtaaaaatttccatctatgtgacaagtgtcatgcagaggagcagaatacagcacagaaggacaggcatccggccaccacaaaacagaagcatgcattcgaaagaatggaggtacaacctcttccagagactgatgatggagatccgacaatggaaagtaagtattttgacagcaggatcgatttcttgaagcactgccaagacaatcaattccagtttgataccatccggcgggcaaagcactctacaatgatgattctgtattacctacacaattcaacctgctctgcttgccatcgtgccgtggaccaatgcttggtgtggcggtgcctagagtgcctaggctgcaccttttgtggtcaatgctataaacaaaatggtcaaggcttgcatattcatgaattaaggcagattgacactagagaaacttcacagaagcacactctacaggactacattgatggccttgtgcatgcatcgaggtgctatgatccacgtaactgcacccatccactctgtttaaccctgaagaaactgttcgcccatggtgcacgatgccatgtccgtgcctgcaatagcggcggttgcaaaaagtgtctctttatgtggaaactcctgttccgccactcaaaagattgcaacgacggagactgcgcggttcctagatgcagggatgtaaaggcattcatagctgaaaagatgaagcttaaaatctagtaatggaccccctcccccttctcccccttccttaaccagtcaaattcgttgatgaagatgcaataaactgcggttggccattgctggtggatggaactgcaaggtaaataatgtggtgacttactgcttctggtgtggttgcatgtgctccatgccacagaggatcacccaaccgaagcttacataggcaatctgacattggtttttagtgcccgtacataccttgtacatatagtttttctctccaacacaaataggggtttgttttaatttcttcatcgtcaaagttttgttctccataatgtctgcctcatttttgttc

SEQ ID NO: 15298 - DNA, 661 bp, Zea mays
  Clone ID: LIB3059-024-F4_FLI
aaaaaaagaagaaggaagaagatttgatctgatttaaatcttggtagaactgagcatacaacatgtctatgaatcaatcaatttgttttgcaggcgtacatggtcggcgagcacggcgacagctcggtggcggtgtggtcgagcgtgagcgtggcggggatgccggtgctcaagtcgctgcaggagagccaccgctgcttcgacgaggaggcgctggagggcatccgccgcgccgtcgtcgacagcgcctacgaggtcatcagcctcaagggctacacctcctgggccatcggctactccgtcgccagcctcgccgcgtcgctgctccgggaccagcgccgcatccacccggtctccgtcctcgccagggggttccacggcatccccgacgggaacgacgtcttcctcagcctgcccgccaggctcggccgcgccggcgtccagggcgtcgccgagatggagctcaccgaggaggaggccaaacgactgcgccgctccgccaagaccatctgggagaactgccagctcctcggcctctgatgatcacatcaccgtctctcttcattaattaattattgcatcaatttccacaacctagcagcagcatccggtacccgtgttcaataaaaacaaaccgctacaatgtgtgctttctagctgc

SEQ ID NO: 15299 - DNA, 1325 bp, Zea mays
  Clone ID: LIB3059-025-A8_FLI
tgctgctgcgcttcgcggacctgatcgagcggcacgcggaggaggtcgcggcgctggagacgtgggacaacggcaagacgctggcgcaggcggcgggggccgaggtgcccatggtggcgcggtgcgtccggtactacgccgggtgggcggacaagatccacggcctggtggcgccggccgacggcgcgcaccacgtgcaggtgctgcacgagccggtcggcgtggccggccagatcatcccctggaacttcccgctgctcatgttcgcctggaaggtcggcccggcgctcgcctgcggcaacaccgtcgtcctcaagaccgccgagcagacgccgctctccgcgctctacgtggccaacctcctccacgaggctgggctccccgagggcgttctgaacgtggtgtccggcttcggcccgacggccggcgcagcgctctgcagccacatgggtgtcgacaagcttgcgttcacgggatcgacgggcacggggcagatcgtgctcgagctggcggcgaggagcaaccttaagccggtgacgctggagctcggtggcaagtcccctttcatcgtcatggacgacgccgacgtcgaccaggccgtcgagctcgcgcaccaggcggtcttcttcaaccagggccaatgctgctgcgccgggtcgcggacgttcgtgcacgagcgcgtgtacgacgagttcgtggagaagtccaaggcccgcgccctgaagcgcgtcgtcggcgaccccttcagggacggggtcgaacaggggcctcagatcgacggcgagcaattcaacaagatcttgcggtacgtccagtccggcgtcgacagcggtgccaccctcgtcgccggcggcgacagggtaggcgacaggggcttctacatacagccgacggtgtttgccgacgccaaggacgaaatgaagatcgctcgggaggagatattcgggccggtgcaaaccattctcaagttcagcggcgtggaggaggtgatccggcgcgcgaacgcgacgccctacgggctggcggcgggggtgttcacgcggagcctggacgcggccaacaccctgtcgcgggcgctgcgggcgggcaccgtgtgggtgaactgctacgacgtgttcgacgccaccatcccgttcggcggctacaagatgagcggcgtcgggcgggagaagggcatctacgccctccgcaactacctccagacaaaggccgtcgtcacacccatcaagaaccccgcatggctgtaaatcacatcctccgtccttgcccgcacggcgctgcgccggttctcggagaacgtgacgaataaaacaaacggtttggtt

SEQ ID NO: 15300 - DNA, 1183 bp, Zea mays
  Clone ID: LIB3059-025-B8_FLI
agcgaggtgcaggagctggtgcgcaccaagggcctcttctccttctacgaggacggccaccaggagtgctgccgggtgcgcaaggtgcggcccctgcgcagggcgctcaaggggcttagggcatggatcaccggccagaggaaagaccagtcccccggcaccagggccagcatccccattgtccaggttgatccttccttcgaaggcctggatggcggggccggtagcttggtcaagtggaaccccgtggccaacgtcgacggcaaggacatctggactttcctgcggaccatggacgtacctgtcaacaccctgcatgctcagggctacgtgtccatcgggtgcgagccgtgcaccaggcccgtcctgccggggcagcacgagcgtgaaggccggtggtggtgggaggacgccaaggccaaggagtgcggcctccacaagggcaacattgacaaggacgcccaggcggcggcccccaggtccgccaacggcaacggctcggcgggcgccccggacatcttcgagagccccgccgtggtgtccctcacccgcaccgggatcgagaacctgctgcgcctggagaaccgcgccgagccgtggctcgtggtgctgtacgcgccctggtgcccgttctgccaggccatggaggcctcctacgtggagctggccgagaagctggcggggtccggggtgaaggtggccaagttccgcgcggacggcgagcagaagccgttcgcgcaggccgagctgcagctgcagagctttcccaccgtgctcctgttcccgggccgcaccgccaggcccatcaagtacccgtcggagaagagggacgtcgactcgctcctcgccttcgtcaacagcctccggttcgtagagaaggaggtggaggggactgggtttggtagagacacaggaagggaagagggttcaggggaaaaaaaatcaggtgtagcttttgtaactgcaaaatgattgcagcaggtatacctgaagtctgagcttctgaggccctgtgcttggtagccgagggagagattacttgttgtgtgtgcttatagtcagtggcgagtggctactgtaaggttcacccatatggttatctaaagcactgccgtagattgtattatttatatagtagagttttaatatagacataagaatgtgtaagccgcagagatagcct

SEQ ID NO: 15301 - DNA, 718 bp, Zea mays
  Clone ID: LIB3059-025-D6_FLI
gcgctctctttctctatcgactggcgacgactccgccaccgccgccgctctacgcgagacgcccaggtcttcgccaacgacgagcatccgggttagagaggaagaaattgcaaccgaaacaatggcggcagattccggcgctcgcagacaaccaagcttcaccaaggtcgaccagctgcgccctggaacccacggccacaacctcatcctcaaggttgttgactccaagatggtcgtccagagaggccgcgagggagggccccagggaagacagatgaggattgcggagtgcttggttggtgatgaaaccggcatcattgtcttcactgcaagaaacgatcaagtggatgtaattaggcctggaacaactgttgaactgaggaacgcaaagatcgacatgttcaagggttcgatgcggcttgcagtggacaagtggggaattgtgaaagctgctgaaagctcagctgagtggacagtcaaggaggacaacaacctgtccttaattgagtttgagctggtgaccgtgacggagtgaaaaccgccattgcttaggagtattgttggtttgctgtgttgttgaacctaatcatcatcgccaatcaataaggactcgtggttgatgttctcggcatcggagttgcgtattgctgtaccgttgcttgcttactgtgcgttgtggctacttttgactgctatcgaataataataaattggtgtc

SEQ ID NO: 15302 - DNA, 800 bp, Zea mays
  Clone ID: LIB3059-025-D7_FLI
tcctggcgcggttccggcccatcgcgcccaagcccacaccggcggcgacaggggaggggagggacgtccccgtggagcgcgacctgctgcggaagctgctggagcccagggtcatatcgccccgggcggtgcgccccgtgtggtctgccatccacgtcgggtgcatccaccgcaccgacgacgcggcctgcaccgacgccggcgtctcgaagacggcggttcaggtggaggcggagctggaggtcgacgcgctcccggcggtggtctccgactccggcaaccgcgtccggctcgtgaacgacgcgtacaaggagatggtggggcagcccgagtgcccgtggctcgacgccgtggctgccacgtcgaggaggatcagcggggaggtggcgctggtggtagcggaccggtcctctctgccggactcgtacggagcgttcacatgcacggcaaagatcgagtgggaggacgacgggaaggtcacctccatcgctgcaccctgcgacgtcagccggctgcagtgcgagtccagggactacctcttcgcctggaggttccgcaccgccgccgccgacgccgacgcatccgttgggcacagctcagaggagattagtgagagttagggaagcttgagctgcatccaatgaaaccaagtgcatagactaagccgctagctgcatgttaaaactgagcagcttcctctttcgcgaagtccaataggatgtagacccagttctgaaatcctgagtaaatataagatgttgactggagaatgcaaaggaagtataacctgccctttcagg

SEQ ID NO: 15303 - DNA, 888 bp, Zea mays
  Clone ID: LIB3059-025-H12_FLI
gccgccgccgaaggacggaaggagaagagggtacggccgtctcctcgcccccatggcccacgagaagaagctgtccaacccgatgcgggagatcaaggtgcagaagctcgtcctcaatatctccgtcggggagagcggcgaccgtctcacccgcgccgcaaaggtgctcgagcagctcagcggccagacccccgtcttctccaaggcgaggtacacggtgcggtcgttcggcatccggcgtaacgagaagatcgcctgctacgtcacggtgaggggcgagaaggccatgcagctgcttgagagcggcctcaaggtcaaggagtacgagctgctcaggaggaacttcagcgacaccgggtgctttggtttcggcatccaggagcacatcgaccttggtatcaagtacgatccttcaacaggcatctacggaatggacttctacgtcgtgctggagcgtgcgggctaccgtgtggcacgccgcaggaggtgcaagtcccgcgtcgggattcagcacagggtgaccaaggaggactccatgaagtggttccaggtcaagtacgaaggcgtcatcctcaacaaggctcaggccaacacgttgtaaacctcacctgtgggcaaaacagctctctggtctcttctcctcctccgtgtcaacgcaagaccaccacccacctcgccaggcttttttgggtttaatttgtgttctcagccctgatgtttagtctgctagcactctgtgggtgctgttgtcgcaagatcaccaccatgtcaattatttccgtgcccttgtcgcactctgtgtgctgttgcttgaaaacatgctagtttgatctccctagcgcagcttgtgatctggcttttttgtttggttatatgcttttatctgcc

SEQ ID NO: 15304 - DNA, 516 bp, Zea mays
  Clone ID: LIB3059-026-C11_FLI
agaaccccgtgttttgcgtggagaagaaggcaagccgctcgacgctcgtcgatgtgcggagctatgcacaaatcggaatcgccatcgtcctcacaaacaccgattgggtttgtttatggaccgagaggtgacgaccgtgcaagtgatgtggcgacaaccacaagatgcagttggtggacgtactgaaggatggtggacttaaccagtggatgctcgccgagcgagtaccctcccccagcaaacactgtctaagtgttaaattaaaggtactccttaggatgattggatgttgttgtgaattggccttcatccctgccgccaggatatatggtcaagagggttattgcttccgcaggagaggaccaggaggagtagcgtggccaggcttcgccatgttactcggttttctccgttagttatttccgctgcattaaaatttatggttattatttctgaaactccaataatgtaattactaatgagacttattaaatttgtggtattatgttttattgt

SEQ ID NO: 15305 - DNA, 922 bp, Zea mays
  Clone ID: LIB3059-026-E3_FLI
caacatagaaagtggaatccagtagcaacaacagagcaacaatggcgaccaagatattttccctccttatgctccttgctctttctgcatgtgttgctaacgcgacaattttccctcaatgctcacaagctcctatagcttcccttcttcccccataccttccatcaatgatagcttcagtatgtgaaaacccagctcttcagccctataggctccaacaagcaatcgcagcaagcaacatacctttatcacccttgttgtttcaacaatcgccagccctatctttggtgcagtcattggtacaaaccatcagggcacagcagctgcagcaactcgtgctacctgtgatcaaccaagtagctctggcaaacctttctccctactctcagcaacaacaatttcttccattcaaccaactgtctacactgaaccctgctgcttatttgcagcaacaactattaccattcagccagctagctactgcctactctcagcaacaacaacttcttccatttaaccaattggccgcactgaaccccgctgcttatttgcagcagcaaatactactaccatttagccagctagctgcagcaaaccgtgcttccttcttgacacagcaacagttgctgcctttctaccagcagtttgcggctaaccccgcaaccctcttacaactacaacaattgttgccctttgtccaacttgctttgacagacccagcggcctcctaccaacaacacatcattggtggtgccctcttttagattgcttattagttgtaattcaataataaagttttttggatgatgtatgtggccaaccagaaataagaagttacatttccagattttaatgtgatattggtctccaagggtgttcgataattacttttcctaagattgggagtaacaagctttaaatc

SEQ ID NO: 15306 - DNA, 721 bp, Zea mays
  Clone ID: LIB3059-026-H6_FLI
acgcgtgggtcgtcctcattattattctcactggtcgatctgctaacacaaacagcagcagctcctcctcactagctagccttctctatttttgctactgcaagtgtccaagtctgcgacgacgtccgagatgtcgacggtgagccgtgcatcccttgaccagaagcttgccctcgccaagcgctgctcccgagaggcgactcttgccggagctaaggcggcagcagtggcgactatcgcctccgcgattcccaccctcgcgagcgtgcggatgctgccgtgggccaaggccaacatcaaccccaccggccaggcgctcatcgtctccacggtggccgggatggcctacttcatcgccgccgacaagaagatcctgtcgctggcgaggcgccactcgttcgaggaagctccggagcacctcaagaacacctccttccagggcaccggacgcccccacccggctttcttcaggccatgatgagatcagatatatatatgacacatccgtcgacctcatcagtcatagagcccagccagccagtcagtcagtcagcacaagcacaagcaccagagatgatgccatccatgtctgcatgtatgcatttataaaaaataaactgctaggctgatgacgcgctctaatataagctagccgtcgcgcgcgcgtgctaatcgtcctcgatgtactagtgattgtgctatttaaatatatagtttcacg

SEQ ID NO: 15307 - DNA, 500 bp, Zea mays
  Clone ID: LIB3059-027-A10_FLI
caagaaccgctttgagccggcattcgtgaggaacccgctgcaggcgatgaagaaggacaccctagaacgcgcccgggagcccaacttggatctgaaggcgtacctggccaactcgtacctgcacccggtgttcaagggggacgaaggcgacgacaggtactcggtgatggacgacgatgggtggatggaggaggaggtgatcgtgccgacgaagcggcattcgaggaggacgacgcccgcgcagagcaagcatgaagggtcggactcgctctctgtgctcgagagttctctacagcggtagtcacagtaggagcttagcctgtacagaatggatgaaaatgatcacggccctgctccattgcttttgctttggttgttggttgttcatgtcacaggggacacacacacacagatagaattcaagagagctgtggggaggactgaggggagagatagtttactgtagcttggacaaagaatctgaatacagcagttacatt

SEQ ID NO: 15308 - DNA, 613 bp, Zea mays
  Clone ID: LIB3059-027-B8_FLI
cttcaaaacgagttgacaatgcgggtttcaggcagtccagcaggttggggccatggcaccgccagatcagatccccctcttcctcactcaaccgcagtgttctcgtcggagcaggcgatgcaaccacccaccattgcaagcgttgtattcccgttgcagcagccactggcaccatcagcaatgaccaaaccacctcatgctgcaccaccactcgaactgaagctctttccagaagtggcatctgccgaaggccatgagccgtgtgaagaccacaaagctcccaaccatgtggcacgaccacaggcaaggtacccaacgcaatcagcctcatggcccgtaaacctgttctctggccttccacgaatggaagatgagcaatgcagtagcagcacaagcggcagcagcagagaggataacacagatatagaatgagtggatcagctcctacaatcaaagagtctctgttttgagtctagtggatgtaaatttgaatctcctttttggatttcagaacgatagattatactctgttggaaataggacccctcccattgcaagtctttgttggaatctctataaatgcgaatcaatcttactggcactttgcatgccg

SEQ ID NO: 15309 - DNA, 1064 bp, Zea mays
  Clone ID: LIB3059-028-A11_FLI
tctacttctcctagagatcaatggtctggtatctgaagtcaagcagatcttacctggtatggttcggcgacatcggcattcagatagcactggtagcacgacttcctccagaagcaatccaatgcgagaagacatgttgaaccgatcaaacacacatcgtgctagaagtcagtttttagaaaatcacctggcaaagttatttgagcaaaaaatggaaatattcaccaaagttgaatacacacaggaatctgttatttctactgtcctcaagctctgcctgaaaagcttgcaagaatttgtccgtcttcagactttcaacagaagtggatttcagcagattcagctggatatggaatttctcaagacctctcttaaggaatttgtggatgatgaagcagccattagctttttactcaaagaggtgaacaatgctgcccatgagagatgtcttgacccaatccctcttgagccccccatattagataagctcataaatgcaaaactagcaaaaattaaagagagaaacccaaatatgcggtagctatgcacagattggtgtcgtttactagaattcagttctgtccatttgaatgcactattcagagttgtgtgtgcaacttcatagagtttagggcacatagcatggatgaaaatctggagtcagactcagatttgaataacactccccaaattgtatactggtatacttaatttggggtggtcgagctgttagcatccccttgcttgtcaggctaccgtcaagttgtcttctgtgcattgttttcttatcccaggtcaggtactggtctgaatttaatcaaatgagcatcgagctgttagaaaaccaaggcaccaactctaatagattcaccatctggaaagcgagggcagttatcatgccttgtgaagatggtttgttgggattgcgattccctttatgcgtcctgtttttttatttgtcatcttctgctgtatcatcctttctttgaactatattttcatgtggtacatgataccttttgttaccttcgccacagtactgctcacgaatagcattttgagcc

SEQ ID NO: 15310 - DNA, 587 bp, Zea mays
  Clone ID: LIB3059-028-C1_FLI
gaattaccggtgtgctataccaaagctgaacaaggaaattgttcctgagaaatgtaaggttgtggtgaaaccaaccagggttgttgttactcttttcaagggttctaaaggcaactggttagacttgcacttcaaggaagacaagttcaagccaaacatggacaaggaaaaagatccgatgtcaggaattatggacttaatgaagtacatgtacgaggagggcgacgaggatatgaagcgcacaatagccaaagcttggtctgatgccaggtctgggaagacgactgattcgatgagcggattacgttgagctggtataatcagttgatgggcttaagttttctgcgctagcccctgcagccgaagtgtttctgatggttcaaatagcgttgcagtgccttgttggtgttagtccttgtttatcttacatttgtgagtgaagttggacgtgccaaacatatttaaatatatcctcttgaacgggggaaagatcatatcaagtccaagaggttttgtgcttttgtggaattaccacggcgtttctgtttgctacgaaacgatggtagtaacagcttgagccttgccag

SEQ ID NO: 15311 - DNA, 860 bp, Zea mays
  Clone ID: LIB3059-028-D1_FLI
tgaaatgctcgcaaggtttgttgtagatagtcacgccagatcccagccgaagggggctaaccttgaagacagggtttcaactgatgtggatgatgatccactggctgctgcaaggcaagctgacccagatgtcctttcccaagacatgctgaagaaatacataacctatgctaagctgaatgtgtttcccaaaatacatgatgccgatctagacaagattagccatgtttatgctgaactccgccgtgaatcctctcatggccaaggggttcctattgcagtaaggcatatagagtcaatcatccggatgtcggaggcacatgcaaggatgcatctgaggagctacgtgtctcaggaagatgttgacatggccatccgtgtcttgcttgactcttttatttcgactcagaagttcggtgtgcagaaagcacttcaaaagaatttccggaagtacatgacattcaagaaggactacaacgagctgctcctgctgctcctgcgcacactggtcaaggacgccgtgcacttcgaagaaatcatggcaggatcagcctcacgtcttactcacgtcgaggtcaaattggaggacctgaggaacaaggcccaagaatacgagatctacgatctgaagccgttcttctccagcgcgtgcttcagggacaacggcttccttctggatgaagggcgtgggatcatcaggcatccactggcggagtaacaactgagaactgatcttcctcatgtctagaaccggcctttgtctgttacggccctgagatgaagagtgatgatatctgacctcatttgttataggcatacaattgacacttggctggtcgccttttggatttagtatctgt

SEQ ID NO: 15312 - DNA, 638 bp, Zea mays
  Clone ID: LIB3059-028-E8_FLI
cgccatggtcgccgcccgcgaccgcgacgactggatcaacagcgtcgtggccgggctaggcaccggcgcgctcttccgcgccgctaacgggccgcgctcggcggtcgtcgccggggccgttggtggggttcttgctggcgccgccgccgctgccaagcaggttgggaagagatacctccccgccctctaaatctgattgcggtacttgtctctgccctgccatgccgtgatcaagggaaatcatttcgtcgcgtggatgttatttcttcgttctcgttaattatttgggaagagtcatgttcttctcgacattcctatatattgttgacatccatatgctggtactatatatgtcaaagaacgatctgatctcaccagatcacgaaatttttggtccacattgcaatgtaacattagacgctagctggtatcgacacaataatactgctttttccattatgctggagaacccatgacattgtgaaatgtaatgctgagtgtagtgtagttttgctagattgtcgctgttttcctatatctctttaaagacgaaattcttcgcctgcccgatgtatgtaaaaaaagacatgccttgatctcagtgagatgttttatacgacaaattgttgtacttctcg

SEQ ID NO: 15313 - DNA, 895 bp, Zea mays
  Clone ID: LIB3059-028-H8_FLI
ctctgctcccgatccatctccggctgccgcgcgcggtagatctccgttcggcagcgtgtgatctgcccgatccgtgcggttgggtctggatcgggtggtgaaggtagcgggcgcggaggaagatggggctcgcgttcgggaagctcttcagccggctcttcgccaagaaggagatgcggattcttatggtcggtctcgacgccgccggtaaaaccaccatcctctacaagctcaagctcggcgagatcgtcacaaccatccccaccatcggtttcaatgttgaaactgttgagtacaagaacattagcttcacggtctgggatgtcgggggtcaggacaagatcagacctctctggaggcattacttccagaacacacagggtcttatctttgttgtggatagcaatgaccgtgaccgtgttgttgaagccagagatgagctgcacaggatgctgaacgaggatgagctacgtgatgctgtgctgcttgttttcgccaacaagcaagatcttcctaatgccatgaatgctgctgagatcactgacaagcttggattacactccctgcggcagcgacactggtacatccagagcacttgtgccacaactggcgagggtctgtacgagggcctggactggctgtccagcaacattgcgagcaaggcttgaatatcaaatgcgaactgactaggagctccggatgtatcatggaaacttaggacagaatcgcctctacaacctgttaggtgtcttctaccggcacaatatattttttgtttggaatatgtaatgatgttacggttcaacgtttattctaccctactatactgttggatgttctttgggcctgtttcattttgcacaaggattggagttccaatatcatgctacatttt

SEQ ID NO: 15314 - DNA, 847 bp, Zea mays
  Clone ID: LIB3059-029-A12_FLI
tgattattggttttgtcacataatactacactagcaatgcatacagtcttgtgcaagacgttgcagattcctgcagaactggtgctgccactaatgtcattttgggtcttgctcttggatacaatgacaatgctggtggtattgctgagaactgatgctgttgatgctgctggcaacaccactgccgctattggaaagggatttgccattggttcagctgctcttgtgtctctggcgcttttttggtgcctttgtcagcagagctggagtcaaggttgtcgatgtcctctcccccaaggttttcattggtttgattgttggagccatgcttccctattggttctctgccatgaccgtgaagagtgttggaagtgccgccctaaagatggtggaggaggtccgcagacagttcaacaccattcctgggttgatggagggaactaccaagcctgactatgcaacctattggaagatctccactgatgcttccatcaaggagatgattcctcctggtgctctggtcatgctcactcccctcattgttggaaccctcttcggtgttgagactctctatggtgttcttgctggtgccctggtttctggagtgcaaccgtcgttttctcttaacagaaaagaactataaaaatgtcgccgctgtcaaaacccagaaattacgaggcgcgaaatggaaagcttccagcagattaacgatcggctagatttgattcattccgcccgcccactacctctcacggtcacggccaatccggccaacccagaaatcacgtgtcagtgctattttgtgtacaagtactacttaatatatgtttgaaaacttttttaagtg

SEQ ID NO: 15315 - DNA, 650 bp, Zea mays
  Clone ID: LIB3059-029-B11_FLI
caaggagaagaaccctaagaacaagtctgtcgctgcggtggggaaagctgctggcgacaggtggaaatccctgagcgagtcggacaaggctccctatgtagccaaggctaacaagctcaagctcgagtacaacaaggccatcgctgcctacaacaagggcgagagcactgcagctaagaaggctcctgccaaggaggaagaggaggaagatgaagaggagtctgacaagtccaagtcggaggtcaatgacgaggatgatgaagagggtagtgaggaggatgaagatgatgacgagtgatggagctcctcgagacaatggaccgtgcttcatccaacaatggagcggctacacaaggccccgtggcgatcacaaaaaaggagcctatatccatgtactagaattattcagtttcactccacatcgtgatgttttatttttacttttgtcgtgctataacggatagcgctcctcgttggcgccactggcgggtggttctgcctctggtctggtgtgtttgtgtgtggtcacacttgccagccagcagaggcgcctgcttgtacctagattactgtttccattgtcgtcatcatcggctaacattgtcataatgtcagtttgggtaatgttagattaagtaattattgtgttc

SEQ ID NO: 15316 - DNA, 1442 bp, Zea mays
  Clone ID: LIB3059-029-B3_FLI
ccgatggttaggtcatgaaacaaaacacttcaatgttggaaagtaccgccggctcaagcatggaactaatcagactgctgatttctttcgtggagataacagggagggtgtggaggcacgtaacgaggtggctgcattagcaatggaagatatgctatcttggatgcaggagggtggtcaggttggtattttcgatgccacaaacagcacaagaatacggaggaacatgctgatgaaaatggctgaaggaaaatgtaagatcatctttttggaaacattatgtaatgaccaagatgttcttgagagaaatatacgattgaaagttcaacaaagtcctgattatgcagagcaaacagattttgaagctggtgtacaagatttcaaagagcgattggcctattatgaaaaggtctatgaaccggtggaagaaggttcttacataaaaatgattgacatggttagtgggaaggggggccaactaaagattaatgacataagtggttacttgcctggacggatcgttttcttcttggttaactgtcatctgacacctcgtcctatcctgctaacaagacatggtgaaagtatggataatgtcagaggaagaatcggtggagactcttctttgagtgaggccggtgagctttattcaaggaagcttgcgagctttgtggagaagcgactgaaatccgagcggactgcctctatatggactagcacactccagagaacaatattaacagcacatccgatcattggttttccaaagatacaatggcgtgctcttgatgagatcaatgctggggtctgtgatgggatgacatacgatgaaataaagaaaagtaaacctgaagaatatgaatcacgaagaaaagacaagctgaggtatcgttatccgagaggagaatcctatcttgacgtcattcaaagactagaacctgtgataattgaacttgaacgacagcgtgctccagttgtagtcatagctcaccaggctgtgttgagagcactttatgcatactttgcggacaaaccgcttgaggaagtcccaaatattgagatacctctacatacaataattgagatacaaatgggtgttgctggtgttcaagagaaacggtacaaactcatggatgcaatccatcccacagcggggttgtaagaaataataaatggagctcgccttctaaaagcaatggtagcacaaataaattttgtgatgatatacgtatcacaacattaatcaattagaagctatagttcgaggtggaatgtcacaccactaggtttagctcatagatgatttgccatttgacttacaagttttggctggttgtgtagtgtgtactcttaattcatgagttctgagcatgtttaattcagatcgagttctgagcaagtttattcaggccaaagctcgcgccaaagacagttttcccagt

SEQ ID NO: 15317 - DNA, 1089 bp, Zea mays
  Clone ID: LIB3059-029-B4_FLI
cttctgcttgctctggggggaaggagagagagagagagcgagagagagatctagtagagaggctagtaggtggtcctcgaacgaagatgttggcggtgttcagcgggcaggtggtggaggtgccggcggagctggtggcggcgggcagccggacgccgtcgcccaagacgaaggcgtcgcagctggtggggcgcttcctggccgcgtccgagccggccgtgtccgtgcagctcggcgaccacggccacctcgcctactcccacaccaaccaggcgctcctccgccccaggtcgttcgcggccaaggacgaggtgttctgcctgttcgaaggggtgctggacaacctgggtcgtctgagccagcagcacgggctgtcaagcaagggcgccaacgaggtgctcctcgtcatcgaggcctacaagacgctgcgcgaccgcgcgccctacccggccagcttcatgctcgcccagctcaccggctcctacgccttcgtcctcttcgacaagtccaccaactccctgctagtcgcatccgaccccgagggcagggtgccgctcttctgggggatcaccgccgacggctgcgtcgccttctccgacgacatcgacatgctcaaaggctcatgcggcaagtcgctcgcgccgttcccgcaaggctgcttctactccaacgccctcggagggctcaagtgctacgagaaccccaagcacaaggtcaccgctgtccccgccgacgaagaagagatctgcggtgccactttcaaggtggtggaagggtctactgtcctgacggcgctgcactgatctatcatcatcaggcggaggcgatgcgatgatgatgcagaactttgtacatgcgttggtggatggtggtgtaacatagtggctgccaacaagtcatgctcatgcaaaccgatgaatctatctctgtatcatcgatctcggttgcttgctagtccagactccagacatggctatatatatatagctggtgctaataaataggagtataatcgtcatatcgatcggttgcgtgtggaatgccaatcatgtgtgtaatctgttggcaaataacaaacctctgttcctc

SEQ ID NO: 15318 - DNA, 542 bp, Zea mays
  Clone ID: LIB3059-029-B7_FLI
tggaagccaaatcaagaggtgatgatgccttcagaagaaaggactaccttgtagcggtggatgcttatacgcaggctacagagttggacccaactgatgcaacagtgctctcaaacagaagcctgtgctggctgcgggcagggcaagctgagcgtgctctggaggacgccaaagcatgccgtgcattgagaccagattgggcgaaagcctgctacagggaaggtgcggcgcatcgtctgttacagaggtttgaggaagccgcaaacgccttctatgagggggtgcagcttgagccggagaacacggagctcgtcaacgcattcagggaggccatcgaagccgggaggaagttccatggcgtcaacacgccaaactcaacacaatgagactttgctgtttggttggataggtagatgatgaagcggatggacatgaacgttgtcttagttggaagttggtgagatgatgaatgagatgataatgaaatttgaaagagcgaatttgcagatttattttgtgttttgtgattgttttcttaaact

SEQ ID NO: 15319 - DNA, 667 bp, Zea mays
  Clone ID: LIB3059-029-D9_FLI
gtcaccaacgcaaattgcaccaagaaatccatcgagaggccgtcgacaggggaattaatggcgtcgtcgtctagcagcagccaccgccgcctcatcctcgcagccgccgtcctgctctccgtgctcgcggctgccagcgccagcgccgggacctcctgcgtgccggggtgggccatcccgcacaacccgctcccgagctgccgctggtacgtgaccagccggacctgcggcatcgggccgcgcctcccgtggccggagctgaagaggagatgctgccgggagctggcggacatcccggcgtactgccggtgcacggcgctgagcatcctcatggacggcgcgatcccgccgggcccggacgcgcagctggagggccgcctagaggacctgccgggctgcccgcgggaggtgcagaggggattcgccgccaccctcgtcacggaggccgagtgcaacctggccaccatcagcggcgtcgccgaatgcccctggattctcggcggcggaacgatgccctccaagtaactgcgaagagcatagtgcatgaggaatgagcttgtagctagctcatatgtctgaataataagcacagcaagaagatgaatgcatttctcggatcgttcatccggaacaataattaaaggggatccggatttgttcttgtgat

SEQ ID NO: 15320 - DNA, 719 bp, Zea mays
  Clone ID: LIB3059-029-F11_FLI
gggtttgtctgcatcccccctgcaattattattgaaggacctcaattagtgcagcatggttttaaagatgcaattgccaaagttggattaacaaagttgatttctaatttttttgtggtgggcttattctatcacctttataaccaggttgctacaaacacattggagcgggtagcccctttaacacatgccatcggcaatgtgttgaaacgtgttttcgtcattggcttttccatcatcgcattcggcaacaagatcaccacacagactggaattggcacttccattgctgtttctggtgttgccctctactcatttataaaggctaagattgaggagaaaaagcaaataaagagtgcataaggtgttggctgatgtggatgcggttggtttgtcgctttgatggacctctattctctcggtgaacgaacaaacttgcaagatggataaaatcttgctatctcctagtacatttgattgttattcccagtctggtactgaggtgtgcggttgttgttggctaacttgtttatttgaagcaaatttgagcaatgctcagtggcatggaatttccatttctgttttccttcgctcatttattctgacttgacatggtgctattgtaatcttaagcagtagtgtctctagaatgttttccccaaggagatttcagtaccaaatttgaacaatcctcaaactagaaattttgatttccatgc

SEQ ID NO: 15321 - DNA, 141 bp, Zea mays
  Clone ID: LIB3059-029-F3_FLI
ggtaattcagccgtaggttgctatgctggttgggatttactcgtgaaccagagtttttctatcttatatcctgaatttgttatcccaaagtttcctggctttttaactattttgttgttacatgttgatattgctttgttc

SEQ ID NO: 15322 - DNA, 499 bp, Zea mays
  Clone ID: LIB3059-029-H8_FLI
tatgcattggtttggccaggatacagtacagcccctcctagctgtaggttgcccatggagcatgaagcgcctccggtgttccattagaggccaaaaactgaatcaaccacagtgtactatgtaagtcttgcggattgactactcgggtgcattagtttggcagataatcttaaagaaggctatcatgtgggtgcaagaaacattcacattcatatacatcagctgcggattaccgcgtaccgcgatgggttcaggactcagggagaatgctcattgtgaccaatctccagcaacgtcatatatatccgttctttacagttttctctaaaagtttttgtcctctatatctcttctctcttcaacaatgttctctatctcgttctctatacataaatacatatgttctatatacataaatgcatatgttagagatatattttgctttaatttttttgtacgtgtgtatttgtcactctctcaaatatattatatatatttt

SEQ ID NO: 15323 - DNA, 854 bp, Zea mays
  Clone ID: LIB3059-030-B1_FLI
aatgagggatgtgatatttgctgatattccaaagctcattccatttattgatctggaggatatgagcctattcagttgcttctacgattttgttttcttcatctgccgtgaaaaggtcaaaagagtgtcactattcagagagctgtagcagcatggaggattgttctaagtggaaggttccgtttgcttgatcgatggtgtaacttcgttgagaagtaccaacgccataacatatccgaggatacttggcagcagctgctagctttcagcaggtgtgtaaatgaagatctggaaggttatgacccacgaggtgcttggcctgttctgattgatgattttgttgagcaaatgcacagaatttatcactccactgactgcagcagtgcgatggaatcacagtgtaacatttccagtacccttaaaggactggaccctcaacctggatcaaagaggaaatgcccacacctcaaatccaatgaagaggatgtagagctttcggatagctttacgcgctctgtccatcttacaccaataaagcgagtcaaggaaagccatgacgccagatatggagcgggggaatccgccaaaactacccatttctctaatagttcctctggtggttaccacgaggatatgaatttacacaactcaagaggttgccttcagaactccccctgtaatgttgaggatgccctgtccaaagggtttgagggttgtatttcgatgaaatgcccattttgatgtaacaaatttcgtgtcagcccagaaactatacattcccttttagcggcaaaatcatcctgtgtgtgtatctagtcattttgtgcaaaaaatgcagtaattgaatgcatttt

SEQ ID NO: 15324 - DNA, 706 bp, Zea mays
  Clone ID: LIB3059-030-E5_FLI
cctgctggactcggactacacggcgaagctgtcggatttcgggctagcgaaggctggacctggagaagacgagacccacgtgtcgacccgagtcatgggcacgcagggctacgccgcacccgagtacatcatgacagggcatctaacgaccaagagcgacgtgtacagcttcggcgtcgtgctcctggagctgctaacggggcggaaggcgttggacaagaaccggccgccgcgagagcagagcctggtggaatgggcgcggccatgcctgcgcgacgctcgccggctggagcgcgtcatggaccggaggctgccgcgccccaccacgcccacccgagcagcccaaaaggccgccgggatagcccaccagtgcctcagtgtcagccccaaatcccggccccaaatgtcccacgttgtacaggccctggagtcgctgcttgctctagacgatgccgccgtggagccgtttgtgtacacggcgccgccggagagcagatgacctgtgtcatcttgtgtaaaaagcaagcgccggtgagtcaacaatccgaaggtgttttgcccacagtagtccactatatatatattttctattgtaaaaaacattagttcacgcgtgagacgcgtacctctgtttttctcgcccctgggaaacttggtggctgcctctatatttacactgatctaatctaggcgacagatcacacat

SEQ ID NO: 15325 - DNA, 350 bp, Zea mays
  Clone ID: LIB3059-030-G5_FLI
caagaagatgaacgacatctacggcgactggccggaacaggactgagagcgcgtaccatgcatcacctgctcgatcgaagctaccatgtctaccttcctgcctttgatcaccgtgatcgacaacatcagattgttcagttcattattctggatgttgtcgatcacggtgatcaacaacatccagaataatgaactgaacaatctgatgtttcgatttgaacttatttgaacatattgtgcttgttctttgtttcctgctgaatccctgcctgtaatccgtctgatcagacctctgcattcctgccaccatttctactttcaataatttgaagtgctgtgctgttgctttc

SEQ ID NO: 15326 - DNA, 817 bp, Zea mays
  Clone ID: LIB3059-030-H12_FLI
actaccgagcagattgcaagtgatgtgcagatgggcagccagcgctggtactgtccatcttgcctctgccgtgtctgcctgtgcgacacggacgatgaccagatcatcctgtgtgactgctgcgatcagggctatcatctctactgcctcagtcctccaagaagaaaggtgcccaaggggcattgggactgcgaaccctgcaaggagcggagggagaaggagaagaggatactgatgctccacaggaaggattacgatgaagacatcctgaagagtggcgagttccatggaccgaacttgctgcttaaggccgcgaaaaaggtgaagcgcgatgaggaggtgaaggtggctaagactaagagcaccagaaagtaagaggcatggagattgtgagcgagcggattttgtgttctctgccatgatcagctagcgccaagtttctgccctgggaggctcagctctgcccagctgaatgggacgggcggctgagggccgtagaaacctgtgctttctgaactgaatggttagagaacatgaattcgctagaattgctccagtctatttctttacaatcgtttctttcaacccggcagggtcatacttgacaaacttgccagcgcctgaacttgagaaggttgtgatcacccgtgatgcttttaaaccccgtgatgcttttaatggtttatgaaactggatcttggtagacttaattacccgtgatgcttttaatggtttatggaactgaatcttggtagaattaaagtatctgttgctgtgttgagaaatgttatggtttctagttcgttcttgcaggtgc

SEQ ID NO: 15327 - DNA, 618 bp, Zea mays
  Clone ID: LIB3059-031-E1_FLI
ggcacttttgcgatacatccactcgggagcaggaatcaagaaacgagaatatggggatttccctttgccaatagcattggtagagaacagtggaaggtgcaagactaacgagcatggggagaagatacttccggatggaactccgtgggttccaaaactgatgaaagaaattactgttgttatctcaaacgggagcaagcccattcatgttgatcagaagttaattgatggtccaaaccctaacaatcgctggaagatgttcataccaattatacttgctgtggagtacttcttggtagtaaaaggaatccggagggcgatccatgcagatatcgcaaatgggaaggtggatgactgggagcagcgttaccgggacttggttggaagcagggaccctgtggagcagaaaggttctaccacccggaaccgcaaagcctaagttggtgtagcagaaatgattttattcgtgttgtgacccactcgatctgcttgctgttccttttcctaattatgtgttgagggctttatagagttcgctggttctacttgaaaaataattgctcgtgttgtagttgataagaatatcttttccattttatgatgcttggccctcttcgc

SEQ ID NO: 15328 - DNA, 412 bp, Zea mays
  Clone ID: LIB3059-032-A10_FLI
gtcgagggtgcaacacagcagtgagattctttttgaactcatccgctttctctggctccaacacagcagtgagagaaagcggatgagttcaaaaagggtgtcgagggtgcaaccaagtttctccttagcaagctgaaggacctccaattttttgttggtgagtccatgaaggatgatgcgtctgtggtattcgcctattacaaggatggtgccactaatccgacattcctctatttctctcatggtcttaaggagatcaagtgctaggcgtgcggcgaaattagttacccatgttgggtactatctatgtactattattatatccaaaactatagttgtcctggctgaattgaactcaaaagggtttgtttgagaaaaaattgtcccaagattggattgcttgttaaagctc

SEQ ID NO: 15329 - DNA, 816 bp, Zea mays
  Clone ID: LIB3059-032-A8_FLI
gtcatggttgaccacatgaggaagatgaagaacaatgccattgtctgcaacattggccactttgacaatgaaattgatatgctcggccttgagacctaccctggcgtcaagcgcatcaccatcaagccccagactgaccgctgggtgttccccgagaccaacactggcatcattgtccttgctgagggtcgcctgatgaaccttgggtgtgctactggccatcctagctttgtcatgtcctgctcattcactaaccaggtcattgcccaacttgaactgtggaaggagaagagctctggcaagtatgagaagaaggtgtatgtgctccccaagcaccttgatgagaaggttgctgctctccacttgggcaagcttggtgccaagctgaccaagctcaccaagtctcaggccgactacatcagcgtgccgatcgagggtccctacaagcctgcccactaccggtactaggcacacggcttgcagctcactcgggccgttgtgtgctatgaagttcgctacactggcctgtcagttatcttttgcatgcatatgcattatcatatacgcagtcgcgtagcaggttttcttatggttatcgcttgagctgaggggggagggaaggagctgtttgcttttgctgaagaataatggtgtagtcggctggggtgaggcgatgtgcgttgccagatacagttttgtcttgttgactctacttatctgattatcatttgtaagcgatttgctcaagttatttgtcgtttatgaataacttgctttcctcaagagcatacttaaagacggatcctgatttgcgtt

SEQ ID NO: 15330 - DNA, 458 bp, Zea mays
  Clone ID: LIB3059-033-B1_FLI
ggcttcggcgaccctgtcgagctccagctccgcaacgcctggctcaaccgcctggtggtgcaggcgcgcggcatggagcgcgcgtcgtgctacgtgctttccacctgccgcgtgcgctcctcggccgggttctgcacgcacttctgcctcgcgcgggcgcagtgcttcggcgaccctgtcgagctccagctccgcaacgcctggctcaaccgcctggccggccgccggtagccgcccgtcggcagctgctgctactgatactactaataggattcgatgctccaaggaccaaatgcaatgatgcctcctcttcgctggcaagaacgaggaagagaagcttgcagattggatttgaagcaggggaggccaacatatcttttcgttctcccagaattggatatcaattgtacagattattgattgtaaatttgcttattcaatcaagaagcagttcatcg

SEQ ID NO: 15331 - DNA, 1193 bp, Zea mays
  Clone ID: LIB3059-033-E6_FLI
cgctcctcccccaaaatcccccaaaacctgacgcgctggagggccgatccgcggctccccgccgccttatccgagcagtctcctcggcccagccggggatccaagcgggatggggtacttgagctccgtgatcgggcaccccaccgatggatcctccgtcagcggcggcggcctcagccagaatggtagatttagctatggctatgcaagctcccctggtaaaagggcatccatggaagacttctatgagacaaaaattgattgtgttgatggtcagatagttggtctttttggagtttttgatggtcatggtggtgctaaggtagcagagtatgttaaagaaaacctgttcaacaatcttgttagtcatccaaagttcatcagtgatactaaagtcgctatagatgatgcttataaaagcaccgacagtgaattcttagaatctgacagtagtcaaaatcaatgtgggtcaactgcatcaactgctgtacttgttggtgatcgtctcttcgtcgcaaatgttggtgactctagggctatcatatgcagggaaggaaatgctattgctgtttcaaaggatcacaagcctgatcaaactgatgagcggcagcgtattgaagatgctggaggttttgtgatgtgggcaggaacatggcgcgttggtggtgtacttgctgtttcgcgtgcttttggtgacaaactcttaaagcaatatgtggttgtggatccggagatccgagaggaagttgttgatgacacgctcgagtttcttatccttgcaagtgatgggctgtgggatgtggtctctaacgaggaagctgtcgcgatgactagatccattaaggacccagaagaggctgcaaagatgctcttgcaagaggcgtacaagagggagagcagtgacaacataacttgcgtcgtcgtgcacttcttgcatgggcaaggtagcagcggatacgcttaaagcgtagcagtaaaattattttacgcagtggtgtgctcggatgtacatgcgtcgattgatttcccgatgttaaatggagaaacgtaaccacgtaaggtaggaaacgtgtattatgatgggttgaactgggaaatgcgtgtaccctatatactatatatatactgtagtttggtctgtattgtggtcgcagacgatgtttgggtctgaagatagtgttgtattgttgtgg

SEQ ID NO: 15332 - DNA, 1134 bp, Zea mays
  Clone ID: LIB3059-034-C9_FLI
acccatttgatgtttggcaaaattttactaaatcaggtcacctgcaagaaaatatgtctagtcttgggagagaaccgagtagtctgtcgcctgaaccagctaaaggaaatgattccttggatttgtggattaccagcaacttcaaggaatctaaaagcaatgatgttgggagaactaatgcctcatctgatggatggcaggattttgccagttttgatcaagctcagagaattactaaagttcatgtggaaggacatgttgtaaaagatccttcaggggctgaaactttggacttatgggcctcaagtcatgttaatgaaaagaaccttgaacagataagtgaacataatgatctattcgatgactggcaggatttccaaaactccaatccacagcaaacaaccttacaagtttcttcagatgcttcattatttgatataaccttggcatcaaggcctgatgcttttggagagcaggaatttgggagtgttttgcaggtagcttcatccgaaaactcaaaggataaaaaggagggttctaatgaatcaaaagcatttccatctgatgaccacttgaaaagcacaagtggaatgcagcagatgggtgatgttgattcgctgtcttcattatggccagctaataaaccagagcctgcaaatacaaatgtggaacagttgcttgctcagatgcacgatctgtcctttatgctcaaggatgaactttctgtccctgataaacccatcgatcattcaaaaccctgaagtgacaacatcaaaaattgtgctctgttactatcagccaaggaagattgttgttgcaagtccaaccttttgggtgctggacgaattgcaacgaatatcccttgagtggaaaatgcaagtcaagtcacagaaaaccctgttgttccaacagtgccttttatcagagtattggtcagcagaggattgtatttgttttctctgttgcttcgttgcattgatcgtcagagactcagagtcgggttggttccttgactgtccctgagtgaggctgaaaaccacgttttatgtctgcctcttacatgtatgtaccattttgcggtctgtattttgtagagtcgaactgagctcaccaatcaatgaattccatttcatc

SEQ ID NO: 15333 - DNA, 1119 bp, Zea mays
  Clone ID: LIB3059-034-G12_FLI
cgcttccgagcagacgtcctccttggataaggggataggcgcgaggaagagcggcctatccgcatccgcataaatcccagtcaaattgaacgagagcgccactcccctctgctaatcccagtcaaatcgaagcaagcatggccatggcggccgtgggcgtgggcggcgcagtggcgttcctcctcccgcagcgccgccagggcgccgtcccctggagcggcgggcggcggcgggcgcccgtggcggtgcgcgcgtcgtacgaggccggggtgggcgtgatggcgaccaaggtggggatgatgacctacttcgatccggagacggggaagccggtgccggtgaccgtggtcgggttccgggagggcggcaacgtggtgacgcaggtgaagacggccgccacggacgggtacgacgccgtccaggtcgggtaccacggcgtgcgcgaggacaagctcacccgcccggagctgggccacctgggcaaggccggcgccccgccgctgcgccacctgcaggagttccggctcaccgccgtcgacgccttcgagcccggccagcccctcgacttcgccgacctcttcaaggagggcgacctcatcgacgtctccggcaactccatcggcaaggggttccaaggtggcatcaagaggcacaacttcaagcgcgggctgatgacgcacggttccaagagccaccggcagctgggttccatcggagccgggacgacgccgggccgcgtgtacaaggggaagaagatgcccgggaggatgggaggaaccaagaccaagatcaggaagctcaagatcgtcaagatcgacaacaacctccgggtgctcatgatcaagggggccgtgccagggaagcccgggaacctcctccgcataacgccggccaagatcgtcggcaagaacatccccaagaactagacttcttttttcaggggggtgaatgttgagtgtttgtgtttgttaccctgctacaaactggatgtaatcctttgccaatttccagtttttgaacacatgcaacttcagattagtaaaactataacctgtacaatttggatgcttgggtgagagagtaataggcaggtaatgcaagatgcacttctggttcctg

SEQ ID NO: 15334 - DNA, 1141 bp, Zea mays
  Clone ID: LIB3059-035-E7_FLI
ctgctgtcttcaataggtccagcagatttgggaagcttcagggtattcagtgtgcactagcaggtaggaacctttacatgaggttcacttgtagtactggagatgccatgggaatgaatatggtgtcaaaaggtgttgaggatgtcttgggctacttgcagaatgatttccccgacatggatctcatcagcctatctggtaactattgttcagacaagaaggctgcagctgtaaactggatagaaggtcgcgggaaatctgttgtttgtgaggccacagtcaaagggggagttgtgcagagtgttcttaagacttctgtgcaaaaacttatcgagcttaatattgtaaagaatctcgctgggtcagctgtagccggagctcttggaggtttcaatgcccatgcaagcaatatcgtaactgccctgttcattgctacggggcaggatcctgcccaaaatgttgaaagctcgcagtgcataaccatgatggaggcagtgaatgatggaagtgaccttcacgtttctgtgaccatgccttctattgaggtaggcactgttgggggcggcacttgtcttgcttcacaggctgcatgtctgaacctgcttggtgtgaggggtccgaatcgtgactcacctggggcaaatgctaagcttctggctaccattgtcgctggcagtgtgcttgctggcgagctctctctcctgtcagcccttgctgcaggccaacttgtgaagagccacatgaagtacaatcgatcaagcaaagatgtgccaggtgctgcttcttgagtatattatatgcagcagctcgtcgggtactccaaggctccaagtgacatgttttatacagcagtagcccaagcgagatcgtcgctaaacaacagagatgggcagaggcccgactgtagataagcgagcaggtcctgacagcaagcgcaacctgtttgactgttccgtggacgctatgttagcgacgtacagcacctgacagattatgcagcttctgactgtaacttttgtttatgtatgtttagcgttcggttgtaaccgttcaatttttttttggtttgctttggatagcagaagatcagataaaatttgtgttcctttttgtgcagtatagtaatttgcctgttattatt

SEQ ID NO: 15335 - DNA, 784 bp, Zea mays
  Clone ID: LIB3059-035-H6_FLI
attccctgctaaaaaccctagcccatcagggcagcgaccttctagaaccgtctccaatggcgctactccgagcgctccggcgagcccttccggcgctctcctcgccggcggcggttctcccccgtcgcgccccgcacccactacctcctccgcccgctcctcgtcggttcctggacccgatcgggctccgctccttctccgccgccgccgccaccgcgtcgcaggcgccgcccatgggggccaccctgttcggcgggctcatggacacccggttcccgaagcgccggccgggcttcgccaaccgccggaagagggctagcttgcgccccaaaggtccgtactactgggtgaagtgcaagcctgacgagcccataccagttagtcagccgaaccaagggagcgtacgagggaggaaggagaagaagcggatcaagcagcgcaaggactttatcatggctgagaagaagaagcgcagagctcagtattctgctgctgttaagagaaaggaggcagaacgaacagaaaggaagatggctgctgtggcaagagagcgggcatgggcagcaaggttgatagagctaaaacagattgaggaagacgttaaagctgtaatggcataagggcctgctctggaaaatggcaaggcgtctaacctgtttctgctgctctattttctcctcctttgttcctacatagtttaaattgtcacaattctttgtgatggaatggaagaccagtaccacttctttaaacagtaatatcaaatgccggaactgtttttttt

SEQ ID NO: 15336 - DNA, 1174 bp, Zea mays
  Clone ID: LIB3059-036-A10_FLI
tccacattcattggtggcccatcaaattggtagtgattggtctgatgttttgtttcccaatttctagatatttagcataaacatttgctcgacacaagttttttttgccaactggtccttttttttttgccatgtagggacccatattctaaaggagttacattaagatccctcaaaatttctgatttgccgggtactgttaacattgtttacatgttatgggttttcttcttgcatgctaactctcagtaacacctctgtgatgtacttgcagtcatttttttggttggcatttttggtgctcattgatgattaaaatatggcatgccattctccactgtttctgctttatagccatgtttttaggagggcagacctagtgccggagaggctcccacatgaagtgggtctggagaagggataaaccatggcaagccttcgtccacaaatgtggagaggctgtttcgaacaagctctcgccactgcactatgcctgcccttcaaattctgttgtctataaattgtgattcccttttatacttatttttttagggctggtagaaatactacataaatctgtgttcctttaaattttgatgtctataattctgcctcctgccagtctagagtaatccttcagatttcagtcattttgatttgacatgtgtaacctgatgtaatcgttcttgaggaatactttgccaagatttgttctctcttgagtctggaatcacttatttgcttcgcatgatgtagatccaccaactatggtcaaggccagcagccgtgaggatgcccaaccaatgactgaatcatctaatgctgaggtgaacacatcaagtgctgtggctgctggagagtctgagtcccatgaaattggatcgccgaagagtctaaaagatgctatcaaaccaaaacataaaagaaagaagaagaaaagtgacaggagttagtttagttgcaagcctgtaattttgtatgccccagataaatcaacgacagtctacaacacctcaaactcctgattgattaggtttcatccggggtgccatacatgggttttttgtgtgttttcaatcgtgactggtgctagtagtgacaggcaaattttgtacaagctgtagaattgtattttaggaatggttcagttaagctttcagtcaactttgcagct

SEQ ID NO: 15337 - DNA, 819 bp, Zea mays
  Clone ID: LIB3059-036-B4_FLI
tacgctccattttataaccaaccggcggtccatctgaggaggaccaagaaacatagagagagcggttctacgtccgagtcgtcgcatcaggtcccctcgattcgccggcggcgccaccaaccaagctcatacatctgaattgactagtcaaactcagtgatctctttggggactaatcaaactcaagaactaagtttcatgtctgatctcgacgtccagcttccatctgcttttgatccgtttgcagaggcaaatgctgaggactccagtgctggtgctggatcaaaggactatgtgcacgtgcgtattcagcagcgcaacggaaggaagagtctgacaactgttcagggcttgaagaaagagtacagctacaacaagatcctcaaggatctcaaaaaagagttctgctgcaatggtactgtagtccaggatccagagctaggccaggtcattcaactgcaaggtgatcagcgtaaaaatgtcgctacttttctagtccaggccggaatcgtgaaaaaagatagcatcaagattcacggattttagactgcaaattttgagtgcttgtgtgtgcctatcatatggtaccatatgataccaggtattgaagcttcggaagcttgttggccttcgtaacatcagtagtcgttattcatctgaatatgtgtcattatttgatttgataagactggtattgatgcaagttgtccttgcagtatgttttgtaagtgttacctgcatgaaagtatcgtttgtctggggaactgtctactactgatattgaataacaagagagattgctgttcgtgttcgtctatg

SEQ ID NO: 15338 - DNA, 865 bp, Zea mays
  Clone ID: LIB3059-036-B9_FLI
tcctgcggggtcatcctcttcgtcctcctcgcgggccacctccccttcgacgacgccaacatcgccgacatgtgccgcagggcgcaccgccgggagtacacggtcccgcggtgggtgtcgcagccggcgcgccgcctcgtggcgcgcctgctggacccgaacccggcgacgcgcctcgccgtcgcggagctcgccggccacccctggttcaagcgctcgctcagcgtggactcccagctcggcggcctcctggacggccaggcggagcgcgagctggcgttccaggccccgccggcgctgaacgccttcgacatcatctccatgtccccagggctggacctgtcgggcctgttcggcgagggcaggcgccgccgcgagaagcggttcatgacgacggcgtccccggagcgggcggtggagcggctcgcgcaggccggcgcgaggctcggctacttcattgtggggaagaagggggccgagcgcctgccgctgggcgtcctgccgggcctcgtggccatgtcgatggagatgtcggaggtgtcgccggagctgatgctggtggagctgaggctggagggcggccacggcgacgaggacgaggcgttcgggtgggaggagctccgggttgagctgggggacgtggtaacagcatggcacgtgagtgaagaaggttaaaaattcgcaagaggaaatgcgagaacgatttcgcaggtgtatcagtgtagtatgtatagccgtatagcaagtgcgcatctcatctcgtgtacgtgaaattagttggttaggacgaacagcagcgtgtgatgttggggattaactagactggtagtttcaatcaaatgtgtgatgtgtgggattatttgtc

SEQ ID NO: 15339 - DNA, 598 bp, Zea mays
  Clone ID: LIB3059-036-E12_FLI
aatctaccaattgcttttcgtctcctgtccatcccttgtgcgctaccgctcctctcccttggcaacgacgactggcgccgccgctgccagacttcgctgggcatctcgccggcgacgagctcccaccaggattagagaaggtgatggcgaggagtgacagctgcctggcgcgcgtgggtgccggagttgcgatcggtggcgcggtcggcggagccgtcggtgcttgttatggaacttttgaggcattcagatacaagatccctggattgctaaagatcagacatatcgggcaaactactgttggcagcgctgcaatttttgggcttttcttgggggctgggagcttgattcactgcggaaaatcctactagtttgtttccctcctttttctgaacacgactttgtcgatgtgcttcagaggaggattctagattttgagcgctaccctgagtggcttcagtgaaaactattcaacgcctgtacaatttaacagctaatacctcagggttggaaagagcaatcaagttatgtcctggtttggtgtggatggaaatactccctccatttcaaattaaaataaaattcgttttaaatactt

SEQ ID NO: 15340 - DNA, 517 bp, Zea mays
  Clone ID: LIB3059-036-E8_FLI
cgtcccctttccacaacagccttgggatgaagagagccaagacaagggggtaatgaacaaagctgcaagcatcatgaaggcagaaccaaatgaatctattctgagaccgatcctgtgtgcacatgggattgccttgcttggctattgtactggcccagtacggcctcgagccaccagcatcggggcggccgtaccctgataaaacatatatatctggagttgtgtttgctgctaccgggggagttcggttatgcgccataggttgttcgctatatattgggttgtgcgggattttgtagcaatgtggtttgtgtgatgctcatttggagcgtttgagagctctcggctcgtatttctcatcaagatagtatttaagggcgctgtttgggattttgaagcaatgctctaactgtctctgtacacgacaaacatggaggcttgctatatttcatgaatctctcgtttgctgctatcaatcactgatgcatactagtaaagtgatggcgtcttcagttgc

SEQ ID NO: 15341 - DNA, 668 bp, Zea mays
  Clone ID: LIB3059-036-F8_FLI
caggcagtcaaatgggagcaatacatggcagaactcaccaccctggaccattctcctcccatcctggtgaccagaagaaccccagccaaggtttccaagggccgtttgatggcagcaggcccatgtacacgacgaatcaggctcggatgcacgctccacctcctccacacttccacggagccttccccaggaacgcatctcctcttgagttcccagcggggttccggggagcctggccgtccgtgcaggcacctccgatgccggcaccgtcacatccatcgtctttcccgccgtttcagttgaggccaccgccaccgccgcagcaggatatgtctggcgcaggcggcaccaggtggcccggtggcaatcaaatctacaacccttttgcaccaacggctgcggcggcggctcagagagcggaggctgaccctgagtacgaggatctcatggcatcagttggcatgaagtagcgaagactgctggctggcccctgatctgtctgtggcacaaacacagaggcttcttcctattgcttgccaagatgtgcgggttactaatctcctccaatgtatctctagatggtactgaattccgttccatcatagacaggtgccatgcttgaacgaaaaacaaaaataaaaaataaactagtggaccttgtttgagac

SEQ ID NO: 15342 - DNA, 755 bp, Zea mays
  Clone ID: LIB3059-037-A11_FLI
acagattcaacttcaatctaatacttctctaacgacgaaggaaaaaaaccgaccagagcgtacatggacatgaacgcaacttcctatgttttccaagtcactatctgatttgcatttcagcataatggttagtggcttgatgtgcaccatggttccttagttctcagcctggacaaacgaaaattgcacacatgctaatccaatataatttgcatgataaacgtttaaacacaggttttattttaaacgatcttggattcgatcccggctaacctcaagaacccgttcagaagagcagccagacagggcgccatgtggccgtcgccttcactcggccttgtcggcggcggcctcctccaccttctcctccaactcgaccaccttctcctcgactttctcctccaccgcggcaggctcctctggtgcggacgccttctccgcctccgccgcagaggcaggcgcgggaggctcctcctggtcggggtcgcgggcggtctcggtggagctggagatggcagcgcggaggcggcccattaagggcctgaaagcggtctccacggtgacccaggccagcgcgagcccccctgcgacgatcgccgccctcttcagggcgctaccctcgcgctggcctccacctcctcccttcgccatgggtgctcgcgggtcgacggtgacggatggggtggcgcgatgcgcgtgtgtgatgggggtcggtctgtggccgcgggcactcgggatttggaattgggggcggg

SEQ ID NO: 15343 - DNA, 1177 bp, Zea mays
  Clone ID: LIB3059-037-B3_FLI
ccccattgacgtacagctatgatgcggccgacgtcgacccttgctatggtcgtgccgtcgctcgctgtagccatcctctgcatcctagtccggtccgcctccgcggagttctggctcgacgagttcaccacggacggcgacgtccgcagagactacgaccgttctggccggcaggtggcgtcgcttgtcctcgaccagcgttctggcgctggcttcaactccacgcgcaagtacctcttcggcgagttcagcgtggagatgaagctcgtcggcggcaactccgctgggactgtcacctccttctacctgacgtccggcgagggcgacgagatcgacatggagttcatgggcaactccagcggctccccgacggtgctcaacacgaacgtgtgggccaacggcgacggcaagaaggagcaccagttctacctgtggttcgacccggccgccgacttccacaaatacaagatcgtctggaacgacaagaacatcatcttccaggtggacgacgtgacggtgcgcgtcttcaagcgctacgatgacctgccgtacccggacgccaagcccatggcggtgcacgccacgctgtgggacggcagctactgggccacgcgcaagggcgaggtcaagatcgactggtccagcgcgcccttcgtcgtctcctaccgagactacaccgccaacgcctgcgccgtccacggccggaacggcggcggcagctcgtcgtgccccgccggtgccaacgagtggatggacaggcagtccgacgacaccgaccgtctcaccgtggcttgggcgcgccggaactgcttgcagtacaactactgcgatgacgggtggcgcttcccgcaggggttccccggagagtgcgcccgcaactgatccaccatctgccctgcagtcgcgagtctccaagtctcgccggcctcatcgcatcctcttaccgcagatataggcatactagatcgagttcattcttggattttatgttcttgtaattgtcttattgtacgtacgtacatcgtctcttccgactcacaaagagcccagcagcgtgcgtcctggatctggatgcatatcgaaggtactagttctgtgacttctaaaagatcttatttttgatgattttggtgtaaaatatcatcgcagaaactgaggaataaacatcagaattcat

SEQ ID NO: 15344 - DNA, 406 bp, Zea mays
  Clone ID: LIB3059-037-B6_FLI
ggtcgaccagaacggtcgcgtcgccacatgcctctccgtcgaggagaggcagcgcctcctcctccgcggcgccaacgccctgggctcaggcggtgaagacgactccgacgtcatcgcgctcaagaactacatgaacgcgcagtacgttggggagatcggcgtcggctcgccgcagcataagttcactgtcatcttcgacaccggcagttccaacctctgggtgccgtcctccaagtgctacttcttgatcgcttgctacttccactcgcgctacaagtcagggcagtcaagcacttacaagaagaacggtttgactcttcctttcttgtgttgttactgtattgttttcccgattttctcgttgtggactgagatctgcatcactttcgtcatacgtttgtatttc

SEQ ID NO: 15345 - DNA, 672 bp, Zea mays
  Clone ID: LIB3059-037-H12_FLI
agaactgccaataatgcggtattggatatcgagagccttcctcaaccgcctgataaatgctgctctgggagtccgaagatgatcagggccttgtcgcgtaagggttcgaaccggatggagaggaggggcggcggcggcggcgagcaggagcaagaggatttggcgaaaaaacttgtcatcaaagttgtgccgtctcaactggagcagcagcccctgggtcagaacaaggcgctggtcgctccacattgcacacctgttcttgttgattctggggaagggaggagcaaaagattcattagccggttcacgtccatcaaccctcggaagattctcctcttgttcgcaacgctgtcgagcgtggggacaacgatactgatctacttcacgctggcgatcaacagcaaagcggaggcctagtcgcctggagacacccaccagccaccaccaccatttgcgtcggcgggcgggcggcggcagtacattccgagctcgagtttttatttttatctagttttgtttgtgaggtagctgccgcggcgagatcagatgcagcctgccgctcaggtgtgtgtatccattgactgtgagtgagagactgcttcagtgggtgtcattcttcctcgcgtgtatgtatatattggtggaatcgttgatgtgacttttttagtcttc

SEQ ID NO: 15346 - DNA, 253 bp, Zea mays
  Clone ID: LIB3059-038-A1_FLI
caacaattgttgtcgttctacctgcacgctgcgcctaacgttggcaccctcttacaactgcaacaattgctgccattcaaccaacttgctttgacaaacccagcagcgttctaccaacaacccatcattggtggtgccctcttttagattgcttatgagttatagttcaataataaagtttttttgatgatgtttgtggcttcccagaaataagaaagtacatttctagattcttatgtgcaaaaaaaaaatt

SEQ ID NO: 15347 - DNA, 807 bp, Zea mays
  Clone ID: LIB3059-038-B7_FLI
ctgagatccttgttgatggccctcatgacattgatcgctgcgcttacgtcactgagaccgtccttgctgcctgctacaaggcgctcaacgagcaccatgtcctcctggagggtaccctcctgaagcccaacatggtgactccaggctccgactccaagaaggtgactcctgaggtgattgctgagtacaccgtccgtaccctccagaggaccgtccctgctgctgtgcctgctgttgtcttcctctctggtggacagagcgaggaggaggccacccgcaacctcaatgccatgaacaagctcagcaccaagaagccgtggtccctgtctttctccttcggccgtgccctccaggcgagcaccctcaaggcctgggctggcaaggtggagaacttggagaaggctagagctgccttcctcgccaggtgcaaggccaactctgaggctaccctcggcacctacaagggtgatgctgccgccgacaccgagagcctccacgtcaaggactacaagtactgagttgcttctctttgcgtgcccgttttggaactcctgcctacgagctaggttgcggagtgtggtttgctcgttagagcttattttcggacatccaaaaaacatgcttcctatgtgggatgatggttatctttatatttgtatgttaattagtctctttgctgttaaatttcgtgtaagttggtcctgccgatggagaatcgagcagccccctttttttgttctatcaactatgctgtaatgctggctatgtatcggcaaaaacaattctatatgctgagttggagtcggc

SEQ ID NO: 15348 - DNA, 1245 bp, Zea mays
  Clone ID: LIB3059-038-E12_FLI
aggaccgcggcgccctcgtcgagttctacgccccctggtgtggtcactgcaagaagcttgctcctgagtatgaaagacttggtgcaagttttaagaaagctaaatctgtcttgattgctaaggttgattgtgatgagcacaagagtttgtgcagcaagtatggagtttccgggtatccaacaatccaatggttcccgaaaggatccttggagcccaaaaagtatgaaggacaacgcactgcagaagcccttgctgaatttctcaatactgaaggaggcacaaatgtaaagctggcaaccattccttcaagtgttgtggttctcaccccagagacctttgactcaattgtccttgatgaaaccaaagatgtccttgttgagttctatgccccatggtgtggtcactgcaagagtcttgcaccgacgtatgagaaggtggcttctgttttcaagttggatgaaggagttgttattgctaaccttgacgctgacaaacacagggatttggctgagaagtatggagttagtggatttcctaccttgaagtttttcccaaagggaaacaaagctggtgaagattatgatggtgatagggacttggttgactttgtcaagttcattaacgagaagagtggtaccagccgtgacacaaagggtcaactaacctcagaggctggccgtatagcaagtctggatgtcctggctaaggagttccttggtgcttccggtgacaagcgaaaggaagtcctctccagtatggaggaggaggcagataagctcagtggttctgctgcaaggcatggaaaggtctatgtaaccatcgcaaagaagattctagagaaaggcaacgagtatactgagaaggaaaccaagaggcttgatcgcatgttggagaagtccatcagcccctccaaggccgacgagtttatcatcaagaagaacgttctttcgactttctcatcctaaggcatctgctagctccattttcacgtttcagatataggcgacaaaaactgcaggattataagtgtgataatgagagttaaatggtgctagaactaattttggggctttccctcgaggatatgtaatactcgtacgtcttgcgaattagttcttttccttgtgcttctggatttattccgtagcaccatagtttattttttggtttgacatggaggacattgtgactacagaactgagttttactatccaataacactgctcacttgatggggcttatgcg

SEQ ID NO: 15349 - DNA, 2082 bp, Zea mays
  Clone ID: LIB3059-038-F8_FLI
cctcggctcctcccccgcggccgagctcgcccctcgccccgccgcctcaactcgtctcgcccgcgaccgatttcctccctccgctcgccgcgccgcaacccggagataaggccgcgctcgatcgagaaccacctgggatccagcgtcatcgcgaccagctccggcgaggcgtccgccctttgcagcccggtgtctctgcgaccggcacacagctccagagggtgtcttggactgaagacgatatcagcaaagcttgaaaaggactgagagatgtcattgggctatgctgagaagctgtcctaccgggaggatgtgggtactgtgggaatgcctgagatctttgagacccctgagctagtccagaataagatagaagagcttgctgccatggtgcaaaagagtaagcatttagtggtgtttaccggggcagggatatcaacttcatcaggcatacctgattttcgagggcccatgggtgtctggaccttgcagcgtgcaggaaaaggtattcctaatgcatcacttcccttccatcatgctgttccaagcttgacacatatggcactagtcgaacttgaaagagcaggatttctaaagtttgtcataagccagaatgttgacagcctacatctccgttctggtttcccaagggagaagttggctgaattacatggcaattctttcaaggagatctgcccatgctgtaaaactgagtaccttcgtgattttgagattgagacaattggactgaaggatactccaagacgttgttctgataagaattgtggagctagattaaaggatacagttcttgactgggatgatgctttaccccctgaggagatgaatttggccacggagcattgtcgatcagctgatcttgttctatgtctaggaactagtttgcagattactcctgcatgtaatatgcctctgatgtcaatcaagaatggggggagggtggccattgtaaatcttcaggcaactccaaaggataaaaaggcaagccttgtcatccatggacttgttgataaggtcattgctggagtcatgagcaagttgagtctgcgaattcctccatacatacgtactgactttgttcagctcactctcaggcactcactgaaaaagaaatgtgttagatggactcttcgagtaacaagtattcacggcctccgagcaccattgccatttcttcagtctgtcaaggtttcctttccagaaagacctgatctgaagtctgtagtgcttaaagagcaaccattctctttgcagagggaaacatcgatgaacaaaccatttttcatgctgttgacattaaatttcagtgatggttgcagctgtttgagctcctcaattggatggcctgttgattttcagaagcgaaaagacagcttcgtcagagatagagctctagtcctacgggagttgtactctgctgcacagcgcgagtcttgcattgggcaacaagaaattctggaaagagagaacctaccaagagctgagacgtctattcatggaatcgtgacaaacatcgttaggtatgacactgaagatgaaaagttggctccacccaagaatgatttgatgaatcacagccgcagcaaccctgcaaaacggcacgtggaaggcactgattgccactcgtcattgccaaagaaactgaagtactttttgaaagacaagaagctgaactgctaaaagtgtaaaaccgtagaaggtagatagagaatgctgtaggtttgtttattttggttattagacgagttatacatagcatagatgcatgggaagttcgcatgctaaggttgaactcttctgctgcataggaaagttggctgacttcttatattatgcgagcctagcttaggtacctcctgtggggagaagcgattgcaatacatggtagcatgttgtagagctcctcaccccagttagtcagtgactgatgatggtatcctcttaccagtcctctggtggtatcatcttttgttcacggaggtcgatgaagtactgcctccgataaaaaaaagacgcttttgacattattgctcccccaaattcttattttgacggctaaac

SEQ ID NO: 15350 - DNA, 776 bp, Zea mays
  Clone ID: LIB3059-039-C1_FLI
aggcacgcgggggcgcaaggcgcgacggctcagcgcggtctcgactgcccgtctacggcgcagccaccccgtggcgggcggctcccgacctcaacggctcgggcgcgggtccggctgctcggccatggcggcacaagtgcgcggccccctgagcgggcgagcgcgcagtcccgcggctctggcagtgcgggcgctaaccaggcgcagccagtgtgggttcgtcccggcgggcgcatggtaccggccatggtgccccgttgaggcgcgtgcgcgcacatggtattctcacggaggcaaccagacggtcgaacggatcatcatggtacagaacactccatgcataggagtgggcagaaaggtaaatctggttgttgaaacaaattaacatacgatctttgaaaacctgttgctgagtagagatcaactccttgtggccagactgccagactccagcgagatcatctccttccagtggtgtcgggttgttgtccagcgtccagccattagacatgtactagcctctgtagccatacctaagcagcgtctccatgaacttgtctttgaatcgcttttcgtccgacagacgccggatgcacggatgcatggacattgctgtcgacggtaaccgctcggtggagagcaaagtgctgataacgtgttgaatctcagtggagagagacagataatgacaaatgactgaactcattattgcagggaacatcctgatatatatacaggtgaagggttgcgttctcaagggggtgtcccttggaaat

SEQ ID NO: 15351 - DNA, 502 bp, Zea mays
  Clone ID: LIB3059-040-A5_FLI
cgcgcctttcccgcaaggttgcttctactctaatgcccttggaggattgaagtgctacgagaatcccaagaacaaagtgactgccgttcctgcaaacgaggaggaaatctgcggcgcaaccttccaggtggaaggggctacggtgctcacagcgctgcattaggagatgaggtgtcttcctccgtctccaggcctggactgggggcaactgtacatggtgcctggtggtgtaatgtaacataacggcaatggcatatgcagctgatcctggtctgcctgtatcatctcctcccacccgtaaagagaagttctttctgccgccatcgccatggtcagtcagagcttctctgctatagctgctggatgtgttgtgtgttgcgtctgtatcgtctctagtttgttcgacttacgtggaaacctgagatcagaccgggtatcgagcggctgcttgcatggatggaatgctgtaatcatctgtagtgacaactccattttccttgtc

SEQ ID NO: 15352 - DNA, 1655 bp, Zea mays
  Clone ID: LIB3059-040-E8_FLI
cggaggttctatcagagatagaggaggaaaaacttgaatctgaagaagtagaggcagaagaagagagttctgaggatgagttagatccatttgtaaagtctgatcctaagttaccaagagttgtccgaatggcaaacctctgtgttgttggtgggcattcagtaaatggtgtagctgaaattcacagtgaaattgtgaaacaggatgtgttcaacagcttctatgagatgtggccaactaaatttcagaataaaacaaatggagtgactcccaggcgttggatccggttttgtaatcctgcattaagtgcattaatttcaaagtggattggttctgatgactgggtgcttaatacagacaaactggcagaactgaagaagtttgctgataatgaagatctgcattcagagtggcgtgctgctaagaaggctaacaaaatgaaggttgtttctcttataagggagaagacaggatatattgtcagtccagatgcaatgtttgatgtgcaggtgaaaaggatacatgaatataagcggcagctgctaaatatccttggaattgtctaccgctacaagaagatgaaagaaatgagcacagaagaaagagcaaagagctttgttccaagggtatgcatattcggtgggaaagcatttgccacatatatacaggcaaaaaggatcgttaaatttattacagatgtggcagctaccgtgaaccatgattcagacattggagatttgttgaaggtcgtatttgttccagactataatgttagtgttgccgaggcgctaattcctgccagtgaattgtcacagcatatcagtactgctggaatggaagctagtgggaccagtaacatgaagtttgcaatgaacggttgcattcttattggaactttagatggtgcaaatgtggaaatcagagaggaggttggagaggaaaactttttcctttttggtgcagaggcacatgaaattgctggtttgcggaaagaaagagccgagggaaagtttgtgcctgacccaagatttgaggaggttaaggaatttgtccgcagtggtgtctttgggacttacagctatgatgaattgatgggttctttggaaggaaatgaaggttacggacgtgcagattatttccttgttggcaaggacttccccagctatattgaatgccaagaaaaagttgatgaggcgtaccgagatcagaagttatggacaaggatgtctatcctcaacacggctggctcatccaagttcagcagcgataggacgattcatgagtacgccaaggatatctgggatatcagccctgccatccttccctagaccaggtggatatcaggttctttcgcctatatttctgtgaaccctcaggatcaaggaacagttggtgacgacattaatttgcctcagccccttagcaggaagcgctggtcacctcagttttgtgtagacaaaatctaggcatcgataaatgatgggggactatgcatggtgttttggcagcactgttcagtaccttgccttctaaatctggtttttggtgtgtgtgtgtaagctaataaatgtcgaggcaggattgtaggaacaccattgatcatttggctcgctggtgacctggtgacgtatggtgtaattagtagttgtttgcct

SEQ ID NO: 15353 - DNA, 1256 bp, Zea mays
  Clone ID: LIB3059-040-G3_FLI
tgatcataggtattagtgaagttgatcccatacactggcctggatcaaaatggaaatctctcctgataaagtgggatggtgctactaagtacagccaccagaatagagtatctccatgggacatcgagggagttggcagctcagttttagttactcaccgtctttcctcttctgtttcgaagcgaacaaaactgtgcttccctccaagcgatttggacacaccaattctagatggaaatggtcgtccagactccgtggaaactgaacgtttccacagggtcttgcaaggtcaagaattggtgcaccctagtattcatggtgctgcatgctctcattcatcagatagccccagatgtcaaggctcttatggcaggagattctctgctgatgtgtggaactgcaagatgaatgatgtaatgagtgggcctcgacacctaaatgccactgggtttgcttaccagcccctaggcttcagtgaatctgtcaaattctcagaggtcttgcaaggtcaagaaatgtctcaggcggttccttccttcatgagatctgctttcaactctggcacgcagaatggcagggttcgaccatttgattatgtgcagagatcagatgcaactcaaggatacgctctccagcagtttaatctgccagcaacagaagtgcattcgccctcttctgttcttatgtttaaccaaaccatggtaccacatgctgagctagatggtgcgaccaaccgtgaagaagtacatggcagcaggtacttgtcatccaatgcaatagggagagaagctgaaccatggccatccatgcagcagcaaagagcgagtgtaaatggaagcgagcctctcgacacaactgaagcctcagctcctgcaaggaacgctgaatctggatcggtcggcaggggcgcggggcgaagcaactgtaagctttttggtttctccctgactgagaagatccttggaacggatggtggtggtgtgaaagaagggaactacgaagtggaccgtcaaactccccgggtgctagacttgtttgggcacggttctacgcctggagctctgcatgctctctgtgctgctcccttgggaatatgatgctgttctgcctagttttacaacagttagatttatgtaatccttcagccattttcatcgcgttgtacttgaccaatatgtccagcgtatgatttccagttttaattgtatgctgatgctacatatcctctcttgagatccatgcatgagaattctggc

SEQ ID NO: 15354 - DNA, 792 bp, Zea mays
  Clone ID: LIB3059-040-H5_FLI
gagaagcagaaaggcaacaatagcaatatgaaggcttcttcgaaagtcaagaaagaagtcagttctgatgatgattttgtcatgccaacggcgcagaagaaaagtgcaggtgctgctggaagtaatgccaagacatccaaggttaaaaaaattaaagatgaagatttggaagatctcaaggaggacaagaaaaggaagaaacgagtgggtgtcaaagaagaggcaaagttggccttggccattgtaaagggagagaaggttaagaaagagaggaaagtgtatggtttgccagggcagaagcatgatcctcctgaagaaagggatccattgaggatattctatgaatcactctatgagcaggtccccaccagtgacatggctgcaacctggttgatggaatggggtttgctcccggtggatgtggctagaaaatgttttgagaagaaacaaggtcagaaggttaagtcaccagtcaaagcaattgtggcgaagagaattccttcttctccagccaagacactgccttcatctgcaaagaagttagttatgccttcaaacagtgctggaaagctgaagtctcagaagaaaaggaaggcaagtgatgacacagatgatgacgacgacgacgatgattttgtagcttctaaagcaaagaccaagaggcacaaggcctagttaggtcctagcatctcattatcctagtaatgagacgtgttcttcagacaatttctagctcggatgaccttggatgattgttccttccattggtttgctcatttggggcgcgcaact

SEQ ID NO: 15355 - DNA, 706 bp, Zea mays
  Clone ID: LIB3059-041-D12_FLI
gatgaaaatcgccgctcacatctcatctggcatactatggcggcgcctctcctcggtcggacctcggcttccaccggcggtgcctagatcggcggcgcccggaccttggcctctgtcggcggtgcccggctcccctcggcatccaccgacgccggccgactcactatctccctccccccgttgatgcccgacatcaatggcggagcaccatcctgatctcatcatatgccggaagcagcctggcatcgtgattggtcgcgtgtgcgagaaatgtgatggcaagtgtgtcgtctgcgacgagtgcaattatggttcgttccagggaaggtgtgtgatatgtggaggagtcggcatctcggacgcttactactacaagaagtatggttttaagaagagatgatcgagatgatttgggctgtgtgtggttctctttggctgtgtgttctgttctatcgcactgaatactgagagtaggcagctgaggcagcagctttgtattcctattatggtttgatagttgttaccgttgtgaaaatgtagctccgatatgttttttaataactagttctaattgtagggtgcaagagactgcatatgtaatctgtgcttgatggtaatggctatgaatgaacttgaaacgttggcatgatatttgtcatcacatgacatgttactgctcaaagaatctagttgtcatttagaacgg

SEQ ID NO: 15356 - DNA, 612 bp, Zea mays
  Clone ID: LIB3059-041-D3_FLI
cttgtgttgtgtttggctagggtttgctcgcgtctcctccttcccttggctgctgtcgtgccggtcggcggcgacagcaagggagggaacatgtcgaagaagaacaatcttgccaagaggaagaagcagtacgagttcgacctccaacgggagaaggaggccaaggagaagcaggccaagaagctgcaagccaagaaatccaagatgaagatagatggtgctgaaaagaaacgtaaaggtggccaatttaaggtcggcaagaaaaaggtgaagacgaaactttcagccttagcaaaagccaaagccgcgcaagccatggaggtcgacaagtgactgcggagcacaagcatcatcaccttaagcgtcgagccagagttggaactctgaattctgtgcccacatgaatagctcccgtcgggtgcagctgcagctgcagcttgttgaacctttctttctaaaaagaatgtcattcttgcttttttaagggtaatcaagctctagttataggttttggtgataacgactatgatgttagagaactaatgagatttatggagctaaatgaaaaagagaaaaatacatgtgatttttgatgcttcaattactaaagaa

SEQ ID NO: 15357 - DNA, 1138 bp, Zea mays
  Clone ID: LIB3059-041-E3_FLI
tgaaccgaaagttcgaggtgtatgagaagcagatgaaagcggccaggaagtctgggagcaaggccgcacaggataaggttaagggccaggcgctatcaaaggctgctaaagaggccgccaagaacaaggggaaagggaagagtgctgcagatgacgatgatgaccagaaacaggtagctgtgccgcggaagtggcgtgactacagtgttgagttccatttcccagagcctacagagctcacaccacctctccttcagctcattgaggtagggtttagctaccctggtaggccagacttcaaactctcaggtgttgatgttggcattgatatgggaacacgtgtagctattgttgggcccaatggagctgggaagtctacgctgcttaatttacttgcgggtgatcttatcccaacagaaggggaggcaaggaggagccagaagctgaggattggacgatactcgcagcattttgttgacttgctgacaatggaggaaaatgcagttcaatatttgttgaggctccacccagatcaggagggaatgagcaaagcagaggctgtccgtgctaagctcgggaagtttgggttacctggacacaaccatctcactccaattgtcaaattatctggcgggcagaaggcccgagttgtgttcacttctatatcaatgtctcaacctcacatactcctgcttgacgagccaacgaatcacttggacatgcaaagtatcgatgcattggcagacgcgctggatgaattcactggaggtgtcgtcttggttagccatgactcacgattgatatctcgtgtttgtgaggatgagcaaaggagcgagatatgggttgtggaggatgggactgtgaacagatatgatggcacatttgaggattacaaggatgaactcatggaagaaataaagaaggaagttgaagaataatgctgctccaagttagttgtgctttgctgtttatttatataataggctgttttcttgaactgaaattgcatgtactattactgagttctctttactctggtttgcagagtattcatatatggttccaactttgtaaaaatggggcatgcttgttttatgttatacaagagaaacctgagaatatggtattatttgtttgt

SEQ ID NO: 15358 - DNA, 909 bp, Zea mays
  Clone ID: LIB3059-041-E6_FLI
ccgagttccccagtactccgcagtccgcacggccgcatccgtcaagatccgcgaagagcaacgaggcgaggcgaggggagggaaaacaagtgagtgagagagagagagagaggagggaaaatgctgcgccacgccgcccgccgcctcgtttcccgcgccgtcgctccgcccaccgcgcgccgggcgctcgccacggcggaggtgcccgcggaggccgtcgaggactccacgttcgtcgaggcctggaaaaaggtcgcccccaacatcgagcccccagcgacgcccctctccctcatgcagccgcgcccgcccacgccagctaccatccctaccaagctcaccgtcaacttcgtcctcccctacaagtccgagatcgccaacaaggaggttgacatggtaattgtaccagctacaactggtcagatgggtgttttgccaggccatgttgccacaattgcagagctcaagcctggtgttctctcagtacatgaaggaaacgatgtgagcaagtactttgtgagcagtgggtttgctttcgtccatgcaaactccattgctgatattgtggctgttgaggctatccctgtggatcagatcgacccagcattggttcagaagggtctcgctgaattcactgccaagcttggttcggcctctactgacctggagaaggctgaggcccagatcggagtcgatgttcacagtgccctcaatgctgcattgaccggttaattggtggcattttaaattgtcttgtctttttcatctacagttttagagtgagtttaagtttgcaaactcatgggcatgggatggagggaatgatcctaaataaattatactccatctaaaacatggacatatgtttcttgtttcctgaatcctgcatggatttctttttgtactggt

SEQ ID NO: 15359 - DNA, 1235 bp, Zea mays
  Clone ID: LIB3059-041-G5_FLI
cgcgggtgcaggcctccaggggcacggcgatgggacagcacgactctcttctctgagaaaacccaacaaaaaccctcgctcgcctcacttgttcgctcacctcggtgcggcgcgtcgttcggacacggagatacagcggcgattccggcgatggagtacgtgaaccccctcaccggcttccgcgtcgacggccgccgccccaacgagatgcggcaactcaagggcgaggtcggcgtcgttgcgcgcgcagacgggtcggcgctgttcgagatgggcaacaccagagtcatcgccgccgtctacggcccgcgagaggttcagaacaaaggtcagcaagtaaacagcaaggaggctttggttcgttgtgagtacaggatggcagagtttagtacaggagatcggaggagaaaaccgaagggtgacaggcgatcaacagaaatttctcttgttattcgacagacaatggaggcaagcatattaacacatttaatgccacactcacagattgatatatatgtccaagttcttcaagctgatggtggaacaaggtcagcttgcataaatgctgcaacactagctcttgcagatgctgggattccaatgcgagacattgccacatcatgtagtgctggttatctgtgttctactcctttgctcgatctgaattacctcgaagacagtgctgggggttctgatgtcactgttggcattcttgcaaagatggacaaagtgactttgcttcagatggatgcaaaattaccaattgatacatttgaaaatgtaatgggacttgcaatagaagggtgcaaagcaattgcaacttacatccgagaggtgctattggagaatacaaagaagcttgagtgtcagcgtggttaaccttaggaggcaggttgatgacctgaacctacccaacaacggacatcacacagcccattaaaaggcttactggttgtggttgtgggtggctggctctagtgcagtgcacaggaacttccaacggagtatgtgcaagtcgtcagaagttgttcaaggcagcttgtttgtcatcatcaccagggatacaagacatgcttcctcagtaaggtgttatcggaatttttcggttcctgtaaactgatataaatcgatggtggaactgtactgataatcttccgtatggtgttattggaatttgtgtgacagttcctgtaaactaatgcagagagagagatccagcggggctcctgcctcct

SEQ ID NO: 15360 - DNA, 398 bp, Zea mays
  Clone ID: LIB3059-042-A7_FLI
acaacaagaagactcgcattattccgcgccacgtgcttctggcgatccggaacgacgaggagcttgggaagctgttgggcggcgtgaccatcgctcacggcggtgtgctccccaatatcaaccctgttctgctgcccaagaagacggcggagaaggcgtccagtggcgggagcaaggaggcaaagtcgcccaagaaggccgccaagtcccctaagaaggcatagactgactgtccggagtgatctgatgtttagcagtaccttgttaccagtatgcggtgatgcgtaggctgcagatgggacgaatgtgcttgtatgtgtatgtgtcctgctgcaagttgtcctttgctatttagaatggaagaagaaatgccttgtttctctgaggttgcaatgtct

SEQ ID NO: 15361 - DNA, 574 bp, Zea mays
  Clone ID: LIB3059-042-B9_FLI
ctcccggcggcggcggcggcggcgcagcagcggcagcagcatccgaagatggtgaagttcctcaagcccggcaaggccgttatcctcctccagggccgcttcgccggcaggaaggcagttatcgtgcgcgtgttcgaggagggcacccgcgaccgcccctatggccactgcctcgtcgcaggcctcgccaagtacccaaagaaggtgatccgcaaggactccgccaagaagactgcgaagaagtcgcgcgtcaagtgcttcatcaagctcgtcaacttcactcacctcatgcccacccgctacaccctcgacgtcgatttcaaggatgtcgccaccggtgggcccgacgcactctctacccacgacaagaaggtcgccgcctgcaagacggccaaagcgcgccttgaggagaggttcaagaccggcaagaacaggtggttctttaccaagctccgcttctagatgctcggcctcccgaatagtcctgctttagctgtcgatttgttgtatcggacacactccatctctgttttcgtattaccatgaatatttcgtgtttagtcctggggctctc

SEQ ID NO: 15362 - DNA, 807 bp, Zea mays
  Clone ID: LIB3059-042-C7_FLI
gctcgctctgctagcctaccatggctgatcaccaccggggcgcgacgggaggtggcgggggctacggcgacctccagcgcgggggcggcatgcacggcgaggcgcagcagcagcagaagcagggcgccatgatgacggcgctcaaggccgcgacggccgcgaccttcggcgggtcgatgctggtgctgtccgggctgatcctggccggcaccgtgatcgcgctcacggtggccacccccgtgctggtgatcttcagcccggtgctggtgccggccgccatcgcgctggcgctcatggcggccgggttcgtcacctccggcggcctcggcgtcgctgcgctgtccgtgttctcctggatgtacaagtacctgacgggcaagcacccgccgggcgccgaccagctggaccacgccaaggcgaggctggcgtccaaggcccgcgacatcaaggatgcagcacagcaccgcatcgaccaggcgcaggggtcttgagagaagaaccacactcgagcggaccgcgcgcgcgacctccttgaaccactgccggcgcggcggcatatggcccttaaaggcggtggctgctgctacgtacgctgccgtagagtctcggtcgccgcgatagctctagctagtcgtttatgtgttgtgctttgtgtgtgcatgcttgtgtctgggggcatgcagtgcagtgcagtactatatgctgtatgcgtctctctttgatcggagaggcggatgtacagcatgctcgatatgtctagtttggatgtcatgtttatgatgaggaataaaatgcagtgttcaggtg

SEQ ID NO: 15363 - DNA, 759 bp, Zea mays
  Clone ID: LIB3059-042-E12_FLI
gcggcggcgtaggtagcggcggtgtgcttgtgatctcaatctcaaccccaggcgagctcggctccggtcacccgtcgatccacgcaaccatgtcgaggaggaagaccagggagcccaaggaggagaacgttacccttggacccactgtccgtgaaggagagtttgtctttggtgttgctcacatctttgcatccttcaatgacaccttcattcatgtcactgatttgtctgggagggaaactttggttcggatcactggtggcatgaaggttaaggctgatcgtgatgagtcgtctccttatgctgctatgcttgctgcccaagatgttgcacagcgttgcaaggagctcggtatcacagcgctgcacattaagcttcgtgccactggaggcaacaagaccaagacccctggacctggtgctcagtctgctctcagggctcttgctcgttctgggatgaaaattggacgcattgaggatgttaccccggttcccactgacagcactcgcagaaagggtggtaggaggggaaggaggctgtaggcgtgtatccttgctatttgccatcactttgcactggtctctgagtagttctgctatttattagcttgccaaaaggagctttaattttgctcatttcgctctatgtcgaggatcatttattgttagccgaatctatgatgtgcattgataatgttttggttatggaattgacaattatgcttaaaaatgcattttcactcgataaatctagatcgcg

SEQ ID NO: 15364 - DNA, 1059 bp, Zea mays
  Clone ID: LIB3059-042-F11_FLI
cttgaactcaaaattattcaacggaaggtggagaaattaaggagttcccttgaatgttttcacaatattgaaggtggcattggtagtgatagtgttgtgaggtatgctgaagagcagttgatgatgagaaatcagcatcgcatcatccactggcaagcagggctctgcaagttgaatgacatagttaaaaggggcaacaagtgtgatatcatcctcaactatcacaatttgttgttccaaaggatcatcttaaacatcagtgatacatctagcatatttgtgaacaattcactgaatggaaaccaaattggaaagacatttccaaatttggatgcatctttggcattcaattttgttttcgaagccgaggagaaccaaagagttagtgatttacagtccttgcagaagaagacaatggaaacaagcttgctgcttggaaatcttattgatgttttagaagaaatcaaattatctaagttggagttagtaaatcttacctccgctgcttttgttttggagtcccagacacgtaaacttggcctccacctgtctttcatgagtttcaagagtggcaagaagattgctttcatcatcgacatgacagacttgaaccgctcggtctacccttctgaaccatctgagctcattaaggtttttgaagcacatactacgctagcacagccaagcatagacgagaccatggcttctataaggaacctgcaatctggtcgcacagcaatactaagattgtgccggatggtatcccggctgattcatggttacaatgatgacctgatcactggagtgcaagctgtaggaagtaaacatcatccggattgtaggtagtaggcattaacagtgttggttttgtttttgtttttgcatgtaggcttaagatgtttgaatgcataaagcagtccttttcaggtggacgtgcaagcgattttggttactgcaaatccttgtaactgcccgtttattacagcaacaatgcataactggtagcttggtgcgttagagtgatggattacagtcttgcagatatgtcggcactgttgt

SEQ ID NO: 15365 - DNA, 1897 bp, Zea mays
  Clone ID: LIB3059-042-G5_FLI
caggcggtgctgaaggtatggctgaagagaggaaggtatctgcttctgcagtggcatcagtcaccacagcaaggtcgtctcaggctacctctttgcctcaggactcggaggagaaggagtgcgtctgggacgcttcgctccctccgagtggcaatgttagccctcatagtagtattgacagcatgggtgtggtcactgctatgagcaccctcaacagctgcacgagcacatataaaagcgagaccatagctggtgaagcaatgctcaatgttgagaggaactgtgagagtgtaaagggtgttcgaggtgacttactagaaagtgcaaaaactagcatgagtcgagcaagtgatagcagtgttgttagtgatgacagcagctggagccacatcactggaggtgccagcaagcctcacaaggggaatgatcctagatggaaggcaattcatgctgtacgaactcgtgatagcgtgcttggaatgagccattttagactactaaagcgtcttggttgtggtgatattggcagtgtttacctctcagaattaagtggaactcggtgctactttgcaatgaaggtaatggacaaggcatccttggcaagtaggaaaaagttaaatagggctcaaactgaaagggagattctacagcttcttgaccacccattcctcccaacgttgtatacacattttgaaaccgacaggttctcttgtttggtgatggaattctgtccaggtggtgatctgcatactttgcgacagagacaaccaggaaagcatttctctgagtatgctgcaaggttttatgccgcagaagtacttctagctctggagtatctacacatgttgggagtggtttatagagatctgaagcctgaaaatgttcttgtgcgcgatgatgggcacataatgctttcagactttgacctctcgctgagatgtgcagtctcacctacactcatcagaacatcagctttcgattctgatcccagaagagcaggtggttctttctgtgtacagcctgcttgcatcgaacctacttcagcttgtatccagcctgcgtgcttcctccccaaattcttcggtcagaagagcaagaagaagactcgaaaggcaaggtctgagctgggacataacgccggcaccctgcccgagcttgttgccgagccaacatcagctcggtcgatgtcatttgtcgggacccatgaatacttggcccctgaaatcatcaaaggcgaagggcacggaagcgctgtcgactggtggaccttcggcatcttcctgcatgagctgctgtacggcaagaccccgttcaaggggtcagggaaccgtgccaccctgttcaacgtggtaggccagcaactgaaatttccagagtcgccgtccacaagctactcgagcagagacctcatccgtgggctcttggtcaaggagccgcagagccgcctgggcgtgaagcggggagcgacagagataaagcagcatgccttcttcgagggtgtgaactgggctctcatccggtgcagcactcctcccgaggtcccgaggcctgttgaggctgagctgcctgtgaagtatggggtggcggaggcgatcgggagcaacagcaagcgggtagtcggagcagacgtgaagtcggccggaaaatacctggactttgagttcttttaagaacagtgcgtgcccagtggcagctattgtttgcgtactgtccgtgtatggtcggttttgatgtttgtgtgattcgatatggtgatttgtgcctcgccgtcgatgcacacaattctcaggtttgaatcgaccaaaattagataggtgtgtgttgccatttgcctgctttggcacatttcgagtttatgtatggaactatgtatagagtatgcattgcaatttgcagc

SEQ ID NO: 15366 - DNA, 974 bp, Zea mays
  Clone ID: LIB3059-042-H3_FLI
actgcctcgtgtggccgtcgtctcccgttcggaacgccaagcccccctccggcgaaatggcccccaagcgaggtggcagggcgccggtgccggccaagaagaagacggataaagtgacgaaccctctattcgagaagaggccgaagcagttcggcatcggcggggcgttgccgcccaagaaggacctgcaccggttcgtcaagtggcccaaggtcgtgcgtatccagcgacagcgccgcatcctcaagcagcgcctcaaggtaccaccggcgctcaaccagttcacccgcaccctcgacaagaacctcgctacgaacctgtttaagatgcttctcaagtaccggcctgaagacaaggctgccaagaaggagaggcttctgaagagggcccaagctgagaatgaaggaaaaactgttgagtcgaagaaaccaattgttgtgaagtatggccttaaccatgtgacttacctcatcgagcagaacaaggctcagcttgttgtcatcgctcacgacgtggatccgattgaactggttgtgtggcttccagccctgtgcaggaagatggaggtcccttactgcattgttaaaggaaaggctcgccttggatcgattgttcacaagaagaatgcatcagtcttgtgtctgaccactgtcaagaacgaggataagcttgagttcagcaagatcctggaggctattaaggcaaacttcaacgacaagttcgatgaggtcaggaagaagtggggaggtggcatcatgggatccaagtcgcaggccaagaccaaggcccgggagaagctgctcgccaaggaggctgcgcagcggatgacctagattgtctactgctgtgtctgccctgtagtttgacggggacgaactgatgaacgcgtattgtggttttccgaatctagtttcatatgttgctgtccaccagaccatgtttagaagctttgcaagacagagtttacagtgttt

SEQ ID NO: 15367 - DNA, 868 bp, Zea mays
  Clone ID: LIB3059-043-A6_FLI
gcggccgctcgcgaccaacaagcaacatagaaagtggaatccagtagcaacaacagagcaacaatggcgaccaagatattttccctccttatgctccttgctctttctgcatgtgttgctaacgcgacaattttccctcaatgctcacaagctcctatagcttcccttcttcccccataccttccatcaatgatagcttcagtatgtgaaaacccagctcttcagccctataggctccaacaagcaatcgcagcaagcaacatacctttatcacccttgttgtttcaacaatcgccagccctatctttggtgcagtcattggtacaaaccatcagggcacagcagctgcagcaactcgtgctacctgtgatcaaccaagtagctctggcaaacctttctccctactctcagcaacaacaatttcttccattcaaccaactgtctacactgaaccctgctgcttatttgcagcaacaactattaccattcagccagctagctactgcctactctcagcaacaacaacttcttccatttaaccaattggccgcactgaaccccgctgcttatttgcagcagcaaatactactaccatttagccagctagctgcagcaaaccgtgcttccttcttgacacagcaacagttgctgcctttctaccagcagtttgcggctaaccccgcaaccctcttacaactacaacaattgttgccctttgtccaacttgctttgacagacccagcggcctcctaccaacaacacatcattggtggtgccctcttttagattgcttattagttgtaattcaataataaagttttttggatgatgtatgtggccaaccagaaataagaagttacatctccag

SEQ ID NO: 15368 - DNA, 934 bp, Zea mays
  Clone ID: LIB3059-043-B7_FLI
cgcaaacacacggcacgagcagctgagcgcccatggcaggtccccggcgtctcctcctcctcctcctcctcccgctgctcgtgctcctcggcgcgcacccgccgcagtgcgggtccgcggaggaggggacgaaggtctccctggagctctactacgagtcgttgtgcccgtactgctcgcggttcatcgtcaaccgcctcgcggggatcttcgaggacgggctcatcgacgccgtccacctccggctcgtcccctacggcaacgcgcacgtcgcatccaacagcaagatctcttgccagcatggtccgtacgagtgtctgctcaacaccgtggaagcttgcgccatcgacgcctggccggatctggatgtgcatttcagcttcatctactgcgtggaggacctggtggtgaagcggcagtacaaggactgggagtcctgcttcgagaagctgggccttgacgccaagcccgtaacagaatgctacaaaagcgagcatggccacaagctcgagctcaagtacgcgaaccagaccgacgctctcgagccgccgcaccggtacgtgccctgggtggtcgtcgacgggcagcccctgctagaggattacgagaatttcgaggcttacatctgcaaggcttacaagggcactccaccgaaggcctgtgagggcctggaacgtctgcagatggccctcgagacagcggcggaggcgcgcaacggcgtcagctacaactccggtgtcagcaagcttgcgactgctgaagatgagggtggggagcataaggtgggagaatactagtacgtaattgactagcgacgtgcccttttttgggtcatgtgaagatatgaaggaccgttccatctcgttgtccgggtttttattgtacagtaatagctaatatggtaatgataataattacatttctaatcttctcc

SEQ ID NO: 15369 - DNA, 587 bp, Zea mays
  Clone ID: LIB3059-043-C8_FLI
ggttcgggtgcggcccatgtgagaaggcgcgcggtgtttgcttccgccgtcggcaaggaaggaagaagagagcagaaccctagctagagtttggcgagtggtgcggaggcgcggctgctcctgctcgtcgcgacatcgaatttcagcgccgcccgcgcgatccttggtctcttcgcccgtgaggagaggcgcggcaatggctgggaaaggcgggccgaccaacctggagaaggagcagatgtttgggatggcggagaaggagatggagtacagggttgatcttttcaacaggcttacaaagacctgttttgagaagtgcgttgaaaaaaggtataaagaagctgagctcaatatgggtgagaacagttgcattgatcgatgtgtttcaaagtattggcaggtgactaatttagtcggtcagatgcttgggaaccagcctcagatgtgaaccgagaagcactagtttcattttgtagcagaatcctattgctctgtttattctttttggttggtattagaatcccgccacctgctattaagtacaccaatacagcaccagacttgttaatgcgtggatcgctctaaag

SEQ ID NO: 15370 - DNA, 796 bp, Zea mays
  Clone ID: LIB3059-043-D12_FLI
gataattttgtggactacaaagaccggaaaattattctttcttcaggcagtgaaaagaagcttgaagaggctgcccctgggcttattttacggaagagaaagtctgctgacgagtcagttgccagcgaggcaaattcatcttcggttgaaagtgaagcatcagttgctgatgctgtggcccttctgcttaagcataaacgtggtctacaaacctcagaagaaatggagaatgagactgaaccatattctagcaagaccgaagggaagaagtcgaaacaaaaacgtgtattgggcccagcaagaccagatttccttgaagccagacaagactctgaaacatgggtgccacctgaaggtcaaactggtgatgggcgcactgcattgaatgaccgtttgggttattgaaaagctcttccagcaacagttcccttgtggagaagtgcagtatcgtgcctatggttttgagcctgtttggggctccatattctgtgaagacaacgcaatagaagctaagaatgcttattctgttgatggcaagtttggtgaaggaactattcattgactttttagggcgctagtgggactgtagctcggctaatcctctcacactctaagggtttgttcggttattttcaatctatatggattggaggggattgatataaattgggagagattttgagtactaggaattgaaaccccatcaattcctctcaatccatttcgattgtggtagaaccgaacatgacctaaagaggatatttaggctataaagaggttcaatgtgttaaggcct

SEQ ID NO: 15371 - DNA, 1249 bp, Zea mays
  Clone ID: LIB3059-043-D7_FLI
cgagtgttcctttctagccttcacttctcagcacggcagccttcgacccccgactgcagccgccagccgcgccatggagcaagccgccatgccgcaggttccccgcgtcaagctcggcatccaggggcttgaggtgtcgaagctggggttcgggtgcatggggctcacgggcacctacaacgcgccgctcggcgacgaggccgtggccgccgtcgtcgcgcacgccttccgccgcgggatcaccttcttcgacacctccgatgcctacgggccccgcaccaacgagaccctcctggggaaggcgctcaagcagctgccgagggagcaggtgcaggtggccaccaagttcgggataggtcagggcgccgctggcatgaccgtgtgcggcacgcccgagtacgtacgcgcctgctgcgaggccagcctgcgccgcctcgacgccggctacatcgacctctactaccagcaccgcgtcgacaccaccgtccccatcgaggatacgattggtgagctcaagaagttggtggaggaggggaaggtcaagtacatcggcttgtcagaggccagcccagacacaatccgccgtgcgcacgccgtgcatcccatcaccgccgtgcagatggagtggtcgctctggtcccgagacatcgagcccgagatcgtgccactctgcagagaattggggattggaattgtggcttacagtccaattggccgtggattttttggtggaagaggagtgatacagcaagtttcttctgaatctagtctgcaaaggcatccaagatttacaacagaaagcttggagaagaacaagcagatttacctgaaaatagaagatttggcgaagaagtaccagtgcagcccagctcagctagctctagcctgggttctgcgtcaaggggatgatgtggttcctataccagggacaacaaaaacgaagaacctagatgccaacgttgactccttgaaggtgaagctcacagctgaggacctgaaggaaattggcagccagatacgtgcagaagatgtggctggtggaagacaatacaattcctatgcacatacctcctggaagtacgcagatacaccaaaaaagtgaagttctggtcctggaaaccttgtagcaatcacaggcgtatgcaaatgttgaactatttccctgcatttgagccggaatcgtacgatgatgcatcttgtgaacatgcggcactaataaatcgagacgaagaataatgtgttttccatc

SEQ ID NO: 15372 - DNA, 537 bp, Zea mays
  Clone ID: LIB3059-044-A5_FLI
cgctgtagggttttctggtcctggtaggcgagctggggaagacgcaaggtactgcggctgcgcgcgaggggtcgtcggacgaccgacgaggacgagcggcataggcgcgtgcatggcgctcacgaacttcatcctcacggtggtgggggtgggcgcggcggtgatgctgctgcggaaagacgtcaagcagtcggccaccgtcttccgccgcaacgtgcgccacatccgcaactggctcgaggaggagtccgccgccgccgccaaatctactgaacagtcttcagtgaaggagttggagtcccaagctgccaagaaagacgctgtgcccaaggacgacaaacattagatgatcttacaccctgtttcttgtaatgcgttggcagtttgaggtccaggattttgaattggtcctttaaaaaaatgtatgtgttgtaggacctttagttctgttggaaattttactgaataatggaagacatcttaggttcaaggttctgaaatgggatcttatatctcaatgagattatgatggtggat

SEQ ID NO: 15373 - DNA, 715 bp, Zea mays
  Clone ID: LIB3059-044-F8_FLI
gagggagagaaaaacccaggccccccgatctcctcctcccactccgatcgcccgaccgatcgccgagcttccctgttccctccccgcccccgcgacgccgcgacgccatggagccgccgcacgccgagcaggccgtcgccgctgtagcagcaggaggagagggcggcaccgcaagcccgggcaccggcctcgaagggccggtgcttaggcgggggctggacggcggtggggaaggggaggacggggagctgggggcggggcaggaggcgaacgcacggctaccagagcggcctggcgaggcggactgtggctactacctccgcacgggcgcctgcggcttcggggagcgttgccgctacaaccatccccgcgatcgtggcggcactgaggtgcgcgcgggcggacgattttctccagcctctgcttcccgctctcttgctttctcaatcttccccgatctgatccgtgtccgcgtccgacacgctgctgccggtgaattgagatagttaccgtttgaaacctgtgaggatcagaccgcaaccgcagaaactagcgatttgggtaatgtggttcgtccagagcggattatgcacactgctctttgtggatttctccatggtgtcttgttgttatttgacatcggatgacagcgtcaaagttttgatctgcctcactcgaaactgcactactgaggttccttccttttatggttgag

SEQ ID NO: 15374 - DNA, 736 bp, Zea mays
  Clone ID: LIB3059-044-H7_FLI
ccgcaccatcccttaagcgcagcagagccagtgccagtgccagtgccagtgaagcagagcagcagcatggctcgggacacagcagcaggcacaatcagcctagcgaggcggtcccgcccagccggtcccacagctccaggtcagagagagaccccagacatggcggcagcagggatcagcacctccaggacggcgccgctgggttgctgcaccctagcgacatgttcatcgtgaagaagaagaggcaagagcgcgcgaggagcggcatcgggtccccttccagctcgggccgaggcgccggacctctgtcgccggccaaccctgggcgtccgggccctgccccctcgcccagaggtgccaggacgccgttccagagggatccaccgccacacccgtctcagcagtcgatgcattcagctgggtctggatggggcagcggcggtgcgcattcggatcatcaagcgggggcaagctcgtcagcacccggcatcggagacatccagtgggcgaagcctgccaagaggctgaggaccgacagagcaggcagaggcggccgagcctaacggttggttcttctttagcgtcatatggatgtgtaaatgcatccacgtagcggatggaggcgtttgataataatcgtcagtgtatttagttcatcgtcctagcaagtcaaactttgctggcagtttttaaaacagttttttaaggaaaatcaggttatatttcagacctcttt

SEQ ID NO: 15375 - DNA, 674 bp, Zea mays
  Clone ID: LIB3059-045-B4_FLI
tctcaatctccctagcaatctctagcagcagatcctcgtgcgaagcaaagcgctagcccccttcgtactgtcccgatggcccgcacgaagcagacggcgaggaagtccactggcggcaaggcgccaaggaagcagctggccaccaaggcggcgcgcaagtctgccccggcgaccggcggagtgaagaagccccaccgtttccgccccggcaccgtcgcgctccgggagatccgcaagtaccagaagagcacggagctgctgatccgcaagctgccgttccagcgcctggtgcgtgagatcgcccaggacttcaagaccgacctccgcttccagagctccgccgtcgccgcgctgcaggaggcgtccgaggcctacctcgtcgggctcttcgaggacaccaacctctgcgccattcacgccaagcgcgtcaccatcatgcccaaggacatccagctcgcccgccgtatccgtggggagagggcctaggcgtcgtcccggtggaggtggaagtagtagtggccgtttctgtcatcactgtctggctagaaggtgtagagatgtgccgggttctgtagtttgggttatcggtcaaatcatgatgtagttgggtctaccctgctgtaatttaactatgactatgcaatggcaatgaagttctcggttatcagttcccg

SEQ ID NO: 15376 - DNA, 528 bp, Zea mays
  Clone ID: LIB3059-045-B8_FLI
atatgatcaaaacgaatacgaagagttgtggagaaaagcgactgaccggaagcctgtgagcagacaaagacacttgcgaagtgcatcaaagcgctatgttacagaggcaatcgggctgtcatatctcgattattaccctgatctagccgtacaaataaagtcatctgatcgtgataagagactgagcctactacgaaggttcttcttctggttggagaacttgtgccatgagggagcctacatgccctggatctccaaacctctagcttgcaaccccatttcaccggatggatgaatatgaaccgacgcccactctcatcctcaagacacacgaagatgagccctaggggtgagcggttagcagagatttgcttgcagcatccctgcatctctgatgctacttgactgctccttgtttcgatgcgatgcaaagctgagtctgtaatcttcagtgtctatgcagtactgcagttatttttctgcaggctaaattatacaacatggcaacaaatacagcacggatattgc

SEQ ID NO: 15377 - DNA, 1274 bp, Zea mays
  Clone ID: LIB3059-045-C7_FLI
gtgtgatttttctgatcatgaaatggaccagagttccaatctctgttggtttagatgaagtggcaagtttttgttgtgtgtgtgtctctgataaaaggcacccatatttatgtctgtgacattaatccaaatatgctaaatgttgggaaaaagtgtgttgcagaaagaggtcccgagcatgaacttttctaatagattttgttgcctctgtctcaagtgtgggttatgttgttcaacagttggtttttatttccaggttatagcgaagaacattgtcttagctggatacaaggagatgcagaagctctgagttttgaggatggatctatggatggttacactatcgcatttgggatcagaaatgtgacacacattgagaaagctctatcagaagcttacaggtcggctaatttagaaccctaacaattattattgctcatgtttaaattattactgtttgaacttcagtatatgtgtatattcttcgtgattaagttttttttgtcttcgtgtgcagtatcatggattaagcttttttatattttaccatgtttgtttagttgatggttctgaaatgtcattactgtcatatcaattggcatatttcaaaattttttttgcttagttgatggttctaaagcaagggtggaggttcctatgcttggagttgagtcatgtggatgtccctatttttaaatagatgtaagtttcgtcaatcatgtttactcgtcaatctttaactgctctttcagattttctgcccttcttttttcagttatgatgcttactcgttttctatgattccggctattggagagctggttgatggtgatcggcagatagaagacaggcaacatgctaaccaggcctgtgaaccttaaaccttggcaggaaaagtttgctcagatgattcaggaagccggattccagagggtggaatatgaaaacctcctgagcggtgtagttgccattcattctggactgaaactgtagagctgaatacagatggttgttttttcatgggtgcaccgattctacaattagtagtatttgttgttttttaatgaattctataataggttcggtggcttgtaaaagcagctggtgctggctgtcagcatcatcacaatatgtagaataagtagtatttgctagaagtatgtgctggagcagtagcgtcagtggctattttggcttttaagccagctgacctcttccatttgtaaagctttttcttggaaacgtgaaaccatccagaacatcaaattagtctt

SEQ ID NO: 15378 - DNA, 878 bp, Zea mays
  Clone ID: LIB3059-045-E5_FLI
aaagcaatcacccgagcaaagcagtgcggagcgacgatccagcggcatttcgcattcgacgaacgaagcgccgccatctgatccgacacgcagcgcaatggcggcgggactgaagaggccgtcgttcgggacgcgggcgtggcggctgctgcggctggcggtgctgtgggcgcggaagggcggcgcggcgcacagcctgcgcctgcgcctgctccgcacgctccgccgccacggccacggcctcgccggcctgggcggcgcgcgcggcgaccggctccgctgcggcgagcgcgagtactccatcgacgagacgccggcgttccggttccgcaccccgtccgcgcgcgtgctccgcctcatcccctgcatcgcgccggccgtgccggacacgccgggcctctacggcgacgaccgctacttcttcagcgccgccgccgccgcgcgggagacgggcgagggcgccgggtgctgctacagcgacgtcgacgatgaggaggaggacgacgaagagccgagctgctgcggcgatggcgagatgctgctggagcgcgtggtgccagaggcctgccgcgcgagctcggccggacggtcggtggcagcggacagcggcgaggacgccggggtggacgtcaaggcggacgagttcatcgccaggttctacgcgcagatgaagctgcagcgccagatctcgtggctacagtacaacgagatgatggagaggagcatcagctagatttatttcttcgttcattcttgcttactactagtactaccagcgattgagcttgagctctgtacatttgctctaaaatttcttttgttgctcccaaaaattattattactacaatacatatacatgatacaattttttttcttc

SEQ ID NO: 15379 - DNA, 812 bp, Zea mays
  Clone ID: LIB3059-045-E8_FLI
gcaaagcaaaagttcccctattgtatggcttcatccaaagccactactggggagttggtttcttgaggtacttccaagtgaagcagctgccgaactttctcttggcctcaccagtgctttctctcgcggtttattctattgtccattacgcaaaactgcttcaccggtgtttccagagaactagcgtccacaagcagattatcactgctctagagaaaaggccagttgtgtcgtatagaagatcagatgacgcgacaattttgagtgaacctcctgctggactcaccaagaaagcacaagggagctctaaggctaaacagagaaaaccagttgctaccgagatagctcctgcgacattccatgacagtaccacgccagctaaccaaaacatcgaagaggatcaggacgcgtgctccatactactactcccattcgttctgcatctggccttcatggcattcacagccttgttcgtgatgcacgtccaggtgtccacacggttcctatccgctagccccgcggtttactgggctgccgcgcacgttctggcttctccgagccgcgccaacagacgatggggctacctgatctgtgtctatttcatcgcgtacattcttctaggtagcctgctcttctccaacttctaccctttcacgtaacgtaagaacggcggagtggggggtgtccccggatgcgttatccagtagcgagccactcccgcagtggatggctcatctgtttatcaggtggattatctcgaccagctttgcctgaaggtttccctaggttggtaggtgcttcactggttcagt

SEQ ID NO: 15380 - DNA, 436 bp, Zea mays
  Clone ID: LIB3059-045-F10_FLI
cgcatccaagcccgtgccagctgcagggaacctgcggcgttggcagcaccccgatcctgggccagtgcgtcgagtttctgaggcatcagtgcagcccgacggcgacgccctactgctcgcctcagtgccagtcgttgcggcagcagtgttgccagcagctcaggcaggtggagccgcagcaccggtaccaggcgatcttcggcttggtcctccagtccatcctgcagcagccgactccatgcccctacgctgctgccggcggtgtcccccactgaagaaactatgtgctgtagtatagccgctggctagctagctagttgagtcatttagcggcgatgattgagtaataatgtgtcacgcatcaccatgggtggcagtgtcagtgtgagcaatgacctgaatgaacaattgaaatgaaaagaaaaaagtattgttc

SEQ ID NO: 15381 - DNA, 582 bp, Zea mays
  Clone ID: LIB3059-045-F3_FLI
aaacattcggatctgaaatcctaaacggaagtgagacgcccaatcggtgatccaccgcttccccgtcggtaccatgtccgctggaagcgagaggccgtacgccttctcgcccccgtcggcggtcccgggccccttctcccgcggctccggctccgctcccaccacggccgcgacagatagcactgggaggagctcgtcctccgtggcgccgacgaagagccgaaagccaccgttccggcccgccgtggacgacacaaagcccgtcctccgcgatccgatatcacgctcggacctggcggtcaccgagcaggtcgtgctgcggctgccgccgttcccctaagttcgcgccacccaatgttctttgctcaaccatattaatctaaagatggtgccctttctgcgcatgttcgtcaactcgacagtttgtcaattggaaactttgcccgtctaattatggttctggaccattagtggtttttgtattcaattagtaaactgagttatatagaagtaatgataattggttatctacatacatgtttgatttaccctggtaaatcagggttaaattactagtataag

SEQ ID NO: 15382 - DNA, 139 bp, Zea mays
  Clone ID: LIB3059-045-H11_FLI
gttttacctgttggtagaaagaaccttgaaagatagggaacgtgtcgttttttgtcaaagcggttcctgtgctgtataacatgttgcatgagtattggcgcaacttataagacaatgtcaaatgggtttttgggagtcc

SEQ ID NO: 15383 - DNA, 1018 bp, Zea mays
  Clone ID: LIB3059-046-D11_FLI
ggtacagcacggcctgaaagagctgagtggagcctgtcccgacgagcacatggtatccgtctacaacggcattccccatctgtgaccaactatctaaactctgcgctctaccgttgggctggtgatgccaatacatttgatggcgacacatgtattgagctcgtctgctccccaaacaaccctgatggtggcctccggaagcctgtcatcaaatccaagtctagcaagcctgtttatgacttcgcctactactggccgcagtacacacccatcaccgaggcagctgcccatgatatcatgctgttcactgtctccaaatgcaccggccatgccggcaccaggctggggtgggcattggtgaaggatactaaggtggctcagaagatgatcaagtttatagagctcaacacaatcggtgtatccaaggactctcaacttcgtgccgctaagattatcggggcaatatgtaatggctatgagccggtaccatcctctggtaaaacaagccaactcttccatttcgccaaggaaaaaatggcggctcgctgggctagacttcgtgcagctgtggcagcctcagacatctttactctcccttatgagctatctggctattgtagcttttccaatgagactgtcaccgccaatcctccatttgcatggcttcgctacaacaaggatgatattgaagatctggaggccttcctactcgagaaaaagattatcactcgaggtggcacaaggtttggagtggatgcaagggctgtcagagttagtatggttgacacagaccaagccttcaatgtgttcatcaatcgtctggccacaatgaagtgaaatttcagtgcaaattaataaagcactttgtggctactacaaggatgaccgcgttctagatggaacaatcgatgctttggaaagcttaataatgttttatgttgttgaataattccgtgtgttttcgggtatgttgtgtaatactcaatgtcaaatcctatgcttaatcgatgttgtggtc

SEQ ID NO: 15384 - DNA, 782 bp, Zea mays
  Clone ID: LIB3059-046-F3_FLI
gtcttggaacatgctgagcctcttctaaaagttacaattgttcctcgtggaacagctgctttaggctttgcacaatacgtcccaaatgaaaatcttttgatgacaaaagagcagctttttgatatgacatgcatgacattaggtggccgtgctgcagaggaggttttgattggcaaaatctcaactggtgctcagaatgacctggagaaagttaccaaaatgacatatgcacaggtcgccgtgtatggttttagtgaaaaggttgggcttctgtccttcccccagaaagatggtggtttcgaattgagcaagccttacagtaatcagacagcatccatcatcgacgatgaggtccgggaatgggttggcaaggcctacaagaaaacagttgaattgataacagagcacaaggagcaagttgcacagatcgcagaattgctgctcgagaaggaagtcctacaccaggacgatctaaccagggtactaggagaacgtccattcaaggcactggagccaaccaactacgacctctttaagaaaggtttcgaggatggtggtgacaacagccaagcaccagcagagaacgccgagctgcctgatgattcatctcccccagttggtgacgttgtacccacgtagtgtttctctcctcaacgtcagagctgtacattgagcgctcattctcgatagattcttgtttgttggttgcatcataaaaaagatctgtataaattcgcgcccaagctgattatgccactgtggaaatgcatttggatttccgt

SEQ ID NO: 15385 - DNA, 946 bp, Zea mays
  Clone ID: LIB3059-047-C1_FLI
aattcgaaatatttgcggtgatcacacatagcggtaagctagaagctggccattatgtgacatatctgaggctaaacaatcattggtacaaatgtgatgatgcctgggtaaccagagttgaggagcataccgtcaggacttctcaggcatacatgctcttctacgtgcagaagacgttttactacaaagcttgtgaaagagcagccacagtctgatctgaagcaaacattgatgacacaactccagaccaccataaatttatttgtcaccgaatcagatacacatgtagtaagtagttcgtcaatcaagagggaaaacgggcgccgtatccacagcagcacagccatggcctgtcaaatcttttcgttctccactgacctatagttccaatcagagagaagctttttcggcggattttttctttacagacagacatctgcccaagcgaagatgcttgaatttatgcattgagttatattgtgctggctaatggatatgttgtggcgatttgcttaatactcaggtgcttcaccgtttggtacctgtggcggtgactggcgaggatgctcttaaccagttgcgcttgtgttcaatacaaggtcgagcaaggaagatgagtataaaacgtggaaagaaaacataaagggaaccgattttttttaatgtgttcctttcagcaattgcattcttgttctactgaaggtagagggtttcttgctgataccgattgttgtgtatttgctcccttgccttttttcgcttggtctttgtcttaatggatgagctgaaatctatagcagttgtcatagtgcccactaccccccaaaatgtagggcattacagtgctgagatgagcaggaacatgcagatgtcatgcgggtcgcgttttgccatctcttgtcgcttgaaaatctgattggagctctggtatgagttggcgtgaact

SEQ ID NO: 15386 - DNA, 974 bp, Zea mays
  Clone ID: LIB3059-047-C5_FLI
gggcggagcgctggagccggcgtaactccgggcccatcggtcggcaggtcagtcaaccgcgctccccggcccccagtggctcgtagaacattcgagaacccctcgcctcctcccccaacgataaaatcctcaccgcgccgcaacgcatcttcgccccacaaaccctcgtctcgtgccactttctcagtcccctctagccgccgcctaccgctcgcgctctcctcgcgttcgggaaggtcgtttcgccatggcctcggagacggagacgttcgccttccaggcggagatcaaccagctgctctcgctcatcatcaacaccttctactccaacaaggagatcttcctcagggagctcatctccaactcctccgatgccttggacaagatcaggtttgagagtttgacggacaagaccaagctggatgcacagccagagctgttcatccacattgtccccgacaaggccaacaacacgctgacaatcatcgacagcggcattggtatgaccaagtcagaccttgtgaacaaccttggtaccattgcgcggtcaggcacgaaggaattcatggaggcacttgctgctggtgctgatgtgtccatgattggccagtttggtgtcggtttctactctgcctaccttgttgcagagagggttgtcgtgaccactaagcacaatgatgatgagcagtacgtgtgggagtctcaggctggtggctccttcactgtcgcacgtgatacctctggggagcaacttggcaggggtacaaagatgaccctctacctcaaggatgatcagttggagtaccttgaggagcgccgcctcaaggatctgatcaagaagcactccgagttcatcagctacccaatctctctctggattgagaagaccactgagaaggagatctctgatgatgaagatgaggaggataagaaggatgaggagggtaaggttgaggatgttgatgatgaaaagg

SEQ ID NO: 15387 - DNA, 679 bp, Zea mays
  Clone ID: LIB3059-047-C7_FLI
ggataaaagacccgctcctgtcccgcaggcaactgagcgccggcccgcccgcccgcccaccagccgccgccgcaccgccaccgcgcgacctcccttcttcgccgcaaaccgctctgggcgcttgaagatggcggtgccgctgttgactcagaagatcgtgaagaagcgggtcaagcagttcaagaggccccacctcgaccgctacaagtgcctcaagccaagctggcgcaggcccaagggtatcgactcccgtgtcaggcggaagttcaagggatgcaccttgatgcctaacattggatatggctctgacaagaagaccaggcactacctccccaacaagtttaagaagtttgtcgtgcacaatgtttctgagctggagttgcttatgatgcacaacaggacatactgcgctgaaatcgcacacaacgtgtccactaagaagcgcaaggaaatcgtggagcgagctgctcagcttgacattgtggtcaccaataagcttgcccgtctccgcagccaggaagatgagtaaactgtttctagcagtagttttggaatggtgcggctttagaggacttgctgtgtatgatgattcagttatcatttctttttgcttcatgattctgagtactgtgaacccacttgctatcagtagcaacttaactgtggcactgttattatc

SEQ ID NO: 15388 - DNA, 235 bp, Zea mays
  Clone ID: LIB3059-047-C9_FLI
gcttggtcttcagagagagcaccagctctctctgaagaccgagagggaaaagaagcgtgagaagtacttccccatgaggaagtatgctatcaaggcctaggtcagaactgtgagatgctgcgcttagcatatcatcggctgtgttttaatttttggtttgtatggacatttgctgtgggtcggaagtacgatgtattcctccatttccataaatggctaaattggtttgactggc

SEQ ID NO: 15389 - DNA, 493 bp, Zea mays
  Clone ID: LIB3059-047-F10_FLI
tgggtacttggggtccctagccttcttcagggtcgtggggcggtgaagaagattgaagataacaacactctggtcttcattgttgacctcaaggcagacaagaagaagatcaaggctgccgtcaagaagatgtatgacatccaggcaaagaaggtcaacaccttgatcaggcctgatgggaagaagaaggcttacgtgaagctgactcccgactatgatgctcttgatgtggccaacaaaatcggcatcatctaagtgctgcattaggcatcctagttcatctgttgtgtcctagttctatgtgaaaccagagttttgtagctatggctctcaatcgttccattaccatgtgttatgcacacttctgaatttgatatcatccaagtgaccttttgaactagtttgcgttctgcacttcattacacttggacaccgtcagtctttgtgaccagtaattttgtttgtcgtaatgggttggttttgcaactcgacc

SEQ ID NO: 15390 - DNA, 630 bp, Zea mays
  Clone ID: LIB3059-047-F11_FLI
ggaagatgtcgtcggtgttcagcggcgatgagaccgcccccttcttcggcttccttggcgccgccgccgctctcgttttctcatgcatgggggcggcgtacgggacggccaagagtggcgtcggcgtggcgtccatgggtgtcatgcgcccagagctcgtcatgaagtccatcgtgcccgtggtcatggctggtgtgctcggtatctacggcctcatcatcgccgtcatcatcagcactgggatcaaccccaaggccaagccatactacctctttgacggctatgcccacctgtcgtccggccttgcctgtggtcttgctgggcttgctgcaggcatggccattggcatcgttggtgatgctggtgtcagggcgaacgctcagcagccaaagctgtttgtgggcatgatcctcatcctcatcttcgctgaagcgctcgccctatacggtctcatcgtcggcatcatcctctcatcccgcgccggccagtctcgtgcggactaggcacgttccacatgtctccgccacctggtcgtaaccgggtcgtgttttgtatcggtgatgagccgacaagctggagcacttaattttttttatgctgtctagttttttgaacttgcgttgagtcgag

SEQ ID NO: 15391 - DNA, 481 bp, Zea mays
  Clone ID: LIB3059-047-F5_FLI
aaacggatggacaagtatatttggagtttgatgtggtgtttccggatcgtgtgtttgtctcagatgcaggtgggcgctgtgggcgggaggcaggtgtaccagaacgtcctccacgctatctactgcatcctcaagaaggagggcgccggcggcctgtaccgaggtctcggccctagctgcatcaagctcatgcccgccgccggcatcgccttcatgtgctacgaggcgtgcaagaagatcctcgtcgacaaggaggatgaggaggaggaggacgaagccggcggcggagaggatgacaagaaaaaggttgaatgatcaaagttcttggccaagaaggtagcaatgtcgtgaagcgtacgtgaactggaaacggatggacaagtatatttggagtttgatgtggtgtttccggatcgtgtgtttgtctcagatgaaaaaaatacaatattttgagtccaagttaatcaatgttccatttgcc

SEQ ID NO: 15392 - DNA, 692 bp, Zea mays
  Clone ID: LIB3059-047-G8_FLI
caggatggtaaaaaggatatacatttactcttacgaggaggccaagtctttgactcgcaaggcgaagccgccggttgttggtgacaccatcaagccagacccaaacaaattgccaccggaatctgacgtgccacatgactcaaacaacaatgctcccgttgctgctgattatcaggactgatggatgctaacttggctcctaccttttctttcccctcttggatgtcggtcatgggaggcaatgcacgctccttgggacttgtaagagttatctgttttgttgcttcgcgggcccaaaggacgcttccctgcaccatctgcctttgtttggaacggcttggaccgccgtggtccttttacctgcagcaaggaaaggaatggctgggagggaatggatactgctatcgttccgtgtgtggcaccccgtgatctgtttgccgtgctttgtaggaggcatggcgtattgccgggtactttggttttggagactgctactgactgctgacgtcgtcgggccgctcctctcacctctggtaaataggactttgtacacaattattttgttagtagcagtatatgtacatcatcggtcgtgttgcttgctacatgtactcctatgtagcatcctcccctgcattttagtcctggctaggtatcagatgctctggtgcaaaaatgtctctgcttgttcc

SEQ ID NO: 15393 - DNA, 350 bp, Zea mays
  Clone ID: LIB3059-048-C3_FLI
ctggagggagaggctcacctatgctgggctaactcaagtgtggttcgaccccgatgaggttgacacgctaaaagaccagttgatccatgtgacatccttatctggctctgggttcaacatcctagtgtgtgatggcagccttgcactagcgtggcataatcgcccgttatatgtggcaacagcttggtgtgtgacaggaggaaatgctgccagttccatggttggcaacatctgtaagggtacaaatgatagtagaagaaaggaaaaccgtaatggacccatggagtagcaggaagaataaccatgtcatgagcaaatcgatcaagtaataaaatgcactgatgacatgc

SEQ ID NO: 15394 - DNA, 1056 bp, Zea mays
  Clone ID: LIB3059-048-F2_FLI
agggtttccgcgtcggctagtttggacgcatggctgctgcaggagagtagagaccacagcgcgcgaggcgaggagaataagctatgggcgcgccgaagcagaaatggacgtcggaagaggaggatgcgctccgcgccggcgtgcgcaagcacggcgccggcaaatggcggaccatccagaaggaccccgagttcagcccggtcctctcctcccgctccaacatcgacctcaaggacaaatggaggaatttaagtttcagtgcaagtggactgggatcaagtaaactgcgggttccaaagataactggaccctcatcttccccatcatctagctcgcagcctctgcttctcccagcggcaaacaaatttactgaagctacactgcctgcagatgctgagaaaaagccacaggatgggaaaactctgccaaagtatggtgccatgatcatggaagctcttttggaattgaatgagccgaatggttcagatattgctgcaatcttcggcttcatagagcaaaggtatgcggtacaaccgaccttcagaagatttctagcctcaaagttacggcgacttgcagactcaaacaaaattgaaaagatcgataagtcctataggatcccagactcccttgcaacaaggactccagctccaatgaatgcttcagctccaaaacagaaggatccatcaaagccatcgaaggtgtcaaaggccataggattgttttctgcctccagccctgcactagaggctgcgatggcagctgctgtcaaggtggctgacgcggaggcaaaagcacatgatgcgcatgatcagacgatggaggcagaaaggatcttcaagatggccgaggataccgagtctctcctcataattgcagcagagatctatgatcgatgttcaaggggagagataaccacgttagttccagtggcacaaagggagatttgagatctattggagtctctcttgtgttgtttgttgtacatggataggttctggaatccagtggcccggattgctcctgttgtatgatgtaaccgtttgtgttgtactt

SEQ ID NO: 15395 - DNA, 880 bp, Zea mays
  Clone ID: LIB3059-048-G11_FLI
ctcatcgtctcatcctcttcctcctcccgtccaaacgcagccgaagaggaaaggagaggcggcgaggatggggcggaagcggaaggagttgctgtcgtcggctccatggaggacgggggaggcggcggaggacgaggacgcggcaaggatgagccgagaggggaaggtcagcgtcaccagcaaccccggggagacgcccaccatgagcgtgccccggagcaagcgccaggacctcgacctcaccgtcgacgacttcgaggaggacgagatcgaccccgagctgcgctactccttccagcggaacagcaggtttctgaagagagtttttagcgtggacacacttgtcaagcctctccctcctgtaatggcatacagtgtatcccgcaatataaacttcttcttccggatcttcacacagttctgggatgaagaaggaattgccaatgcccagaagtcccttggactggggaacgaggacggctcccgccgaatgcgctgatcgtggtcaaaccaagttttctgtaccgggttcagaactcttttgccctagacactggagacgtgttgtacgcctcgaaagacatggcatgggacgtttcttaaggttggcttgcaattttgtttatcctggtgtgtctgtttcatgtatgtttgaagtccagatcttgtgcttgcaaaatagaggagtcgaggtggcacatcaaactccaggccaatggaacgaaatgcctacctgttcatttccactttgtatactagtcaaagacgagcttggacatatcttttgctgcttcattcctccttttcctttatgatcattagtattgttatccttttgtatgtctcccaatatgctgaagaaaagcaaatcatgctgtgc

SEQ ID NO: 15396 - DNA, 566 bp, Zea mays
  Clone ID: LIB3059-049-B9_FLI
gctggaggatgcaaggcagcacgcgaatgctaacatgacgataatgcttgttgggaataagtgtgatctgtctcacaggcgtgcagtgagctatgaggaaggcgagcagttcgcaaaggaacatggtcttatcttcatggaggcctctgcaaagaccgcgcagaatgtcgaggaggcatttgttaagactgctggagcaatctacaagaaaatccaagatggcgttttcgatgtatctaatgagtcttatgggatcaaagttggatatgtagtccctggccaatctggaggtgctggtagctcttctcaaggtggtggctgctgcagctaatctgctaacgcccttatgtacaaaggcatatctgcggtgtagctgcgttatctctatgttgctgagcgtaaaatagttactgctccagggtgctttgttatttgatgcaccaacgggtggcagtgcctgaacgatttgagacattcagttttatttatgtcaggtgttcataaacattctgtaaatcactagattcttcaccgtcattcgtcattaagcgctcacaaattctgtc

SEQ ID NO: 15397 - DNA, 649 bp, Zea mays
  Clone ID: LIB3059-049-D12_FLI
cccacctgggcccgataggagtttcgtcatcatggtggaggcaggcgaaagcaggcttgggatgtttagtctaattaaccatggcaccactctctgttattccattaggcaaattgggagcgagaagtccaatcagttggagatggacagtgtgatccctttacctgagggttatatttactttcgcattcacggttcatatgaaggacacattctcatatttggatacgcatttagtgaagacgcatgcttcgcacttgagatcaagactatgaagattgagagagtctgtcggaagtggcgtggtttctgtccttattttgtgttcctgccatccatgtcacaaaggaggatataatgtggactgaattcacatccaggtttggggcttcttccaatccattctgctggtgtggagttgagctaggtgatggcacaggccctcatgtagatgtagcacatctgcaacactgtcccatgttatcatcctagtctgtcgtattatctaggcatctagcttacattagtagctactgaaactttagttatatctatatttttaagttctcccgactgtaatttaagatgtgacaaaggcgtctttagtgtatcaagagccaacttttataagccggctttgtgtgctgcg

SEQ ID NO: 15398 - DNA, 754 bp, Zea mays
  Clone ID: LIB3059-049-D5_FLI
gcgtggagcgcacccgctcggtcgactcgagcaagccggtctcgaggtcgctggctgctgagttcgaccaggaggctgacggggaggaagaggacaatgctggagagaccagcgatccagatgacggcagtgtgcagtacctgaggaggaggctcaaggaggagatgctgctgaaggaggttgcgctcgaggagctggagaaggagaggcatgccgcagcgtctgcagccgacgaggccatgtccaagattgcgtgcctgcgtagcgagaaggcgctggtggagagggaggcgcggcaattccaggagatgatgcagcagaagcagatgtatgaccggcaggtgatcgagtcacttcagtgggtgatcatgaagtctggaatgcaaggctgggagccagaggccataactgatcgagccttgtcggagacaagcgaggatgacagagataagaagtagctagctcttggttattggagttgaatggaaccactgaggaaggccctgttgtttgctttgagttcatcgtcctctgatcagctcttagtaaccaaacagagaatgccaagttacgaaaactcggatgttccttgaccatgcaaagctcttcaggggaaatatctgaaatccacctgtaaatataccatcttcttttaaactacctgtgtacttatctaataagaacaacatctgtacttgatcgctctaccttgcaaatgttcattgctatttatctgcaaatgttcattgctatc

SEQ ID NO: 15399 - DNA, 637 bp, Zea mays
  Clone ID: LIB3059-049-E4_FLI
cctcctcagacccgagaagcgcagctgcggccatggacgccaccggcactggagctggagggaaggcgaagaagggagcggccggtcgcaaggccggcgggccgaggaagaagtcggtgacgaggtccgtgaaggccgggctccagttccccgtcggccgcatcgggcgctacctcaagaagggccgctacgcgcagcgcgtcggcagcggtgcccccgtctacctcgcggccgtcctggagtacctcgccgctgaggtcctggagctcgccggcaacgctgccaaggacaacaagaagacgcgcatcgtcccgcgccacgtgctgctggcgatccgcaacgacgaggagctcgggaagctgctgaccggcgtgaccatcgcccacggcggcgtgttgcccaacatcaacccggtcctgctgcccaagaagacggcggagaaggcgtccagcggcgggagcaaggaggccaagtcgcccaagaaggccgccaagtcccccaagaaggcatagggtttggaggcggatccgatgttgtcatgtgtaggttgtaagcgggcaatgtgattggctgtgtatctgcttcgctcaagttgctttatgtcattcctaatggaataggaaatgccgtgtttctt

SEQ ID NO: 15400 - DNA, 730 bp, Zea mays
  Clone ID: LIB3059-049-F1_FLI
caccgcgtgcgaaccaagcagaccacaacaagaagaagcgtagtcgtcgccggaaggaaaggcgcggagcaagatgtcgtggcaggcgtacgtcgacgagcacctgatgtgcgagatcgaaggacagcatctcagcgccgccgccatcgtcggtcacgacggcagcgtttgggcgcagtccgagagcttccccgagttaaagcctgaggaggttgctggtatcataaaggactttgatgaacctggtactcttgcaccaactggtcttttcgttggaggtacaaagtacatggtgatccaaggtgaacctggagttgtcatccgaggaaagaagggcactgggggcattactatcaagaaaaccggcatgtccttgattattggtgtctacgacgagccaatgactccagggcaatgcaacatggtggtggagaggctcggcgattacctgatcgagcagggcttctaaaagttcgtcatgttctgttttggtcatttgggcaccaaagtttgcgcctcatttggttctgtaatccgtgagctcgtgcatgtacttggcgtattgcatgcagtgaataatttagcttgggtttgtttgttgggggcagtgttggggacggatttggattggggtttatgcttggcatcgcgtcgtatcgaaactcagctgctgtttcgctgagtaatgtacatttccctggtaatggtacttgtggactctgatgctttt

SEQ ID NO: 15401 - DNA, 162 bp, Zea mays
  Clone ID: LIB3059-049-F8_FLI
tggacgatgggggggtggcgtgggaggtcgtgggcacaagggcaagggtggcgaatagtggcagtgtcagtgtgagcaatgacctgaatgaacaattgaaatgaaaagaaaaaagtattgttccaaattaaacgttttaaccttttaataggtttatacaac

SEQ ID NO: 15402 - DNA, 1278 bp, Zea mays
  Clone ID: LIB3059-049-H5_FLI
gtaaatatggtcagccatccagttcccatctcttctacttctctactactacttatgtacctaacgtaggcgtccacactcaaaattggtgcacggttctgcctttctccacgcgctggccgcgaatctcgtcggtctaccaaatccgtcgcgaatctcgtccacaaaacttccagccatggctgccgtgaccaatccatggcagccgcgccctggtcccccgaccgcgccggcttccatccatggtgcttcttcttgttgtggtgttcggatcgcagtccactgaccgaaccgaaccactgttcgacggagcagatgacacgatggccatcttcctggcgctgcggtcgccgaagctggaggtgttgggcctcaccactaccttcggcaacgtccacaccgccctcgccacgcgcaacgcgctccacctggtgccgccgcctaccttccttcctctctctcccccaccctgctcgtctgttccacccactccgaccgcggctcacatttgcttctgatgtgtgtgcttgagctggaggctgttggcaggactgacatccctatggcagagggatcccatccaacgatcaagaaagccaccaagctgaggatcgcaagctttgtccacggttcagacggcctgaggatcgcaagcttcgtccacggttcagacggccactgtggatcgaggtgcggcaggtcggggcgccgccgcggattgtaggctcgaccgagactacttcgtcaccaacgtcctcgttttagcaagcatcactataaagcacgagtgaaggttctcccagaggttaatgccaccaatgctgggacagaaacaagtgagttgaagcaagatcgacagatttgataaaggttctcatatatgggtggaagataaagatttgtcctgggttgatggtgaggtatttcgaattgatggccaaaacgcccatgttcgcacaaccaaggggaaggcgggatggcgtattgtggcggctacgagggaccgatgttcctgtgtggcagtgacaacgataccgtggagccaaggcaatgtcagcaagctgatttttcagattggaatctatggttctttttaaagatcgaatatgttctagcatcttaaaaagatttgtcagaatgtaaacatttgttctgaggtcatttaggcctcaaacagaatttcttggacttatttcgttggagggaatgggacatcttgagatctaaatgtgtatagaagatccaaatgtgtatagaacatatatttttatgggtatc

SEQ ID NO: 15403 - DNA, 1496 bp, Zea mays
  Clone ID: LIB3059-052-A8_FLI
tcaaggacaagcttatattccctttcgtagacctcgatagatttccagaacaccctggtcatctatcaaggacaagcttatattccctttcgtagacctcgacatcaaatattttgacctcgggcttccacaccgtgatgctaccgacgacaaagtcacagtggaggctgcggaggccacactcaagtacaatgtggctatcaagtgtgccaccattacaccagatgaagcaagggtaaatgagtttggcttgaaggctatgtggaagagcccaaatggcacaattaggaatattctgaatggcactgtgttcagagaaccaatcatctgcaaaaacatcccacggcttgttccagggtggacaaaacccatttgcatcgggaggcatgcattcggtgatcagtaccgggcaactgatgcagttatcaaggggccagggaagcttaaattagtttttgagggaaaagaagagcaagttgagctggaggtgttcaacttcactggtgcaggaggagttgccttatcaatgtacaacactgacgagtccatccatgcctttgctgacgcttctatggccactgcttatgaaaagaaatggccattgtatcttagcaccaaaaacactattttgaagaaatatgatggcaggttcaaggacattttccaggaggtgtatgaagctggttggaaaaccaaatttgaagctgccggcatatggtatgagcaccgccttatcgatgacatggtagcatacgcacttaagagtgaaggagggtatgtctgggcttgcaagaattatgatggagatgtgcagagcgatttcttagctcaaggttttggctcattgggtttgatgacttcggtactggtgtgccctgatggaaagacgatcgaagctgaagctgcccatggtactgttacccgtcattaccgtgttcaccagaaaggaggtgaaactagtacgaacagtattgcctcaatctttgcgtggacaagaggacttgcacacagggcaaagcttgatgacaatgctagactacttgacttcacccagaagcttgaggctgcctgcgttggagccgtcgagtctgggaagatgaccaaggaccttgcccttctcgttcacggatcttcaaatatcacgaggagccattacctgaacacggaggagttcattgacgctgttgctgatgagctcagatcaaggctggcagccaactcgaacctttgaaatccttgccgaagttgtggtgctttcctgcgcgacgctttcgaaccgtttttattatgtcgccattttctttccctgtgccaccaccctgatgaatgaagaaggcctgagctaggcgaacatctgcaggctgcagcagtatgccaaatcattatcattaccgttaccattaccaattggagattgccgtagatttccgcgattatgggaactcattaaccggattatctgagacgtttgaaataaaaggtcgcccattagaatg

SEQ ID NO: 15404 - DNA, 897 bp, Zea mays
  Clone ID: LIB3059-052-D9_FLI
gaggaaggaggcgatcctgctgctgaatgcggcggcgaggagacggaggtggaaggggcggcggcgaagaagccgaagttggaggaggccaaggaggcggagaaggggagggtagaggagacggcggaggggaagacacaggaggcaaatgaggagaaggcagtggaggcggaggacaagcctgtgacagaggaggcaaatgagaagaaggcagttgaagcggagggaaagcctgtgacacaggaggcaaatgaggagaaggcagcggaggcggagggcaagcctgtgaagctggggcctaaagaattcgcctcggccatcgatatgttcaactacttctacgctctgctccactcctggacgccgcagcttgagttcaataagtatgaacaaatggtgctggaggatttgctgaggaaaggtcatgctgaacctgctaagaagattggggcaggagtcgaagcatttgagataggcaaccacccggtgtggaaaagtcactgcttctttgtgcgcaggactgatggatctgtggatgacttcagcttccgcaaatgtgtggacaacatactgcccctccctgaggactttaagatcggcaatggcaagaagtctggtggccaccaaaaggatggcggtggagggcgggcaggaggacgccgtggaggaggccgaggcggctggcgtggtggacggggccggggcaggaggggagggtaggttcttacttcttaactggccctgcaattttgcccagttaactataccggggttgccgtggaaacgaaggtaggttcttactattatgttggtttattatgtggtgcctgtcctaaagaccgataccaacttttttaccttgcaaccggtatatgatccacgccgagtgcttgccgc

SEQ ID NO: 15405 - DNA, 1610 bp, Zea mays
  Clone ID: LIB3059-053-F1_FLI
cgctgaaaaggagcttggagcaaatggccacagccttgatcgatgtgatagtgttcaagaggatgaggatggtttgagttgcaaggagaaagatctctataactgtggtaccaaagcttcagatgaggaattttctgatagattgcaagagaatcacgagaacacccagccaagtaataatcataacgattcagtagatcagagtcaactgcccccttcttcaagccctactgagagtacagatgaaatttcatcagaagacgaagaaaataatgataaagagaacatggatccaagcgctcagaataatgatgtacatactcttgaacacctccaacaagccatcggaggaaactcacgtccagatgatgctatcttaaaggattttctagatgatgaagctgaggaagaggatgatagtgacaatgacatgactagatttaaggacaatgaagaagatgatggaagcgatgaaaacgaggtgttcaatgacctaatagcagctggttatgaagaaaaagaagtagatcacgagaagcgtaatgaactccaccaaaagtggcttcaacaacaggatgctgctgaaacaaataatgttatccaaaggctgaagtttggtcatcgggagcaaaaagaatcagcatatgaagatgaagatgaagacgaagacgaagatgaagatgaatatgtagctgattgtgaggaaggatcacaaaatgaagatttaactccagcaaatattgtgcgacaaaattcagagaaggcaaaacagatgattgcaaagatgtttgaagatgacaatgatacttatgagcactcggatgatgaggaaatagaggagcatttggctcgtcagcgcatttcaaagcgagaggttgataataatacattgatatccccattagaagatgacaactcaagggaggtatttagtctaataaagaagctcaatattgctcctaaacctaagatgagaggaaagcaatcaacatcaaatcatgaaatgcttatggctggaaggaacaccattgcttcaaagtcatcgtttcttggacgaacagccagtggttcactggcatcttctcacagatcagtctatagatcctatgtatttggtcgtgatgacagcaatagcagcagtaggagctgcatttctacttcagagagtaatttagatctggatcagaccaattcctctcaacccaagaaggccaagttcagttcacagccgaaaccagaggggacaagggcaactccagagtgtaacacgacgagttcaggtgtttccctcttcgacgtcctgcgcaggacttcagagcagagcagtcaggaaagctgtagcacaatcacagaaagtcaagctgtgcaccagttctcggcattcaagttatcaaggaggttttccaaggtgggttcaaaaaatcgacaatctctagatggctgttagtatcgagagggtgggttactgttggagcttatggggcaacgcgttgagttagtttcgagcttcaaaccgccaaaatgttccggattgcaccatgagtgccaggtgttttatgcacgaactgcgaatgctgagacctggccctgttgtagattatgaaacccag

SEQ ID NO: 15406 - DNA, 558 bp, Zea mays
  Clone ID: LIB3059-053-F7_FLI
gcgacgacgagcaagcaaaggaggccaagagccccaagagagcgcccgcggatggggcggcgcgcgcatctacgcccgtgaagaagaagctgaaggaccagaaggcggctgcggcaaacatgggtgtgtgcagcttctccatggcgcgggtgcggcagctgatgcgggccgaggaccccaccatccgcccttccagtgaggctgtcttcctcatcaataaggcttcagagttcttcttggggaagtttgcagaggatgcttatcacaatgccgcgaaggatcgtaagaaatccattatttacgataatctttcaacagctgtttccagccagaagactttaaagttcctttcagattttgtaccgcagagagttgcagccgaagatgctttgaagacaatgacgagcaacaactcgtaaccgattatgctagactagattgttagtcctctactcctctatttaggcacgtcagtgttttttctccagcatgtacaaggaaacctgtagtactgactgattactgaattctatctttgatctgcatttcaggcagaac

SEQ ID NO: 15407 - DNA, 700 bp, Zea mays
  Clone ID: LIB3059-054-A8_FLI
tcgaatcgtctcgctcgtggctgccctactcgtgctgcttgccctcgccgccgtttcctccacgcgcagcgcacaaaaggagtccgtggctgacaacgccgggatgttggcaggcggcatcaaggacgtgccggcgaacgagaacgacctccagctccaggagctcgcgcgcttcgccgtcaatgagcacaaccaaaaggccaatgctcttctggggttcgagaagcttgtgaaggccaagacacaagttgttgctggcacgatgtactatctcactattgaagtgaaggatggcgtagtcaagaagctttatgaagctaaggtctgggagaagccatgggagaacttcaagcagctgcaggaattcaagcctgttgaagagggtgctagcgcctaaggatctgtcgtctccctgtgcaatttgctgcctgaagcgcaaaactaagttacagaataaggagctgcttcgtaacatgccagagcatgcaccctcgcgtaatttcataaaatcacagggctcttaatgtaatatcttgaattgccgtgccatgtgtaataagtaatatcatgaataacagttgctattatgggttctaaaggtttattaacagccatccatgggccatggcagagttctcatattactttgttgaagtctttgttggaatatacatgacagaattctcacattgccttgctg

SEQ ID NO: 15408 - DNA, 461 bp, Zea mays
  Clone ID: LIB3059-054-B5_FLI
ggacttcaaaactgatttgcgtttccagagccatgcggtgcttgccctccaggaggctgctgaggcataccttgttggcctgtttgaggacaccaacctgtgcgccatccatgctaagcgtgtgaccatcatgccaaaggacattcagctggcaaggaggatccgcggcgagagggcctaatcgccacctcaaacatcgtgacaaaaacatgaagtcctggggttattgttaatctggtgccattgtaaggacatatgagtagggtttgttttgtggatcgcaagtttctcttctgctactgttgctgctacctttgctggtgttattgctagggtcgaatacttaagttaactatgcgctgacagtctggactagcagtgttatgtgcgctgctggaccttgcgcgcaatgctgtggccgatttgttcgttaatgtcaagaattgtgttacagtgcgtgt

SEQ ID NO: 15409 - DNA, 384 bp, Zea mays
  Clone ID: LIB3059-054-C1_FLI
gccggagccggagccggaggcctagtagatgaagacgttcgatccgtggccggtcttcttccgccgggagtggaagcgcaattggcccttcctcacggggttcgccatcaccggcttcatcatcactaagatgacggccaacttcaccgaggaggacctcaagaactccaagttcgtccaggagcacaagaagcgctgaccaaccaggtgttgtccgaattgcctgtctggacagccagttatgttatgctgtttgaatgaaaaattagcttctttttcttcatctaaatgcgtgcagcctatgctccatctgtaatgtaataagaggcaactgacttgatccaaaagctaccagcttctgattatgaatgatacttcaagttt

SEQ ID NO: 15410 - DNA, 532 bp, Zea mays
  Clone ID: LIB3059-054-C11_FLI
gttctacttctcgaagttgcgtgatattgagatactgtgtcaacggcctgagttagagcatctaccgatgactaaggcggtccggaagatactttatgcagctgatgcaaaggattcaccgctacctgaggcgaatgatataatcacaaagtcaccaagcttgttctcaaatgaaaccgagtgagatgtgcggctacatgagctaattttggtgcttattttccatcattgatcgtcttagttttgagtctgtaaatgcgtaaaataacatttgacacaagtctttttgctgtcaaaaacagttttcctgtaagaacttgagtggggttaattagttattacgcattcatgcttgatgtgactgtccctgtatggttcctctggagaatatagggtctgttcacttgactaatctgtaccggcgtctactacttttacaggaaaactgtttttgacagcaaaaagacttgtgtcaaatgttattttacgcatttacagactcaaaactaagccaaggatgttttcattaatc

SEQ ID NO: 15411 - DNA, 590 bp, Zea mays
  Clone ID: LIB3059-054-D3_FLI
atttcaaatccttcgatcgcgcagcgccgcccgccctctcgcagctctctccgatggcccgcacgaagcagacggcgaggaagtcaactggcggcaaggcgccgcggaagcagctggccaccaaggcggcgcgcaagtcggctccggccaccggcggcgtgaagaagccgcacaggttccgccccggcaccgtcgctctccgcgagatccgcaagtaccagaagagcacggagctgctcatccggaagctgcccttccagcggctggtgcgtgagatcgcgcaagacttcaagaccgaccttcggttccagtcctccgctgtcgccgcgctgcaggaggccgccgaggcgtatctggtgggtctctttgaggacaccaacctctgcgccatccacgccaagagggtcaccatcatgcccaaggacatccagctcgcgcgccgcatcaggggcgagagggcctgattgctgctctgtcttcctgtttctgtaatgtctgaactaggcgatggactctatcgcttcttgtcctgcaatcgtgtaccgatgttcttggcaaatcaatttggctgttatgaatgtgattcagtg

SEQ ID NO: 15412 - DNA, 1265 bp, Zea mays
  Clone ID: LIB3059-054-E11_FLI
caatgccaacatggatacagaagctcacacagaagttcctcaacagtcctgttacagtggaccttgttggtgaggatgaccagaagctggctgaaggaattagtctgctctctgtctcttcggaaaaccgtgaaaaaccagctgttcttgggaaattgattaaggaacatgcaaaaggtggcaagtgcattgtttttacacaaacaaaaagggatgcagatagattgtcacacaatatgagtcgaagtttccaatgtgaggcgcttcatggggatatctctcaatctgaaagagagaggacactggcaggatttcgggatgggcggtttaatatattgattgctactgatgtcgcttctcgtggattggatatcccaaatgtagatctggtgatacatttcgaattgccaaattcgtcagagatattcgttcacagatctggccgaactggccgtgctgggaagaagggcactgcaattgtgatgtacaactatgatcaaagtagagctgtgcgggtcattgaacgtgacgtaggatgcaagtttatggagcttccaaaaattaatgtcgagggatccgacttgctgggtggtggatttgactccttcgggggcggaggtggtgggtatggtggctcaaactatgggcgctcacgagggggctttggtggacgtggcggtggtggtggttttggccgatcaggcggtggtggatttggcaattctgggtttggccgctcaagtggtggatttggtgactcgggatttggccgctccgggggtggagggtttggtgactcaggatttggcaggtcaggtggtggcggaggattcagtgactcaggatttggccggtctggtggcagcggtggaggattcagtgattctggttcaggtcgtttcggtggcggttttggtagttctcgctcaggtagttttggtcgctttggcgacaaggactcacgatagacctataactaataacagctatagaattatggacatcctgagccagattcagcttggtcatgcggtatatcacaaaggagatcgagattgttgcggaccctatccatgaacacctcggagagggcataaggctgggtgaggcgggtccttcgataggaaaaaataatcacgtgccttgtttatttattgttcttttctgttcgttttttaatttgcttctgcaagttctagctctagatcatacctgtaaaatatgcagaggtcttttgcggatgatattcttatatcgtttttggt

SEQ ID NO: 15413 - DNA, 735 bp, Zea mays
  Clone ID: LIB3059-055-D4_FLI
cgccagacttcgaagccgaggctgtgttcgaccaggagttcatcaacgtgaagctctctgattacattgggaagaagtacgtcattctgttcttctaccccttggatttcaccttcgtctgcccgaccgagattactgcgtttagtgacagatacgaggaatttgagaagttgaacactgaggttcttggtgtttccattgacagtgtgttctcccaccttgcatgggtgcagacagacaggaagtcgggtgggctcggcgatcttaaatacccacttgtttctgatgtgaccaaatcaatttcaaaggcctttggtgttctgatccctgaccagggtattgctttgagaggactgttcatcattgacaaggagggagtgattcagcactctaccattaacaaccttgccattggtcgtagtgtggatgagaccatgaggacccttcaggcattgcagtacgtccaggagaacccagacgaggtgtgcccggccggatggaaaccaggggagaggtcgatgaagcccgaccccaagggaagcaaagagtacttcgcggccatctagattcgtcgtcattgagaagcaggtgcccgttaagtgctccagcagtaggttctcgtgttcagcggagctcgcgttttgacaagtgtgttgtgctgatgtgcatcccgatttgagtgctgttctttgccaccttgtttagttctttcagctgacgaataaggttcattgc

SEQ ID NO: 15414 - DNA, 583 bp, Zea mays
  Clone ID: LIB3059-055-E5_FLI
caagagccaactgcaacagatcgcaagaccaatgtacagcaacccacctgttcatggtgcactggttgtttctataatcctcagtgatccagaattgaagagtttgtggttaaaagaagtcaagggtatggctgatcgtatcattggaatgcggaaggcacttaaggaaaatcttgaaaagctaggttcacctttgtcatgggatcatatcactaatcagattggaatgttctgctacagtgggatgacacctgaacaagttgaccgtttaacaaatgaataccacatttacatgacccgcaatgggaggataagcatggctggtgttacgacaggaaatgttggttacctagcaaatgcaattcatgaggttaccaaaccaaattgagttagggtcctaccttctttggtcgatggaagctgatggaatgagactgtgaagcggcgtttccccccctctgttcctgacagaaataagtttagcctgctgctaccatatacatggacacagactcagatgtagacactcaagttttgagagctgtgatcctgtttcatttaatcaaaaacaattttgtttttt

SEQ ID NO: 15415 - DNA, 690 bp, Zea mays
  Clone ID: LIB3059-056-D3_FLI
tggagctcccaaactagccctaaaggtttccactcccagaagctccgttttttttgtctcttcctcacagatctgttatccatgtgggccacaggagcagggagagagatctgggtggagaaggtcctgggaggaccagatcgcagagctgaagaggaggagcgtggcgaaggattcagaagagaacctgtcgtggggcgctcgcatgcggagaagggccgaggcgtcagcagcggagtagctgcgacaagcgaccctgccaaatgcagctgtactcgtacgtagcatgtggagcgaagcgaaacggaatatattttctggtgggtacaatttggtctgcaaggtttttaaggcgtggatctaaagatgtccagatggaaaccttcagagacagacctgttacgagaattggacgtgtagctgtagtagctgtagcggtggcatctggccaggattgaggaacagcagcacctggatggagtgtggtggctgctggctgcagaccaacacccttggccctggctacataatagttgagttcctgcctggccacctgggcctggctggctgtatgtaaacgactcaactatgttactccttgagactcctgttacatctgtggcaggtccagtgtaaatgtaaatactacaagcatcaataacgaaggagcaagccagttgttcttccaat

SEQ ID NO: 15416 - DNA, 823 bp, Zea mays
  Clone ID: LIB3059-056-E10_FLI
gcgacatcgtcgacgactatccgtatgtggctatggacactgagtttccgggcgttgtgtgtcgtccgctcggcacttacaagtcggcggccgagttcaactacgccactcttaaagctaacgtggacatgctgaagcttattcagctcgggctcaccttgtccgacgagcatggtgggctgccggcgctaggcccagacggtcgtccctgcgtctggcagttcaactttcgaggatttgaccctcggactgatgtggctgcagcggactccatcgatcttctacgccgtagtggtattgacttctctcgccatgctgctgatggagtcgactctcgctgctttgctgaactgctcatgtcctccggcgtagtattgaattcagatgtgcattgggtgacttttcatagcggctacgactttggctacctgctcaagctactcactggcacaaatctccctgatacgctgccaggattcttcgatctcatcaagatttactttcctgttatctacgatataaaacacttgatgaggttctccaatagcctccatggagggctgaacaagcttgctgagctgcttgatgttgcaagggttggaatctgccaccaggcagggtctgattcgcttctgacagcactgtctttcaagaagcttaaagaggcatacttcaacggattaactgagaaatatgctggtgtgttgtatgggcttggctttgagggtgtagagaccacctctgctcactgagtaatggataattaaataaaagatgaactatttatgaaaatggagaaatctgtttggtgtctttgtctgac

SEQ ID NO: 15417 - DNA, 992 bp, Zea mays
  Clone ID: LIB3059-056-F11_FLI
gcatcgaccaccaggagtggaaccccaaggtggacgtgcacctgcggtcggacggctacaccaactactccctcgagacactcgacgctggaaagcggcagtgcaaggcggccctgcagcgggagctgggcctggaagtgcgcgacgacgtgccgctgctcggcttcatcgggcgtctggatggacagaagggcgtggacatcatcggggacgcgatgccgtggatcgcggggcaggacgtgcagctggtgatgctgggcaccgggcgcgccgacctggaacgaatgctgcagcacttggagcgggagcatcccaacaaggtgcgcgggtgggtcgggttctcggtgcctatggcgcatcgcatcacggcgggcgccgacgtgctggtgatgccttcccgcttcgagccctgcgggctgaaccagctctacgcgatggcgtacggcaccgtccctgtggtgcacgccgtgggcgggctcagggacaccgtggcgccgttcgacccgttcggcgacgccgggctcgggtggacttttgaccgcgccgaggccaacaagctgatcgaggcgctcaggcactgcctcgacacgtaccggaagtacggggagagctggaagagtctccaggcgcgcggcatgtcgcaggacctcagctgggaccacgcggctgagctctacgaggacgtccttgtcaaggccaagtaccagtggtgaaccctccgccctccgcatcaatatcttcggtttgatcccattgtacatcgcgcgtttgacggtctcggtgaagaacttcatatgcagtgacgcgccgctggggttggtagcagtactatgggattgcattgagctatgtcactgtgtgctttcgacaggacagtagtgaaggttgtatgcaagtttagttttttttttcattactgatatttggaatgtcaacacaataaatgaagctactatgtgtttcgtaagtataatcttacttatttttaggtg

SEQ ID NO: 15418 - DNA, 559 bp, Zea mays
  Clone ID: LIB3059-056-F9_FLI
ctaacgacccacacgagcaccaagccgaggggaggggcgatggcgagaggtgtggtgtcagcgaagggcggcacggccgcgggcaagaagaaggggtcggtcgccttcacgatcgactgcaccaagcccgtggaggacaagatcatggagatcgcctcgctcgagaagttcctgcaggagcgcatcaaggtcgccggcggcaaggccggcaacctcggcgaatccgtcatcatctcccgcgagaagaccaaggtcaccgtcacctgcgacgggcccttctccaagaggtatctgaagtacttgaccaagaagtacttgaagaagcacaaggtgcgagattggctccgtgtgattgcagccaacaaggaccacagcgtctatgagctgcggtacttcaacattgctgagaacgagggcgaggaagaagattagactgcattgcacttatatctcagttttgaactcattgaatttgatacttgtacccgtagttttgcaaatgcccccatgttatgctctggtgaattttggatggtttatttatttgaaaaatctttgc

SEQ ID NO: 15419 - DNA, 974 bp, Zea mays
  Clone ID: LIB3059-057-C1_FLI
ggaagtcaacaaaaataagaccacaatataatagtcaagctgacaaaggggacaccaagaatttcatggtacagattataatttgtagcgaacaaggcccaaagaacattctccattttaactggttacctaacaaacaccttctattcaataggcctggtgcaagggtgggcagccattgtcatgggaattctctcaggtagcatcccctggtacactatgatggtactgcacaagaaatggtccttcatgcagaggatcgacgacaccctcggcgtattccacacccatgcggtcgctgggctcctcggcggcgccactactggactctttgctgagcctgtcctctgcaacctcttcctcgccatcccggactccagaggtgcattttatggtggtgatggtggatcacagtttgggaagcagatcgctggcgcactcttcgtcattggctggaacattgttatcacttccataatctgtgttcttattggcctagtcctgcccctccgaattcctgatgcacagctgcttatcggggatgatgctgtacatggtgaggaggcgtatgctatatgggcagaaggcgagctcaacgatgtaacccgccaagatgaaagcaggcatggcagcgtcgtcaagcctgtatctttgacaagcatccgtttcatctctataaatgtacaatttgagagaagttctgaatgcatcttgaaagaacaaggaagtatcttgttcatccttagcagataagtctaggaggttaattagtgatcctttcaagtggcataaggtgcatgttgggtaacgttttctaggtatctctccaattctttctcaccactttcaagagtctcccacagtgctttccttaatgcatcctgcccttggctcttcgtgacaagatcataagcatatctcataacatagttgcagtatgcagcttcatcattcatacattcctgatatgatga

SEQ ID NO: 15420 - DNA, 528 bp, Zea mays
  Clone ID: LIB3059-057-C5_FLI
cagctaagcccgtgccagcagttcggatcctgcggcgtcggcagcgtcggcagcccgttcctgggccagtgcgtcgagttcctgaggcaccagtgcagcccggcggcgacgccctacggctcgccacagtgccaggcgctgcagcagcagtgctgccaccagatcaggcaggtggagccgctgcaccggtaccaggcgacatacggtgtggtcctgcagtccttcctgcagcagcagccgcagggcgagctcgcggcgctgatggcggcccaggtagcgcagcagctgacggcgatgtgcggcctgcagctgcagcagccaggtccctgcccttgcaacgcagctgccggcggtgtctactactgaggaaactatgtactgtagtaataatgtaatggagccgctggctagctacctagctcgctagtttactcatttagcggcgatgagtaacgtagtgtcacccatcaccatgggtggcagtgtgagcaatgacctgaatgaaccattgaaatggaaaggaataat

SEQ ID NO: 15421 - DNA, 669 bp, Zea mays
  Clone ID: LIB3059-057-F10_FLI
ggtgaaaacccaattcttcaaccctacaggatccaacaggcaatcacataccgaagacaccgctggtgagaggtacgggggaagaagggaagctataggagcttgcgagcattgcgcgctgggatctagcacgcgagcgagcgagagagccgcgcacctatctggcaagcgacgccgcggcctcgatcggagtcggaggcgaacacccccatggcggcggctggcggcggcgcaggagggaaggtatccttcaagatcatcctcacctccgaccccaagctccctttcaaagtgttcagcgtgcccgaggcggcgcccttcaccgcggtgctcaagtacgccgcggaggagttcaaggtcccgccccagaccagtgccatcatcaccaacgatggaattggcatcaacccccagcaaagtgcaggcaacgtgtttctgaaacatggttcggagctgcgtctcatccctcgcgatagagttggagctgtagtcatgtcttccggttagaggatatatacagtccaatgcataatgagcaaaacttgagagaaataaagctttgatgttggccttgcttggctgtaggatgttgttacaaggataataagcgaaccttaccgtacatgtctcaagttgtatgctctctgtttgtatgtggagagatttctg

SEQ ID NO: 15422 - DNA, 345 bp, Zea mays
  Clone ID: LIB3059-058-B7_FLI
cttccatttaaccaattggccgcactgaaccccgctgcttatttgcagcagcaaatactactaccatttagccagctagctgcagcaaaccgtgcttccttcttgacacagcaacagttgctgcctttctaccagcagtttgcggctaaccccgcaaccctcttacaactacaacaattgttgccctttgtccaacttgctttgacagacccagcggcctcctaccaacaacacatcattggtggtgccctcttttagattgcttattagttgtaattcaataataaagttttttggatgatgtatgtggccaaccagaaataagaagttacatttccagattct

SEQ ID NO: 15423 - DNA, 417 bp, Zea mays
  Clone ID: LIB3059-058-C11_FLI
aaaacagaagttccagggattcacggtggatgaagccctgatggagattgctggcccacaggcctaccttatgcactgtttgcccgcagagagaggagtggaggtgaccgacggtgccatcgaggctccaaattcaatcgtgttcccccaggctgagaacagaatgcacgctcagaacgccatcatgcttcacgttctcggtgcttaaccctcctattgcacaccagtgtttaacttttcttgaatttgcttagggattgaggcagttttggctttagggcatatgtgagagcttaattcagcgaactgttcagtaacgtggtaactgttcttcagggtgggagtttgttgtactggaaaagtttggcaacctgaataaaaaataatcttttgtgctggttttactgagcagcaggg

SEQ ID NO: 15424 - DNA, 1303 bp, Zea mays
  Clone ID: LIB3059-058-C2_FLI
ccatctgtcgactggtagcagagagaagagatagaccgagagagggagggagagagagaacctgacactgagactgaagcatcggcgctagctagcttgggcagcaacatcacgatgtcgtccaactgcggcgaggatgagaaggagctggtgtgcgtgaccggcgccggcggcttcatcggctcgtgggtggtgaatgagctgctccagcggggttaccgcgtcaggggaaccgcgagggaccctgcggacagcaagaacgcgcacctgctggctctggagggagccaaggagcgcctcaccctgtgccgcgccgacgtcctcgaccgcgcctccctgcgcgccgccttcgccggctgccacggcgtcttccacgtcgcctccccggtgtccaacgacccggagcttgtcccggtggcggtggagggcaccaggaacgtcatcaacgccgcggcggacgagggcgcgcgccgtgtcgtcttcacctcctcctatggcgccgtgcacatggaccccagccggagccccgacgccgtcctcgacgagacctgctggagcgactacgacttctgcaagcgaaccgacaacctgtactgctgcgccaagatgatggcggaggtgacggcggcggcggaggcggacgcgcggggcctgcagctggccgtggtgctgccctgcatgaccacgggccccatgctgcagcagacgctcaacttcagcaccaaccacgtcgcgcgctacctcatgggcaccaagcgctccatccccaacgccgtcgccgcctacgtcgacgtccgcgacgtcgcgcgcgcgcacgtgctcgcctacgagcgccccggagccaggggccggtacctctgcatcggcaccgtgctgcaccgcgccgacctcgtcgacatgctcagagacctctttccgcagtaccccgtcacggccaagtgcgaggaggacggcaagccaatggcgaagccgttcaagttctccaaccagaggctcagggacctggggctggagttcactccgctgaggaagagcctgtacgagaccgtgctgtgcctgcagcagaagggccacctgcctgtcatccaaccgcagcagcgcgcgtacctgtgatgtgaaacaaccgacatatataaacatgcatgcaatgaggcaaacgacacacacgtcagtggaagaacgagaagatgacataaggaatctgagaactttttattaagtgtatattcatgttacttttcagtatctacgggtgtattacgttttacgttcttaaaacaaaagcttttgctgttgtacaatt

SEQ ID NO: 15425 - DNA, 397 bp, Zea mays
  Clone ID: LIB3059-058-D9_FLI
ccatctcccaatggatcccggggcgtcttccccagcagctctgatgtggaactacgatgaggtgatggctattgttcaccagtacaactgtgtcaaggcctgctttgccggtcatgaccacaagggtggccactctgtggactcacacggtgtgcaccaccgcacccttgaggctgccttggagtgtcctcctggtaccagcgcttttggtcacgtcgaagtgtatcctaacaggctgctgcttgtaggttttgacagaatggctgatacagaggtccgtttttgagccattaaacggctttaattcgtgccgacttctactacttctataatgtttttgtctatatagattacagctgcagcagtccaaacgctggctttaatccgatgcttacac

SEQ ID NO: 15426 - DNA, 1075 bp, Zea mays
  Clone ID: LIB3059-058-E10_FLI
atcgcggcggtgggcgtaataggcgcggggcagatgggctcgggcatcgcccagctcgccgccgccggaggctgtgccgtacttctcctcgacgccgaccccactgccctctcccgtgccgtcatctccatctccgcctccctacggcgcctcgccgccaagggccagctctcccaggccgcgtgcgaggactcaataaagcggataaggtgcgtctccgccgtgcaggatctcagggacgcggatcttgtgatcgaggccgtcgtggagaacgaagctgtcaagaagaagctattcgtggagctggataaggtcacgaagccctcggccatcctcgcctccaacacgagctccatctccataacccgcctggcttcagctaccaaacgcccctctcaggtgataggcatgcacttcttcaaccctcctccggtaatgaaactgatcgagattatccgaggagccgatacgtcagatgaggtgtttgctgcggtcagatctttctccgaaagactcgggaagtccgttatatgctcgcaagattacccaggattcatcgtgaaccgcatcctcatgccgatgatcaacgaggccttctgggctctgtacaccggagtggcaaccaaagaggacatcgacgcagggatgaagctgggcacgaaccacccgatgggccctctgcagctcgccgacttcatcggcctggacgtctgcctctcagtacttcgggtactccacagcggcctgggagatagcaagtacagcccctgccctctcctcgttcagtacgtcgatgctggccggcttgggaagaagcgtggagtaggcgtgtattcgtatgggcacaggccttcgtccgtcaggccgaagtcgtctctgtaggcgtgagagcaaactgttgggcgaataaaaccaggtgcgtgttgcaattgcacgtcagagaaaaagggagcacagcctagttcagaggtactcagtcggacgcttcaggtcgtgtagattcgtaatggcagggtttgctgctctatgtagaaaagatggttcagtgtttttaatctgataagtggaagtcatg

SEQ ID NO: 15427 - DNA, 1019 bp, Zea mays
  Clone ID: LIB3059-058-E8_FLI
tcagcagcttctgcttgctttgtgggggaaggagagagagagagagagagatctagtagagaggctagtaggtggtcctcgaacgaagatgttggcggtgttcagcgggcaggtggtggaggtgccggcggagctggtggcggcgggcagccggacgccgtcgcccaagacgaaggcgtcgcagctggtggggcgcttcctggccgcctccgagccggccgtgtccgtgcagctcggcgaccacggccacctcgcctactcccacaccaaccaggcgctcctccgccccaggtcgttcgcggccaaggacgaggtgttctgcctgttcgagggggtgctggacaacctgggtcgtctgagccagcagcacgggctgtcaagcaagggcgccaacgaggtgctcctcgtcatcgaggcctacaagacgctgcgcgaccgcgcgccctacccggccagcttcatgctcgcccagctcaccggctcctacgccttcgtcctcttcgacaagtccaccaactccctgctcgtcgcatccgaccccgagggcagggtgccgctcttctgggggatcaccgccgacggctgcgtcgccttctccgacgacatcgacatgctcaaaggctcatgcggcaagtcgctcgcgccgttcccgcaaggctgcttctactccaacgccctcggagggctcaagtgctacgagaaccccaagcacaaggtcaccgctgtccccgccgacgaagaagagatctgcggtgccactttcaaggtggtggaagggtctactgtcctgacggcgctgcactgatctatcatcatcaggcggaggcgatgcgatgatgatgcagaactttgtacatgcgttggtggatggtggtgtaacatagtggctgccaacaagtcatgctcatgcaaaccgatgaatctatctctgtatcatcgatctcggttgcttgctagtccagactccagacatggctatatatatatagctggtgctaataaataggagtataatcgtc

SEQ ID NO: 15428 - DNA, 713 bp, Zea mays
  Clone ID: LIB3059-058-G4_FLI
gcattacttggatcgaagcctttctttgctttcataggggaacactttgagagttctgaagagctgaaacatttgaaagaagtgctgcttgatcttttcagaggagaggtcgtagagaatctgaaccttgccggtgtggatcggatctatgtgtgcactgcaatctctcccaccactgtctacatgatgcactgtgctctccgtctaaaaaggtcaggtacatctattcctaggatggagctggtcgaagttggaccttcaatggatctggttgtaaggaggcacagacttccagctgaaagtttgaagaaagaagctatgaagaccgctgaacatgctaagaagatgaaaaatgtcaccaaggatccagtgcagggcaagctgggcaaggtctacatgccagaccagcaggttggaaagttgaccttatcaaacgacgtaaagggactaaagagggagcgccgcgaagccaagaaaaatcaggactcaaagaagcaaaaggtcaaccctgagtaaagagcactgaagtttacctttgtatctgtttccaactgctgtgttatccaagtagaagttgctcgctgtcagattagtgccatcttgttaggctaaagatctctgtacgactttcacatcagtattgtgtaccaatccatgttatgacataagcatggaattttgagaatgtgttatcctatcaaatatcaaacgtc

SEQ ID NO: 15429 - DNA, 646 bp, Zea mays
  Clone ID: LIB3059-058-G9_FLI
aacagctatcgtcaaatctacgacattcccagcaatgactatgctagtaattatacagaggaaacatcaatacaacttccagaaataggcaccagcaatactattgttcaaggtcatgttgatgtcaatgaacaccgatttgatggaccaagaacaatcgaagaaatcgttcctgttccattggatgagatacagatccatgaggatgtcccagggcaaccgggagcagccgatgagatagatgaggttccattttctgacgctccgatcattggtgctccattcagactgatctcatttgttgctaggtatgtcagcggcgctgatttggtcaaccaaaaataactgtctgcataccaggaattcaggacttttatgtcaggagttcctttttgatcccactgataattacgtcagtatcttgagataaagatggatagattggattcagaatagatatggagctgtattcattcgtgtcagtgctcacgtcactgccaattattctccttcccctgtacttttttcaggcgccggagaaattcttgttcctttatactacctgttcttgaatatttgtcatccgctacttcatttttaaattaaaacacgataaataaaaaagaacggagaagtacaatattag

SEQ ID NO: 15430 - DNA, 866 bp, Zea mays
  Clone ID: LIB3059-059-A11_FLI
cggacaaggagcaggcggaggaggagctgtgccaagccacaatgggtatctcgcgtgactcgatgcacaagcgccgggccaccggtggaaagcagaaggcctggaggaagaagcgaaagtatgagcttggtcgccagccagccaacaccaagttgtcaagcaataagacagtgaggagggtccgtgttcgtggaggtaatgtgaaatggagggctcttcgccttgatactggtaactactcatggggaagtgaagctgttacccgcaagacccgtatcctcgacgtggtctacaatgcatcaaacaatgagcttgtgaggacacaaacccttgtgaagagtgccattgtgcaagttgatgctgccccattcaagcagtggtacctcactcactatggagttgacattggtaggaagaagaaaacccctgctgcaaagaaggataatgctgagggacaagaggttgaggcagcagctgaggaaacgaaaaagagcaaccatgtcacgaggaagcttgagaagcgcaaggagggacgtacccttgacccacacattgaggagcaatttggcagtggacggttgctggcatgcatttcttcccgccctggacagtgtggccgagctgatgggtacatccttgagggtaaagagcttgagttctacatgaagaagctacagaggaagaagggcaagagcgctgtagcttagagcattctcatggattgtcttgcaccgaaatgtgtgttctgatgagtacactttttttggttagtcgtctcaagttcagagcgttatgccatgttttcagacctgattagtacactgttttctaaaagcgattgagctctagtccaatgtattgataat

SEQ ID NO: 15431 - DNA, 644 bp, Zea mays
  Clone ID: LIB3059-059-B3_FLI
ttaagaagtgggtctccaagactagttgaactgaacgattttgtgcgtcaacgacacaacaaaggatttcttgatgttcttagttttagtgagacccaggtcacaccgattgttgaaggatatggcggttgggcacttcgtatggagatagtgccaattgaatctgcatacccaggctttggggagcttgtcgttctaccgtccactgatcatataaattcatgtaagccagttaacaagaacgatccttcttatgcggaaaccttggcatttttggagaagaacttcaaattatgcctggaaagagcagagtcctaggtcttgtcaatggcgccgtggagttttcagcaatctgaaggcttcattttccatttaccgccagagacttttctcccgttaacgacgaatggtggttgatctgaccaaatgatctgggcgtgctgtggtttatgaagctcgcaccgaactttgtagtaacattgcacatagcggttaggctgtaaatagctgtcttttaccttttagttgacatgagttgcccccatgtaagatcaagctatataccccaatgcctgtatcatctcaacagttttcagcaacagattttttacaaaacaatctcataatatataagccattttcat

SEQ ID NO: 15432 - DNA, 866 bp, Zea mays
  Clone ID: LIB3059-059-B9_FLI
ctcagatgcatggtggaagcactaagaaatcggcacctgatctatccccgaccaaacagaagaagcaacaggcagttcaagaaaggaaaaggaagcaacagtcaaagaggggcaagaaagtggctggtgaatccctggaaataccccaaacaaattttgaatcggagaatcaacctcataatgacgatgtcaacattgagaaacagacaattacgagtagcacactctcaccaaatggtgccaaggggcaaaagggagctcaaaggagaaaccagaccaaaaaaaggaatcaaagaaaaatccttggagatgctgaccttgcatgccagcctggagtgagaaaaagctcaagaacacgctcaaggcctttggagtattggcttggtgaaagattactatatgggcctatacatgacaatttgcatggagctattggcatcaaagcatactctcctggccaagatggcaagagatcattgaaagtgaaatctttcgtgcctgaacagtattcagatcttgttgctaaatctgcaaggtactgaagccaagattttccaaagaggatcacgccttgtgacctgttgctttgtcacctcactatgggatgttgacatgtattggtagaactgcagtactgcacaacgaaatgcatgttaacttaggcaggtatcaaatggatgagtatctatctagtttggatgcgctactacccattcggctactcgatacgtggagtctagggtgtcaattgacatttgcatgtatacatagtggtacttgatagtaagacagttttaggttcagactcttgaaaattgattttgtttgtcttctcgttttcagatttaagatgcgataccacagat

SEQ ID NO: 15433 - DNA, 832 bp, Zea mays
  Clone ID: LIB3059-059-G11_FLI
tcaacgcaccctgtgcccggtgccgccgacccaaatggcatccacctcgccggaacccgccgccgccgacgaaactatcgacaccatccacatccgtcgcctagagtgttccgaccacgagaggggcttcgtcgcccttctctcccagctctccccctgcccggacctcaccacatccgtgttcgccacgcgcttcgccgagctcgcggcgcagggcgacgaccacatcatcctcgtggccgaggacccctccgcctcggaccggcggatcctcgcgacagggtgcctcttcgtggagcgtaagttcctgcgaggctgcggcaaggtggggcacgtggaggacgtggtggtcgatgccgccgcgcgcggcaggggtctcgggctccgcatcgtgcgccgcctcgtggagatctccagggacgccggctgctacaaggtcatcctcgactgcacccccgagctgcgtgcctactatgccaagtgcggattcgtggagaagggtgtccagatggccgtctacttctgagttctgatctagagattcattgctaaggagtgatggcatatgcgctcgttctgcttaaagaccccatctaaatttgccgtgaattttggcaattgagaagcttccttagaactgtattaatcctttataagaaccgatagatgttcatttttgtcttctaattatgtttggcgaggccattatgaataatgttccccacttctgttcccgtttgcatcatcaaacgagatattagcctgtttgttccggattccaaacgcttcggctgaactcgcttatttgaatcatttaaatcaatgtgaatat

SEQ ID NO: 15434 - DNA, 864 bp, Zea mays
  Clone ID: LIB3059-059-H3_FLI
aaatgattcttcagaacagtgaagctatggtatctatagacatgcctgctggcccttctgaagttttagtcattgctgataaatacgcgaacccagttcatgttgctgctgatctgctatcccaggcagaacatggcccagatagtcaggttgttctagttgttgctggagatggtgttgatctgggtgccattgaggcagaagttagcaagcagtgcaacgcgcttccaagaggtgaattcgcttcaaaagcacttagccacagcttcactgtgttcgcgaaagatatggttgaggcgatatcattctcaaatctgtatgcccctgagcatttgatcatcaacgtaaaggatgctgagcagtgggaggagttcatcgaaaacgcagggtcagttttcttgggccaatggaccccagagagcgtgggcgattatgcgagcgggacgaaccatgtccttccgacctatggttacgcaaggatgtacagcggtgtatcgctgaactctttcctcaaatacatcactgtccaatccctaacagaggaagggctgagaaagctggggccgtacgtcgcgaagatggccgaagtggaggggctagaggcgcacaagagagccgttacccttaggctgcaagaggttgaggccaatgtaactgtctagccgctgtccatggtctattgcaacgttcagactcgatgtgggatgctggagttcttccctaggaacctaggggaactggactattgatgtcttccaaacaggctctggaatgttagaaagaggcgtttcaactggtgcagctaataatgttcattggaccctgatttgtttcacgaataaacttgagcagaacttactgtgt

SEQ ID NO: 15435 - DNA, 1013 bp, Zea mays
  Clone ID: LIB3059-060-C8_FLI
tccgaattcccaggcaggcaggtcggcgaggagggcaggaagaccgaagaccgagccgtgcgggggctcgggacgggaacgggacaggaccccaaaatctcagatccttcctgcccgcccgcccgtgcccgtcgacgcgtcgttcttgccggccgcgccccacctccgccctctcctcctccagggggatcggatacgccacaggctgcgcgatggtgctgtgggtcttcggctacggctccctcatctggaaccccggcttcgacttcgacgacaaaatcctcggcttcatcaagggctacaagcgcacctttaatctcgcttgcattgaccacagaggcacaccggagcatccggcgaggacctgcacgcttgaaaccgacgacgaggccatatgctggggaattgcatattgtgtcaagggtggtccagaaaaagagctaaaagcaatacagtacttggagagaagagagtgtgagtacgaccagaaaatatccattgatttctacaaggaaggagatcccttgaaaccagctgtgacgggcgtcttagtgttcgtttccactccagatccaattggcaacaagtactatcttggccctgctcctctgcaggatatggcaaggcaaattgctacagccaatggccctactggctataatagggattacctgttctcaatggagaaggcattagccagcattagccacgaagatgattcgatcatagagcttgcaaacgaggtgaggaaggtgctcaacagaacaaaggagaccaagatcactggtgccaatgcttccatgaaatcacatgcccctcttgtgcacctgtccgcgcttccagaaggcaccgttgtggactcgagatagcgacctctactcggaatttactttcagctcttgcatgtttgtggttgtggccatcatgtactgattttcccttttcaacagttgtcgtgaggctgtatcgtctggagtaaaaaaaaaaaaagctaaaagccggcactaataatg

SEQ ID NO: 15436 - DNA, 790 bp, Zea mays
  Clone ID: LIB3059-060-E12_FLI
gcgtggggtgcgccgccaacatctccggcggccacgtcaacccggccgtcaccttcggcgcgctgatcgccggccggatctgcctcgtccgctccctcgtctactgggccgcgcagctgctcggcgccgtcgccgccgcgctcgtgctcaagctcgccaccggagggatgcatctgccggagtacgcgctggcggggggcgtgagcggatggaacgcggcggtgctggaggcggccatggcgttcgggctcatgtacgcctactttgcgacggtgatggacaaagcgcggagggtccgcgccggcgccggagcgctggcggcgccgctcgccgtggggcttctggcgggggccaacgtgctggcctgcggcgcgctggagggcgccgtgatgaatccggcgcgcgcgttcgggcccgccgtcgtgggctcccgtcgctggagacaccaatgggtgtactgggtggggcccatggtcggcgccggcctctccggcgtcgtctacgagcacctcgtcgccggcccggccgccgaggaggaggagcccgcgccgagctgcggcgaccgccgtcgtgcgtagaggactacatgcatgcaggagcagcaggacgtcgtcgtcgtccccgctcctcggaatcttctgaataaaaaaaacagcttgcatgcgtgctcaattgttgtgtgtcgtggtcgatcatgagtagaattaatgtttcatgcatgcactcttaccgtcttctacttatgtccttgtttgcttcaataatctggcttgtgcgctgggtgtaaaac

SEQ ID NO: 15437 - DNA, 672 bp, Zea mays
  Clone ID: LIB3059-060-E5_FLI
tctcaatctccctagcaatctctagcagcagatcctcgtgcgaagcaaagcgctagcccccttcgtactgtcccgatggcccgcacgaagcagacggcgaggaagtccactggcggcaaggcgccaaggaagcagctggccaccaaggcggcgcgcaagtctgccccggcgaccggcggagtgaagaagccccaccgtttccgccccggcaccgtcgcgctccgggagatccgcaagtaccagaagagcacggagctgctgatccgcaagctgccgttccagcgcctggtgcgtgagatcgcccaggacttcaagaccgacctccgcttccagagctccgccgtcgccgcgctgcaggaggcgtccgaggcctacctcgtcgggctcttcgaggacaccaacctctgcgccattcacgccaagcgcgtcaccatcatgcccaaggacatccagctcgcccgccgtatccgtggggagagggcctaggcgtcgtcccggtggaggtggaagtagtagtggccgtttctgtcatcactgtctggctagaaggtgtagagatgtgccgggttctgtagtttgggttatcggtcaaatcatgatgtagttgggtctaccctgctgtaatttaactatgactatgcaatggcaatgaagttctcggttatcagttcc

SEQ ID NO: 15438 - DNA, 761 bp, Zea mays
  Clone ID: LIB3059-060-G3_FLI
gccggctaggtaatctggtacgacgacccacgacgacatggcggcggccaccaccaccagcagcagcaagaagtcgtcgtcgccgtcgtcctcgagctcggcgcagcgggcagcagctgccgccctgctcgtggcggtgtccgtcctggtggtgggcgcggcggcggtgtgcgacatgagcaacgagcagttcatgtcgtgccagcccgcggcggccaagacgacggacccgccggccgcgccgtcgcaggcgtgctgcgacgcgctggcgggggcggacctcaagtgcctgtgcggctacaagaactcgccgtggatgggcgtctacaacatcgaccccaagcgcgccatggagctgccggccaagtgcggcctcgccacgccgcccgactgctagccaagccaagcaggaaggcccccggcattgctagctgtacgtgtgtgtgtgtgcatctgcagcagggtgcaggggcccgtacgtacgtgtcactctctctctcatcttgtcacctatgtagagtgtgtgtgttcgtactaattaaaatgttcttgtcgtcgtctgtgcatgcatgcaccatgtcgtcgtgcatgtctattctgtgtgtgtcgtcgtgtcgatcggtacgtatagatgcccgttgttggtttggactggtcgtgacgtactatacgtacgcgcatgtgtgtcactcctggtcgtgtgcagtgtatgtatgtgcttgccgggcaaaagttgcatctagctaaacagtagtactatt

SEQ ID NO: 15439 - DNA, 576 bp, Zea mays
  Clone ID: LIB3059-061-B8_FLI
gcgttcgttcccaagggcgctagggtttaaccccccaactgttcggtctctctctctccccgaatccaattcagcgtcatctagtccgggagcctgcgacatggggtacctccaggaggcccgggagaatcacgtcaagaagaaggtcgaggaagctttgcggagcaaaatgaaacaaaaggctcttcaggaatgtgatttctattgttcaaaatatgctgagtgtgcacggggaagaacattttctgtggtatggcaatgccgcaaacaagcaaaagagttgaatgagtgccttcatcaatacacaaatgatgcaatcctggaagaaatgaagaaggcttatatgattgagcaaaagagcaaggagataaatcaataagcaaaaatccaatgcgcaatgtgcatcacaatcaccctgcttgtatgtatactgttgcctttgatagatactattcatgggtagtgttgcaaacattgttctccccacatgcataacctgatactagtattgggtggcaaactggcaatcttgctgtttctgtcgaacatgcgatataagttgttttcttctgctgc

SEQ ID NO: 15440 - DNA, 1444 bp, Zea mays
  Clone ID: LIB3059-061-D10_FLI
gattattctgttcgctctcgcccaagtcatcgtctggtcgtcgcccgcagaggcgcagacgcccaaaaccggaaggggcgccatggccgcgtcggatctggagagcaaggccaaggaggccttcgtcgacgacgacttcgagctggccaccgagctctacagccaggccatcgacgccgggcccgccaccgccgacctctatgccgaccgcgcccaggcgcacatcaagctcggcaactacactgaggctgtggcggatgctaacaaagcaattgagcttgatcctatgatgcataaagcttactaccggaaaggtgctgcatgcattaagcttgaagaataccaaactgcaaaggctgctcttgagttgggttcttcttatgcatcaggcgattcaaggtttgctcgtctattgaaggaatgtgatgagcgcatcgctgaggaatctagccaggcaccagtaaagaatgttgaggctactgtggctgctactattgaggacaaggaggatttcacaaatatggagaatacaccaccagtgatagaacccccaagcaaaccaaaatacaggcatgactactacaacagtgccacagaagtggtactgacaatatttgctaagggtgttcctgctgatagtgtagtcattgattttggtgaacagatgttgagtgtatccattgaagttcctggtgaagaaccataccattttcagccccgtctgttttctaagattatccctgagaaatgcaaatatcaagtcttatccaccaaggtcgaaatacgccttgcaaaagctgagcaggtgacatggacaaccctggattatagtggaagaccaaagactgttccccagaagataagcacgccagctgaaacagccccaagaccttcatacccatcttcaaaggcgaaaaaagactgggataaactggaagctgaagtcaaaaaggaggagaaggaagaaaaacttgatggtgatgctgcattgaacaaattcttccgtgacatctacaaggatgctgatgaagatatgcggagggccatgatgaagtcattcgtggaatcaaatggcactgttctctcaaccaattggaaagatgttggagcaaagaaggtagaagggagcccccctgatggtatggagctcaagaagtgggaatactaaagtttggactgcccatcttttgtaaatccaggtcttggaaactatgacctaattccgtccacccatagtgccatgagcttgcttggttaagtctctgcttttgtaagctttctgtatgacagtctagcgtgtgtctgagtgctacttgccgtagcttttgatggacataggtatgctattatgtggtatcgaccgggaaccatctgtggtatcaaagacagcaaactataatgtatggaatgcctattctttttggtctaagatgtttttcttgtc

SEQ ID NO: 15441 - DNA, 142 bp, Zea mays
  Clone ID: LIB3059-061-F3_FLI
tcctcttcctcgatcgatctcctctggatctggcccatgtcgctggagcaaactattgcctcctgctctgctcctcacgtcaccatcgccgtctcagctcaactgtacgactccgtatatattataaccatcggttgtcatc

SEQ ID NO: 15442 - DNA, 615 bp, Zea mays
  Clone ID: LIB3059-062-B3_FLI
cacacacacaagttttcagtagaagaacatcaaatacatactggctcactcgtgattccttcacccagcagttcgtaaccacctgctaaatcatcaaaaagatggccccctgcaaagtagcagcagccttactcctgttgatcacaacaatttccgtcaacaccgtaaccgggtcgcgatgtaacgctcaggagaagaaccagattgtgagcttgtgccaaatgtacatccagagaggaaccctcgttcagctcccatcccaaactgggccatgctgtgcggcagtgagagagctggagagggtacacaggggtatgcagatgaagtgcatcgccgatctactaaacgctggagacctgcagaaatacgatccaactaagatcaagcatcttgacatttcctgctacacttaacacatcgttagtttcattcctctcctccccatcgttgtaaggtcatgctgtgaagggcgcgatggcgtggaatggatggtggtggtagcaaagatgctcagaagatgacatttcgttagttatttaattaagtcttccaaggcgtcaatcttcctgacatgtatctttattcgaaaaaataaactggattatttctggtatc

SEQ ID NO: 15443 - DNA, 457 bp, Zea mays
  Clone ID: LIB3059-062-F4_FLI
actattgtagctcatatcatctgtcacccatggcgaagtgcagcagcttccaaggattattctggttgctttccatgattcttctagcatcctttgttgctcatgcacgcacaacaagtgggcacaccaaagaggacagcaatgctaggaacatgacgatgaccaagacgagggcatcgggcaacatacttgttagccgtaatgacgacgggccatgctatctagattccggtcttaatgagtacgtctgcagaaagactaataagtgctataagagcttggtgctctgcgtggcgagttgtcaaccatcatcatgaattcatgatactgcggagacatcatgatactgcggagacagacggcgagagatgaggctagctagatgctgtttcaccaaaatattatgtaacacccaaatctcccattttaagaaataaataagattttcgaaaagatt

SEQ ID NO: 15444 - DNA, 876 bp, Zea mays
  Clone ID: LIB3059-062-H11_FLI
tattattgagaccaacaagcaacatagaaagtggaatccagtagcaacaacagagcaacaatggcgaccaagatattttccctccttatgctccttgctctttctgcatgtgttgctaacgcgacaattttccctcaatgctcacaagctcctatagcttcccttcttcccccataccttccatcaatgatagcttcagtatgtgaaaacccagctcttcagccctataggctccaacaagcaatcgcagcaagcaacatacctttatcacccttgttgtttcaacaatcgccagccctatctttggtgcagtcattggtacaaaccatcagggcacagcagctgcagcaactcgtgctacctgtgatcaaccaagtagctctggcaaacctttctccctactctcagcaacaacaatttcttccattcaaccaactgtctacactgaaccctgctgcttatttgcagcaacaactattaccattcagccagctagctactgcctactctcagcaacaacaacttcttccatttaaccaattggccgcactgaaccccgctgcttatttgcagcagcaaatactactaccatttagccagctagctgcagcaaaccgtgcttccttcttgacacagcaacagttgctgcctttctaccagcagtttgcggctaaccccgcaaccctcttacaactacaacaattgttgccctttgtccaacttgctttgacagacccagcggcctcctaccaacaacacatcattggtggtgccctcttttagattgcttattagttgtaattcaataataaagttttttggatgatgtatgtggccaaccagaaataagaagttacatttccagattttaatgtg

SEQ ID NO: 15445 - DNA, 531 bp, Zea mays
  Clone ID: LIB3059-064-A10_FLI
ccggctcacaggaaagtgttcgtcctcatggcgccgccgcagccgaagtcgggcctcttcgtgggcatcaacaagggccatgtcgtcaccaagcgcgagctgcctctgcgcccgtcccaccgcaaggggaaagcaacgaagagggtgtccatggtcaggggcctgatcagagaggttgctggctttgctccttatgagaagcgtatcaccgagcttctgaaggttggcaaggacaagcgcgctctgaagcttgccaagagaaagcttggaactcacaagagggcaaagaagaagagagaggagatgatgggtcctcaggaagatgagatcggctggtacgcacactgacaagaagaaataaagcatttcaagttcatgaatgtggcagccagagattatcaactgtgttttttccctacctctagaaactagacatggcaaagtatttttgaccgaaacattgtttgttagtaatgtattgaaccacctcgtggtattttgccccaacttccaatgcatcaatggtttgtt

SEQ ID NO: 15446 - DNA, 1243 bp, Zea mays
  Clone ID: LIB3060-001-B10_FLI
gctacatgtcgtctcttttcgtttctcacttcctctcttcgttcccaatttgaaggctgcccaacccttgcgccggtaggcggtggcggtgaggatagagggttacctgaggaggcagtgatggcggccacgattcagtacaaccggagcaacccggcggtgaagcggatcctgcaggaggtcaaggagatgcagtccaacccctcacccgacttcatgtccctccccctcgaggaggacatcttcgagtggcaatttgctatccttggtccgagagacagcgagtttgagggtggaatttatcatggcaggatccagctaccttcggattatccattcaagccaccgtccttcatgctacttacgccaagtggacgctttgagattcagaagaagatttgcttgagcatatccaattaccaccctgagcactggcagccttcatggagtgtccgcacagctttggtagccttgattgccttcatgccgacgaacccaggtggggcattgggctcactggattacaaaccagaagacagacgagcacttgctataaaatcacgtgaggtgccgccgaaatttggctccccacaacgtcagaaactaattgatgagatccatgagcaaatgctcagtaaggctcctcctatcccccaaacgctgccaaatgtgccaaacgaggagctcgcacctgactcttgtgatgagcatgcagacaaggtagatgaaggtggcaacacatccaagtccatgtcaggctcgtcgagtggccatcctgtgcctgaagctgaatcgctggctgcagaaaacacgggtgaagcatcagcagttgaggttgccaaccatcaagtgcctgaagcgagccgtagagaaagcattccaagagttccttcgtctctgcagaatgctgctattgcaacccagaagccaaagcatgacaggctattgaccttggccgcatttgggttgactcttgctattatggcactagtgatcaagaagttcttaaaaatcaatggcttgggcggtttcattgagggcaagttctgagtaggattgtgcataagttggatgtacgagatgactcattcctcgtactcagcatatgctataagctatataaccccgtaagatttgtaattgtttagttatagatgaaatcaaaatggaacggtactatcaataccccattgtatatgtacactggattgaaaattgctgagtatttaagcatctgatgtat

SEQ ID NO: 15447 - DNA, 1861 bp, Zea mays
  Clone ID: LIB3060-001-C2_FLI
aggccacaaaacagaggtacccaaacgatcgatctgtgcatctccccaccgtccgtcccgcaaccatctgattcagaagcagacatcaatggctagcaacggctgcaacggcaacggcaacggcaaggcggcgccggcgggtgtggtggtgccggagatcaagttcaccaagctcttcatcaacggcgagttcgtcgacgccgcctccggcaagacattcgataccagggacccacggaccggcgacgtgctggcccacgtagcagaggcagacaaagctgatgtggacctggcggtgaagtccgcccgggacgccttcgagcacggcaagtggccccgcatgtcaggctacgagcgcgggcggatcatgagcaagctggcggacctggtggagcagcacacggaggagctggcggcgctggacggtgccgacgccgggaagctgctgttgctgggcaagatcatcgacatccccgcggccacgcagatgctgcgctactacgccggcgccgccgacaagatccacggcgacgtcctgcgcgtctccggcaggtaccagggctacacgctcaaggagcctatcggcgtcgtgggcgtcatcatcccctggaacttccccaccatgatgttcttcctcaaggtcagcccggcgctcgccgccggctgcaccgtcgtcgtcaagcccgccgagcagacgccgctctccgcgctctactacgcgcacctcgcaaagatggccggcgtccccgacggagtgatcaacgtcgtccccgggttcggccccaccgccggcgccgcgctcgcctcccacatggacgtcgacagcgtagccttcaccggctccacagaggtgggtcgcctcatcatggagtcggccgcgcggagcaacctcaagacggtctcgctggagctcggcggcaagtcgccgctcatcatcttcgacgacgccgacgtcgacatggccgtcaacctgtcgaggcttgccgtcttcttcaacaagggagaggtttgcgtggcgggatcgcgcgtgtacgtgcaggaagggatctatgacgagttcgtcaagaaggccgtgcaggccgcgcggagctggaaggttggagacccgttcgatgtcaccagcaacatgggccctcaggttgacaaggaccagtttgagagggtcctaaagtacattgagcatggcaagagcgagggagcgactctgctcaccggcggcaagcctgccgccgacaaagggtactacattgagcccaccatctttgtcgatgtcactgaggacatgaagatcgcgcaggaagagatcttcggccccgtcatgtccctcatgaagttcaagacggttgatgaggtgatcgagaaggccaactgcaccaggtacgggctcgccgccgggatcgtgaccaagagcctggacgtcgccaaccgggtgtcccggtcggtgcgcgccggcaccgtgtgggtgaactgctacttcgccttcgacccggacgcgcccttcggcgggtacaagatgagcggcttcggccgggaccaggggctggcagcaatggacaagtacctgcaggtcaagagcgtcatcaccgcgctcccggactcgccatggtattgagttgagccagggaccgaccgatggaaccccatcgatctcttcttgtgcagtgtacatgcgtcatgcgtgcgtgctcacacagctgggttgctgctttgtgcttgtgttcgtctctggtttgtggctcatgtgttagtctgcaccctatccttctgtacgtagctgccggacatgcatatagtatgttaagtacaccatataaactcttgttttataaattcaagtttagcttggagccttgactccttc

SEQ ID NO: 15448 - DNA, 1185 bp, Zea mays
  Clone ID: LIB3060-001-C5_FLI
gccactagctaggcttgctcttgtattattgttccccggcccccgtaccgtacgtgccagcaaataagtttcatttctagaaggaagaatagcggggcgtcgtccagtgtcactgccacctgcacctgcgaggaagaaagcaagcaagcgccactctcctctcactgctctagctatttatacccccgtgccttgcgtctccttcctctagagtcctccaccccaccttccctacctatctatcctacagcggctagtctactcaactctgctctgctcgcgcggcgatcgaggcaccgtcgtcgccaccatcagcggctagtaccgatcgagccaccggcacatcagatcggccggcccgacgaccatgctggcctcgctgcggtacctggccggcacggcggggccgagcggcttcggctcgcggacgaccgccgaggaggccgcggccggcgacctgcgccacgtcaccgccatcatcacgggcgccacgtcggggatcggcgcggagacggcgcgggtgctggccgggcgcggcgcgcggctggtgctgccggcgcggagcctcaaggccgccgaggaggcccgcgcgcgggtgcgcgccgagtgcccgggcgccgacgtcgccgtgctgccgctcgacctcagctcgctcgcctccgtgcgccgcttcgtcgcgcggttcctcgacctcgggctccccctcaacctcctcgtgtacgtgtgtctgtccaactttcttgctttctttcttcatcctgctgctgctgcatccatcagtgagcagtccacctgccaaggcagcagcagcaacaactgcggctaacttacatggactgacacatggttcacgtgcgtgcgtacgtacgtgcagcaacaacgccggcaagtacgccgaccgtttcgccgtgtcggaggacggcgtggagatgaccttcgccaccaactacctgggccacttcctgctcaccaggctgctgctggacaagatggcggacacggcgcgggccacgggcgtccagggccgcatcgtcaacgtctcctccaccatccacagctggttccccggcgacggcgacgccctcggctacctcgaccgcgtcacacggaggaagatgtgcgtgtgctcgctccgtgctgtgctagctagctcgctctcccccgtcatctcgttcatcagctagc

SEQ ID NO: 15449 - DNA, 825 bp, Zea mays
  Clone ID: LIB3060-001-D11_FLI
attcgcttcagccttcaggcccatcagcttatccattctctccctcacgagtcacgaatgaatagtacacggcgctcgctccctcctcgagagcgtgtatgcgcagctgcagctcggtaaggcagatgttgctgactcgtctgtccagcgtttcttgctcgtcaacagcgcagcagttgcatgcgggcgtcggcaagttcgccgccgccgcatgctggagctggaagaagaagcgcgaggagctcccctgcttcagggccagactggccgccaagccgccgcgcgcctcaccggcgaagggcggcattgttccggccagcgacgatgacgacggcgttagcctcggcaccgtgaagctgccgggcaacatcgacaccgctcggttggagtccttgctcttccagtgggggaacagcctctgccaaggcgccaacctgccacttccggtgcctctcaaggtggacaaggttgagggcgggatcaggctagggttcgtcgcggtcgaggacggcgcgacgcggacgctggtgtacatcgattgcctggtctctccggccccggatggctctggtccggtgttccgagcgatcaggaacggtcctatgaaggacaaggagccacctggggagcccaggatcatgagaagcctccttcaggctctcgaaaagtctattcagatcgctcgtgtttgaccgtgtaaacggcacacgatcaagcgctgcatctctgtaactattaattaagagccctctaaaccctgctattctagttgtctcttgagtcttgaccattccagggaaaaaaataaaccaagaaagtttcagg

SEQ ID NO: 15450 - DNA, 2060 bp, Zea mays
  Clone ID: LIB3060-001-E6_FLI
gttcgttgcaagtcgcaaagatttgcgccgcctgccgggcgtcgtcggctcatcgccgtcggcggtaggcttctgcctcccccgtctcgatacctctcattcggcgaagactcgcagggaggtccccacttcatcacctccgtttcctaccggaaaaggcaacttctgtcggccatctcagtactttttttggaagatggatccagaagactctagtgagtttgaagaggacgacgacgaagaagaagatgatgacttaatgctattcatattgccagcgctatatctagcatctactggaattggaactctggatcaaacatctatggttagtgatggtactgcgattgaaactccaagtcaagtatcaaagtttaatgatgcagaaaggatttgtaaagtgcttgaagatgacagaggccaaggctatgataaactccgtgtggagcctcatgttctcctcgaactttcacgctatttgaggtcaaatgatcttttgaaaaataccagaggtgtttctgtagaagagaaaattggcatgtttatttacatgctatcccgaaatgctagttttcagaaactaagtgacagattcaagtacagtacagaaactattcacaggcatatcaaagcatgctttgatgcagtcacaccaatgactggtgaattcgtcaggccaccttcaattcaagctcaccggaaaatatcatctgatacacgttatgggccttactttgagaactgtattggagcaattgatggcatccatgtccctatgacaatatcggacagtgaagcagctccataccgaaatagacaagaatccctttcccaaaacgtgatgcttgcttgtgattttgatttgaattttgtccatgtttcttgtagccgagaagggtctgcatctgacgcagcagtcttatactctgctatagaatatggatttgaagtcccaagaggaaagttctacctggttgatgggggttatgcgaacacgccatcttttcttgctccttttagtgaagtcgcttaccatgctgaagagcaagatgagagcaatttccaaccaatagactacagggagcttttcaatcttcgccatgcacagctgtacagacatatcaagcgtgctgtaggcctactgaagatgcggtttccaattctaaatgtcgcaacatcataccgaaaagacactcaactgaaaattccttcagcggcagttgttatgcataacataattcagagacaaggaggtagtgaagagttgttatgtgagcaaacaattccatttgcgtcccgtaaaacagtgaatcttcctagtggtgatgacacgtatggttatgatgtttcagctttcaacagtgaatgcgacatgggtaatgctttgagagatggtattgcactgaggatgtgggcagattatgaaagtagtatgtatgtctgatttcagaatagaacaggctggccttaaagaatattgagtggtgtggtgtggatgttttcactgccctttcaggtggtgttggagctctatatggtcctttgcatggcggtgcaaatgaggtggccattgctctagaaaaggcagcactgtcaggcgaattaatattttatcaagcgggagctatatccaaatgtggacttctgctctgggctaatttatagggcgatgggatttcctacagagtttttccccgtgctggtgtctggctgagacattataccccctgtcagagaacgagtggtggtgccaagccagagtgaggaactcgcctagattgccacctcaaacgcaaccacttttgtgcttctgccatgtagaatagctgctgcatataaacacaccggcttgcctcaataaacagcaaccacttttgcgcttgaaaaaggccacagcccacagatgcttcgcttggttggagttgtaggctttctgttgtcaaaaagtatataggcaataatgcagtaagaacactacacctttacagtgtgaaactgtcattgcgttctctatgccgtaacttccattaagatgaatgaagagatacgatcaagttcct

SEQ ID NO: 15451 - DNA, 1910 bp, Zea mays
  Clone ID: LIB3060-001-G9_FLI
cacacatcggggaatggcgacctacgaccatgccgccaccccgacaccgcagtctccgggcgtcggcggcgtacccttctcgtcctgcatcggcgacctcctccgcttcgtcctctcctcccacgccgccgcctaccccggtgacgacacggtcgctttccccctctcgccctcctactgcgcccgcctcctcaacgacggcgaactgttcgagaagctggaggcctgtattcagcagtgcctcgaggaggggcggctcccggggccgcccgcggtggttgggattccggctgaggaggaggggccggaggagagagggtggaagctgctgctgccggagaaaggcgctgagttgaagcggatgtacgatgctgttgagtttgagctgcatgttcaggaaccctacttcactcaactcagagccggagtcaagaaggttgaagggagattagcgactggtaactacaaccggattacacaaggttctttgctgctattcaataaatgcctcttgcttaacgttgaggtaatattattttctaaataactaactcttctcgggataatttattatgctttttacatcatcatctcttgttactgtttgcgtttgacattgatatttagacatcttcttcaaaagaaattgtatttattttgtaatactccattatgcaaaattattaatcaaatcaggcattcattacattttttttttctgtaaatttgccagtctcctttgcttatgcttttttttcaggcagttaggaagtacaattcattctctgagatgctgaaaggagagaaaatctcaaatgttcttcctggtatttcatcaattgtagaaggtgtgaaagtatataggaaattctatgcagaggaaaaggagaactcttatggagttttagcgatatcagtttcaaagccaacatctcaaccttacataaccatgaataatatccttgctggattggggtatgatggactgggtagactccttggtatggcgaaaacaactggaactgttccagatggactacctcctccaagatctgcactgctgtcatcttgtatgggactggttcaaccaaatgagtaggaaaggatggtggggcagctttaatgggagtggtaaagataaagtccaccttgatacgccggagtccagagttcgagacttctgtcgtgatctatttcattgttgtgttgcttgtcttcagattcaagcaagaaccaagctgcatctgaaaccattgagtctttgctgcgtgtgtgttgttggatgaatgttcatctgactcaaccctatggtcctgtttttgaaatccgcgtgcatgaaggttatggtgccagatggtctcaagatggttcaaagttcattggattcttggagccctacaccccagaaggctatgctaagggatggaaacactagcaccagctgcctagtagatcttgatctgtattagcgactctatcagggttcatctgcatatcttctgaaggcctacatgttctgttgaatcgaaagagacgatcatgtgttacgtcagctgcctgcctaagatcatgtgttgcatgaccactgttttatttctgaatatgttcttttttttttgcaaggcgtatatcgacaccaagtactgatatatgcgtctgaatatgttctacttttattcaaacacacccgccaagatcagttcatagttttgcacaaagacatgcaaatgcaattggacacaacccaaatagaaaggtattttttgtttcaatccaaactattcctctactgcgactaagtactgatgtcatttctggcatctgactaacaaaaagcatacaaccatgaatgtcgctgatgctagttattttgtggatttggccgtataaataatcaaataaattcgaag

SEQ ID NO: 15452 - DNA, 1270 bp, Zea mays
  Clone ID: LIB3060-002-A2_FLI
cgcgccatttccacctcccactgtcctttcgtccagtccccagccctgcagcccaaccgtggaggttctggaaggcggtgtatcccttctagaaccttctcgagatgcagagcgccgcggctttccggccgtgccccactcggctgctgccagcctcgcccgatcgggatggcaagtgccgccagcgacaggtgtcatgcagcgcggccggggatgctgtggcggccccgaaggcggaagaaggaggcgggctcatgaagacgctgtggctcggctcgctcttcggcctctggtacctgttcaacatctacttcaacatctataacaagcaggtactcaaggttttcccataccctataaacatcacagaagttcaatttgctgtcggaactgtagcagctctgttcatgtggatcactggtattattaagaggccaaagatttctggagcacagcttgtagccatcctacctctggctattgttcatactatgggcaatctcttcaccaacatgagccttgggaaagttgcagtgtcatttacgcacaccatcaaggctatggagcctttcttttctgttattctttctgcaattttccttggcgagttacctactatttgggtagtatcatctcttcttccaattgttggtggtgttgcattggcatctcttactgaggcatcctttaactgggctggcttttggagtgcaatggcttcaaatgttacctttcaatcccgaaatgtattgagcaagaagctcatggttaagaaagaggaatccttggacaaccttaatctcttctctatcattacagtgatgtcatttttccttttggcccctgttaccttctttacagaaggtgtcaaaattactcctacatttttgcaatctgctggtctgaatgtaaaccaagtccttacaaggtgtcttttcgctggactgtgtttccatgcataccaacaggtgtcttacatgattttggcgatggtgtctcctgtcactcattctgtgggcaactgtgttaaacgtgttgtggtcattgtaacatcagtgctgttcttcaggacacctgtttctcctatcaactctctcggtactgcgattgcacttgccggagttttcctgtactcacagctcaagcgacttaagcccaagccgaagacggcttaaatagggattgtattttccatctctttgtgttaatggagttaaacacttctatgtttcaggtgactgcattttaaaagatttgtgcttataacaac

SEQ ID NO: 15453 - DNA, 817 bp, Zea mays
  Clone ID: LIB3060-002-C5_FLI
cgccgtcgtctaatctaccgcgcgcaagccttccctcggggctagatctccggtctccgcttgcccaacttccaccactgaggcgatgcaggaggccaagcacctcaccacctcaaagcttccgccgcaatcccaatcctcatccccatccccttcggctcccgccgcgaaccctcccccataccatcacgactatggtacctttcaccggccgtttcagccgacgctgcccgtcgtaggccccgcctaccatgactaccatgcctctcctatcgggttcggcagccaggggttcgttgcctccccgggcgccgtccagcagcaggtcttcgtggagggcatccccgtccgagagccgcccctaccgttctgcggcgtcggcgtcggctggtttttgttcttattggggttcttcttggcggcaatcccctggtatgctggtgcgttccttctattctttgttgctttggaccacagagagaagcctggattaatcgcatgcaccgttgctggcatatttgcactagttccattcatcctgaacggtatcagattgaatcctttctggtgatcagtgcttgccaatccagatccacatgactaatgttttcagcaccacattcgatatgttaatagctgtattattttgctcaaacttgcgaagaacaaaatatatgagcttatgtgtaaaaaggaattgccatgctgttttatgtccgcagcaggttcatgccctgtgatatgtgtaatcatgaattgtacagtttatctgtaccgcagcagtttacgagaggtctagtaaaagcacattttaccc

SEQ ID NO: 15454 - DNA, 1302 bp, Zea mays
  Clone ID: LIB3060-002-F8_FLI
cggcatcatgtttctcgccggttccgtcatcaacgccggggccgtcaacgttgccatgctcatcgtcggccggatcctgctcggcttcggtgtggggttcacagcgcaggcggctccgctgtatctggccgagatatcacccaccagatggcgcggcggcttcaccacggcctaccatttcttcctcgtcgccggcacgctcgccgccaacgtcgccaactacgtcacgaaccggattcccgactggggctggcgcgtctccctcggcctcgccgccgtgccgtccgccgtcatcgtcatgggcgcgctcctcgtctcggacacgcccagcagcctcgtgctgcgcggcgagccgtacgcagcccgcgcgtcgctgcagcgcgtccgcggggcgggcgccgacgtggaggccgagctcaaggacatcatctgcgccgtggaggcggcgcgccgggacgaggaggagggcgcgttcaggaggctgcgcgccgaggggtaccggcactacctggtgatgatggtggccatccccgcgttcttcgacctcaccggtatggtcgtgatctccgtcttctcgccggtgctgttccgcacggtcgggttcgacagccagagggccatcttcggcgccgttataattagcctcgtcagcctgtgcggcgtggcgctgtccaccctcgccgtggaccgctgcggccggaggttcttgttcctcgccggcggcaccgccatgttgcttttccaggtggcggtgtcatgggtgttggcggatcacctcgggaagcaccaggcggtgacgatgcccaagaactacgcgatgggcgtggtggtgctggtgtgcctgtacacgttcagcttcagcatgtcgtgggggccgctgaagtgggtggtgccgagcgagatctaccccgtggagatcaggtcggcggggcaggccattaccctatcggtcgcgctcaccctctccttcacgcagacgcaagtgttcatctccatgctctgcgccatgaagtacgccatattcctcttctactccggatgggtcctggccatgacgcttttcgtcgcggcgttcttgccggagacgaaaggcgtgccgctggagaccatgcggtcggtgtgggcacggcattggttctggaggaagttcgtcgtcttggacgctgccaggtaggaggttcaggatcaaccgtatgtaacaagaatcatatcaacgtacacttaagcaagtgacaagtcgaattactgttatatcatggtggtcatatgcaataattaatacaacgtctcacttgtatggtt

SEQ ID NO: 15455 - DNA, 2645 bp, Zea mays
  Clone ID: LIB3060-002-F9_FLI
ggcgctcccgtcttcgaccaatactgcgatgcggatctcggtgacaacgccatggagctcgtccagcgtggccccgtcgacatcgaacgcatcgacctccgcaggggtgcgctagctggctgctacggcgagcagtccgcacgcggacacactccttcctccttcaacgacgatttgggtgcctcgctcgactcggtcgccaacagctccgtccatggcggccacggatccgtgctgccccacctcacgcccatctgcgcgggcactagcaggatccctgtgcccgacgaccggaggctggactgcgccgaggatttcgacaccaatcacttggacaaggggttcgagtcggatcccgtccctcttcccgtcgtctacgaccgctacgacgagccgaaccacaacgagatcgttgaggtgctcgcgctactagagtacaacgaggaggctcgcatcaccgatgcgattgaaggactcatccgtgaggctaccagcaggaccgctgcgctggagtccgtcgaacaccgccgacgccaggtgctaaccgcggcaggcgaggtcgagcaggaaccaacggaaggcattatcaacgaggtggaggccgaggaggcatgcgaacactccgaagtccctccgacctcgccaccgtccaggccctcgccgacacgttcgtcgacggcaacgagctcgaccacccatcgaagtccaaggaggaagtccagcttccacgcgcggtgtacttcgcatccgacaacgacagcccgcctcctccactccttgccgtcaccaaaccaggcggaggtggtggagtcattcgagctggagtccgcgcgtcctcccgtcgtctacaacagccacgtcgagctcggcctctacagtttcacaccgacgattttcagcgtcgagcaagttatagaggaggaggtacccgtcgctatgcccaccaggtgttcgagaatggacctcaaccgcgacgcctactccgtcctcgacctccccgtggtctgcatcgtgggtgggcccaactccaacgaatacggcaccaaccgcgtcctgcaccacaccatcagcctcccggacttctcccaggagctacggggcttccaggctatcacctactaccaagccatcatcaacaatctggacgacgcacaggagcagatggacatggccatcgcaacggcgctgaggaagagcaagcaagtgtacgtcagcgtgagctgcaacatggctgacctcttccactcgcactcatgcagttgcagatgggattctgcgttacataagccaccatggccaccacctgtgcagcccgtgcagtttgtgataccgggagatggtgctcaagactggattccaccttggccatccttcagtggtgaaattgagcaactcgagttgatggtgcttattgagttaggatcctctcccactttcttcagtgatcgcttgagtcctcagttattgggagtgcaaatagtgggactgatggtgaaagttgcaaatgtagtggaactacggttactctcggtcacctcccagcagtatgcctatgcgacactgcctcccagctgcaccgaggaattcgacgccacacacttgaacaaggctaagatactcctcaacattatgggcgtcatcatccagctgaactacaggaggatctttgtacatgacggtcaaccgctggaaagcaagccgaaggagccactgcgcatccagaagatgatgacaggtgatagtgtcatgatggatgagaccgatgattcttggttcaactgccataaaatcaagctgccagcggactgtggatatgaattccaaatgaagtatggtttaattggatggttaatgggtgcactgcttggctatgctcagggtgcgaatcataagctcttctcaccgttgacagccttgcatcctcttgtcgtcgcttgctgtgaccatggtagcataatggatgcgctcaccaccaacttcatgtccaacaatctggtgcaactgtgtggctgccttctcagcgtggcagcgaacaaaggcaatttctcagcctttccttgggatcctggtgatgatggagcagttatacttggtgttcttgggtgctcaagttatccaataaagacgaagtggctcaattatcatcaaaagtgctacaggttgctgtctaaagtagcgcctcctccattggggtcccggcatacaggctgtgtggtgaacgctcagagaggaggtgaccaagtttggatgcagcccctggttcatgacttgggtcagcttaatgggcaccaacagagggagattcaagtatcatccatcatcagtgattcaatctcagctacgttatggaaaacagttgaacaaaccaatccaagccattccttcacaacaggacttgctcaaagtgtaggattcaagcaaccgtggcctccacctatggagtttgagtgcttggactgtgcatgtcctcccgcaacttggcgaatatggtcagcggcttgagggcaagccacatttcaagcggtggggaatgttaggagtggctgccatgtggggccattgctagggagcaagtgggtttctacaactataaaagtacatttgtataggctgagaaggacatcaattaccaattatcagaatac

SEQ ID NO: 15456 - DNA, 1363 bp, Zea mays
  Clone ID: LIB3060-002-G8_FLI
aacaaccggagcttttaccccacccgctttcccctccccgccaggaacaacagggctcctcgcaataattcgtccatccatggcgaagctcgtcaacaagctggtcgattcgttcgaccaccacgaggcgccggcgccggacgtcggctgcgtgcgcgccgtgctggccgagctcgtcctcaccttcctcttcgtcttcaccggcgtctccgcctccatggccgccggggccggcgggaagcccggggaggctatgccgatggcgacgctggcggcggtggctatcgcgcacgcgctggccgctggcgtcctggtgacggccggcttccacgtctccggcggccacctcaaccccgcggtgacggtggggatcttggttcgcggccacatcaccaagctccgggcgctgctgtacgtcgccgcccagctgctggcgtcctccctcgcctgcatcctcctccgctacctcagcggcggcatggtgaccccggtgcacgccctgggcgctggcatcagcccgatgcagggcctggtgatggaggtgatcctcaccttctcgctgctcttcgtcacctacgccatgatcctggacccgcggagccaggtccggaccatcggcccgctgctgacggggctcatagtcggcgccaacagcctcgccggcggcaacttcaccggcgcgtccatgaacccggcgcggtccttcggtcccgccatggccaccggggtctggaccaaccactgggtctactggatcggcccgctgctcggcgggtccctggccggcttcgtgtacgagtcgctgttcatggtgtacaagacgcacgagccgctgctcaatggagacatctgacgaccgtcgggcccccagggcagtgagcacggttcatgcttgttttctgtaaaatagttcgttacctacaagcatgatgcatatattgaccaaggtaattaataggagagggttgctgttaccctggtgggattgtgggatgtagaaattgttgctgggctttgcttttttttttacttttcctcccaaggaattttttaagagggctgggttctgtaaaggatttgtttaggctattagttagctatgtagtagaaaactagagaatgctatacgttggacgtgattttttttcacgtatattgttgtacgatatggtattttttatcttccggatgaaattggatgtacatagcataattttttttgaagcagtatttatgctatcatcgctcggggaaatatcataccctcaacaaccagcaaatggattcaaagatcttgctgttcattttaatcttaattcgtatggattggatgagattgagtcaagatcttgttgttcatttt

SEQ ID NO: 15457 - DNA, 1608 bp, Zea mays
  Clone ID: LIB3060-002-H10_FLI
gcgagctgaagcatccaggctctggaatcatcgtcgggatgtctgtgccagcatcagcccaggtgcctcacaccatacgatctgctgggagctgctgcttcaggtcgtcgcatcaactatctgcgcagaatctgggccgacatcgcaggtggcgggggaccggaaagaagaagatcctttccacccgtggcgtgcttgagtccaggaacggtgcgcatcctggtggccttacgaagagaaggaaggtcgtggagcacatcatcctgctcagagccaagcccaacatctcagacgctgaagagaaagacatgctggactacctatacacatcgcagtaccagatgcgagggatactcgcggtctcgctaggccgcatcgaggaccccaacagcgacaacttcacgcacgctgtgttcatgcgtttccagcagaagcaagacatcgcggagttccagagtaacgcgtactactccaaagttgtcgacgagcacgtaaagcccgtttcctatggctcggtttctgtagatttcgagtccgaggtggaagacgacattatacctctctttcgcaggggagaggtatggccatggcctaaatcgatcgataccgttctttcttttttctttttcttttctttttttggcaacagaaagaagaagaaaaaatgtggcaggattttaactacggcgtcgagtttatgctgctggtgtctttcttgaagactgcgtctagagaggcaacggaggacgcattagcgtctcttgacaagttgatcagccaatgcagcgcttctattgtgcaggcaacatgtggctgctgtttggatcgtccggataacgagtacagtcatgctgcagtaatccgtttcccatcatctgatgagttgaagctgttcagggatagcgaggagtacaaggatatgtgggcgtccaagttccgcccgatcgtggagagatccctgcacctgcacttcaccgttgaccccgtggggaaccagctgatgtagaccgaccgagtggtcatccctatacatgggaccaagagcatctgtactgtacagtgtaaaacagagagatgggggtaatatagaggataccgctagggtcaacaagtgacagtgctcggttacgttacattacatcacggcaaaaaaacaaataaagaaaaacaagagaaaatagcctctcttgttgctcaggagctcacagacagatagatagatagatagatagatagatgctgagcaccgaccgagttgaggtccctcttgagagttcagttgtgcagcgggtttgacccctgcggcaccttctcttagcctcggacagatcctgcacgactcgcctccagccaagtttctgccggccgtgctgcctagagatgtcaatggggacccgatacccgctaacccatggggaattcccctattagggtacgggtatgggacaaaaattgtccccatgggtatggatatgggacaaaatctccacccattgggtaaacgggtatgggtttgggaagcaataatccgaacccgattacccatgggtatttcatacgtgtacacctctcctgtttgtatgaatgagttaaggccgagtcgacatc

SEQ ID NO: 15458 - DNA, 1774 bp, Zea mays
  Clone ID: LIB3060-003-F12_FLI
cccccgaccccctccgtttgccaacgactcccggctccactgtcgctcccgctcccttccctcccacgcaagacaatggtggccgatcgcctccgcctcgcgctgctgctctccgcgtgcctctgctccgcgtgggcgcgcccacgcctcgagccgaccatccgcctgccgtccgagcgcgcggcggccgacgacgccgtcgggacccggtgggccgtgctcatcgccggctccaacggctactacaactaccgccaccaggcggacatctgccatgcataccagatcatgaagaagggcggacttaaggacgagaacatcgttgtcttcatgtacgatgacatcgcgcatagcccggaaaatccgaggcctggtgtcatcataaatcatccccagggtggcgacgtctatgctggggtgccaaaggattacactgggcgagaggtcaacgtcgacaatttcttcgctgttctgcttggcaacaaaactgctctcaggggtgggagcggcaaggttgtggacagtggccccaatgaccatatatttgttttctacagtgaccatgggggtcctggcgtccttggaatgcctacgtatccatatctctatggtgatgacctcgtagatgtcctgaagaagaagcatgctgccgggacctacaaaagcctggtcttttaccttgaagcatgcgaatctgggagcatctttgagggcctcctgccgaatgacataaatgtgtatgcgaccaccgcgtcaaatgcagaggagagtagctgggggacgtactgccctggcgagttcccgagccctccaccggagtatgacacttgcttgggagacctgtatagtgttgcttggatggaagacagtgatttccacaatctgcgaactgaatctctcaagcagcaatacaacttggtcaaggataggacagcggttcaggatacattcagctatggctcccatgtgatgcaatatggttcattggagttgaatgttaagcatctgttttcgtacattggcacaaaccctgctaacgatgacaacacgttcatagaagacaactcgttgccatcattctcaaaggctgttaatcagcgcgacgctgaccttgtctacttctggcagaagtaccggaaattggcagacagctcacatgagaaaaatgaagctcggagggagttgcttgaagtgatggcccacaggtctcatgttgacagcagtgttgagctcattggaagccttctctttggctctgaggacggtccaagggttctgaaagccgtccgtgcagctggtgagcctctcgtcgatgattggagctgtctcaagtccacggttcgtacttttgaggcgcaatgtgggtcgttggcgcagtatgggatgaagcacatgcggtccttcgcaaacatctgcaacgctggcatccttcctgaagcagtgtcgaaggtcgctgctcaggcttgcaccagcattccttccaacccctggagttctatccacaagggttttagcgcctaagaatcgtaaggtgaggcgaaatatttcagccgctccaccgcaacgaactggtttacattaccagtcctcaggggggtcctagttcttgaaccactattatagctgttccaccgttccagattacatagctatgcccaatttccggtgtacatattatagtcggaaagttatttggcaattgtattggtcgttgctgtatatattccctatagtttgttagcagatgtgtagtttgtgattccataaaaatgaa

SEQ ID NO: 15459 - DNA, 858 bp, Zea mays
  Clone ID: LIB3060-003-G2_FLI
ccaactttgcatagtcaaggtaaaagagaattgcgatgaggaaatggaatcgccaacaaagaacaatttgaatagcaacaatagcatcaaagatatttctcaagagcacaagaaattagcaaatggattcaaccttttccagaaggagctggaaagactgaaagatgagaatctgtctcctcttcttcccctagacgtcaatctaactgacccatcactcagtggtttggaaaggacattgtcacaactcgatatggcaaatgagcatttgcaaagtatttttccatcatttaaagagcttcctggttctggcaatgctttggaaagattactcgccttggaactcgagcttgcagaggctctccaagcaaagaagaaaacaaacatccttttccagagttcattcttgaagcagcacaatgatgaagcggcgatcttccaaagcttcagggacatcaatgaagtgatacaagatacgatcgagctgaagaggaggcagatggcggtagaaaacgagctaaaggagatgcagggcaggtattcagagctcagcgtgcagttcgccgaggtggagggcgagcgacagaagctcgaaatgaatctgaagaaccgaacaccatggagatcatagggaaccaccaatcaaagcgaagaaaactaacgagagaagaaaaaaaagtgtcagccagctgcaggctttgtatacaatcttgtgcgacggcagtgggatacattttgtagtgtatatatatcagctgtatcgattgtagagttgtagtgagcgagtgatatgcataaaatgtaacacagcaccttgtacaagaaacaagccttgttatctgattgttccttgccaac

SEQ ID NO: 15460 - DNA, 1198 bp, Zea mays
  Clone ID: LIB3060-003-G8_FLI
gcagcacagagcatccagcttcccccaacaaaggaatctccctccccttcctcagcagggtagccatgtttggtcttcgtgcccgcgcagcggcgcagctccagcgcccaaccccgtctccctcctccgcttcctcggcgtcgttctcgctcgcgaggctcgggtgcgcctccccgctcgccgccctcgcgcctctggcttccgcaccgccgtcgccgtcggccagggagacacagccgacctccctctccgccaggtggcctgccgcgcccatgcgtccctggggaacccgtggccactccaggccgaccacgcgcgttctctgcactgctgccggcagcgtccaaagagaggggaaagaactgctagttcagcatttgcttgttggtgaaaaggatgtcaggcttctggttgatctcgaaaagaatatcattgcagaaggagcagacttgagtgatttagccgtggagcactccttatgtccatccaaagaaaatggtggtatgcttgggtgggttcgaaggggacagatggtaccagaatttgaggaggcagcatttagtgctcctttgaacaaagttgtacgatgtaagacaaaatttggatggcatctagtgcaagttcttgctgagagggatcaatgcgtactgcaagacattgacccagaagagcttcactcaaaattgcaagaccctagttttctcgaagaagctcaattgattgatgttcgggagcctgatgaagtggagaaagcttcacttccaggcttcaaggttctaccgctccgccaatttgggacctggggaccagttatgacagacgagtttaatcctcaaaaggacacttatgttctgtgccaccatggcatgcgctcaatgcaggtggctaaatggttgcagtcacagggtttcaaaaaagtttacaatgttgcgggtggaattcatgcctatgcggttaaagccgactcctccatcccaacgtattagaggatcctcatggtgacactttagcacggctgggaacttctcatatatcttaggcattggcgttgatcaatgcttgaattcagagctcaattttatttctcatactgtgtatcagaaagttttgggagtcctagggaggaaaaatatacagctatttttgtaaaaaaaagatacttgagaaattgctttattgaacgaaccgtttcatcagg

SEQ ID NO: 15461 - DNA, 1078 bp, Zea mays
  Clone ID: LIB3060-003-H10_FLI
cgttttttttgttaagctctcgcttaacctaaacgccgggagcacaacacaagtgctcggcgaaatgacgagcgccggggcggcgacaggcgccgcgctaggcgcgcggacggcgcggtcctgcgacggctgcatgaggcggcgggcgcggtggcactgccccgccgacgacgccttcttgtgccagacctgcgacgtctccgtgcactcggcgaaccctctcgcgcgccgccaccaccgcgtccgcctcccctctgcgtcctgctcctccccaccgcgcgacccggacgcgccaacgtggctccacggcctcaagcgacggccacgcacgccacggtccaagccaggggggagcaagagcaacaagcatgaggcgactcccagctttatcgccgcggctgcgtcgtcggcagcggtccccgacctcgaggcggaggagtccggctccggtatcctgggcggtaacgacgaccaccacgggttcctgcaggatgacgacgaagaccttctgtaccgcgtgccggtgttcgaccctatgctcgccgagttctacaaccccgtggccgacgagggggagcagaagccggcctgcagcctgctgatgccgtctctcgcggaaacatcgccggagttcgcctccggcggctcggcggaggcggacgggctctccgtgtcgttccacgtcccggacatggagctcgctagcttcgccgcggacatggagagcctcctcatgggagtcgacgacgacgggtttgactgtttgggtttcttggacgaagagaaacctcaggtgaacgcggacttggacgccatagtagcgccggcgcctgaaccagaggacaagaaacggaagcggccggagatgatactcaagctcaactacgaaggcgtcatcgcctcatgggtccgtgacggcggctcgccgtggttccacggcgagcgtcctcacctcgactgtcacgagctatggtcggacgacttcacgacgggtagccgggaactcctcggcggagccgtgacaccggtgaccggtggcgagcgtgaggcgcgggtgtcgcgatacagggagaagcgg

SEQ ID NO: 15462 - DNA, 1413 bp, Zea mays
  Clone ID: LIB3060-004-A5_FLI
gcgtgtaaatcatggcgtcctccgcgttcctcaacgctctcgtcctccgatcgccatcaccgtcgctctcgtcctcgtctaaccgccgcagcaccggcgccttcgcgttcccgaacccaccgcgcttcccatgcctgcgttctgcgcgtcgactcgtccttgcgagggcggcggcagcgccggcgccgggcgatggccccgaggacgagtgggggccggagcccgagggcgggtccgctgtcacgggggccgcggtggcggaggcgccggaggcgagagaggtcgcggagctcaaggcgcagctaaaggacgcgctgtacggcacggagcggggcctgcgggcgtccagcgagtcgcgggccaaagtgctggagctcatcacgcagctcgagacgcgcaaccccacgccggctcctacggaggcgcttacgctcctcaacggcaagtggatcctcgcgtacacatcattttcccaactattcccactattggggtttggtaatctgcctcagctggtgaaggtggaggaaatatcacaaaccattgattctgagaacttcacagtgcaaaactgtatcaagttttcaggacctttggctacaacctcagttgccactaatgcaaaatttgaaattagaagccccaagcgtgtgcagatcaaatttgatgaagggattgttggtacaccacagttgaccgactccattgtgctaccagagaagtttgagttatttggacagaacatcgacctgagtccactgaaaggcatattttcttccatcgaaaatgcagcatcctcggttgcaaagaccatatctgagcagcctccgctcaaaataccgatcaggacaaacaatgctgaatcgtggttgcttacgacataccttgacgaagagctcaggatctccagaggcgatggcagcagcatctttgtgctgttcaaggagggaagtactcttctatactgagatccaaatcccgagtcgatgatcgttgaagctgaaccgtgaagtagttatactgcttatgcttttctttcttatagtattatactccgtctcaaaataagtcaatttctagaatcacttaaagtcaaattatctaaagtttgaccaattttataggaaaggtaccgtcgtctatgtttctatgacaccaaatgagtacattatgaaaattattttatggtgcattagtgacactaattcagtgccgtgctctttttatgaatttggtcaaacttaaaaatagtttgatttaagataactctgagaaattgatttattttgggacagagaggatgtttatgggttgtcttgtaaatacagttcttgtcattagagtatatgatgactaggaccggtttaatccgaattatataaactctatatatcagccaacccctttttttat

SEQ ID NO: 15463 - DNA, 1385 bp, Zea mays
  Clone ID: LIB3060-004-F5_FLI
ctagccgtacgatggcggacaccggtgacgtcgccgccgccgccgaggcctcggcgcgaccggcgggcagcagcagcacccagccgctggcggggcgcgtggcgatcgtgacgggcgcgtcgcggggcatcggccgcgccatcgccacgcacctgtcctccctcggcgcgagcctggtgctgggctacgcggcgcgcgccgacgaggcgggcgcgctggcggcgtcgctcccgcgcgcggtggccgtgcgggcggacgtctcggacgaggccggcgcgcggtcgctcttcgacgcggcggacgaggccttcggcggcgcgcacatcctggtggccagcgccggggtgctggacgacacgtaccccgccgtggccggcaccgccaccgaggccttcgaccgcgtgctcgccgtgaacctgcgcggcgcgttcctgtgcctccgggaggcggccaaccgcctccgccgcggcggcggcgggcgcatcgtcgccgtgacgtcgtccgtggtggggagcctcccgccgcggttcggggcctacacggcgtccaaggcggcggtggaggcgctggtgcggaccatggccaaggagctcgggggcacccgcgtcacggccaactgcgtcgcgcccggggccacggccacggacatgttcttcaagggcaagagcgaggccatggtgcgacacgccgtggagacaaacccgatgcagaggctcggcgagcccggtgacatcgcgccggtggtcggcttcctgtgcaccgacgccgccgagtgggtcaacggccaggtcatccgcgccaacggcggctatgtgtgatgtgatctttagctttcacagcttcttggtgtccatcgtcgttttcctttgccacgcactgtttcgccatcttgttatctttacctttaaccttattatcattctagcacaaattcataggaatattttctcgaggatcgttgggcggccggcttgacggccttgacctcggctagtggtcattgccataatgccaggtcagccttcaatcatgacagaaatagctcgcccatccaggatccaacatagaatctaagatcatctcaatatatgtaacatcacaagtgtaattatacttagagcaaggttatgtagacgggttgaagatatgccacgtcagatttatgatgatatagaagaaatagaaatagagagaaaatggaatcggactatttactaatagccagctctcaaagcaaggtgctcagtggtagccagcttaaaataaaatgctcacaaactccaagacagattgtaagaggagacaagccaagtattaaatgtacagcttgtgttagtgtatgactagtatgtgacacggcaataatacaaagcccgttataggtt

SEQ ID NO: 15464 - DNA, 1011 bp, Zea mays
  Clone ID: LIB3060-004-F7_FLI
gtcctcgcgtctcccttcccagatccatcgactcgctcgggccgcccctcccgtcgtccccgttcgaaggtgcggcagccggcaggcgagcgatttgattcgacatgaatcccgagtacgactaccttttcaaacttctgcttattggtgattctggtgttgggaaatcatgcttgcttctcagatttgcagacgattcttatttggacagctatatcagcacaattggggttgatttcaaaattcgcacagtggagcaagatgggaagaccataaaacttcaaatttgggatactgctgggcaagagcgcttcaggacaatcactagcagctactaccgcggagctcatggaatcattattgtatatgacgtgacagaccaagaaagcttcaataatgtgaagcaatggttgaacgagatagaccgttatgcaagtgataatgttaacaagctccttgttgggaacaagagtgaccttactgccaacaaagttgtggcaactgagacagcaaaggcgtttgctgatgagatgggcatcccattcatggagacgagtgccaaaaacgccatcaacgtggagcaggccttcatggctatggctgcatccatcaaggataggatggccagccaaccagccgcggccaacgctaggccagcgaccgtgcagatccgcgggcaacccgtcaaccagaagacgtcttgctgctcgtcctaagattgcctcatttctttggttccttgtgactatttctacggtttgtgcgcgcacgcaaatgtatttgcattattcctgatagcatctattcgttggccagatgattagagagctgaaaatatgttaagaacaataccatagagagaagttcctcagtgctctcgcagcttaaggagcaaacagcaacactttacttcgttttttatactttattatagccgcactgtttattactcgggctacatttgtgaacagcgactgtaatatttttttactctatattcgtagtgagatg

SEQ ID NO: 15465 - DNA, 1792 bp, Zea mays
  Clone ID: LIB3060-004-G11_FLI
cgaccttgcgtacgtacgtcgtagcggatcgtccagctcgctcgccaccgccatggacccgtacaagcatcgcccgtcgagcgccttcaacgccccgtactggaccaccaactccggcgcccccgtgtggaacaacgacagctccctcaccgtcggcgcacgaggtcccatcctgctggaggactaccacctggtggagaagctagccaacttcgaccgcgagcgcatcccggagcgcgtggtgcacgcgcgtggcgccagcgccaagggcttcttcgaggtgacccacgacatcacccacctgacgtgcgccgacttcctgcgcgcgcccggggtgcagacgcccgtcatcgtccgcttctccacggtgatccacgagcgcgggagccccgagacgctgcgcgacccgcgcgggttcgccgtcaagttctacacccgggagggcaactgggacctggtgggcaacaacttccccgtcttcttcatccgcgacggcatcaagttcccggacatggtgcacgcgctcaagcccaacccgcggacgcacatccaggacaactggcgcatcctcgacttcttctcgcaccacccggagagcctgcacatgttctccttcctcttcgacgacgtcggcatccccgccgactaccgccacatggacggatccggggtgcacacgtacacgctcgtcagccgcgccggcaccgtcacctacgtcaagttccactggcgccccacctgcggcgtgcgctcgctgatggacgacgaggccgtcgccgttggcggcgccaaccacagccacgccaccaaggacctcacggacgccatcgcggcggggaacttccccgagtggacgctctacatccagaccatggaccccgagatggaagaccgcctcgacgacctggacccgctggacgtgaccaagacgtggcccgaggacgcgttcccgctgcagcccgtgggccgcctggtgctcaaccgcaacatcgacaacttcttcgcggagaacgagcagctggccttctgcccgggcctcatcgtccccgggatctactactccgacgacaagctgctgcagaccaggatcttctcctactccgacacgcagcgccaccgcctcggccccaattacctgctgctaccggccaacgcgcccaagtgcgcacaccacaacaaccactacgacgggttcatgaacttcatgcaccgccacgaggaggtcgactacttcccctccaggtacgacgccgccaggaacgcgcccaggtaccccatcccgaccgcccacattgccggccgccgagagaagactgtgattagcaaggagaacaacttcaagcagcccggggagaggtaccgcgcgatggacccagcaaggcaagagcggttcatcaccagatgggtcgacgcgctctccgacccccgcctcacccacgagatcaggaccatctggctctccaactggtctcaggccgacaggtctctgggccagaagctcgcgagccgcctcagcgccaagccgagcatgtaagatcaaccagacaagggcgccgcgcgggggaggacggacggagctctctgtctgctttcgctcatgcatgtatcatatgcatggaaccaagacaaattactctagcagactagcacgcatactgaatcgcgtttccgcctgatcctttccctagtttagttttttttcgccccggataaaggctgctagcttggttgtaataatggctggctgtgtccagaactcttgcagaagacagaactcttccaaaacaacaac

SEQ ID NO: 15466 - DNA, 934 bp, Zea mays
  Clone ID: LIB3060-005-A12_FLI
tcaaccgaatgatcgtagcctacacttatccttctaatgctatctatatatgcttgattttgtgtagggttgtctccagaaagcttgcttgttacttatatcccacacacttgcgcgcacgcaacccggcctttgtccctctcttgcctctcactgctgctgcccctcgctattcttctctgatcgatttctgtcatggcttcattctggttcagctgccgctgtagcgggatgacccaggtttgccgcagatgacccaggtgggactatgcggtggccggcagccccagatttggtgggggatgagataggaggtggctgcatggcctttcttgttggttttctatcgatttcctatgttgtgctctctaatcctctcagctctctacttttggctaggcgtcaaggacgcccacgcgatgccttaaaaacactgcttatgtgaatattgtttcaaaatacgtctgcttgattgtttagcatgaattgagtcgatgtgagtgcctgtagtttctttgctagtccaaccgacgtggtaactgatatgttttatgtatttcaggttggtacaggatattttctaactgggagtggtttaacgtggctagtggagcaggctgtacattttccctgacatttactgggtataaggaatagggggccatcacttggcacaagacaaatacatgtgaatgttttgtgtgtaccatcattgtatttagggttcgggtgttaatttagatgtttatgaccctgatgtttgatggaaaataaattattccttgatgaagcggcggtcaatgaacagagcccttcggttttcagtcggagctactgacccttcatctgttcctgtggtgaagtggttgctgccgcttccgtggtgggaccaaccatgccgaagtcgtgtctagcagagggcaatcaatctcct

SEQ ID NO: 15467 - DNA, 1077 bp, Zea mays
  Clone ID: LIB3060-005-B11_FLI
caagctgccccgcagcaacgaacacgaaccttggcagaacgaagctgaagtagttcgttgtgaacccagtatggcaaacgcgccgaggatcctggccctcggcctgctgctagcgctcctgtgcgctgccgccggcccggccgccgcgcagaactgcggctgccagcctaacttctgctgcagcaagttcggctactgcggcacgaccgacgactactgcggcgacgggtgccagtcgggcccgtgccgctcgggcggcggcggcggcggcggcggaggcggaggcagtggcggtgcgaacgtggctaacgtggtcagcgacgcgttcttcaacggcatcaagaaccaggccgggagcgggtgcgagggcaagaacttctacacccggagcgcgttcctgagcgccgtcaacgcgtacccgggcttcgcccatggcgggacggaggtggagggcaagcgcgagatcgccgccttcttcgcgcacgtcacgcacgagaccggacatttctgctacatcagcgagatcaacaagagcaacgcctactgcgacgcgagcaacaggcagtggccgtgcgcggcggggcagaagtactacgggcgcggcccgctgcagatctcgtggaactacaactacgggcccgccgggagggacatcggcttcaacgggctcgccgaccccaacagggtggcgcaggacgccgtgatcgcgttcaagacggcgctctggttctggatgaacaacgtgcaccgcctgatgccgcagggcttcggcgccaccatcagggccatcaacggcgccctcgagtgcaacgggaacaaccccgcccagatgaacgcgcgcgtcggctactacaagcagtactgccagcagctccgcgtcgacccagggcccaacctcacttgctaggccagcagctcctgctagctcgtccacaataaatgctcggcgtcgcaccctcgcgaaaccaagagtttactactgactagtacgagctagctagcatgcagtaataataatcatcgtaataataataataaaacgacggggctgagccactttgttcgacctgaatgaat

SEQ ID NO: 15468 - DNA, 791 bp, Zea mays
  Clone ID: LIB3060-005-B8_FLI
ctccaatctccatccttccatcttccgctcccttccctgcttgcgctcggcacgcaggcgacctcggcggcgcttgggctcggcctctcagcgacggcgtcagcagattcccctcctgcctctcgccagtcccctcgcctctggtcctctgcgaaccggccggtgactctgcgaaactattccagcacaggtacccaagtatggcggcaagacgcaatgttcggtactcgcctcttccttcagaggacggggatgacagcaattttattaaagaagatgttgacctccgatacacttacactccgaaatcgtacagaaggatcccatggaagtcaattgccctggcattgttcctcctcctcctaggaacttcacttctctttctttcttacttcatattcacaggtcacatggagggtgatagttctcaggcatatggtctcttgttcctgggtttcctttcctttcttcctggtttctacgagactcgagttgcttactattcatggcggggagcaccagggtacacttttgcatccataccagattattagcctttcagtttgcgctgctgatgcagtaaggataatgaacaagcaaacaacttcaaactttccttgggaaccaattttagtgataaaagagttaagcatgcatatgtagtggctcaaatgattgttgtgtttataggatgttattgcttcgtcggtcagtaaaagaataattccttgtgatattgtgtaagagcaaaggttgattttgcaatttcttggtatttccttgtcaaatat

SEQ ID NO: 15469 - DNA, 807 bp, Zea mays
  Clone ID: LIB3060-005-C4_FLI
ccaagatctgtgatggcatcctcaagcttctcgaatctcaccttgtgccgtcttccaccgctcccgagtccaaggtcttctatctcaagatgaagggtgactactacagataccttgctgagttcaagactggagctgagagaaaggacgctgctgagaacaccatggtggcatacaaggctgcccaggacattgctttggctgagcttgctccaactcaccctattaggcttggactggcactcaacttctcagtgttctactatgagattctcaactcacccgatcgcgcctgcagtcttgcaaagcaggcttttgacgaggccatctcggaactggacaccctgagcgaggagtcctacaaggacagcactttgatcatgcagctccttcgtgataacttgaccctatggacttctgacatctcggaggaccctgcggaagagatcagggaggcgcccaagcacgactcgagcgaggggcagtaaagccggctttacgtgcctagaagctagtacctagtgtttgctgctgtctaatgacactatgcaatgtgatctggaccctggtttcttgggtgcgacgcttgtagcagccgtgttatgattatttgtcgggaaaatttgggggctccccatatgagatgctgccgggcaagacctcggcatcccacctcgtttcaggcgggggacgctggagcgtggtccggttgtgttgggaagccccttaaactgttgtcgcttgcattttaaccttttcatcgccgttcagtggtcctaaatctatggctcgtctcagtggtctagt

SEQ ID NO: 15470 - DNA, 1302 bp, Zea mays
  Clone ID: LIB3060-005-E4_FLI
ctttccccaccccgcatcgtcggacaccctccaaagtccaaaccctctccccgccgcatcgccgccgccggaagcgcctccctcgatccagatccaggagatatgcctcgcaatgatgatcgctatgggaatacacgcttgtatgttggaagattgtctccccgcacccgttctcgtgacctagaataccttttcagcaaatatgggagaattcgagaagtggagttgaagcgtgactatgcattcattgaattcagtgacccccgtgatgctgatgatgcacagtacaacctagatggcagggacgtcgatggaagccgcattattgttgaatttgctaaaggggttcctcgtggttctggtggttcacgtgattacaacggaagaggacctccaccaggaacaggccgttgttttaactgtggagttgatggtcactgggcaagagactgtcaggctggtgactggaagaacaaatgctaccgttgtggcgaaaggggccatatagaaagaaattgccagaacagtccaaggaacctcaggcgtgagagaagctattcacggtctccatccccacgccgaggacggggccgcagccggagctacagcagaagccggagctatagccgatccagatccccgtctggatctcctaggggtggacgccgagaccgtgatgagaggagatcaaggagtcttagctacagcaggagcgcaagccctaggcgttctgtgtcacctgtaaaggaaaaggagcgcagccgcacacctgatggcagtaggagccccagcccaagggacaaggtgagcccaccaccaaaggataatggtgcccacaatggctcggaccgtgaagacagccctgggggcagggagatgagcaagaggagtcggagctcgtctgatggctaccgtagccctgtgggcaatgggcgcagcccgagccgtagcccaagccccaaggtcaacaatggtgatgacccaagccccaagggcaacaatggtgacgacccaagccccaagggcaacaatggtgatgacgagcaccgcggttcaccaagaggaagtcagtccccctgaactgaaaaactccccgtgcaatttggggagcagtgtgcctgatttgagaaaacaaactgtattttgccatttctcagacttgtgatctttttgagcaagaaaactcggtgtaagaatttgttgccctcgggtgtaagacagatttgtggtatttgagcttttcatcctgccaaaagctgaatattcattcaattgccaagtatctcgagtttatctgcttgg

SEQ ID NO: 15471 - DNA, 1429 bp, Zea mays
  Clone ID: LIB3060-006-D6_FLI
ctggaccgaatcgtcagccgtgcgtgccagggaacactaacacgccatgaaaaaactggcagagctcatgctcatcctaggtggagctttgcgcgtgtgccatgtgttgctggtggtgctgctgccgctgcctggagtgcatccataacatcgtccctcccctcagcagccttcccttcctccgcttctccggcccagctctcccaggtggaggtggaggtggagcagcggcggcggtggtggcttctccacctgtagtctccatggcgtccatctcggtccccagcccggccccttccgcgaccgaagacgccgaaaacatcaggaaagcagtgcaaggatggggcacggacgagaaggcgctgatcgagatactgggccaccggacggcggcgcagcgcgcggagatcgccgtggcctacgagggcctctacaacgaacccatcatcgacagactccactccgagctctccggcgacttccggagcgcgatgatgctgtggacggtggacccggcggcgcgtgacgccaagctcgcccacaaggccatgaagaagcagggcgagcggtacgtgtgggtgctcatcgaggtcgcctgcgcgtccgcgccggaccacctcgtcgccgtcaggaaggcctaccgcgaggcctactccgcctccctggaggaggacgtcgccgcgtgcccgctctacaaggacccgctcctcaagcagttcttggtgcggctcgtgagctcgtaccggtactccggcgagctcgtcgatgacgagctggcgagggcggaggccgcggagctgcacgacgcggtggtggcccggaagcagccgctgcacggcgacgtcgtgcgcgtcgtcagctcccggagcaaggcgcagctgaaggcgacgttcgagcggtacaggctggaccacggcaaggccgtcgacgaggtcctcgaggaacgccgcagcgaccagctcgcggcggtgctcaagacagcggtgtggtgcttgacgtccccggagaagcacttcgcggaggtcatccggagctccatcgtcgggcttggtacggacgaggagtccctgacgagggcgatcgtctcgcgcgccgagatcgacatgaggaaggtgaaggaggagtacaaggccaggtaccacacgacgctgaccagcgacgtcaacggagacacgtccggatactacaatggcatcttgctcactctggtcggccctgagtgaatgaccatggatggacgatggatccatataggttgaagtcattgtttgcgacctgtagtttgcttgaacaatatcacactcgtttttgtttgattgaacgaaacgacactagtgttgtttgttcacatatgtgtacagaactgctgagtgaaatggtgatatttgtggtgatcgaattggtgaaaataaaacgccagatcgatggg

SEQ ID NO: 15472 - DNA, 1182 bp, Zea mays
  Clone ID: LIB3060-006-F11_FLI
caacctcagcccaagaagtctgcatgggagactttcatgttcaatctgaggtggaagaatatccttgtgttaatatctgtatggtcattgttcttggtgctgcaagttctcaagaataattcaaaatcatgcagctctttctactgggtgataaacgttctgcaggttccagttgcggtaagtgtgttcttgtgggaggccatgcagttatgtagggagagtcatgcacgacgtatgaatgggaacctggaatgtgtgtgtgaggcctctattgagtggtcaccagcacaactgatcttttgtgccttttgtggccttctcggtgggactgttggtggccttcttggatctggtggtgggttcatccttggcccacttcttcttgagcttgggtgcatacctcaggtggcaagtgcaacagcaacattcgtgatgatgttctcctcctccctctctgtggtggagttctacttcctgcacagattccccctgccttttgctggctacctcatcttcatttccatattggctggattctggggccagtgtttggttaggaagatcgtgcatgtgctcaagagagcatcgcttattgtcttcatcctctcctctgttatcttcgtcagtgctcttacgatgggtgtcgttggaacccagaagagcatttcgatgatcaacaatcacgaatatatggggttcctcaacttctgcgagtaactcaaacaccatcagactgtcgatccgtccgggagaatccaggccaatgcctaattgacctcatctccctcaaaatctagaagaataaagtcgccaagtatgtacacaggttagctcctcgctaacatgtgcgcatttaggccgacagagtcgctgtagtgaattcagctcgtgttagctcctggctaacgagcagaccatatggctttagttttgtggaagtgggcgcgatttcgtcatgtcatgcatgtgttagctcctggctaacctgcaaatgcgtgtgttggtgcaggtttttgtcacgtctgcgtcagctcctggctgaccagcagttgtttgtcgttcattctctgcgtcagctcctggctgaccagcagttatttgttgttcattcttgcgctagcaccaggctaggctgcaaaactgcaaatatttgttgaacattgtaaatatcagtcaattccc

SEQ ID NO: 15473 - DNA, 953 bp, Zea mays
  Clone ID: LIB3060-006-G6_FLI
tcctgctctgctagtgccaggattccgccctatccatcccatcaacctcagctaaggtccccagcggcggcgaggcgatggcggcgcctgtgacggtgtacggaccgatgctctcaccagctgtggcccgcgtggcggcctgcctcctggagaaggacgtgccgttccagatcgagccggtggacatgtccaagggcgagcacaagtcgccgtccttcctcaagctccagcccttcggacaggtccctgccttcaaggaccacctcacaaccgtctttgagtcaagggctatttgccgttacatatgcgaccagtatgcggactctggtaatcaggccctcttcggcaagaaagaagacggcgcggttggccgcgctgccattgaacagtggatagagtctgaaggccagagctttaacccaccgagcttggctattatcttccagctcgcatttgcaccgatgatgggccggaccactgacctggctgtggttgagcagaatgaagcgaagcttgcgaaggtgcttgatgtgtatgaccaacggctgggggagagccagtattttgctggtgatgatttctccctggccgaccttgtgcacttgcccaatgcagatttccttgtgaacagaaccagcaaggctggcttgatcaccgagagaaagaatcttgctagatggtgggatgatgtctcgtcccgacctgcatggaaaaaggtcactgagatgcagagcacgccgaggccctcttagagcttttttttgggtttctttgagcagcttctgatggcaattagttgcattctccttgttttgtcatcaagtccttgtctgtaccgtttcctgttctcttatttatcggtcttaattcttgatctatgtatggtttggatctgttcttctggtcctttagtttatataagtacctacaattcttcatatggtttgccatcc

SEQ ID NO: 15474 - DNA, 1023 bp, Zea mays
  Clone ID: LIB3060-006-G7_FLI
gccgcgggccgcatcgcgttccggcgcccgtggaacacgccacagccggaagcgctgcgcctgcgcctccgcctgcgcgcgcggggcgtccggcgtgaggacggcggcggcgtgcgcacggaggagcaggagcagacagcaccgcggacgttctacgacctgctcgggatctcagcggatgggagccccgatgatgttcgggcgtcctacaggcggctggcgctaaagtaccacccagacgtgtcccctccgggcgccgcggccgagaacacgcgccgcttcatcgaggtgcaggaggcctacgagacgctctccgacccaagccgccgcgccagctacgaccgtgcactcgcccgcggcgtctgccgcctcgccttctccgggcgccgttcccaatcccaccacgcctactaccattaccaggaacaggaagagggatctgggtggagaaggtcctgggaggaccagatcgccgagctgaagaggaggagcgtggcgaaggattcagaagagaacctgtcgtggggcgctcgcatgcggagaagggccgaggcgtcagcagcggagtagctgcgacaagcgagccttccaaatgcagctgtactcgtacgtagcatgtggagcgaagcgaaacggaatatatttttctggtgggtacaatttggtctgcaaggtttttaaggcgtggatctaaagatgtccagatggaaaccttcagagacagacctgttacgagaattggacgtgtagcagtagtagctgtagcggtggcatctggccaggattgaggaggaacagcagcacctggatggagtgtggtggctgctggctgcagaccaacacccttggccctggctacataatagttgagttcctgcctggccacctgggcctggctggctgtatgtaaacgactcaactatgttactccttgagactcctgttacatctgtggcaggtccagtgtaaatgtaaatactacaagcatcaataacgaaggagcaagccagttgttcttccaat

SEQ ID NO: 15475 - DNA, 3945 bp, Zea mays
  Clone ID: LIB3060-006-H7_FLI
gccgaaagggtttctccaaaaccctctccaacaaaatcgcaaccgccggcgaggatcggcgccgccatgtcccagatcctccgccaccgcctgtcggctcactaccacggagtctgcggccactgctgccgccgcctcagctcctccgtctacggcggcggcgggagtcgccgcgccgtcgccgcgccgccgcaggacggcgagggcagccgagcggtgagggtgtctgtgtggtgggacttcgagaactgccacatccccaacggcgtcaacgtccaccgcgtcgccccgcgcgtttccgccgccctccgcgccgccggcatccgcgggccgctctccatcaccgccttcggggacgtgctgcagctcgcgcgctcctcccaggaggcgctcgccgccacgggcgtctccatctcccacgtcccaagcagtgggaagaatagttctgaccgctcttttatggctgatcttgtctactggattgctcagaatccgccaccagttcattttttccttatatctggcgatagagattttgcaaacatcttgcatcggttgagaatgagcaactacaatgtactgcttgcttgtcctagtagtgctaccagtgtactgtgcagtgcagcaacaatcatgtggccttgggaaggcttagttagaggagaggatttgtcaccaaaacgttttaacaacccgccggatggtttacatggatcttggtatggtcactaccgaggagcccttgacgacccccccctggagaaggaatcagaggaacccatcaaggtagcatctgttccgaagcagttttcagtaccatctaataccaagcactgcccagttcccaaacatgtaaaaaatgcaattctggaggtactacgttcatatcctgaaggggtgaacatctcactcctccgaaatcagcttgtaaagaacaaaattgatctgggtacaaatttctttggccacaagaaattctcttcctttcttgaatcaatgccacatgttgttaaattattaggttctcgattaggtgaaaacgaactatatgcaattgctgccaacaaaaaatttatgcagcctggtgatggggctcttgatgaccccttcctggagaagggagcagaggaacccatcaaggtatcatctgattcccagcattgttcagtaccatctgataccaagtctagttcaatccctaaatatgtaacagatgcaattctggaggcgctatgttcatatcctgaagggatcaacctttcactactccaggaagagcttgcgaagaaaaaaatttgtcttggtccagatttttttggccacaaggatttctcttgccttatacaatcaataccagatattgttgaattagtatgtcctcaaactggtggacaactatatgcaattgctgtcaacagaagatcactgcagcctggtgacggaagtactaagacccttagctcagctcaaggtaatgccagggagaataacccaactggaacagctcacagtaataagaagaatacactaagttctcttcgaagcatttacaagagcagaagcttcacagagacactaagtgaacatccacctacattttctgtcttaccttccccgtcaaatgggctatctgaggaccaaattgagtgcccagtggtggatgtgaatgggtcgacagagtcaccagcaaagcacagggaagttggtgaaatgactacccctggaactccctcttcctcaggggtggaaaatgctgctaatgaatatggcttctttaaaaggatctggacaatgtggaatggtcccaagaatgttaagtctgaggtttctcaaaattgtgaaagcacttctgctgaagtgattgatgatttgcaggtttctcaaaattgtgaaagcacttttgctaaagtgattgatgatttgcgaactcctttggaagagtataatggtgatcaccgtataaagcttttgaggaggatacatgaaacctcttccaaaaatgatcgctcagatggtactgagggcatgttagcagtaagtgataatttatcgatttcattaggtgatgatcattctgaaaaaataaagagagatccatcaattcctgaaaacccagaaccatgcagaaaacctgctgctgtttccatgattaaatctggaaaaaaggatgatatttctgaaatgaataggggcatgtttaactgggcttcaaggtggtggccatttgggaaatcagatgcagatagtagtacaaccaacataaatgccactgatgaaccgaggactgactctattgaagaatttgaatcttcaaacgctccaactaatggaagtgcacaacaggtggttcatgaaatatttacaaagcctgacttgtggtctgttttggagcaacagttatcagaacctcttgggtctgaggttgttttgaaagcaaagacaaggaagagaagaatacaaatgaggtccatatattgatttcattatgtgttgtgtagtaaactcagcatcgcctcacattttgaaaattatgatcaaccattgcttgcttgagcatccatcatataataattcttctatatgtttccttctgcaagtaaaaaggatttatgagaaatgcaaaatcatgttttggatagagcagttattatatgattgcttttcttggccaggcaggaattggcacacagattgcagaagttaaattgctggcctttgaaaggcctccttgataaagacctgcatcacctggtacatctgttaatttctgaaaagaaatggattgaagaaacttcttccagaattttccctttccgtcttaccctccctcgcaagagaagatgtgtcccatcaagttccagcaaatccaacggcctcagttacattttttcaagtgggaagccacaaaagggcagatacgttgacaataacagtaggaaaagcaggtccctcactagagaggagatactatcagattgtcacaagctggtgaaggagcttctttctgagcatgaatatggattcaacatcggaattttcaaacgccgtttttcccaggagtatggatacgagcttgaacaccggaagctcgggtatctggaccttgaaacgctgctgcatattatgcctgatgtaagggtgaaattcccaagggtcatgcgctcagaacacgggaacgggcaggctggcagcaagggagacggaaaccgaagcagcggcgatgacttgatctgggaggagcttggtcctgtatctgccacaactgaaaccgccgccgccgccgctgatgcaggggccgacaaggaaacatgctatcgtcctcccactccttcagacgacgagttctcggacagcgacagcataaaagaccggcagcctagaaggaacgccgagcagcagagctcgcttctccagatcattggagcttggaacagcagcaagggtggcgacgtctctaacaacaagcctcaggacatcgacgggttggtggactgttcgagaagcagcccgggcagtgctggcaccagcgcagcttcaggaaaggtgcagacgttgtctccgaagctaccgcacaagcagtactccttcgtgtcggactccggagaggagagcgatccggataagctggtggagagcgtcttggacagcctgcagaaagcacggggcggctcgaagctgcacaactgagcgtctgctgccatcgaattattgtttttgcaacctaacgagtcgtgcttatggtggtggccatggctgactgtcaaggacagcggcgcctgcaagcatcagccggagagactggtgaataaagctcgtcttttacttggactaggccgtagtacaatgggaacagtccttggtaattggtatgttaacattggctagagaccgcctcccatttctgtttcttgtttctttcttttcatgcaggatggttgtccgccc

SEQ ID NO: 15476 - DNA, 1543 bp, Zea mays
  Clone ID: LIB3060-007-A11_FLI
agcccgccagagagacaagcagccaaatcaggcctttatttacgatccggccggccggaatctagaccacctctctctctctctcctcgtacgtagtcgttgagtctttgaggtcgaatggcgcccgtctacgctgccgcggaccacggcaccaacggcggctccggcctgaccctgaacccggtggcggcgcgccgggcgctcagcctcgtcggcgcgcccacgccgtcgtcgtccacgccgccggcgtacgggagcatcgtcaccgtgctcagcatcgacggcggtggcgtgcgcgggatcatcccgggcaccatcctcgccttcctcgaggagaagctgcaggagtacgacgagcggccggacgcgcggctcgccgactacttcgacgtgatcgccgggaccagcaccggcgggctggtcaccgccatgctcacgggcaagaacaaggacggccgcccgctcttcgccgccaaggacatcaacggcttctacctcgaccactgccccaggatcttcccgcccggcggcggcggcggcggtcctctgggcctgctcaagaagctgtcggggcccaagtacgacggcaagtacctccacgccctcgtccgggacctcctcggcgagaccagggtcagccaggcgctgcagaacatcgtcatccccaccttcgacatcaagctcttgcagcccaccgtcttctccaaatacgatgccatcaccgatgtttccaaggacgccctgctgtcggacgtgtgcatcagcacgtccgccgcgccgacctacctcccagggcaccagttccagaccacggacaaggacggcaaggcccgtgccttcaacctcatcgacggaggcgtcgcagcgaacaacccgacgctgctggcgatgacggacgtgagcaagcagatcctgctgggcaacccggacttcttcccgatcaagccggcggactacggcaggttcatggtgctgtcgctgggcacaggctccgccaaggccgaggagaagttcgacgccgtgcagtccggcaagtggggcctcctggggtggctcagcagcaaggacaccacgccgatcatcgacagcttcagccaggccagcgccgacctcgtcgacatccacgcctccgtgctcttccaggcgctgcactcggagaggcagtacctccggatccaggacgacgagctcacgcgacagacgtcgtccgtcgacgtgtccaccgcggagaacctcaaccgcctcgtcgacgtcggcagggggctgctgaagaagccggcgtgcaaggtgaacatcgagacgggcaagaacgagcccgacggcaagagaggcaccaacgaggatgaactcgtccgcttcgccaagatgctcgtacgggagcgccgggcaaggatccagaaaaaagaagccagcaacacactctagacagagctagctagcactagcagagacaccaatgcaacacaaagtgtctactacatcatagcctaattaagcctcatgtgttctacaatcagtcatgcatgttatgtgtatccacttc

SEQ ID NO: 15477 - DNA, 1616 bp, Zea mays
  Clone ID: LIB3060-007-C10_FLI
cacgctcaacacccgccacgacgcggccatggtgtccgtcctgctgaaacactcggaagccaaggtcttcctcgtggagtcgcagttccacgccgtggcccgcgacgcgctcaggctcctcgccgacgccaaagacaggcttcctctcgtcatcacggtctctgaccccagcagcagcagcagcaccggcgacggccgcggcagcaacgacggcagcgtcgcggtcgcggagtacgaagcgcttctgcggagcgcgccgcgcgacttcgaaatccggtggccggcagacgagcgcgacccgatatcgctgaactacacgtcgggcaccacgtcgaggcccaagggcgtcatctacagccaccgcggcgcgttcctcaacacgctggccacggtgctcgtcaacgagatggcgaccatgcccgtgtacctctggaccgtgcctatgttccactgcaacgggtggtgcatggtgtgggccaccgcggcgcagggcggcacgagcgtctgcatcggcagcgtgtcccccggggtggtcttcgaccacatcgtgcgccacggcgtcaccaacatgggcggcgcgcccacggtgctcagcatgctcgcgaacgcgccggcggcggatcggaagccgctgccgaggagggtccgcatctccacgggcggcgcgccgccgccgccgcaggtgctggccaagatggacgagctcggcttcgacgtcgcgcacgggtacgggctcaccgagacgtacggcccggcgacgacgtgcgtgtggaagcccgagtgggacgcgctgccgcccgcggagcgcgcccggatgaaggcgctgcagggcgtcgctcacgccatggtccaggaggtcgccatcaaggacccggcgagcatgagacgttgccctccgacgggcgcgccgtgggcgaggtgatgctccgggggaacacggtcatgggcgggtactacaaggacgcgggggccacggaggaggccatgcgcggcgggtggctgcgcacgggcgacctcggcgtgcgccacccgaacgggtacatccagctcaaggaccggtccaaggacatcatcatctcgggcggcgagaacatcagctccatcgaggtggagtcggtgctgttcgggcaccccgcggtgctcgacgccgcggtggtcgcgcggcccgacgaccactggggcgaggcgccgtgcgcgttcgtcacgctcagggacggcgcgagagccaccgcggacgacatcatccgcttctgccgggctcggctgccgcactacatggcgcccaggacggtggtgttcagcgacctccccaagacttcgaccggcaagacgcagaagtatctgctccgggagaaggcgagggccatgggaggcctgcgcaagccagatcgaagcaggctctagttgacctgttgctgggaacagtccactggctgcattcctggcagcctgctgatagttttatcttggtcaactacgcttagccatcatcgatcaaggggcagcattcagtcatgccctcgtgctttcacagccaccacgttgcacatggacctgtacggtgaaatagtattgcaggacttggccattcatggaatgctttattggatcatccc

SEQ ID NO: 15478 - DNA, 1289 bp, Zea mays
  Clone ID: LIB3060-007-C2_FLI
ctccctttataatttatccatccatggcttcctccaattccaacagcagcagcaacccgctggaagccatgggcgccttcttctcgaagcaggtggaccggcggaagctggtgaccaccgagaagcgggcgctggccacgcggctgtcctcctccggcgacacgttcccggggtcggagcaccggccggcggaccggaagcggtggatggcggagctgggcgccgacaagctgcgcgtgcaccaggtggtgtggcccggcacgcacgactcggccaccaacaagatcggcgtgccgctggtgacccgccccttcgcgcagtgccagtccatgtccgtgtacgagcagctggccatgggcacgcgcgtcgtcgacgtgcgcgtgcaggaggagcgccgggtctgccacggcatcctggcgacgtaccccgtggacgtggtgctggacgacgtgagccggttcctgagcgagaccgagtccgagctggtcatcttggagatccgcaccgagttcgggcacgaggacccgccggggttcgacaggttcctggccgacaagctgggcgagcacctgatcccgcaggacgaggcggtgttccacaggaccgtcgcggagctgctcccgcggcgggtcatctgcgtctggaagccccgcaagtcgccgccgcccaggcccggggacccgctgtggagcgccggctacctcaaggacaactggatcgacacggacctgccggagaccaagttcgagagcaacctcaagttcctggggcagcagccgccggtggccggccggaggttcttctaccgggtggagaacacggtgacgcccaaggccgacaacccggtgctgtgcgtgtggcccgtcacgaagcggatccacggctacgcgcggctcttcatcgccgaggccttcgccaagggcctcggcgacaagctgcaggtcttctccaccgacttcatcgacggcgacttcgtcgacgcctgcgccggagtcaccaaggcgcgcgtcgatggcaccgcgtgacgtgacggcttcgatcgacgagcccgtacgtacgtacgtgtgccagtgttgcggccgtactgccattgcagtgtatgtactgtgtagtgtacactccagtcgtgcagtatatttgcatacaggaacaggtaaatgcgatgtgtatatacgtattcattcatgtgtaacgtgtgcgtcccgtacgtgtatgcagtgcactgtgtctagtgatgaattgctcgtgggacgagcaaaggaataaacatatgcagttacggaattttc

SEQ ID NO: 15479 - DNA, 1319 bp, Zea mays
  Clone ID: LIB3060-007-F12_FLI
cttctgcattgcctgggattccaaagggtagtgcaaggcaactgtttcagcgccttcaaggaccgtttgaggaagggactctcaagagacactttgagaaaataatattgcttcctcaaaaattgcatcaaactcgtagaaaggatgagatccatgagctgaggcaaaaaaatccacttcatacttctcatggttttgcactttctcaagcatgtccagggaacttatctggtgtcattttgacgccacttgacctttgcgatggaccttcgaactcggatgcactttctattggttatacaggatccaacacaagtgggttaggtcttccaaacaataactgctctgttggtgctactcttcctacatcaaatatgaacttaagattaccaggttctcctggtatggttttgggaagcaattcaccattgcctttgaatgctccctctagggatgttcagaggtatggtgtgcctagaccaacctcgatacagggtgacgagcaatcaagaattcattataaccagatggtaaatggcagaaaccttcagcaacctggagttcctgttcctggtgtgttgccatctggtgttgatcagggtgcccgaatgatgccacctgcccatggtgttggaatcatggctggactaaatcgaggcacaccaattactaggccaggttttccaaggcttggttctcttggaaacatgtcacccaccaatggtcaaggcttaaaaaatactgtaaacgttcatcctggtgccatactgggacctggaagtactatgttgaggccacgtgacccaatgcagatgcttagacctggccagaattcagaggagcatagacagatgatgatgccagagtttcagttacaagtctcgcaaggaaataatcatgctgtgcatttcagcggtccaccatattccaacactggggcatcttcacctgttcaatctttacctgcccagcagtcccaaccacatcagatgccacaacaatcacacatgtatggaaacacacaccttcttcatacccaaggaacaaaccagtcaaatccacagcaacagcaggcttatgctatgcgcttggccaaagagaggcatatgcaacagatgatgccccaacaacagcgtccattatctgttgccagtgcagtgtcagctgtacagaatggctcaccgatgcaacagcagagccaaggatctgcaacttgcgtaatcccagctacacagacacaacataagcagcaatatcctgcacaaaatgcacaaggtagctcaatgcttccccatcagccttcagccaccactacacat

SEQ ID NO: 15480 - DNA, 960 bp, Zea mays
  Clone ID: LIB3060-007-F4_FLI
taacctccttgcagaccaacgtaagagaatcctgaattttaatcaacgtatagtgattgcccttgatgttgctattgcattgacttatctccatttgtgttctggggacgctttaatctgttacaacttgaggacgtcaaacatcctactgacagagagctaccgagccaaagtgtgctgttctgaactgtcaaaaagtggtaatatcgtgctattaaagggaacagggggctacattgatccagagtacttggagacctcagagctcactgccaaatctgatgtctactcttttggaataatactcttagaaatcatatcttctcatgggccacaagactgggatgtattgatgaaccaccggcaaagcagtgttgtacaatgggctcttgagaaattctatgacgacctcatgaatgagatattggattaccgtatggaggatcgcgtggatggagatgtggtcagggacttgctcagcttagcgttgagttgtgtggtttcgcgtggcgctgatcgcccaagcatcgtagttgtcggggagcgactgtggaaaatatggcaagatcatcgaagaaacgtaggggaacagcacgagtaccaaggaagctgggcagaatttatcgaacaagagggaatcctgaggcatcacaagtgtgtgctcaagagaagttgggagccttcaacaacgcagcaggattggtctgtgtatgttaggcagattgaattagttcaagaagcttacgataccccatggggagaggaaattttttcggggtctgtttcattggacgatatcacagtatattctcggtagaaagcttcaatacgattatattactcctgttttctccgcggtattacatgtgtagattggaggacaataacctatttgttctatttctgtttcattggacgataaatcatagtgtctcctcggtatgaactcttgaaagtttc

SEQ ID NO: 15481 - DNA, 1461 bp, Zea mays
  Clone ID: LIB3060-009-D6_FLI
gcacaagcaaaacacaaagaagctcaagaaagctgaggcaagcccagaagaagaaaaaaaaaactagaaggagagatgggaagaagcgaaggcagcacaagcccagcggctgggggagccgcctgcgcgtgcgcggtctgcggcggcgccgcggtggtgtactgcgcggcggacgctgcggcgctctgcagcccctgcgacaccgctgtgcacgctgcgaacctgctggcgtcgcgccacgagcgcgtgcccctttccatggtgactgctgcatccggcgtgtacgacgacgacctcttcgcgcccgacgacatcgacgcggcgtcgtcgtgggcgtcggcgcctgcgcaggggcagggaagcccccagaacgggagctcgtcggcgagcttcaccaccggcgacagcggcgcggagggcaggggcctgttcgacctgctgtccgacgtcgacttcgctgcctgtgtcacgggcggcggcggctacctgccggacggcgtggcgcccgtcgtccatcacggcgctgcacctctgtgggcgcagcccggtctggccgccgccgcatggacggccacgtggtcgcccgctgtcgtcgtcccgggcgccgccgtggtcgccgcggcggcggcggagcgggaggcgagggtgcagaggtaccgcgagaagcgcgagaggcgcaagttccagaagaccatccgctacgcgtcccgcaaggcctatgccgaggcgcggcccaggatcaagggccgctttgtcaagcgcgccgccggcacctcctcctcctcctcctcgggtgccggcacatcggacagcatcgacgctgctgccaagttctggctctccttctccgacgacgccagggacggcttcttcgtggacgccggggcctacggggtcgtgccaagcttctagaaagtttgtgccttgaaaatttaggggtcacactcgcatcacagcgggcagcgcttctgggcttctggcggtggcgttcgcccagtttgaagcaagttaagcaaccgcccttctcgtttgtgtcgtgtcgtctcgtcattcatgtgagcagcatccgtggtgaaattccgccatcgctatttttaaatgatggcgcggaatttcgatgggtcatcaccagttggtgaacgaactaggggatttattgtgtcttgtaagatacaactttactgggttgtctatcaaattctgcgttggctcatcgtcatcgctttactggggctaacaatatagttgtggtggaaatctgccatccatgcttccatagcaagctcttagatgatcggaataaaaggggattttgatgggccaatcaggaagtgggtttggttaatctatatatggagcatatagcttatgcagctgttcatccacatggtttcagtgttttgactttctatccaagttgattaattccatatatggtggtcccaataatcttatgccact

SEQ ID NO: 15482 - DNA, 2881 bp, Zea mays
  Clone ID: LIB3060-009-F6_FLI
gctttctctggagcagaaatcaaagaccaactgttacgcatgaagctgcaagacactgcagaggagattgctaaaaggcttggacaatgccctttggcagcaaaagttcttggttcccgaatgtgcaggagaaaggatattgctgagtggaaagctgctctaaagcttggagatttaagtgatcccttcacatctttgttatggagctacgaaaagttagatccatgtctgcaaaggtgcttcttgtattgcagcttgtttccaaaaggtcacggatatagacctgaagagttggttcacctctgggtggcagaaggatttattggttcatgcaatttgagtaggagaacgttagaagaggttgggatggattacttcaatgatatggtctctgtatctttcttccaaagatgctgtggaacttgaagaagttgcgtgtattgtctttgtcatttcacaacagcaacaagttacctaaatctgttggtgagctgaagcaccttcggtatttggacctcaacagaacatcagtgtttgaattgcctagatcattatgtgctctttggcacttacaactacttcagctaaacggcatggtggagaggttgcctaacaaagtttgcaatttaagtaagttacggtatctgcgagggtataaggaccaaattcccaacattggcaagcttacttctttacaacagatatatgacttttctgtgcaaaagaagcaaggatatgagttgcgacagctaaaggacttgaatgagcttggcggcagtttacatgtacaaaatcttgagaatgtcattggaaaggatgaagccttagcgtcgaagctatatctaaaaagtcgccttaaagagttgatacttgagtggagttctgagaatggcatggatgcaatgaatattctgcatttggatgttctagagggtctgcgaccgccaccccaactgagtaagctcacaatcgaaggttacagatctgatacatatcctgggtggttactagagcgatcctattttgagaatttggaaagttttgagcttagtaattgcagtttgctagaaggcctaccaccagatacagagctcgttcggaattgctctaggttgcgtataaacattgttccaaatttgaaggaactatctaatcttccagtaggccttacagatttatcaattgattattgcccactgcttatgtttatcaccaacaatgagctaggacagcatgacttgagggaaaatataataatgaaggcagacgacctggcatctaaacttgcattgacgtgggaggtggattcaggaaaagttaggagagtactgtcgaaagactattcatctctgaagcaattgatgacattgatgatggatgatgatatatcaaagcatcttcaaattattgaaagtggtctggaagaaagagaagataaagtatggatgaaagaaaacatcatcaaggcatggctcttttgccatgagcagaggataagattcatttatggaaggaccatggacatgccattggttctaccgtcaagactctgtgaactttctctttcttcatgcagtattacagatgaagctttagctatttgccttggtggcctcacttcactgagcaatttaaaattgaaatataatatggcattaactacacttccatcagaaaaggtgtttgagcatttgacaaagcttgacacgttggttgtaacaggttgtttgtgtctcaaatcaatggggggcttacgtgctgctccatctctttcctttttttactgttcggattgtccttttttagagctagcacgtggagcagaactaatgccgttgaaccttgatggagacctccacatccgtggctgcattcttgcagctgattcgttcattaatggcttgccacatctgaaacatctttcctttgatgtctgcagaagctccccatccttatcgattggccacctgacctcccttgaatcattacgtctaaatggtctccctgatctttactctgttgaaggcttgtctgccctgcaccttaagtacctaactctacaagatgttgcaaacctcactgtcaagtgcatctcacagtttcgtgtccaggaatcgctcacggttagtacctccgtattgctcaaccacatgctcatggctgaaggatttacagtcccaccgaatcttgatctttcatattgcaaagaaccgtcggtttcatttgaagagcctgcaaatctctcatctgtcaagtgcctgggattttggtattgcaaaacggagtccctaccaagaaatctaaaatccctctcaagtctggagagtctttctatagggtgttgccccaacatagcatctttaccagatatgccgtcctccctccagcgcataagtatagtaaattgccccgtcttgaagaagaactgccaagaacctgatggggaaagctggccaaagatttcgcaccttcgccggacgcacatcaactgctaataccaaacttgcttctttagacttgccacttgaaataaatgagaaggcacctcggatgtcaccccaacgcgacgctctctcctcttgaagctccagaattcaggatcaagtcagaagcgaatgggtcagctaatgctgttgtccccgcggttccctgttttttccgcttgcatttgctccgctatttcactttttatatcattccttgattgtgaacaattgccaatgtgtatttctccgacagaatgaagtaactaactgtggctatggcttttacttttcatgtggcaattagtcctacgtgaggctaattagaatatggaatgtctcatacctttactatctttctttgaagaaagtaagaatattggccaagacatgtttct

SEQ ID NO: 15483 - DNA, 1358 bp, Zea mays
  Clone ID: LIB3060-010-B8_FLI
ggaaaaaaaatcacccccaaactccgaccgagcatcttccccggtaggccttatccggtttctgcttgcacctctccagtgagccagtcaccgccagtccacgccatggcttctcgcgccactctcctgccgctcttcctcttcctcctcgtggcgcccgcgcctgcgctcgccacatccggcaccatcgtcttcaccacgctgggccggagccgctacgcctttgacgtcttcgcgctcccgatcgccccgctctccgccgcctccgcggagctgcgcctcacggacggcgcctccgtcaactacaacggcaacttcgcgccctcctcctccggaccgccctccctcctcttcgtctccgagcgcaacggctcgctcaacctctacctcacccccgtccccacatccgcctccgcccgtcgccgcgacgcgctggaggaggaggaggaggacgagtcggcgccgcccacgccgctgctcccgtgggaccccatcgcgctcaaggaccggccttcgctcacccccgacggcgcccacctggtgtacgtctccacggcggagcccgcgggggcgccgcgccggagctgggcggccgtgtactccacgagcctggcccccggcggggccacgcgccgcctcaccccgcggggagtcgccgacttcagccccgccgtgtcgccgtccggggtctggaccgccgccgcttcgcccggcccgcgcggctgggccggcgaggtggaggacctccgcaccgacatctacgtcttccggacctccgacgggtcgcgccgggcgctggccgtcccggacggcgggtggccgacctgggccgacgacaccaccgtcttcttccaccgccgggacgccgacggctggtacggcgtataccgcgccaggctcaccttcacggacgacgacgtcgcgtccgtcgtcgaccggatcaccccgccgggtttccacgcgttcacccccgccgcgtcgcccggcgcgccggggctcgtggccgtggccaccaggcgcccgggttccgactaccgccacatcgaggtcatcgacttgtccggcggcggcggcgccaacaacaggagcgcctactacgaggtgacccggcccgtggccccgcgcgcgcaccacttcaacccgttcatctcgccggacggcgagcgcgtcgggtaccaccggtgccggggcagcgggaacggggactcgccgctgctgctggagagcatcaagagccccgcgccggacacgttctcgctcttcaggatcgacgggtcgttcccctccttctcgcacgacggcaagaggatcgccttcgtcgggctgccggggctgtacgtggtcaactccgacggctc

SEQ ID NO: 15484 - DNA, 616 bp, Zea mays
  Clone ID: LIB3060-010-C7_FLI
caaggtctcaaactctcaaataattgatgaaatgaactaattaattaatgaactgaatctatatccaacatgatatacatagtacaccgggctcgcgtggctgttcctgggcgtcccgaccagcgacaccctgctgtacaaggaggagctggagaagatgaaggagatggcgccggacaacttccggctggacttcgcggtgagccgagagcagacgaacgcggccggggagaagatgtacatccagacgcgcatggcggagtacaaggaggagctgtgggagctgctcaagaaggacaacacctacgtctacatgtgcgggctcaagggcatggagaagggcatcgacgacatcatgctcgacctcgcagccaaggacgggatcaactggttggactacaagaagcagctcaagaagagcgagcaatggaacgtcgaagtctactgatgatgatccttcattgtattgttcagctcaagcaatctggtggtgatgagtttgcattgcattgtacgtagtattgcggagatcaatcgaatcgtttggctcgtcgtcattctatcgatgtacatacattatatatgatgaaagacatatataatcgtttctttcagg

SEQ ID NO: 15485 - DNA, 1783 bp, Zea mays
  Clone ID: LIB3060-011-A11_FLI
ctggcgcggaggacgcaccagctggacggccatcgggatccggcggatgtccagctggcgcggaggacgcaccggacgatcgtcgtcaacatcgtcttctcggtgatcaccaagcttgcgatcgtcgggctcgcgctcgccgggcatccgctcatctgggcagccgtcctcgcggacgtcggcacatgcatgctggtgatcatgtacagcatgctgctgctgagatcggaatcgaacggcggccggaaggtgaagaagtgctgtgcctcgtcgcagcatgggtcacactcacacgccaggaagaagcattgtgtctcccaccactgttcagatggcccgtgcaacaagtcgacggcaggctgttccaaggaatcgccgtctgctggtaagcatgcttgcagtgatcatggccatgcccacacccactgcaaagagccgagcaaccaccggccggaaaggcatgcctgtcatgatcacggccacagccataaccactgcaaagagcccagcagccatgtggttacagaaaagcatgtctgccatgaccacggcaacacccatagccactgcgaagaggcaggcaaccagctgctgcttgtagagagccacggttgcaatgaccatggccatgggcatagccatgaccgctgcaaagagctcagcagcccgcgcttcaccagcaagcacgagtgccatgaccatgagcatagccactgcaaagagcccaagactccgtgtgctgacagtgaggctgcttgccatggccatggccatggacacgaacatcggcactgcgaaggggacagccactcacacgctacaggtgagcatggctgccatgaacatgatgcgcacagccactgcgaggagcacggccattcagacaccgctgttgagcatgcttgcgagcatgagtgccatggtgagcaccaaactgtgcacgctgtggaaacacaccactgccatgaccacgaccatgagcacggacagcatgagcttggggagatcgaggaacctgagaaggactgccacgaccacagccaccactgctgccatgagcctcacggcaaggacaaggtcgcggccgagccagttgaagaggtcacgatctcaatcgctgccctgcccaaagacgaaggccaccaccacagcgaggaacaacacaatggggagcactgcaggaaggcgaaagactgcggcggcggcggcggcgctgctcccaccgactgcgctgcgagcaagaactgctgcggcgtcaaaggtggagacgcctgctcgagcgtgcaggccgcgcgtgctagggagaccggcccgtgctgccggagctacgtgaagtgccccaggacggcggcggcgagcaggagcagctgctgcggccacagcatgctgaagctgcccgagatcgtggtagagtagtagtagtactgtagtagggtggaaattccaccgtgggagaagggtgtgcacatatgaacaagcaactgtgaggtgagtgtgactcgccggcgtaaatgtagactaagatcgccggtgcagggtgtttgatctagtagtctagttactatataggtttgctggagaaaaaaatgatgtaggattttgactgagcagagcagggggtctgaaaggtggaaggaagggctctgcttggttttcctgcacactgctcctctgtttgcgtcttctgtggcggcggcggcaatggagactgtcacagacgaaggatgtcatgtgactagtgccggccggggccaacactaatattcaggaactatccatatcc

SEQ ID NO: 15486 - DNA, 2052 bp, Zea mays
  Clone ID: LIB3060-011-C1_FLI
aatttccttcttttttttttccttccccaacttctccctgcgtcggccgaggctgcggcgactgaccacagctttcgaccctttccagtggagggaacggggttagcgagcggcctccgctgcgacggcaacggcgtgggagggccatggcggcccccgcgctcgccttccccatgttgctggctgcctcactgctctccgtcgccgctcctgcgctggctcgaagcccatcttgccctgatggttggcaaggcggccctgttcagaacagatgcttcatgtacatatcagcctccctttcttgggatagatccgaggctgtctgccataactacagcgggcatcttgctgcagtatcatcagtccaggagctaaacttcgtgaagtctctctgtggatcatcatccacaggatgctgggttggagggcatcactacagcactagtaccggtaacggttggaaatggtctgatgattcctctgtttggaatgaaactgtcttccttggtgagccattgcctgccaactgcagtgatcctgcatgtaaagtagccaccagcaacgatttctgtactttggtcaccaatggtcagccttcaactattactgaaaaaaggtgcagtgagtcccatggtctgatctgcaggatgaaccacgtggacagatgctaccatgatcattgccacaaggagtatttcatatccattattgctgtgagtggtttcatcctggcaaccactctagccgttgtggtttggctgcttgtctacaggcgaagcaagaaaagaagaagatcgcgagaagtgttaagtgcctcagctgctgcattggtagcaccgcaatggaaagtattcaccagtgaagaacttagatcgatcacaaagaacttcagcgagggtaaccggcttcccggcaacgcaaagacaggcggaacctatagtggaatcttaccggatggatccaaagtagcaatcaagaggcttaagaggtcgagcctgcaaaggaaaaaggacttctactctgagatccggagagttgcaaagctatatcaccctaatttggttgctgtaaaaggatgctgctatgatcatggtgaccggtttattgtctatgagtttgtcgcgaatggtcctttggatgtgtggctgcatcatattcccagaggagggcggagccttgattgggcaatgagaatgagagctgccacaactcttgctcagggaattgcgttcttgcacgacaaggtaaagccgcaggtggtgcaccgtgacatccgtgcaagcaacgtcctactcgacgaggatttcgggtcgcatctgatgggggtggggctttcgaagttcgtgccgtgggaggtgatgcacgagagaaccgtcaaggccgcgtcctacggctacctcgcccccgagttcatatacaggaacgagctgacgacgaagagcgacgtgtacagcttcggcgtgctcctcctggaaatcatcagcgggcgccgccccgcgcagtcggtcgagtccgtcgggtggcagaccatcttcgaatgggccactccgctggtgcagtcccaccgctacctggatctgctggacccgctcatccaggagtcgccggacgcgggggtcgtccagaaggtcgtcgaccttgtctactcctgcacccagcacgtcccttcggtgcgcccgaggatgtcgcacgtcgtgcatcagctgcagcagcttgagctcaagtctgcagcgtccgagcagcagctaaggagcgggacgagcaccagcgcgacgtctccaatgctgccgttggaggtccggactcctcgctgaaatgtgctgccagaaattgatagcctttttaagtactctctagctctgtaggtggtaccacattccttgtgggccaccgttatcttgatcagttgtagacttgtcatctgtaacctctaatctgctacatatgtcgtgggttttcaatgtgtgacctaaagaagctttaggcttatgctctcaagtctgaagaaacaactcatctgtatttcatagagtaataacagtagcttgtaat

SEQ ID NO: 15487 - DNA, 638 bp, Zea mays
  Clone ID: LIB3060-011-C12_FLI
gtcgtcgcagaacgaggtgctgctccgggagaagctgcccaccagggagctctacctcaacctccgctcctccgacacctgggtcgccgagtacaggaagtggatggacagggcgggccacggcatgccctactacttcggccacagcaccctgtcgccgccgcccgtgccggccgtcgtggagcaggcgcccgcaggggccgtcgcggggatctcggcctcgttcccggccaagggcggcgtcggcatggtgcacgcgcccaacccgaccaacaggtacttccgccacgtcgtgcactgcaagggttgcagggcaaccgtcaaaaagtacacctcgttgaagaccgtgttcgcggccctcgcggcggcggccctatcggccgccatcctggcggcgaccaggcagtggaaggccgtcttggtggcggcgtcggccgtgctagccgccgcatcctatgcgtgtgacgcggtgctttctttgatcaccaccaacttcatcagaacacacaggagactgtaattaatgtgtcactggccactgacacgggagcgttctctgtacatttgtattaccgtagctgctggcctgcggctgttgtattttgtatatttgcagtaacgttttgcatgtcagcagc

SEQ ID NO: 15488 - DNA, 800 bp, Zea mays
  Clone ID: LIB3060-011-D12_FLI
cgccgcctggccgccggggcacccctccgggggttccttggcgcgccaatccgggccgtggcgtcgtcggcgtcggcggcccccgcggcggcggccaagaccatcgcggtcggggaccggctccctgacgcgacgctctcctacttcgacacgtcctcccccgacggcgagctgaagacggtgacggtccgcgacctcaccgcggggaagaaggtggtgctcttcgccgtgcccggcgcgttcacgcccacctgcacccagaagcacctcccggggttcgtggccaaggccggggagctccgcgccaagggcgtcgacaccgtggcctgcgtctccgtcaacgacgccttcgtgatgcgcgcgtggaaggagagtctggggatcggggacgaggtgctgctcctgtcggacggcaacggcgagctggcgcgcgccatgggcgtcgagctcgacctctccgacaagcccgtggggctcggcgtccggtcccgccgctacgcgctgctcgcggaggacggcgtggtcaaggtgatcaacctcgaggagggcggcgcgttcaccaacagcagcgccgaggacatgctcaacgcgctctgaactcgcgacgccatggttggttcgtctcttccggcaagagttggtttcttttccctgaaaataatcgtgacggcaacggtggcttgtgttactgccgccactgttgtgaccggcgctgttactagtgcactgcagagatgcaagtttcttgcgaacatggctttataggtctagcttcatgcaattgttgacgccctctgttt

SEQ ID NO: 15489 - DNA, 735 bp, Zea mays
  Clone ID: LIB3060-011-F11_FLI
gtctgccattgagatgtgtgtcgctgttcctccacccccttctctttcagtatgatctgagtaagttctgtccattcaacaccgtcctcttggatcatggcgacccgtcagtgaacacagatggctggttgctgagaatacattccgcccaccctactaccaccgcaactgcatgagcgaattcatgggcctcatctatgggatgtacgaggctaaggccgatggttttcttcctggtggcgccagccttcacagctgcatgacaccgcatgggccagacaccaagacgtacgaggcaacgatcagccgtgctgctgccaacgagccatccaggctcagtggtacgttggcgttcatgtttgagtcttggcttatccctcgcgtgtgcccatgggctctggattccccgtgtcgggacctcgactactaccagtgctggatcggattgaagtcacacttttcacctcctgctgctgctgttgatgatgagaacgagtagctgcttacagcagcagtcttggaacggacaggcagcgaactgaaactggggtggatatgctgtacgtcgtgtcctgcttgctgtcggtttctgaagcttttagctggcagggacaggcggctgttggctttgctgattgcccaaccctctcctgtaatattaatcctaccagagaaacttaaacttgactcaaccgatatgctattaaataaataaagcaagcaagttaggatacg

SEQ ID NO: 15490 - DNA, 1014 bp, Zea mays
  Clone ID: LIB3060-012-A9_FLI
ctttatttctctagtaaacctttcaacactgttcaaaacagaatttgttactgtccttgtgtctgcattttctctactatacctctgcaacacatttcaaaaagtataatgagccaactcctctacttgtaatgtcaaggaaagcaacacaggaaatgatgtgcatggtgtgcctaaagattcaacccgttggtccgttctgccaaaccccatcttgtaacagactatcgatggcaaagtactactgcaacatctgcaaatttttcgatgacgaaaggactgtgtaccactgcccgttttgtaatttgtgtcgtcttgggaaaggtcttggtgttgatttctttcattgcatgaaatgcaactgctgtcttggaatgaaattaactgagcacaaatgtcgggaaaaagggctagagacaaattgtccaatatgctgtgacttcctgtttacatcaagtgccgcagtcagagccctcccttgcggccacttcatgcattcagcttgctttcaggcatacacttgtagccactacacttgtcctatctgctgcaaatctctgggagatatggcggtgtattttggcatgcttgatgccttgttggctgctgaagagcttccggaggaataccgtgataggtgtcaggatatactgtgcaatgactgtgagaggaaaggcagatgtcgatttcactggctataccacaaatgcggctcctgtgggtcgtacaatacccgagttatcaagactgacactgcagattgctccacaccaaattagctggagggaacatttgtgcttatttgtagcctttttttttctcttatgtaaatatcttctagcgggaaggaaaaaagagatgtcctgtaggatagttaacataatttcattcgtagcgatatcagttttgtaagtgtagcagtttacaatttactaggtctagtgcgttgtactgccaaaatggacggttctgctggacaaaggacataatccgagaaaataggctagttagaac

SEQ ID NO: 15491 - DNA, 957 bp, Zea mays
  Clone ID: LIB3060-012-D1_FLI
atcaaaatccgcactccccattggccggcctcatatccccttatccgcttcgccacccgcggtctcgcccaccacccgctccggccggctcttagctgcatgctcgcgccgccctcctctccatcatccagtgctctctcctcttgcgattcgctcgctcgatcctagcttcccttccaagaagcgcagcgcccatggccatggccacgcaagcctccgccgccacgcgccacctgctggccgccgcctgggcgccggcggcgaagccgcggcagctgagctcgcagctcgcgctgccgtcgtcgtcctcccgcgggccggccccgctccgcgcgtccaccgaggaggcggtggaggcgcccaaggggttcgtggccccgcagctggaccccagcacgccgtccccgatcttcggcggcagcacgggcgggctgctccgcaaggcgcaggtggaggagttctacgtcatcacgtggacgtcccccaaggagcaggtgttcgagatgcccaccggcggcgccgccatcatgcgggagggccccaacctcttgaagctggcgcgcaaggagcagtgcctggcgctcggcaccaggttgcgctccaagtacaagatcacctaccagttctaccgcgtcttccccaacggcgaggtgcagtacctccaccccaaggacggcgtctacccggagaaggtcaaccccggcagggagggcgtcggccagaacttccgcagcatcggcaagaacgtcaaccccatcgacgtcaagttcaccggcaaggccaccttcgactaatcacacttcacgtacgccgcacgccccagccgggatccaaattaaagaacttcttcttctattaattacagtatattgtaatttggctgctggtacggtggtggcatgatttgagatgtgcatgatgatccttgtgtaattttattaccaagtctcttcttat

SEQ ID NO: 15492 - DNA, 974 bp, Zea mays
  Clone ID: LIB3060-012-F5_FLI
cttcgtgaagaggagaggcctgaaaccggccatcagagcgtatgacaagctggtcctcatagggtgcgagcctggccaggtcacctacgcatcagtcatcaacgtgtactgccggctcgggcgcagcgacagagcagaggccatcttctccgagatgatcgagcgaggcttcgacaggtgcgtggttgcctatggcaacatgatctcgatgtacggcaagatcaggagggcgtcggaggccacgaggctgctggccctgatgaagcagaaggggtgcgagcccaacgtgctggtgtacaactccctgctcgacatgcacggcaggctggggaactcgaagcaggccgagaagatctggaaggagatggtgcggcgcaaggtccggcccgaccggatcagctacacggccatcatcctggcgaacaaccgggcgggggagctggaccgctgcatggagctctaccaggagttcagggagaccggaaggaaggtggacatggtcatggctggcctcatggttggggtgctctccaagaccagccgcttcaacgagctcatcgagctgctcaaggaaatgaacgggacaaagctggaccggaggctgtacatgagtgtcctgagaagcctccgcgatgccgggctggaggttcatgtgaagtggctccagagtaacttcaccttcatggaagagaaaacttgatgccaggtgcaggtacttgttcctgtgcacgcatattcagcacccaagtatatcgggcgcctgaagaaaaccttgctctgtacatggaaaccgaaaaaaaaggtaaatatttgcttgcctcagtgctccattccgaagcttgtacgctattgctgcacaattccggcattcattggctcaagtgaatagcgatgtaaatgtattttaagggaagccaactttgtaccagtaacgatctgattccgaaattatcgaacagattgccaagttcagt

SEQ ID NO: 15493 - DNA, 777 bp, Zea mays
  Clone ID: LIB3060-013-A4_FLI
tatcaccaaggcgatatcgagagaacgatgcactatcaagtttcttcaaaatcttgactacatcacctgatgaaaacggcaaggtctatgtctcaactgtacaagccaataattatccaatcacttgcacgcaatggcatcctgaggtaatttagttgtagctgtttcaggagttccacatttagtgttcttattggttcttccttttctcttgtgcactgtatttattcctaggttatattcacaacatatcaaattgtggccactcaccaaatacaagtggctttatgccacaataaaactgtcctcatttgatgcagaaagccatttttgagtggaggaaaccaatgatcccacacagcgaagatgcagtacaggttactcaacattttgccaatcattttatcagccaagcacgcaagtctccaaacaggcctcctgccgacaaagtgctggataacttaatttacaactacagtccgacatttaccgggaaaaaatcgaaatcgtttgaggaggtctacatcttctcctgagactggattgaacgcctgagtgtcttcaggaatctgtagttctgcactacattgctattgtagtgtaaccgtgcattagtattacccgtggtaccagaagttgtatttgtatagattcgttggactgcctgtattgcagtaacctttccaccgtatgggtggctctatagaatgcctataagcagcgcaataataatgataatgtaagactgaaaaaaaatacttgtatggagattttctg

SEQ ID NO: 15494 - DNA, 834 bp, Zea mays
  Clone ID: LIB3060-013-C1_FLI
cgccggccgcgccgcgcccaactcctctgatcctcttccttgtccccaccctcttctccgatggcgacgctgcagctcaaccacatcgcgcgggagacctccgacgtggcccgactcgccgccttctacgaggccgtgctggggttcgagcgcatcccttcgcccacctactcgggcttccaggtcgcatggctccgcctcccgagctcccccgacgtcgcgctccacctcatcgagcgggaccccgccgcggcacccgtcgcggtggggcctggcgccgagggcgcgccgccgtcgcagctgccccggcgccaccacctcgccttctccgtcgctgactacgacgggttcgtgaccgggctgaaggcgcgcggcaccgatgtgttcgaaaagtcgcagccggatgggcgcacgcgccaggtcttcttcttcgaccctgacggcaatggcctagaggttactagcgctggtgcagggaatgagaagtgaacagagaccatgatttgcagtctacttctattttatcgtgcaatacctcagcaaaccctgcctacatgatgcgatcgaaaccggagacgttcctgggtcaagcttcgttccgtaaaataaataaatccgaagcacttcaaagctctacatactcgcccttgcttgtttgagacaagggcttgcgttcttgctgcatctcatccgagatgattgtaatccgaacaatgtgtagttaataaaaatgtcgctttgccctgaaaatgttttacgctgtaacatcgctctgtacgtgattggatttcctacatgacaactggctaatggagtctaaataatttccttgtc

SEQ ID NO: 15495 - DNA, 848 bp, Zea mays
  Clone ID: LIB3060-013-D7_FLI
gctcctctgcaccccccatcctcggacatcctcgcctgcagcagaccctcctctggtgcgcgtgcgccaccggcgagatgtcgaagaaaatcgtggtgaagctgcacctgcaggacaacaaggacaagcagaaggccatgaaggctgtctcggcgctcaccggcatcgacgagatatccgcggacatggcgtcgcacaagatgacggtggtcggcatggtggaccccgtgagcgtggtgagcaagctgcgcaaggcgtcgtggtcggcgaccatcgagtccgtcggcccggccaaggagccggagaagaaggacggggaggcagccaagaaggacggcggcgagggggagaagaaggaaggcggcgagggggagaagaaggaagcaggcgagggggagaagaaggaagcgggcggcgagaaggacaaggacggcaagaaggcggcgccgccgacgccgacgccgacgccgacggagcagcaggtccagctggccgagctgttgaaccagtattaccgggcctcctcctactacccgtacccgcccgtggccacgcattaccacgtccagagcatggaggaggaccccaactcctgcaccgtctgctaaggcgactcatggcatggagaatgatctacgaaggtgaagaaggtagtgttgaaccagcatgcagtttctttttttttcacttctagatcgcgttctggctgctcatggaggatacgcagcgtgtctgtatgtacagtacatatagaataacacgtacgtacgtgtggcggtatatgtgtaagtgggacttcgctttctgggataaccagagctgtatgtagctaatacagttttggattt

SEQ ID NO: 15496 - DNA, 780 bp, Zea mays
  Clone ID: LIB3060-013-F5_FLI
ggaacctacgaatcaaagttgccctgggagcagccaagggccttgcgttcttgcacagcgacaaggccagagttatctaccgagatttcaagacatccaacgtgctcctggattcgaactacaacgccaagctgtctgacttcggtttggcaaaggacgggccaaccggcgaccagagccacgtgtccaccagagtcatgggcacctacggatatgctgctccggaatatctcgcaacaggtcatctcacgccgaagagcgacgtctacagcttcggcgtcgtgctgctggagatgctgtcgggccgccgcgccatggacaagaaccgcccggccaccgagcacaacctcgtcgactgggcgcgcccctacctcagcagcaagcgccgcgtctcccgcatcctggacgaccgcctggccggccactacccgctgccggccgtccaaagggcggcagcgctggcgctgcagtgcctctccgaggactccaggaagaggccaaccatggaccaggtcgtcgcgtcgctgcagcaactcacagccgcccaggaccacgacgatgcccaccggtcgtcgcgcaggtacccaaaagatcaccgtcaggctgcggcgctcaacaaccggaatctgaacgctcatcgccgcctgtccgccttgcctctacccgagtgaactaccatattcatattcgatcatcttttgtatcttcacaaaagtagtatgtaaatccgtggtgaagacctgggtaattagtgataaaacacaacttgattgttgattt

SEQ ID NO: 15497 - DNA, 3729 bp, Zea mays
  Clone ID: LIB3060-014-C1_FLI
cggcaatcggcatcgccaccggtagtgggagggagcaagggggggacccaggccaacgccgcgcacctttgccctcttatcatcatcaacatcaccacgggcgggggagacggccctcgaagcgtacccgtccccatcctccttttccgaaccaccggagcgcggcggcgcggcgcgagacccttcccggcttctactcctccgatcctccgcaccggctgacgagtagcccactcactgggggacgtgggatcgatcggcggctgatgggaggctagattccgcaatcccacagactagacacatccccttcgcggttgactttggcgaatcgaccttgatctgaaaatggggctgttccgggcggcgtccggcctggcccgtttggctctgcgaaggaacctcttgcgcgccgcggcaagcccctttgccgccggcggtggcgccgtcccaggtgccgcgccggcgcgctacttccactccacctgcccgcgccggttcgctgcgcccacgccccgtgctgtgccgctctcgcgcctcaccgacagcttccttgatgggaccagcagcgtctacctcgaggagctgcagcgggcctgggaggccgaccccagctctgtcgatgagtcctgggacaactttttccgcaacttcgtcggccaggctgccaccacctcacccggcctctctgggcagaccatccaggagagcatgaggctgctgctgctcgtcagggcataccaggtgagcggccacctgaaagccaagctcgacccgctcgggcttgaggagcgtccggtcccggatgtgttggacccggcgttctatgggttctccgaggcggacttagaccgcgagttctttcttggggtgtggatgatggctgggttcttgtctgaaaaccggccagtgcagacgctgcgctcggtgctggagcggctcgagcaggcctattgcggtaccattgggtatgagtacatgcacatacctgacagggagaagtgcaactggctcagggataggattgagacagttaacccaatggattacacttatgaccgtcgtcaggtcatgcttgataggcttatctggagcacacagtttgagagtttcttggcgaccaagtggacaactgcaaaacggttcggtcttgaaggtgctgagactctgatccctggcatgaaggagatgtttgacagggcagctcatcttggtgtagagagtattgtcattgggatgccacacagaggcaggttaaatgtcttgggaaatgttgtgaggaagcccttgcgacagatatttagcgagttcagtggtggcaccaagcctgtcaatgaaggcgaggggttgtatacagggactggtgatgtcaagtaccatcttggaacttcatatgataggcctaccaggggtgggaaacatatccatctgtcactggttgcaaacccgagtcatttggaagcagttgatcctgttgttgctgggaaaacaagagcgaagcagtactattctaatgaccgtgacaggaccaagaatttgggagtgttgctgcatggtgatggtagtttctcagggcagggcgttgtgtatgagacgctgcatctcagtgcccttgaaaactacaccactggtgggacaatacatatcgtggtcaataatcaggttgctttcactactgatccaaggtcagggagatcctcacaatattgcacagatgtagcaaaagcattggatgctcctattttccatgttaacggtgatgatttggaggctgttgttcatgtctgtgagctcgccgcagaatggcgtcagacatttcattcagatgtagtggtggacattgtatgctaccggcgatttggccataatgaaattgatgagccgtccttcacccaacctaagatgtacaaggtgattaggaaccatccaagtgcgctagagatttatcaaaggaagttgttagagtctgggaagatctcaaaggaagatattgataggttaaacaaaaaggtcagcactatacttaatgaggaatttcagaacagcaaagactatgttcccaacaagagggactggctttcagcttactggactgggttcaagtcaccagagcagatttcgcgtatccgaaacaccggtgtcaagccagagattctaaaacgtgttggagaagccatgactactctgccagaaaatttcaagcctcacagggctgtgaagaagatttttgatctacggcgtcagatgatcgagactggagaaggcattgattgggcagttggtgaagcacttgcttttgctactcttataattgaggggaaccatgtcaggttaagtggtcaggatgttgagaggggtacatttagccatcgacactctgtcatccatgaccaagaaactggagagcagtactgcccgctggatcatcttgttatgaaccaagatgcggagctttttactgtgagcaacagttccctgtcagaatttgctgttttgggctttgaattgggttactccatggagaacccaaactcattggtcttatgggaagctcagtttggtgatttttcaaatggagctcaagtgatatttgatcagttcctgagtagtggggagtcaaaatggctccgccagactggccttgtcgtttgccttcctcatggatatgatggtcaggggcctgaacattctagtgcaagattggaacgctttcttcagatgagtgatgacaacccttatgttatacccgagatggatccaacactgcggaagcaaatccagcagtgcaattggcaggtcgttaatgtaacaactcctgcaaattatttccatgttctgcgtcgccagatacaccgggacttcaggaagcctttgattgtgatgtccccaaagaacctccttcgccacaaggactgcaagtcgaacctatctgaatttgatgatcttgcgggccaccctggattcgacaaacaggggacacgcttcaagcgtctcattaaggaccagaataatcacaaggacctcgaggagggaatcaaccgcctagttctttgctctggaaaggtgtactatgaactggatgaagaaagaaggaagtcggagcgcactgatgttgctatatgtagagttgagcagctctgcccgttcccctatgacctcatccagcgcgagttgaagagatatccaaatgccgagatcgtgtggtgccaagaggagccgatgaacatgggagcatacagctacatcaacccgcggttgctgacggcgatgaaggttctgggccggggtggcatcgaggacatcaagtacgtcggcagggccccgtcggctgctaccgcgacgggcttctactcggtgcacgtgcaggagcagacggagctggtgcagaaggcgctgcagcgcgaccccctcaactaccctttctgaaagaaacgaggcccctgtagattcttggaattggggaccttttgaatttgatataataccaatatagagagaacatgccttaaattttatctgtgcagccatttggtgaaataattgtttcgactctgcagtaccgcatgaaacaaaccgttgtaagtttggaaaaactccatctcgcagcgttgattttgtgttcctaaatgctggaaagtttgtatggctgaaagcctgaaacaccgcctgccgcaattttcttgcgttgaattgcaaagtctataaaagcaatgaactgatatgtcattc

SEQ ID NO: 15498 - DNA, 1268 bp, Zea mays
  Clone ID: LIB3060-014-D1_FLI
ctttacacgaccacgctagcacgccctctccgtctctccccttccggttccggttccagtggctgcatccgctgcgccaccccccgtctgctcacccaagtcccaatcccgcagcccggcggcatggcggtgagcaacaacatcacggcatgcatcaacttcctggtgcttctctgcaccatccccatcgccgcgacggggctgtggctggcctcgaggcacggcggcgaggactgcgccaggctggcccgctggcccatcgccgtgctgggcgcgctcctcctgctggtcgcgctggcgggtttcgcgggcgcctactggaaccgcaggggcctgctcgcctgctacctcttcgcgatggccgccctcatcacgctcctcctcgccctcctcgtcttcgccttcgccgtcgcgcacgactccggcgcctacccggctcccggcagggcctaccaggactaccgcctccagggctactcctcgtggctgcgggggtacgtcgccgacgacccccgcaggtgggagggggtccgggcctgcgtcgccgcctccggcacctgcaggaagctcgccatggatagatcattcatcgtgccggagcagttctacatgtcgcacctctcgcccatcgagtccgggtgctgcaagccaccgacggtgtgcgggtacgcgtacgcgaacccgacggcgtggacgggcccggcggcgagcccggcggcggacgcggactgcgcggcgtggagcaacgaccccggccagctctgctacgcctgcgcctcctgcaaggccggcgtgctgggcggcctgcgcgagcagtggcgcagggccaccgtcccgctgctcgtcgccaccgtcgcgctcatcttcgtctacgtcgtcggctgcagcgccttccgcaacgcgcagaccgaggacctcttccgccgctacaaatggggaaattattaacgatctctcccactgatctacatctactacgtacgtacacgccgatttggatcgggccacaggattttcacatgcgcctcggagagaccgagaatggactctgcgttaccgtacattttcagcaatccggttcaccaagatttgggcccaatggcccatcacggatatcccatccgtggcgtgtgctcgccaaattggagcacgccgtccgcgctcttcgcgtccttttgtttgggatggttgccagttatattaaggtcgctcagcaattatgtgttacatgcaaaataaacataaaaataaactgtaacactgggtgt

SEQ ID NO: 15499 - DNA, 272 bp, Zea mays
  Clone ID: LIB3060-014-E3_FLI
ctacaagttcccatatgtactgcaccacattcgtttgtcagtaccgaagcatgtaaacccatatgcagaagtgagaccgtgtggtatctgttttgtacctcttcgcttcaggaaattttggcctgtatcttgaccatctgagatgtattgatagagttgggtaatgctgttgggcgtatgtgtatttcttgtgcggttgtgcctgacttctcttgccggggcactgaataatcggccatgtttgaataaagaaagccggtatggttctcatt

SEQ ID NO: 15500 - DNA, 2435 bp, Zea mays
  Clone ID: LIB3060-014-E9_FLI
tcaccccaaagctccgcctccgcaccttctctcactcgcccagccgcggctatggcggccaccacatccacggcggcggcggcagtatccttctccctcccctcaccaccgcactgccgcggggcccggcgccgccgcgcgccttccctcctccgtgccgcctccaccgccgcgcccccctcccccgacctctccatccagctctcgccccgcgcgtccccgcccgcgtctaccaacggcgccgccaccgcgcttggaccccccgtgtccgcctcctttgcccgtgaccgcgccgaggacctgcaggccgaggcccgcgcgatggcccgcgccgctggcgccacagtctacagtcccgagctcctcgccgcccgctacggctcccgccccttcaaggtggcgctccgggcaggggaggtgctgtccaagttggcgtcgttcggggtgaaggtcctactggacgagcggagaggggagtcgtcatcggagaggaggcgcgccagggcggtggagttgcgcaccatcttcactaggctcggcccaaccttcgtcaaaattggacagggcctgtccacgcgccccgacctctgcccggccgagtacctcgaggagctcgccgagctgcaggattcacttcccacatttccggatgaagaggcatttgcatgtattgagagagagcttggcttcacgcttgattcaatctactcgacaatttcaccttcccccattgcagcggctagtttaggtcaagtttataaagcacggttgaaatactctgggaagctggtagctgtgaaggtgcagagacccagtattgagaaagccattgggcttgatttttatctacttagaggacttggctttcttataaataagtatgttgacattgtaaccagcgatgttgttgccctcatcgatgaatttgctcgaagagtttttcaagagcttaattatgttcaggaaggccaaaatgcaagaaggtttaagaaattatatgccgataagcaagatgtattagtgcctgatatattttgggattacacaagtgcaaaggttctaacaatggagtggattgagggtgtaaaattaaaccaacaagcagttattgaaagtcaaggattgaaggttctggatttggtcaacattggtatccagtgtagcttgagacagcttctggagtatggttactttcatgcagaccctcatcctggtaatatattagcaacacctgaggggaaactggcttttcttgattttggcatgatgagtgaaacaccagaggatgcgagggtagccattataggacatgttgtccacttagtcaacagggactacgaagcaatggctcgtgattattatgcactagatttcttggaacccgatgtagatgtttccccgattgtgcctgctctcaagaatttttttgatgatgcactaaatgcaacagtgagtgagttgaacttcaagacaatagttgatggcctaggtgctgttctctatcagtacccattcaatgtaccagcatactatgcattgatactgcgatcgctcaccgtactggaaggtttagcactctatgctgaccctgattttaaggtgcttgctgcatcatacccttactttgcgaaaaggctactgactgatcccaacccatatctcagagatgctttaattgagcttgtattcaaggatggaaaattcagatggaataggcttgaaaatcttcttgttcaagggcgccaagatagggagtttgcagccaaagatgcactgcagcctgttctaaagcttctccttggtcctggtggggaggaattgcgtgcgttagttgtgaaagaggcagttcgtgtgacagaagccatcgccattggaacactggtcgattcatacaatgcagctccatcatttttgaagccattaatttccagcggcaatctagctgaaccctttaagtttagtgagactgaacaagaacagatgatggagctccgagaccaggttttcagagtatggggtcttttgagatcctcaaataactttgatccgagccttttgcagccaatcgttcaggttctacaagaaccagaggcccgtgtcttgggttctcgtgtcgcaggtggtgtaacacagcgccttgcggcacgtctgctgcaacagcttctcaggacccctcctgctcctggatcttcttagcagatatatagatataggctcgtatgattgtatgaagcatgtaaattgacacgatatttttcacaggaaatgagaaggaagcacaacccagaattcgagtatatagctagtttcttggttctaagtggataaagacattgtgcatcgagctttgtccagcagaccgtgtatatagttgtgtaaaaaacattgttttgtgctgtagattacactgtttacggagtgaagattgaaatgat

SEQ ID NO: 15501 - DNA, 542 bp, Zea mays
  Clone ID: LIB3060-014-G6_FLI
gcagatggaggcgaagagcaggctgccggaggtgaccatcgtcccggcggcacggccgttggctggcgacggcacagtcgacgcggcaaaggcggcggcaggcaaggagcccgtaagcccgggcactccgtcctcggtggccgccggccgcagcagctgtgaggagaggcgcgcggtggacggcgtcgccctgcctgggtggaagctcgacgccctctgccaggagtcctgcccgtcgccggccatgagggcgcgcttcccctactacttctgaagcttcccgttgcagtcctgcgtgatcgagttcttgagcggcgacatctggtgcatgctcttgacgactgatggcgttcttgggtgttttccttgctcagggtttccctttcgtgcacgttcatgtatgtatgttagtatgtattgtgtgtataaagatctgcgagctttgtgtataacgcaaatgatgaaccttcgggcaactgcgtgtatggttgtatctgtctatctgacataatttgagcacactgtatgtatcgttctcatcg

SEQ ID NO: 15502 - DNA, 637 bp, Zea mays
  Clone ID: LIB3060-014-G9_FLI
caccactccgcgctagctgaggacggtacagcggcacagaggtgcgacgtacgacgacgacgacgcaggcgccacacatggcatcccagctctccgccgccgtgccccggttccacggcctccggggctacgccgcgcccaggtccgcggtggcagcgctgccgtccgtgagggtgggcaggaagaggtcgtcgtcgcagggcatccgctgcgactacatcggctccgccaccaacctgatcatggtgacgacgacgacgctgatgctgttcgcggggcggttcgggctggcgccgtccgcgaaccgcaaggcgacggcggggctgaagctggaggcgcgcgactccggcctgcagacgggtgaccccgccgggttcaccctcgccgacacgctggcctgcggcgccgtcggccacatcctcggcgtcggcatcgtgctcgggctcaagaacaccggcgccctcgaccagatcatcggctagatccctacgtcgccgttgttaagatcagactcagcagcctcgatcgcgccgccggccggcaggtgcaggtggtgactttgtaacgtgtgtgcgtgcgtacgtgtacattgcatccatcttggttccaatggacatatagctcctgttgctcctct

SEQ ID NO: 15503 - DNA, 973 bp, Zea mays
  Clone ID: LIB3060-014-H3_FLI
cttcgcgcagtgggccgcgctctaccaccaccacgaccccgccggcggcccggtcctgcccgacgacgacgcggcggacgctggcaacggcatcggcagcggcaccgccaccgccgcgagcccgacgtcgggagggtccagcggcgggagccccaccaccaaggcagcgtgggggcagcagcatctgcttcacggggtggaggggccccgggtcgccgggaagccggcggcggcgcggcggcggtcccgcgcgtcgcggcgggcgcccgtgacgctgctcaacacggacgccgccaacttccgcgccatggtgcagcagttcacgggcgtccccgcgcccctcgccggcgcgttcagggtcggggacggggccccggtcatcagcttcgccgccgactacggcttcccgcccgcttcttcttcctcggccgtcaacgtgtccttcttcgaccaccagctccaccggagccaacaacaccctgcagcgccgccggtccacaggcagcagcagcagtacgccggcgcgtcgccgttcggcggctacagcagcggcctggtgcaaggcggcggcgcaagcgacgtcttccccgcgtcggcggaggacaggatgctcctgcagagcattctggccgcccagatgccgcacatgccgccggtgtccggcgctaacaccagctctcatggcttctttgcttgaataagtaagtagctgaccaaggtactacgacggcgtcatccatgccagtatgccacatgcatggaagctagagaacatgggggagatggagtgaggattagcagcctagcagtagcaaagaagaagaagaagaaggggtaatcacaagtttccctggttgcgtttgattagttttcttatccgcgcgcgcagcttcatttgtttctccgctagctgcagcgatgtaaatatctttatcttgtttttaaaagatgcagtagtctctgtacacgtact

SEQ ID NO: 15504 - DNA, 477 bp, Zea mays
  Clone ID: LIB3060-015-B3_FLI
gaagagaaccagtgtgctagtgctacagctacggcctagctacctaacctactacggcgcagctagcagcggcggccatgaccgacgggcgcgaggagagcaccagcagcaggtggccagagctggccgccctgcgcgcgctggcgcgcgacgcggcggcccgggccgggagggagacggcggggtggcgcgggcgggagcgggaggatcaccgccacggccacggcaagacggccaaggtcatgcacctgctgctctggggacccaaatgaggtgaagtgaagcgctgctgctgcagcacagcacctgcctctgcctcgtggcccgcgcgcggcgtcctcgcttccttctccgcccgctgcccgcacgggttgtacttgtacatgtaccactgctagactagtacttctgctgtgcctgtaccatagtactgtgtattgtattgtacgtgctagtagtaaactgctgccttcttcc

SEQ ID NO: 15505 - DNA, 741 bp, Zea mays
  Clone ID: LIB3060-015-E9_FLI
caaaactgtaagagcagagagattttagaaagagagagagagagagaaggatctaggtcacaatatagacgaaaaccaatcggagacgaatggtcgtcgcactcgcacgagggctgattcctttccagctcgcaccgcggttgaacagcgtttcgttgtttcctccccaacttccaacacgcctcgatctagatccactcttcccccttctccttccggtcctccccccgagactattcatataggcgggtaggcgtccgaggcctcgtttgttctcggcttcttgtctccaagggtgctactccgtccgcgcttggtctgctctcgtccttccggaggccgcggcgcaacatggcgaagatcaagccgaaggccttgctcgcgcaaagcaaggtgaagaaggtccccggccaaatcagcgtggccacgatcgtcacctacatgatcctcggcgtcctggtcgtgtcctccgtttacgctgcctacaggtactgctgggcagtcacaggagcagcggaggcagtgggcgcccaggggaactgatcccccttccgactgcgtggctgatctcgctgttgttgtatcatccggttggggtaaaatttttggttgttgctgtctagcaaatggggttcatgggacatggataggttgtatgttgatacggttacaccgtagccgatgatatgtatgttgaatttcttcccttttattatcatttgacgatccgattgcctctgc

SEQ ID NO: 15506 - DNA, 1756 bp, Zea mays
  Clone ID: LIB3060-015-H1_FLI
ctcgtcgctcgccccggttgtctcctcctcgacctcccccgtcgcgacaccgcccgatctctctagcgcacggcgggccggagaagaggaggaggggggggacgatctcattcatcggaccggcgtgcctgtgtcgtctgctgttttcgtttttttctttactctttttttttcctcctttgcttgttcaattcaatcagtatattaagatttctgatttgggggcggctcgccatgggattcggaatggggaataataacaacggggcgagctcctcgtcgtcgcggctggaccccgcggcgccgctgctgccgcgccacggcagcagcgggggccgcgagggtggtggcctgtcgtcgcagcccaagacgttcgccaacgtcttcatcgcggtggtcggcgccggcgtgctggggctgccgtacaccttctcgcgcaccgggtgggcggtggggtcgctgctgctcttctccgtcgccgcgctcaccttctactgcatgatgctgctcgttgcgtgccgccgccgcctcgccgacgagcaccctaagatcgcctcgttcggggacctgggggacaccgtgttcggcgcgcacgggcggttcgccgtggacgtgatgctggtgctcagccaattcagcttctgcgtcggctacctcatcttcatctccaacaccatggcgcacctctatccgattgccgcgtcgtcctcctccgcgctcctctcccccaaggcgctcgtcatctgggcgatgctgcctttccagctggggctcaactccatcaagacgctgacgctgctcgcgccgctcagcatcttcgccgacgtcgtcgacctcggcgccatgggcgtggtcctcggccaggacgtcgccgcctggctcgccaagcccgtgcccgtggtcgccttcggcggcgcaggcgcgcttctctacgggctcggcgtctccgtgtacgcgttcgagggcatcggcatggtgctgccgctggaggcagaggcggcgaacaagagcaagttcggcgtcacgctcgggctgtccatggcgttcatcgccgtcatgtacgggctgttcggcgtcatgggctacgtcgcgttcggcgacgccacgcgggacatcatcaccaccaacctcggagccgggtggctgtcggccgccgtgcagctggggctctgcatcaacctcttcttcaccatgccggtgatgatgaaccccgtgtacgaggtcgccgagcgcctgctccacggcaagcggtactgctggtggcttaggtggctgctggtcgtcgtcgtcggactcgccgccatgtacgtgcccaacttcacggacttcctggcgctcgtcgggagcagtgtctgcgtcctcctcgggttcgtgctgccggcctcgttccacctcaaggtattcggcgccgagatggaatggcccggagtgctgtccgatgtcctgctggtcgtgatcggcctcgcgctcgccgtgttcgggacgtacacgtcgctgctgcaaatcttccaatcgtcaagcgcttgatcgacgcgcgttccgctgcgcgtcgatcatcgcattctccagggcaactacgatacatgtgttgagtgttgttcgtgagtggcttgtattggacgggggaaatctgtacgcttttcgtaccacagatttcagttactcccggtagcagtgtatgtgtatgcgtcctagatgttcctcctgctgtgcacgatgggggatacgatgaaaggacaagattttcacttcgtgg

SEQ ID NO: 15507 - DNA, 3046 bp, Zea mays
  Clone ID: LIB3060-016-A3_FLI
caacatcaaagaaaagaggtatattcatacccaactttggcaggtgcatcacatactaattcaccgtcacaagtgccaccaaacggtgcaaagatgatgtggcagatgccagttcctcctgtgtctacaacatacaggaaagctattggagagcataatgatacaaaccagtcctgcatgaagttccttagagaaggcagtgtgcagtcttctccaaatggatttctatcaagtgatgctgctccaagaaccagacaaggcacttttgaccttcaacttccagccgatcattatatagatgacgatgacacatcagataacaagcccatagatttccttggtttggcatcagatgcaaaaccccagaatgatgctgagcttacattagttagtgcagaacgcttgggcaagttcagtgataatagttcatcctcaggtttgcggactacaaataatcttggaagccgacaagttaccaacctgaatgaatcaaatactggcttctttatgggtagagcaaatggatctgtttccagaggccttccgcataccctcgagaactcgtggcaccaaccgatattgagatcaagcacaactactttcaatttcagtaaagaatactccaaagaaaagcacacaaatgaaggtacaagctcaaatttttttgacacaagtgcgaaactaacacatgacgacaagccaacaatcaataaaggtaaacaagtcagcagtataacttttttagcacccagatataatgatgctgatcccccaaaatacttcaaagctgctgatgggaggcctgccagttataaccaatttctttaccaaggtcagaatagttcagctggatggattgcacgaagtcctctggaaccttctgttatcaataattttgctagagttgaccgtccacatcattcgaatctgggtacatttactgtccccatctctattcctcaaatagacaatccttcaattgtctccccgatgggttcttgcacagcagagccaaggagcagcattgtcaacaatcctgctttaattccaagattcaatgggtcgtcaactgtgaattcgtacgccagtcttagtgctgtgacacagagcattggaacttcaatcccaaagctgaaaaatgtggataacttagataaacgctatcctggttttccacttgattcgttttctgtgtcccactcacgacatcaggtagcaatttcaagtaacctggagcaaaagaactcccagaagtttgaagattcagatcaacagtcccatggcaagggtatgaagaacttcaatttgaatgagacactgtcagattgtcaggaagatggtcttgtagaacaagatgggagatgtgctgccagttttcagcatggtaaagacggagggtcagtattcgggatctcttggctcaaaaataaagctgtgtctgctgatccaacagctttggagaaggcagggaagatttttggccattcgtttggaactacaatggagctgaaaaatgctaaagaccagaacgaaccagctgtgactattcgaaatttgtcagactctgcttcgacatctcttggctgtggaattaagaaggatgggccttcagaagacattgccactggaactttgctggtttgtaataaagcccaagaggatgctacatgtttacctctttcatgccagaaacatgtgcctaaagatggacaagatgctgatggagtcatcaagataagtggtgcctccatcaggaatttcatcgatctcaatgatgctgtgccaaacgatgacaattctgaggaatcagtagtgtcacatgaatgccaggcggaaccttcacggaacaaccatcctaaacgagcatttgtgattgatctagaggtgccggcttgtgaagaggatgctgcttgggattttgatcaagaatgtgcacagcctaaacctgatgcacaccaggaagttgacggcagatctgatacatctgctctagctgcagctgagaacatcgtagcgttgtcaaggattattccaacagctctagaggcatctgatgatatgttgcagtggtttgcagatctcgctgtattgaacatcaaggaccttgctgagcaagctgaactccaagcttgtaccaatgattccagtaacgacgagtcagattcattcgaatccttgacactgaagctggaagagaccaagattgatgagtactggagcaggccactggaacctgaaatcacaaccgatgaacaattaatttcaactgctcaccttctcaccaagcccagaaggggccagcaaaggaggcgacggcagaagcgggatttccagaaagatatcttgcctggcctttcgtcactttcccggcctgaaatcatagaggatgtccagttgcttgaggggttagtccaggcttctggtggatcctgggagtcgagtttaactaggcgaggacgttatggtgggcggactcgaggtaggaaacctcggaaaactgtagtaactgtaattgtagaagaggaggtcgaggttagcccaccgccgaaacctgttggcactggcgacctcgaagccgatgataggggtatggttggatggggcagaacaacaaggcggtgtcgcagagcgagatgtccgtcaggtaacaacttggctgctgcgtcttgagaaagggtattgccagcaagcattggacctgattaggtacttggtggttcacaattgttatagactccgatggatggactggtataaggtgatcacagtcatgagtgtacatactctgtcggcctattggcctcaccccaactttcatgcttttgggtcgaaacatggtttacgttcttataataagttccgtaaattagctggtaagacatttctgcgacagcattgtattaagctgttccaggttatgaggtccggtataaattcattgtgagaaaaaaaactgcaatgcctgtaaaccaccttgatctctgaagattagctcatcgcatgcgcaacaaagggtgtgaaagacttcgggtctgtattctttttt

SEQ ID NO: 15508 - DNA, 1556 bp, Zea mays
  Clone ID: LIB3060-016-B5_FLI
ctgtcgccagatttttttttacgagcgctcggctttctctgcctgagctccccagccgcgctcggatttatctgctgccgtctgttcatatctacagctggaatgtttaccatcgttatcctctcagttcttcttctccgttatctctcccggtcggccaagcgcttgtgggatttttctcgctgcccagcttgctccagctcggtgccaagccgccggaaaaatcctgccgcccagccgccgttcggtggtatttattcctcagcccgtcgcgttcttcgctgtccccatgccgcaacttcactgtggggttgctcctgccgcgcccctgttccaattcctatggtggcgctcggtctccagccgtgccgtgatttcttgctcggactgcgcccagctctgcccagcgccgcggttgccgagctcgccctgggtcgcgcccccttcctcctgttgcagctcggccctgcgctttctctttctctgtgctcgtgctcgccgtgccgtgagtcactggccagcagtccagctcgcctccacttcctacgttcctgctccagctctactgtcgcgcgcagctcgcccttgtgcaggtgaatcgcccttggtgctggtcgcgtgttcctcgcccggctcggccgcgacctcgccgttgttcctcagctcggcgcctgctgctcgttcctgctgcgcgtgtcaagctccttttaaccggtcgtcgtcgagctcctctattgcgcgcgtgaggttctctgctcgccatggcgtgtcaagttttctcgtcgagtctcgccgcgcgtcctgtttcctgctcaccagcgtgctctctcggctcgctcggttttaaaatccctatctcgtcgtcgacctcgccacgacttagttcgtccgtcgtgctggtcactattccatattgtgcctattagctcggatcctgtcccagctcatcgttgtgtcattcatagtccagtcgtcaaacccgtcatctcctgctcaaccccacctcaccagctcgctcaagactacaatcgaaggtcgtcgtcaatccgtgcgtcatcaagcaatctcaagaatcgggtgaagacgaagttagcagcgcgatatttcctaagcgctcgacaaattgcctggatcgaaaaatcgctaccgatctcgcggattcgtgtcagctgttgaaacggtgcgataattaatcacgtgatgcggaagatgactcaagtcgaccccaagcgcaggctaatccgcaggatgatgctgatggacgaaccggaagatggataatctgaacgagtgccaagccaaaggatgctcgccaagtggtcgcctaacaaacactaacctagtgttacccaggttatagttttgtgctgctgttgatggtgttaagtgccggtgggctcggccttcttatatgtctaagtacttcttctatacttcttattgaggatggtcacttgagctagcatatatttcaaatttatacttttgtaatcactccgataaaataatgtaaaatttttgtaacctgtaaaatttggtaataagatttccgctgc

SEQ ID NO: 15509 - DNA, 2277 bp, Zea mays
  Clone ID: LIB3060-016-B8_FLI
attgaccttctttatgccagtgtctccctcttagtagtaccagctgacttggatatctcccaaggatcagtgctttatgatgttgatgaagctactgtccgtagtcttaatgggtgcagagtagcagaccaaatcattagacttgttccaaattttgagaattttcgcacggcattaagatgtttgaagtactgggcaaaaaggagaggtgtttactctaatgttactggctttcttggtggtgtcaactgggctttactggttgcgcgtgtctgccagctctatcccaatgctgtgccaagtatgctggtctcacggttttttagagtttttacacaatggcagtggccaaacccggttatgctttgttctatagaagaggaagaacttggtttccctgtttgggatccacgcaaaaatcctcgagatagatgtcatcatatgcctattataacccctgcgtacccatgcatgaattcaagctataatgtttccacaagcacactgagggttatgttggaacaattccagtttggtaatagaatttgccaggaaattgaaatgaataagaccagctggcctgctctgtttgagccttttcaattttttgaagcatacaagaattatctacaggttgacatcattgctgaggatgatgaagaccttaggctttggaaaggatgggttgaatctcgattgcggcaactaactttgaagattgaacgtgatacatatggaatgctacagtgtcatccttacccacatgaatatgcagacccttctaggcagtgtgctcattgtgctttcttcatgggcttgtcaaggaaagaaggtgtgaaaatacaggaaggacaacagttcgatattcgaggaacggtggatgagttcaggcatgaaatcaacatgtatatgttctggaagcctgggatggagttagctgtttctcatgttcgtaggaagcaggtcccagcttatgtgtttccagagggttataaaagacctcgcccttcaagacatgtgaaccatcagtctgataaaaatgacactgaagatggcacagcgaccaggtctccagacagtcaactgaagagaaagcatgattctgttggaactgatgatatcaggtatgcaaagaggtcatcgaccagcccagttcatccgaaaaattcacctcaatctggaagcactggcgatgagactagatgtaacaaccaaataaaaagggctcctagcgatgcaagtggtggcagtccggcttcacctcaggcatcagagagaagcccagatactattctgtctgcccctaggtgcacgacaacaggagcagtgtgttctggtgatgcaattagtaagcatagtagtgttcctcttgttgagaactgcaccactccgactgtagcagtgtgcacaactttgaagcgcgtagctgagaaagttgtttcagagctagttggaagtgaaaggctggggagcaacaacagtgcggaattgttggagagtatggaaaaggaggatgtccttgctgaaaatgttcgttttggcgggaatggagttgcgcaaggtggccttccagaagagttagagccaaacaataggattgaagcggtttcttgagctgatgcaggtatgaacaagtgtacattgtggaagtcgtcactgaggcatggtcttgaactcatcccttgtgcattcggtatctacattgccctgttttctttatactcggctgtttggtatttgtgtgctgctttatggcagggttagtggcatcaaccacacaagattggggaaaaaatggtgtagagatggataagttctacccccttgctggagggaatggtaagtagctcaactcacaagtttccttctggacacagattcgcaattacgggggtttctatgatgatggatgatgggagattatcggatatcatgtcttgcacaacggcatggcaaaaaaaaaacgacgaagaagattttgtggaaggccatggtcgaatgtcatgtcttgctggtacactctagatgagcatgaaccttaagttttcgtttttttttaacttgttgagcagctgactcttgtgtatgaactgagctgcagcgggcttccctgagttgacttgtttgggtctgagatgcttctgccatgttctaggtctagaatagaactagatgcggtggtgtgttctctaccctaagtccccttttgtgccctttccttctgtaatataagatctttgactgtttcttgtgtgtcttctggtccatagattttgc

SEQ ID NO: 15510 - DNA, 1116 bp, Zea mays
  Clone ID: LIB3060-016-D6_FLI
cacaactccacgtcacacacctcacagagctgcagcagcatcagctgccacctcctgcctctcctccttccttcctgcctgcataggttgttgctacacgtatatattctgaagaagagatcgagatgaccagcgtgtggaagaccaaggttctgcctggcctcaacaagatctttgacaaggatggcaagaaggctgcagctgcaggcttcttgaagtccttcaacaaggaggagattgacaaggagattgaggacaagaagacagagctggagcccaaggtcgtggaggcctacgaagcatctcctcctgaggtcaaggctctgttcaaggataagaagccagtcaaggtcagcaagaagaactcggctgcagtcaccaagttcctcgatgagctggctaagattgacttccctggagccaaggtggtgagcgaggcggtggccaagtccggcacctcgcccctgcttccggcgatcaccttcatcttggacaaggtcgcaccgtttatccccaaggaggagcccaaggcggagccggcggcggaggccacctcccgggaagtcgccgtggaggagaagaaggaggaggccgagccagctgcagcgacggaggcggcaccggcgccggcagagacaccgtcggaggaggcggtggtagaggagaagaaggaagaagagaagaaggaagaggaggataagccggctgccgaagaggcggcgccgccagcagcagcagctgctgctgaggagaagtgatcctgttgacggatcgagcatgcaaagcgctccctcctcgctcccttgcttgcttgcttgctgctggtaaattaaattaagttgccgtgatacttaagcgtagccgcacggagtgaaaagttattaagtaaaagcagacaaacacttggcatgcatggacattaatttgttattctttgtaccgtcgtcgtctcgatgaaccgcgtgtacatttgtagtgtggggttttctttgttttcgatttgggggtgatcattacaagaatgtgtaattatttatgttcatatgtttgttgatgatggacggacatatttaagaagacaactcttttgtgtatatatattttcttgttattttc

SEQ ID NO: 15511 - DNA, 1028 bp, Zea mays
  Clone ID: LIB3060-016-D7_FLI
atagtgttgcttggatggaagacagtgatttccacaatctgcgaactgaatctctcaagcagcaatacaacttggtcaaggataggacagcggttcaggatacattcagctatggctcccatgtgatgcaatatggttcattggagttgaatgttaagcatctgttttcgtacattggcacaaaccctgctaacgatgacaacacgttcatagaagacaactcgttgccatcattctcaaaggctgttaatcagcgcgacgctgaccttgtctacttctggcagaagtaccggaaattggcagacagctcacctgagaaaaatgaagctcggagggagttgcttgaagtgatggcccacaggtctcatgttgacagcagcgttgagctcattggaagccttctctttggctctgaggacggtccaagggttctgaaagccgtccgtgcagctggtgagcctctggtcgatgattggagctgtctcaagtccacggttcgtacttttgaggcgcaatgtgggtcgttggcgcagtatgggatgaagcacatgcggtccttcgcaaacatctgcaacgctggcatccttcctgaagcagtgtcgaaggtcgctgctcaggcttgcaccagcattccttccaacccctggagttctatccacaagggttttagcgcctaagaatcataaggtgaggcgaaatatttcagccgctccaccgcaacgaactggtttacattaccagtcctcaggggggtcctagttcttgaaccactattatagctgttccaccgttccagattacatagctatgcccaatttccggtgtacatattatagtcggaaagttatttggcaattgtattggtcgttgctgtatatattccctatagtttgttagcagatgtgtagtttgtaattccataaaaatgaagaacgcgttactgctatttctatgtagccgactgatgctcatgtgaaactttaccccattcttgttgggaaatggactatccgtggtggaattctcgc

SEQ ID NO: 15512 - DNA, 922 bp, Zea mays
  Clone ID: LIB3060-016-F7_FLI
catacctgccgtccgacacgcccaaggggctggaggacctgaggaagaaggacctgcaggcgctgcgcggcgacgggcacggcgagcgcaaggtgttcgagcgcgtctacgactacgacgtgtacaacgacctgggcgacccggacaagaacccggcccaccagcggcccgtgctgggcggcaacaagcagtacccatacccgcgccgctgccgcaccggccgccccaggaccaagaaggaccccgagacggagatgcgcgagggccacaactacgtgccccgcgacgagcagttctcggaggtgaagcagctcacgttcggggccaccacgctgcgctccggcctgcacgcgctgctgccggcgctccgcccgctgctcatcaacaagaaggatctgcgcttcccgcacttccccgccatcgacgacctcttcagcgacggcatcccgctgccggcgcagaccgggttcgacgccatccgcaccgtcgtcccgcgcatggtcaagctggtggaggacaccaccgaccacgtcctccgcttcgaggtgccggagatgatagagagtaagctagctagcagacgcactcatctcaggactgcttgttatcttaatcttaaaaaaaataaatgatttgctttgctaggggaccggttctcgtggttcaaggacgaggagttcgcgaggcagacgatcgcggggctcaacccgctgtgcatccagctgctgactgagttccccatcaagagcaagctggacccggaggtgtacgggccagcggagtccgccatcaccaaggagatcctggagaagcagatgaacggcgcgctgaccgtggagcaggcgctggcggcgaagcggctgttcatcctggactaccacgacgtgttcctgccctacgtgcacaaggtgcgggagctgca

SEQ ID NO: 15513 - DNA, 856 bp, Zea mays
  Clone ID: LIB3060-016-H9_FLI
tctctgttaggcatctaactgaataaatgatctcctaaagaattgacagattccatcactgagcagcccttcgccccggtggctgcggtgtcgcactggctgacacctgctcgcagttgcattacaagttttactgactatgtattttcaggtttattcaatttcggttctaatgcttctgacagcagttgtatcagtcctcttgttcagcttacatgtatccctcgcatccttccttggatccacataagtgttaataataattttgttgcatctcctctgctgatcagagctttcaaactcatgacagaataatgtactaaacttcagtttggtgtctatctcagtgtacctacactcagttggaaaacttcaaccacactgcaacaaggtttataaaaggaaaaacaaatttatgggctcaaacaaagtgtgatagtgaaagtcattttgcttccagcttaagaaccaagccaagaaaacagatatcaactgtgacgccacactcaaaagcttgtttggtgggagggacaaggttgggatgctggagatctccaagcttttgagtcgtggcttcccgaaaatctccaagcttttgtggtccatggagccagggatggctctttggtaaaagacttcgttgtggatggcctcttttatggtccatgttaagtcccaagtcccactaggtggttaagcagaaaaatcttgtgatggcattaagactttcagactttgtttttgggtctgatgcatgtaaaaaggattcccagtgtttctgttgctcttgcgatcctgtgaggacacatatgagagaaatatttagtttgttgatggcaaatcttgtcttatgttc

SEQ ID NO: 15514 - DNA, 1373 bp, Zea mays
  Clone ID: LIB3060-017-A11_FLI
aaaaaactatttagtatagcaccgatatttggagtatatttatttatttgttaattaattggtaacagagctgcacatttgattactgaggtgctgaatggactattcctccataatttgttttttttgtggcgctgcagagacttcatttcattttagaattccattatcttgcttgcttgtatgagtgccatcatttgtacccaaatctctcattattgacctctactatattatcgtcaggattcaaccaccactacagcaacactgtttccatatatatctagcttatcaaggtcgttctccatggacctcctccagttctttggtgtaaagtggtttggctgaaatattttgtttactgcagttctagtatttagtgccagttgcattgattgcaaatttcaggatggcgaattgatgatgtttgaaagtggacataagagaggaatcttgttacaatgcccttaccattttgatgcagatttcaatgattggctccataagaaacttgagttaaattttgttatagtagatgtacccttttatgtgtagcttactcactggacacgccaaccttttgtgttcctgcagtttgactggtgggacgggcattgctggtttgactactccagtggcaataccaactgtatctgtccttggtgctgccccagctgcagcccctcttctgcaccctacagtgcctggtcttgcaattcccggggcaactcttccaattactaccccatctattgatttggctccacctagtcaatgcctattgctcaagaatatgtttgatccagctttggagacagatcctgatttcgatttggacatcagagatgatgttcaggaggaatgttccaagtttggtcaattaaaacatatttttgtagacaaaagtactgccggttttgtgtacctgcggtttgatagtataacagccgctatgagcgcacagaaagcactccatggaagatggttcgcagggaagatgatcacagcaacttttatgaccccacaacagtatgaaatgaagttcccgagctagtgaacagatgcatgattaatatggacgtagttgcttgggctcggtgggtgctggcatttctatattttagcgttttgagcttgtgtcaacttattactggaggtaattataaaaaaaactagtggaggaaaatttagtggaagctagtgtatcgggaaatggctaacgaaaaatggtgaaagaaagagtttccttgccctgtgggttagtgctcgaattgaaactgtactgtgtaatggagtttctccctgaagtgctagtactaatacctaaaatgatggaagaaagagttgacttgcgttgcgcttgttgatttgat

SEQ ID NO: 15515 - DNA, 1702 bp, Zea mays
  Clone ID: LIB3060-017-C3_FLI
ctcgccgcctccactacagggctttgctcctcccaactctcgaaaccctacccacccgatgagagatcgatcggtcgagcgcgaattccccagccgcgagcggggggatcggccgccgcccggggtgctggggcccccgcgccgcgggccggcgtacaagacgaagttgtgcgcgctgtggcagcgcggcggctgttcccgcgacacatgcagcttcgcgcacggacacgccgagctccgccggttccccggatcgcgcacctcgttcccaccccgcgccgggagaagagattatagagctggtgactttagagataggtttgataggaggcgctcacctcataggaggcattcccctgatggagattccaggggccatcgctcccttcgtgaccgacggccaaattcccaagaaagggaatctagctattcacggtctcccagtaggaagagtgaaatgaggcatgagaagaagcctgatgatggagaaactaactcatctaggagtctcagtgtctctgacaataatgatgatagaaaaaaggagacactgttaagtggtgatgataaagaggatcacgaaatacagctcaaacaaataagacaggacatggaacttttgcgtgatgataaatctctcttggagataattttggatgagaagaatgctgaagtgcgcaagatttctagcagattaaatgatcttgatctgcagctaaggaaggagaaagaggaatgccacaggatgacctcaaaaattaaaaagttccttaaagcccatgctcgctttttgaaagcacaggaagaattgaaaaggtcacaagctcgttttgagagactcggtgatttacttgcttcagatattctgaaacgtggtgctaatgaagaagtttctagtatcaatgttgatgaagatccaaatgttccttatgaaaggagcccaaatgctgctatagctaagaagagatcaataccatactcaacaagtgaagaagcgaaagcccgtgaagaaaagaagagagcgggactctgacacaactaggccagataaatataggtttgaaggtactattgcaggatttgaaaaactaagcaagggaaccgagccaacaaaatctttatatttgaagaagaaactgtgggaagatgaaaaggataagataggcaactttgtctcctcagccaacaccgacaaggtcaaagaatctccggtcaaacatgttttgccctccactggtatggctgctcatgctttagacgatctgtttgaagctgttgaactggaggatagacgtgacacatcaatagaaaatgatgctgatgacgaaactaggtcgcctgttatgcccccacaaccaccaccggtggttaatacttacgagcagtacgaggctgatgatgaggaagtcgacgtggaataagtagaatgccgagatggtactggaatgagctatatagctctcgcgcctgtgtaaagcattatgtaatatgtatttgatgctggagtttaccttgcatacaaagaatcgtcattaatgatccttggtggatgcggtttaagcactcaactcttttgttaatttgctgaaggcaacatgccctgttacctgtacctaatataccacgtggtggctagctagccagccttgtcagtgccctggtacttttgggtggtcttgctgtgctgttcgcggcacttgag

SEQ ID NO: 15516 - DNA, 1195 bp, Zea mays
  Clone ID: LIB3060-017-C5_FLI
ctccacgcgagcggacgacacgaagcggccatagccgcacgttgggatcccctccgctacgcctctcgatggtctccgccagcgcgccgccgccgcaggcccagtccgacgcggccgggtcgggggaggaagtgagcaagaaggtgcggaagccgtacacaatcaccaagtcccgggagagctggacggagcaggagcacgacaagttcctcgaggccctgcagctctttgatcgtgactggaagaagatagaggcttttgttggctccaagactgtcatccagattcatcttccatccataggaactctggcatgaacgtgcctgtttcttcatgggctcatagttccatcccacaagctgttgcttcatcaatggtgaaagatttaggtgctggaacaccaggttcaaacaatttttgctcaagtagtactgaaggccttccaagaacttggcaacctggtgaaacaaatgatccaataaatcaaattccgtcactccgccttatgccagattttgcgggagtgacagcttcttaggtagtgttttcgatccaagtacaagtggtcatctgcagaaacttaaggagatgaatccaattgacgttgagacggcactgttgttgatgaggaatctctccatcaatttaaccagtcctgattttgaagatcaacgcttctgatggacctgggctagggagctcaagaagttcagctctagcgacgagcgcgcctttcatgtaaggaagcgtgcacccttcctggcctttcctatccccaaaagctcggccatctaggctcgtgaaatgctgcttcagatcaaggctgtccttggaaatgggaagatgaaaggagaatctgggtaatgccggttgctccctttcccattctttgttgagttcagctttctgattggtttctggtggccctcttgatacggaacttgtgcgctccgtctgagaaagcatgtgtgcaaagtttcatttgaggagttgaggcgatcatggcgctgtaaaatgcggcttatcttcccccttcagggctggtttggtggaccaaccctcaaacatttgcaattcctatgtacgtctgtagtgcgtcaggtgttgttgcccacgtgtaaaaggaaaataaattcacaatgtaaaggagacttgtgcgttagcactaccatttgaatttatgaaatgtcaaagc

SEQ ID NO: 15517 - DNA, 1450 bp, Zea mays
  Clone ID: LIB3060-017-D1_FLI
ggcagtcaggcgcatgctgcgcgcggctccgcagcaccccttacctttcgccgattccaccggccgtgccttcctccaccaccagccgcggcacacccgcggaaccgccgctcgagctcgcgcctgaaccccccaaactctgccaaatttcgccaaatccagccggtcggaccccgcaacacatcgccaaaaccaaccgggccggccgacacaagccgcagcccgtggcgatggacctggcgtcgagcgaccttgcggcgctgggcgcggcggagctggtccgcgtctcggcgtcgatcccgcgcgcggctccccgcaccttcgcgctgctcaccgcctgcctcgtcttcccgctctccttcgccgtgctcgcgcactccctcttcacccaccccatcctgctccgcatccagggcgccacccactccgagctagcgcagtggctcaggctcttcgcctaccagttcctctacctcatcgtcctcttcaccttctccctcctctccaccgccgccgccgtcttcaccgtcgcctcgctctacgccaacaagcccgcgtccatctcctcctcgctcaccgcgctgccccccatcctgccccgcctcctccgcaccttcctctgggtctcccttctcatgctcgcctaccacctcgtcttcgcgctcaccgtcctcctgctcatcgtcgtcttcatccccaacgcgtccgagtccgagtccgcgccgccctccctcgccttcgtactcttcctcgtcgtcgtcgtcttcgtcttcctcgggatccacgtctacatctccgcgctgtggcacctcgccagcgtcatctccgtgctcgagccgctctgcggactcgccgccatggccaagagcaaggatctgctccagggccgcaccggcaccgcagccacgcttgtcgtctcctacttcgcggtctgcggcgtcacctccgtgctgttccgtgccgccgtcgttaaggggcgcgccgaggaggggagcttcggtctggccttgcccgggcggctgcttgtcggcgccgtgctgctgtgcgttcttgtctgtgtcaatttgctgggactgctcgtgcagagcgtcttctactacgcctgcaaggccttccacaaccagcagattgaccggactgcgttgtatgagcaccttggagggtaccttggggagtacgtgccactcaagagcaatatccagatggagaacctttgagattggagcataggacaagggtaagttacacacctcattgcttcatactagcagtttcatgtggatctttatcagaatatgagtatggcttacaaggggctatctggtcttgttgattctagtaccatgtagtagttcgtaatctgtataagtggtaatgcacagtatggaaccaatctgtggaatggaagtatggaacagagatgcatgaacaaggttgtctttcatctcgc

SEQ ID NO: 15518 - DNA, 1122 bp, Zea mays
  Clone ID: LIB3060-017-D3_FLI
tcttcttgccggatctccacaccccattccaccccgcccatgggtgcccccacccctcgccgctgacctgtgggtacactgccccctgctcccccgccccgctcccgctcgcccacgcgaaccctaggcagctaggctttgctgctagaagagctccagcgaccgacgaggagaggagaataaagctcaaatcttggatgcgcccgaaccgatggcgacacctgccgcagagaagccggaagatgtagagatccgtgaggtttgggcggacaacctcgagacagagttcgccgtgatccgcgacatcgtcgacgactatccgtatgtggctatggacactgagtttccgggcgttgtgtgtcgtccgctcggcacttacaagtcggcggccgagttcaactacgccactcttaaagctaacgtggacatgctgaagcttattcagctcgggctcaccttgtccgacgagcatggtgggctgccggcgctaggcccagacggtcgtccctgcgtctggcagttcaactttcgaggatttgaccctcggactgatgtggctgcagcggactccatcgatcttctacgccgtagtggtattgacttctctcgccatgctgctgatggagtcgactctcgctgctttgctgaactgctcatgtcctccggcgtagtattgaattcagatgtgcattgggtgacttttcatagcggctacgactttggctacctgctcaagctactcactggcacaaatctccctgatacgctgccaggattcttcgatctcatcaagatttactttcctgttatctacgatataaaacacttgatgaggttctccaatagcctccatggagggctgaacaagcttgctgagctgcttgatgttgcaagggttggaatctgccaccaggcagggtctgattcgcttctgacagcactgtccttcaagaagcttaaagaggcatacttcaacgggttaactgagaaatatgctggtgtgttgtatgggcttggctttgagggtgtagagaccacctctgctcactgagtaatggataattaaataaaagatgaactatttatgaaaatggagaaatctgtttggtgtctttgtctgac

SEQ ID NO: 15519 - DNA, 849 bp, Zea mays
  Clone ID: LIB3060-017-E3_FLI
tggggggccaggttcggggattttctcggccgggaccattgtttcggtctcttcttatatggaataccgggagggcggtctttccctccccggccgagttttttttaaatacatcagctacagaacttgtcagttgtcactgatgccatcgcatgtgtacatgttttaggtgatgttttcgtttcaaagaaaactgacaagcaaaagaagaggaagataaagaaggttgaggacaaaatgcttggatggggtgggcatgacgataagaagctgatgattcctgctacagtaattttaaggcacatgttcactcctgctgagctgagagctgatgaagagcttcttcctgagcttgaggctgatgttagagaggaatgcatcaagtttggtccggtggataatgtcaaggtttgtgaaaatcatccacaaggtgtcatattggtgagattcaaagacaggaaagatggtgccaaatgcatagagaagatgaacggcagatggtttgctggacggcaaatccatgcgagcgaagacgatggctctgttaaccatgctcttatccgtgattacgacgcggaggtgtcaaggctggatcgatttggacaagagctagaagagtccacatagagtgtatatatacacacacacaccagggattagagtaggtgtgttacctcattcataggtaggttcgcctgattgaacatgagaaagaagttattggatacacctgctaataagagtagtgaccggcttgcagagctggtgatatcatcactagcgaagtagcagcacactgctttctcaaatgtgttgtttaatgaatgagaagctcatatcgatactatt

SEQ ID NO: 15520 - DNA, 637 bp, Zea mays
  Clone ID: LIB3060-017-F5_FLI
ggccactattattattttaccatcacctacccgctgccttcctccttcttttccctttcccatcgtcgaatcctcgccccttctcccgtcggctgttgcttttgcttcgaattcccgatttgcttgccggaaccctagcgacgccgtggtgacgcgacgccgacgcgtatggagatctccttcgaggcgtgggagggcgtgcagcggcatggtcaggacctcgcggaccgcctcgcgcagggtttcacgggcctgctccaggtgccgccgcagttcccgtggccgccgtcgccgcacaagcggatgcccttcgacatcgacctccccgtcgtccccttcggcgccggcggccccctcggcgtcccggggaaggacttccccttccccgccgcggccgtctcctcggtcatcgacatcggcggcaggctgggccaggccggcgctgagctcggggcgtccgtgggcggggccgtgcagcacgccgtgcggcgtctgcccgtgccgttccggaacggacagatccggcgccgcaagctaccgccgccgcttcctcagccgcccgcggattcggtgggcgagggcgcggtagggctcttcgtcgaaagggctgctgtagataggtgccccctcgaggcgg

SEQ ID NO: 15521 - DNA, 1754 bp, Zea mays
  Clone ID: LIB3060-021-F2_FLI
acgtcgtgggaccgaacatgacaacgccctctaccgcaccagcgccattggcatctctcctcctccgcgtctccgcggcggctgttccagtggctcgacgacgtcctaagagccccgcggctgcggcggcggcacgctgggagggaggtgggggcaggaggaggtgccgggcggcggtggtggaggaagccggggtgctgctgcccaaggagggggagggggaggaggccccggacgcggcggcggggcgctacgactggagggaggagtggtacccgctgtacctggccaaggaggtgcccgacgacgcggcgctcccgctcaccgtcttcgaccgccagctcgtgctctggcgcgacgcccacggcgtgctccgctgccacgaggaccggtgccctcacaggttagcgaagctatcggaagggcagatcgtggacggcaagctggagtgcctctaccatggctggcagttcgacggcgacggcaagtgcgtcaagataccacagctgcccgagggcgccaagatcccgcgcagcgcgtgcgcgcgcaactacgaggtgcgcgactcgcagggggtggtgtgggtgtggatgtcggacgccaaccctcccgacgaggggaagctgccgtggttcgagccgtacgcgcgggcggggttcacggacctgtcgacggtgcacgagctcccctacgaccactccatcctgctggagaacctcatggaccccgcgcacgtgcccatctcccacgaccgcaccgactggacggccaagcgcgaggacgcgcagccgctcttcttcgacgtcaccgagcgcacgccccgcggcttcgcgggctactggggccgcaccggcacgccgcacctccgcaaccttctgcgcttcgaggccccctgcgtgctcaccaacacgctcgagttcgccgacaaggacggcagggagcagtgcttctccgcgcacttcctctgccgccccgccgggcagggcaagtccatgctcctcgtgcgcttcggctccaccctcaggtcgccgctcgccaaggtgctcccgtcctggtacttccaccagaacgcgtgcaaggtgttcgagcaggacatggggttcctgtcgtcgcagaacgaggtgctgctccgggagaagctgcccaccagggagctctacctcaacctccgctcctccgatacctgggtcgccgagtacaggaagtggatggacagggcgggccacggcatgccctactacttcggccacagcaccctgtcgccgccgcccgtgccggccgtcgtggagcaggcgcccgcgggggccgtcgcggggatctcggcctcgttcccggccaagggcggcgtcggcatggtgcacgcgcccaacccgaccaacaggtacttccgccacgtcgtgcactgcaagagttgcagggcaaccgtcaaaaagtacacctcgttgaagaccgtgttcgcggccctcgcggcggcggccctatcggccgccatcctggcggcgaccagacagtggaaggccgtcttggtggcggcgtcggccgtgctagccgccgcatcctatgcgtgtgacgcggtgctttctttgatcaccaccaacttcatcaggacacacaggagactgtaattaatgtggtactggccattgtatatttaggtaatggccggcggggagcgttctctgtacatttgtatcaccgtagctgctgcctgcggctgttgtattttgtgtatttgcagtaacgttttgcatgtc

SEQ ID NO: 15522 - DNA, 1081 bp, Zea mays
  Clone ID: LIB3060-028-C4_FLI
cgccctgctggtggttttccattcatcatcgatcttcctgcgtctctgaactttttctgctgtgtctgttggccgggagcagaggttgctacacgtatatattctgaagaagagatcgagatgaccagcgtgtggaagaccaaggttctgcctggcctcaacaagatctttgacaaggatggcaagaaggctgcagctgcaggcttcttgaagtccttcaacaaggaggagattgacaaggagattgaggacaagaagacagagctggagcccaaggtcgtggaggcctacgaagcatctcctcctgaggtcaaggctctgttcaaggataagaagccagtcaaggtcagcaagaagaactcggctgcagtcaccaagttcctcgatgagctggctaagattgacttccctggagccaaggtggtgagcgaggcggtggccaagtccggcacctcgcccctgcttccggcgatcaccttcatcttggacaaggtcgcaccgtttatccccaaggaggagcccaaggcggagccggcggcggaggccacctcccgggaagtcgccgtggaggagaagaaggaggaggccgagccagctgcagcgacggaggcggcaccggcgccggcagagacaccgtcggaggcggcggtggtagaggagaagaaggaagaagagaagaaggaagaggaggataagccggctgccgaagaggcggcgccgccagcagaagcagcagctgctgctgaggagaagtgatcctgttgacggatcgagcatgcaaagctctccctcctcgctcccttgcttgcttgcttgcttgctgctggtaaattaaattaagttgccgtgatacttaagcgtagccgcacggagtgaaaagttattaagtaaaagcagacaaacacttggcatgcatggacattaatttgttattctttgtaccgtcgtcgtctcgatgaaccgcgtgtacatttgtagtgtggggttttctttgttttcgatttgggggtggtcattacaagaatgtgtaattatttatgttcatatgtatgtttgttgatgatggacggacatatttaag

SEQ ID NO: 15523 - DNA, 1922 bp, Zea mays
  Clone ID: LIB3060-028-F9_FLI
cacagagtcacagacagaccagcgctctgcatggccatcattctggtgaccacgcaaaaaggaccagccattcccgggcaaagatggtttcagaagccagcgagcttggcattggcacacactatacacactggtcgctgatattttgattccccacgtgcgacacggcatctacccgtcgaggaactccacatctatctctccatgaagctcgctatatatgcatgtgagcttggcattggcacaccacagagcagccacttggatccggtgctcagcggaacagctagctatagcctgtagctagcagctagcttcagtcacaggccggacggtcggctcacacacagctagccgccgccgctgctagcttagccaccagtagtccgatctgatctacaggcagggggccagcaggggcagctagctagctagccgcgcgccggcgccatgatgaacctgaacctgaagcagccgctcgtgctgcccgcgcaccacagcaatgtcgtcggctcgcgcctgtcgtcgtcgtcgccctcggcagccgccgccagcaggaggaccggcggcggcgtgtcctcccggtccggctcccggcggcacgtgcggctgccgaggatcagctgcagcgccaccgaggaggtcagcggcgccgtgtcgtccgtcaccgtggagaggatgctcacggtgacggcgtcggtggaggcgtcgccggccatcgggcagatgtacttccagcgcgccgtcgacgacatcggcgacctcctcggcaagacgctgctgctcgagctcgtcagctccgagctcgacgcaaagtcgggcgtggagaagacgcgggtgacggcgtacgcgcacaagacgctgcgggagggccactacgaggcggagttcaaggtgccggcgtcgttcgggccggtgggcgcggtgctggtggagaacgagcaccacaaggaggtcttcatcaaggagatcaagctcgtcaccggcggcgacagcagcaccgccgtcaccttcgactgcaactcctgggtgcactccaagttcgacaacccggagaagcgcatcttcttcaccctcaagtcatacctgccgtccgacacgcccaaggggctggaggacctgaggaagaaggacctgcaggcgctgcgcggcgacgggcacggcgagcgcaaggtgttcgagcgcgtctacgactacgacgtgtacaacgacctgggcgacccggacaagaacccggcccaccagcggcccgtgctgggcggcaacaagcagtacccatacccgcgccgctgccgcaccggccgccccaggaccaagaaggaccccgagacggagatgcgcgagggccacaactacgtgccccgcgacgagcagttctcggaggtgaagcagctcacgttcggggccaccacgctgcgctccggcctgcacgcgctgctgccggcgctccgcccgctgctcatcaacaagaaggatctgcgcttcccgcacttccccgccatcgacgaactctacagcgacggcatcccgctgccgccgcagaccgggttcgacgccatccgcaccgtcgtcccgcgcatggtcaagctggtggaggacaccaccgaccacgtcctccgcttcgaggtgccggagatgatagagagggaccggttctcgtggttcaaggacgaggagttcgcgaggcagacgatcgcggggctcaacccgctgtgcatccagctgctgactgagttccccatcaagagcaagctggacccggaggtgtacgggccagcggagtccgccatcaccaaggagatcctggagaagcagatgaacggcgcgctgaccgtggagcaggcgctggcggcgaagcggctgttcatcctggactaccacgacgtgttcctgccctacgtgcacaaggtgcgggagctgca

SEQ ID NO: 15524 - DNA, 1784 bp, Zea mays
  Clone ID: LIB3060-028-G9_FLI
cacttgccacagctaaaactggtgctaattaatttcagctcatcgcacgctgatcaccaccgcttcaccacagcgaaccaccatggaaagattctactacgtcgccgtggccaccttcgtgctcgtcttcctgctccaccacctcttgacgaggaagaagcagcaacgtctgccacccggcccgcggttcgcgtaccccatcctcggccacctccccttgctcaagaagccgctccagacctcgttcgccgacctcgtgtcgcgccacggcccaattattcacctgcgcctcggccgccgccacgccgtcgtcgtcggctcggcggcggtggcgaaggagtgcttctccggagagctcgacgtcgcgatcgccaaccgcccgcacttcccgtccgcgcgcgaggtcaccttcgactactcggtgctcacggccgtcaactacggcgcgctctggcgcaccatgcggcgcgtctccaccgtgcacctcctctcggcccaccgcgtcaacgtcatgtcggacaccgtgatcgcccgcgagctgcgcgtcatggtgcgccgcctcgcccgcgcctccgcctccgcgccgggcgacgccgccagagtggagctgaagcggaggctgtttgacctctcccacagcgtcctcatggagatcatggcgcagaccaggaacacctactccgacgacccggaggaggacatgtccagggaggcgcgcgacatgaaggacatcatcgaagagatcatcccgctcgttggtgcggccaacctgtggaactacgtgcccctgctgcggtggctcgatctctacggcgccaagaggaagctcgcggacgtggttaaccgaagggacttgatcttcgacaacatgatcggtgcagagcggcagaagctgaggcagctggaacgcaagaaaggcgaggcccatgccagcgaatcggataagatgggcatgatcggcgtcatgttatcgctgcagaaaacagagcctgatgtctacacggacacctttatcaacgctctcgtgtcaaatctgctggccgccggcacggagacgacctcgacgactctggaatgggcaatgtcgctcttgcttaaccacccagacgtgctgaaaagggcgcaagaagagatcgagtcgaacgtcggaagggaccgtcttctcgacaagaacgacctcccccgcctgccctacctccactgcatcatcagcgagactcttcgcctctaccctcccacgccgatgctgctgccgcacgaggcgtccaccgactgcaagatccacgggtacgacgtcccggcggggtcgatggtcctcgtcaatgcgtacgccatccaccgggacccggcgatgtgggaggacccggaggagttcaggccggagcggttcgagctcggcagggcagaggggaagttcatgatgccgtttgggatggggaggcgcaggtgccccggcgagaacctcgcgatgcgaaccatggggctggtcctgggggcgctgctccaatgcttcgattggaccagggttggggatagagaagttgacatggcaacagccactggcaccatcatgtctaaggctgtcccactcgaagctcagtgcaagccgcgagcgaacatgtctgctgttcttcagaaaatctagagtgagattgtgaatatttctagttgcagataaacgatacataactatgcaatgcttatatatagtgtatagtagtatagcagtttcttcattttaaagttgtacaatgacattcatagaaaataacgacataaataat

SEQ ID NO: 15525 - DNA, 2233 bp, Zea mays
  Clone ID: LIB3060-040-B9_FLI
ctgctccattctcagccgccgccaatcccttcccgtgctccgcaaccgctgagtgagaagaagagatggccggcaagggcgatggcccggctatcggcatcgatctcggcacgacgtactcttgcgtcggcgtgtggcagcacgaccgcgtcgagatcattgccaacgaccagggtaaccgcaccacgccctcgtacgtcgccttcaccgactccgagcgcctcatcggagatgcggccaagaaccaggtcgccatgaaccccatcaacaccgtctttgatgccaagcgtctcatcggcaggaggttcagtgatgcgtctgtccagagtgatatcaagttgtggcccttcaaggtcatttctgggcctggtgagaagccaatgattgttgtccagcacaagggtgaggagaagcagtttgcagctgaagagatctcctctatggttcttatcaagatgcgtgagattgctgaagcttaccttggtagcacgatcaagaatgctgtggtcacagtccctgcctacttcaatgactcacagaggcaggccacaaaggatgctggggtgattgctggccttaatgtgctgcgtatcatcaacgagccaacagctgcagctatcgcctatggtcttgacaagaaggctaccagtgtcggtgagaagaatgtcctcatctttgatcttggaggtggtacctttgatgtctccctcctcaccattgaggaaggaatctttgaggtcaaggccacagctggtgacacccatcttggtggtgaggactttgacaacaggatggtcaaccacttcgtccaggagttcaagaggaagaacaagaaggatatcactggcaaccccagggctctccggaggctgaggaccgcttgtgagagggcgaagaggactctgtcttccactgcccagaccacgattgagattgactcgctgtatgagggcatcgacttctactccaccatcacccgtgccaggtttgaggagctcaacatggacctgttcaggaagtgcatggagcctgttgagaagtgcctgagggatgccaagatggacaagagcaccgtccatgacgttgtacttgttggtggctccactaggatccccagggtgcagcaactgctccaggacttcttcaacggcaaggagctgtgcaagaacatcaaccccgatgaggctgtcgcctatggtgctgctgtccaggctgccatcctgagcggtgagggcaatgagaaggtgcaggacctgcttctgctggacgtcacccctctgtccctgggtctggagactgctggaggagttatgacagtgctgatcccgaggaacaccaccatccccaccaagaaggagcaggtattctccacctactcggacaaccagcccggtgtcctgatccaggtctacgagggtgagaggacccggacacgcgacaacaacctgctgggcaagttcgagctctccggcatcccccctgcaccccgtggtgtgccacagatcaccgtgtgctttgacatcgacgccaacggcatcctgaacgtgtctgccgaggacaagacaacggggcagaagaacaagatcacaatcaccaacgacaagggccgtctctccaaggaggagatcgagaagatggttcaggacgctgagaagtacaagtctgaggatgaggagcacaagaagaaggtggaggccaagaactcgctggagaactactcctacaacatgcgcaacacgatcaaggacgagaagattgcgtccaagctgccggccgatgacaagaagaagatcgaggacgccatcgacgcggccatcagctggctggacgccaaccagctcgccgaggcggacgagttcgaggacaagatgaaggagctggagagcctctgcaaccccatcatcgccaagatgtaccagggcgcgggtgaagacatgggcggcgctggcggcatggacgaggacgcccctgccggcagcggcggccctggccccaagatcgaggaggtggactaagcggtttgttgtcagtcttgagtgtgctgcagttgctggctggcccagttgctgccgagagttatcgtcagttggtgcggtgtgtccgcttaaactttatttgtggttggttggtacttttgtggtggttatttttttggacctcgtgatagtcggtcggttcaatgttatcgcggctactggcaaaccttaagtgatacggtattcttcttttcggt

SEQ ID NO: 15526 - DNA, 1717 bp, Zea mays
  Clone ID: LIB3060-042-E1_FLI
cgaggcaagcgcccgctgctgcccccggaccttccccagaccgacgagatcgccgacgtcatcggcgcgttccacgtcctcgcggagctcccgcccgacagcttcggcccctacatcatctccatggcgacggccccctcggacgtgctcgccgtggagctcctgcagcgcgagtgcggcgtgcgccagccgctgcccgtggtgccgctgttcgagaggctggccgacctgcagtcggcgcccgcgtccgtggagcgcctcttctcggtggactggtacatggaccggatcaagggcaagcagcaggtcatggtcggctactccgactccggcaaggacgccggccgcctgtccgcggcgtggcagctgtacagggcgcaggaggagatggcgcaggtggccaagcgctacggcgtcaagctcaccttgttccacggccgcggaggcaccgtgggcaggggtggcgggcccacgcaccttgccatcctgtcccagccgccggacaccatcaacgggtccatccgtgtgacggtgcagggcgaggtcatcgagttctgcttcggggaggagcacctgtgcttccagactctgcagcgcttcacggccgccacgctggagcacggcatgcacccgccggtctctcccaagcccgagtggcgcaagctcatggacgagatggcggtcgtggccacggaggagtaccgctccgtcgtcgtcaaggagccgcgcttcgtcgagtacttcagatcggctacaccggagaccgagtacgggaggatgaacatcggcagccggccagccaagaggaggcccggcggcggcatcacgaccctgcgcgccatcccctggatcttctcgtggactcagaccaggttccaccttcccgtgtggctgggagtcggcgccgcctttaagttcgccatcgacaaggacgtcaggaacttccaggtcctcaaagagatgtacaacgagtggccattcttcagggtcaccctggacctgctggagatggttttcgccaagggagaccccggcattgccggcttgtatgacgagctgcttgtggcggaagaactcaagccctttgggaagcagctcagggacaaatacgtggagacacagcagcttctcctccagatcgctgggcacaaggatattcttgaaggcgatccattcctgaagcaggggctggtgctgcgcaacccctacatcaccaccctgaacgtgttccaggcctacacgctgaagcggataagggaccccaacttcaaggtgacgccccagccgccgctgtccaaggagttcgccgacgagaacaagcccgccggactggtcaagctgaacccggcgagcgagtacccgcccggcctggaagacacgctcatcctcaccatgaagggcatcgccgccggcatgcagaacactggctaggcggcttctcttcactcacctgcagagtgcaccgcaataatcagcttccggatggtggcgttttgtcagttttggatggaaatgccgaactggcagcgtctgttttccctatgcatatgtaatttcctgcctctttatattcactcttgttgtcaagtccaagtggaaaatcttggcatattatacatattgtaataataaacatcgtacaatctgcatgctgttttgtaataattaattaatatcccagcccattggatggacttgtttaccatggtgttacttc

SEQ ID NO: 15527 - DNA, 1785 bp, Zea mays
  Clone ID: LIB3060-042-E6_FLI
tggccgccagcgtcaccgtggaaaacctcaaccccaaggtcttaaaatgtgagtatgcagtccgtggggagattgtcatccatgctcagcgcctgcagcaacaactacaaacacaaccagggtctcttccttttgatgagatcctctattgcaatattgggaatccccaatctcttggtcagcaacctgtgacattcttcagggaggttcttgctctttgtgattatccgtgcctcttggaaaaagaggaaaccaaatcattgttcagtgctgatgcaatttctcgagcaaagcagattcttgcaactattcctggaagggcaacaggtgcatatagtcacagtcagggtatcaaaggactgcgtgatgcaattgctgctggaatcatgtcacgtgatggattccctgcaaatgcagatgacattttcattacagacggagcaagtcctggggtccacatgatgatgcaattactgattaggaatgagaaagatggcattctgtgcccaattcctcagtaccccttgtactcagcctccatagctcttcatggtggagctcttgtcccctattaccttaatgaaaaaactgggtggggtttggagatctctgatcttaagatgcaactggaaaatgctcggtcaaaaggcattgatgttagggctttggtggttatcaatccaggaaatccgactgggcaggttcttgctgaagacaaccaatatgatatagtgaaattctgcaaaaatgagggccttgttcttctagctgatgaggtatatcaagagaacatctatgtggacaacaagaaatttaactctttcaagaagattgtaagatccatggggtatggcgaggatgatctccctctagtatcgttacagtctgtttccaaaggatactatggagagtgtggtaaaagaggagggtacatggagattactggcttcagtactccagtaagagagcagatctacaagatagcttcagtgaacctgtgctccaatatcactggtcaaatccttgcgagcctcgtcatgaatccaccaaaggttggagacgaatcatatgcttcctacaaggcagagaaagatggaatccttgagtctttagctcgtcgtgcaaaggcgttggaggatgcattcaacaagcttgagggattttcatgtaacaaggccgaaggagcaatgtatcttttccctcagattcatctgccacagaaggcaatcgaggctgctaaagctgctaagaaagcgcctgacgctttctacgctctccgtctccttgaatcaactggaatcgtcgtggtccctggatctggatttcgtcaagttcctggaacatggcacatcagatgcacgatcctgccgcaggaagacaagatccccgcggtgatcagccgcttcagggctttccatgaggcgttcttggccgaataccgcgactaaactgttacgctgtgtgtgagttaagttggaggttcagtagaactgtagaagagctcagtgacagcgcagaaagaggcagtgttagaaaggcttaggtccttcttcacaggagcaacagttgtctccatcaaggagaaataaaaattttagttttacaacttctcattgacactgttgggttcttgacatggtagagaattgtgtgcactgtgcctggcactgggtcctactagcggcgcaatttaagcgtgaccaggatggcgccatcagccatctctgtcgatattacactgctagctgaaaatgccacttggtccctttcaggtgtttgtggacc

SEQ ID NO: 15528 - DNA, 1258 bp, Zea mays
  Clone ID: LIB3060-052-D2_FLI
tctggggttcactaatcagtcaatcccattgtacctgtccgaaatggcgccaccccaataccgcggggcaatcaacaacggcttcgagctctgcatcagccttggcatcctcttcgcgaacgtgctcaactatttcgtcataaaaatcacagcaggatggggatggaggatatccctgtccatggccgcactgcccgccgcattcctaaccatcggcgcgatcttcctccccgagacgccaagcttcataatccaacgtgacggcaacaacacggacaaggcaagggtgctgctccagaagctgcgcggaacggcctcggtccagaaagagctcgacgacctggtccgtgctagcgacctctcacgagcaacccggtacccattcaggaacatactcgagaggaagtacaggccgcagcttgtggtggcgctgctggtccctttcttcaaccaggttagcgggatcaacgtggtgaacttctacgcgccggtcatgttcaggacgatcggtctcaaggagagcgcgtccctcctgtcctcggtggtgacacgcctgtgcgcgacgtctgccaacgtcgtggcgatggtggtggtcgacagggttgggcgcaggaagctcttccttgccggcggcgtgcagatgatactttcgcagttcaccgtcggcgcgatcctggctgcgaagttcagggactacgaggagatgggtgatgggtacgcgtacctggtgctgaccacactgtgtgtgttcgttgcaggctttgcgtggtcgtggggccctctcaccttcttggtccctgccgaggtctgcccgctggagatcaggtccgcggggcagagcatcgtggtcgctgtggttttcttgatgacgtttgtgattagccagacgtttcttgaggtcctctgccgcatcaagtcggcgacgttcttcgtcttcggtggatggatctgcctgatgacgttgttcgtttatctgttcctgcctgagaccaagaagctgcccatggagcagatggagcaggtatggaagacgcactggttctggaagaaggttgtgggggaggaagcggataggaaagaaacaggagcagggaagatagctttgtcgggcttgtcttagtcattttctgagtcgggtgtgtgtatttgatcaaaactgcaaagaaaaacatagtatacgatcgcgacaagctgatgtaaatgtacatttgtatgtaaatcgagtaaacttatcagtctggcgttgttgccagttcct

SEQ ID NO: 15529 - DNA, 2050 bp, Zea mays
  Clone ID: LIB3060-080-C5_FLI
ctctgccgtcctcgttcccggccgtccgtgccgaaggaagtatctgctgagtgctgacccagcccatgcccatccacctcgctccctcgaccgacccacccagcccagcgcgcgctcgcatggcgatgctgctccgcaaggtgtggggctccgtgctggcgcgcgccgcagcgccgggggccgacccgcgagcccgccgcgcgcaggcgcatcgcgcggagcagtaccagtaccacggctcgctatcgctgggcgcgctcgacgccgtccccaccgacgtgctcgcccagatcctgcgcctgctgggcccgctcgacgccgcgcgctccagcgccgtctgccgcgcctggcgcgtcctcgcctccgacaacggcctctgggctttcttcctccgcctcggccccgagccctaggacctcgtcgtcttcgccgagacgcacctcgccgccggccccgcctcgcacccgtggctgtactacgatagctcgccgcagctctcgttcaaacagatttacggcctccgagcgctggtcccgggtactctcatcgtggatggtggatctggttattgcaagtatggctggagcaagtatgctgctccttccgggcgttgtgctacattcttggaattcggtaacattgaagcacctatgtatgcaaggcttcgtcacttcttctctacaatatatacgaggatgcaaataaagccttcgactcagccagttattgttgtccttccactgtgtcactctgatgataccgagtctgctagggcctcaagaaaacaatacaaggagacgctgtactctgtcttgtttgacatgaatgttcctgctgtttgtgctgtcgatcaggcagttctatctttgtatgcttctaaacggacctctggtattgttgtgcacattggattcaatacgacttctgttgttcccatctttcaaggtagggtaatgtatgagataggtgttgaaactgtggggcaaggtgcccttaaactcactggatttctcaaggagttgatgcagcggagaaatatatcctgtgagtcactgtacactgttcgaaccatcaaggagctgctgattatgaagctgaattgcgtaaagatacacaagcgtcctgcgagatcgatggtgaagggtgtttcactctgtcggaagagagattcaagactccagaaatcctatttcagccccatatgggaggaatgtgcgaaatattcagatattgtttgatttgtgcatcgattacagtttagttatggttggtcaatgttgatcttgcccttgcaggcgtgctatgggcttgcataaagcagtatctctatgtatggatcactgctatgtttcaggaacggttggtgatgacagctggtacaagacggtcattttagctggtggttcgtcgtgcttgcctggtttaccagagaggctggagaaagagcttcaccaacttcttccaccttatatgtcagaaggaataagagtactccccccttcatttggcactgattctgcctggtttggtgcaaagatgatcagcaacgtgagtactttcactgaggcatggtgtgcaaagaagaaacaattccgtcagaagacaggccggagtggtacattgtttgccaattcctggtaatgaaaatctcagacacaagtcacgagcaagaaacttaaagagttccccgcatcaaaaatacggacataacatccggtccatgctccactgagcctccaccagtatatagaagcatgagcattcatgcccagtatatattcacgtccatatcatgcatatatggattatgagccagtgcatcatttggtggtgttgttataggatgttttggtaagttcgttgtggttataggttgttggcaaaagcgcagttgtctcgttttaattttaagtggaacgattaattagttattgagcatgagtctttgtttatagctatatatgtctcatgaaatttggtacagttctaaatgttgtaaaacgcaataaatcattttataaatgagatatgtctttattgctgttgttct

SEQ ID NO: 15530 - DNA, 1056 bp, Zea mays
  Clone ID: LIB3060-018-C5_FLI
aaaaatgtaggcactttagtatatgggttgaccaatttttgggttttgagtttttggtgtgctgtttgccaggtatacaggcataggagaatgttttgttagtgaaagcaatagatttatcttcctgtgttaataagaagctgtccagtgtcattgtatcctcttaggttgtaatacaccaaaatatacccttctcttttgcttaaaatctgagcggagggagtcccgttcttgctattttctagtattagtaggctgttttttttttgtgtcgctaacttcttttctaatattttctgcagtgatgatcccattgtatcattatcagcacaagcacccacacaattccgttttcctgggtctgttcacgttgtgcttgagcttcagcatcggcgtggcttgtgctaacacccaagggaaaatcgttctggaggctttagtgctgacggctggcgtggtggtttcgctgactgcgtatgctttctgggcgtcaaagaagggcaaggaattcgggtacctggggcctatcctgtcttccgcgcttactatcctcgtcctaactagctttcttcaggttttcttcccactgggacccgtgtcggtgggcttgttcggtgggctaggggctctggtcttctcaggcttcatcctgtacgacaccgagaacctgattaggcgccacacctacgacgagtacatctgggcgtcggttgggctgtacctcgacatcctgaacctgttcctctccatcctgaacatgctcaggagcatgcaatccgacaactagccggtcaaagcaccgcaccgcggcctcttgatatcgaacacggtatacccccgcggtcctgtgctctggttgttaagaagacgggatcgaagtgcgacatatgtattgtctattgtatgagcccactcgtgtcaacactgcaaacaattgtggtcatgtcaccttgtatgttcttcgtcactttgcaaacaactgtaagtacctgatatcgttttgcgctcgtgctattcgcgctaaaaatcacaatgatccagtaacaggttgtcatc

SEQ ID NO: 15531 - DNA, 915 bp, Zea mays
  Clone ID: LIB3060-018-E3_FLI
cccatccctcgcagctccaaagcattgaagcaaagaaccctgcaactgcaacaagccctgacgcttaatacatcggccggcactcgatcggcagcagatcaaagatggcggcggaggagggggagaaggcgaagagcggcggcggcgggcagcagatgacggtggtgcgggggctggacgtggcgcggtacatggggcggtggtacgagatcgcgtcgttcccgtccttcttccagccgcgggacggccgcgacacgcgcgccacctaccggctgctggaggacggcgccacggtgcacgtgctcaacgagacgtggagcaagggcaagcgcgactacatcgagggcacggcctacaaggccgaccccggcagcgacgaggccaagctcaaggtcaagttctacctcccgcccttcctccccatcgtccccgtcgtcggcgactactgggtgctctacgtcgacgatgactaccagtacgcgctcgtcggcgagccgcgccgcaagaacctctggatcctgtgcaggaagacgagcatcgacgaggacgtgtacaaccagctggtggagcgggccaaggaggaaggctacgacgtgagcaagctgcacaggacgccgcaggacgacccgccgccggagagcgacgccgcgcccaccgacaccaagggggtgtggtggttcaagtcgctcttcgggaaatgactgcccgtcaccgcacgcgcgcgtgctccggtactgtgcttgcagttgcagcaaataaaaccaggcctgagtgagtgaggattggtattttagctttgtagtatctgtctcgctatctgtgtgtgtggaactgtggactgtgctgttacgttatacgtgcatgtatttttaagatttctctagctaattgcatcgatcggcgaggtagtcactc

SEQ ID NO: 15532 - DNA, 1612 bp, Zea mays
  Clone ID: LIB3060-019-B11_FLI
gtcgatcgctgatcccaccggctgatagagttggcggccgggggagtgagtcgtcagggatggcgtcggagccggtggcgcgggcggtggcggaggaggtgggccgctggggcagcatgaagcagacgggggtgaccctgcggtacatgatggagttcggctcccgccccacccagcgcaacctgctcctctccgcgcagttcctgcacaaggagctccccatccgcttcgcgcgccgcgcgctcgagctcgactcgctgcccttcggcctctccaacaagcccgccatcctcaaggtgcgggactggtacatggactcattccgggacatcagatacttccctgaagtgaggagcaggaacgacgagctcgctttcacgcagatgatcaacatggtcaaggtgcggcataacaatgtggttccaaccatggccttgggagtgcagcagctgaagaaggagctgggccgctcaaggaaggttccattcgagttcgatgagatcgacgagttccttgaccggttctacatgtcaaggattggcatccgcatgctgatagggcagcatgtggctttgcatgaccctaaaccggagcctggtgtcataggcctcatcaatacaagattatccccaatccaggtggctcaagctgcttgcgaagatgcccgttctgtctgtttaagggaatatggatcagctcctgatattaacatttatggcgatccaaattttacgtttccatacgtcacattacacctacacctgatgttatttgaattggtgaagaactctctccgcgcggtgcaagaacggtatatgaactctgataaagatgttcccccagttagaattatagttgctgatggagaagaggacgttactatcaaggttagcgatgaaggtggcgggataccaagaagcggcctcccgagaattttcacgtatctgtacagcactgcaaagaatcctcctgagctagatagacctaatactgaaggggtaactatggctgggtatggtttcgggctcccgatcagccgactctacgctcggtattttggcggcgacctgcaaatcatctcgatggaaggatacggtaccgatgcttacctccacttgtcgcggctgggagattcggaggagcccttgccttgacggcatatttttgtggacctccagtaccactcttctcctgtaactatgtggctcgatcttcttcttgtaatccagtgctggcctcgacctatatatatatatatatatatatatatatatatatatatatatatatatatagctatagttggcctcgaccttatttcactgcctgctctgctgcattgtgaacacagcactgctacgtcctgcttacttccgccatgtactatgtgttgagaactacgttaccacggatcaccagatccgttcccttccctcccgtcagcagtagaggcgcaagaagatgtagagaacctgtctcccttcccataagcacgacagagaaaacacacgagacactggatatagggttgggcctctggcctctttctgatctctatcatatgaaggggtgtacaggttccttatatagagatgtgagacccctcaggggc

SEQ ID NO: 15533 - DNA, 2289 bp, Zea mays
  Clone ID: LIB3060-019-D2_FLI
cccacatccatcatcgccgcctccgccacagcacgccatggagaccagcaagtcgccaccgctctactcggcgccgcgggagccctctgccacgacagtgatgctgtgtccgtgcctggcgttcttcctcctcgctctcatcatcacctccatcgcactcactgtccactttcgcctctactgccacactcctcttgcccacctcatctccccgcaccgctgcccccaccacatctgacctccgtctccgcccgcatcgctggcgtggtcctgcttcccagaggcgtgttccctctgctgccgccgagatcccgatacgttatgggttcccctctcctcgcgacgccggcatgcggggcttacgacgtgctctggggcttcgcagccggaaggttcctctccatcttggctgcctccgacgaagatcagggctcgtcggagcaggaggcggctgcgagcaacccggagggcgtggaccgcgtctgcgcggccatcgcggacgtcgtcgcctccggtgccgacgcgaacctggaggcggcgctatccgcgctctcgccaccgctctgcgaagcggtcgtgctcgctgtgctccaccgcttcaagcacgcacataggccgtcctaccgcttcttcaggtgggccacagtgtccggtggctttacccacaccaccattacctactgcaagatgttacacatcttaggcaagacgaggcagttcgagtcgatggttgcgatgatccaagagatggggaaggcgggggccctgtccatggacgccttcaaggttgccattaagtccttcgctgcggctggtgagatcaagaatgcggttggcgtgttcgagttgatgagaaagaacggtttcgatgatggggtggaatcattcaattgcttgctcgttgctttagccaaagagggattaggtagggaggccaggcaggtgtttgacaaaatgcatggccagtactctccagacctgcgctcttatactgcactgatgctggcatggtgcaatgcgaggaatctggttgaggcggggcgggtttggaatgagatgctggagaagggaatggatccagatgttgttgtccacaacacaatgattgaggggttgctgcgtgggcagaggcgacccgaggccgtgaagatgtttgagctgatgaaggcaaaggggcctccaccaaatgtgtggacttacacaatgttaatccgtgaccattgtaagcaggggaagatggacatggcaatggagtgctttgaggagatgcaggaggctaaatgccaaccagatgttgctacctatacatgtttgctggttggatatgggaatgcaaaacaaatggacagagtgactgctgtgttggaggagatgacacagaagggatgcccccctgatgctcggacttacaatgcactgattaagttgctaacaaataggaatatgccagacgatgctgcaaggatatacaagaagatgatcaagaagggacttgagcccacaatccatacttacaacatgatgatgaagtcatatttcgttggtgatagcaactatgcaatgggttgtgcagtgtgggaggagatgcaccagaggggtatttgccctgatgtgaactcttacacagtgttcattaatgggcatatacgacatggcaggccagaggaggcatataaatatatcgaggagatgattaataaagggatgaaagctccacaaatagactataataagtttgctgcagatttctcaaaggctgggaaaccagatatattgtttgagttggctcagaaagtgaaatttgctgggaaattagatgtatctaatgtgttctatcagtgggcagatagaatgaagagtcgggtgaagagaaatgtaccttcagattggtaatagaatgttctaagattactatgctgccagcaggaatgtggcatgctgtgatggtgcttgaaatttgattactaaggagaactgctacctttttcagtttgccattgtacggtaatgtgccattgaagaattgcgtgcgttaatatccgttggtctgacaatgttttcttgaatatgctcagactgaaaatgttgagtcaatttatgttgtagctgtcatatttctcgttagggaagatttagatgctttgcgattttatattgctgatttgtatgctcatagcttagacctagctggaaattaaatccactgcttgattccagctagcaagcatgtttatattctctttaatgttaaaatgaagcattggatagccactaggcagctcatgagtc

SEQ ID NO: 15534 - DNA, 1462 bp, Zea mays
  Clone ID: LIB3060-019-F3_FLI
tataacttgaaacagaaggctatgaccagatagactctgtcactactggagcatctgtactagttgagggagttgttgcaagcagccaaggcggtaagcaaaaagtggagttgaaggtttcaaagatcactgtgattggtaagagtgaccccacatcttttcctatacagaagaaacgggcatcaagagagttccttagaactgtagcccatctccgtcctcggacaaacacttttggtgcagtggcaagagtgagaaatgctctggcatacgcaactcataaattctttcaagacaatggatttgtttgggtttcaagcccaattattactgcctcagattgtgaaggagctggggagcagttttacgttactactttgctttcgaatagcaccgaaggtggttccctactcaaagatattcctgcgaccaaggatggaagggttgattggtcacaggatttcttctgcaaaccagcatttctgacagtatctggacagctcaatggtgaaacatatgcttcagctctatctgatatttacacatttggtccaacgtttagggctgaaaattcaaacactgcaaggcatctggctgaattttggatgattgaacctgagcttgcctttgcggatctaaatgatgacatggcttgtgcaactgcatatctccagtatgtagtaaagtatattctagagaactgcaaagaggatatggatttcttcaatacatgggttgagaaaggcatcatagatcgattaaatgatgtagtagagaagaactttgttcacttgtcttacactgatgctgtcgagctactacttgggtccaagaagaaatttgagtttccggtaaagtggggtttggatcttcaaagtgagcacgagcgatatatcacagaagttgcctttgatgggcgccctgtaataatcagagattacccaaaggaaatcaaagctttctatatgagagaaaatgatgatgggaagacagttgctgcaatggatttgttggttcctcgggttggtgagcttattgggggaagccagagggaagagcgtcttgattaccttgaagcccgactagacgagcaaaatctgaacaaggagagctactggtggtatctggacctacggcgatatggatcagttccccacgccggtttcggtcttggatttgagcggcttgtacagtttgctactggaatagacaacatcagagacgccatcccatttccccgagttcctggctcagccgagttttaggcttcctttcgaatgtaggaattttatggggatggtatatgaatttcacaggaaatggttcaaaaacacatgaattatcttttaatccaaaggaggccttagcgccccgaaagtgttgtcatttgtttcatcattgtacagagttgagctgagactcgtggttaatcgagccaaccagtgttgtggcatgcttctcc

SEQ ID NO: 15535 - DNA, 2038 bp, Zea mays
  Clone ID: LIB3060-019-F7_FLI
cccaacaaaccactcccacccggtggctcgtcctcggacgccaagccactccgcgccccaatccggaagcgccgccgccgccgatcgaccggccgtcgacccatgctccgctcggcgctcttccgctcagcccccgggctccgccggtctccggcgacggcccacttatccaccgccgccgccgccgccgcagcgtggctctccaacggccctgcctccgccccgtctagggtgcgcctcctcatcggcggggagttcgtcgagtcgcgcgccgacgagcacgtcgacgtcaccaaccccgcgacgcaggaggtggtgtcccggatcccgctcaccacggccgatgagttcaaagctgccgtcgatgccgccaggacggccttccccggctggcggaacacgcccgtcacgacgcggcagcgcgtcatgttcaagttccaggagctcatccgggctaacatggacaagcttgcagagaacatcactacggagcaggggaagacgctaaaagatgcttggggcgacgtgttccgcggcctagaggtggtggagcatgcttgtggaatgggaacactgcaaatgggcgaatatgtatcaaatgtttctaatgggattgacaccttcagcattcgggagccacttggtgtttgcgctgggatatgcccatttaattttcctgctatgattcccctatggatgtttcccatagcagttacgtgtggcaatacttttgttcttaagccatcggaaaaggacccaggggctgctatgatgcttgcggagctagcaatggaagctggtttgcctaagggtgttttgaacatcgttcatggcaccaatgatgttgtcaataatatttgtgacgatgaggatattaaggctgtatcttttgttggttccaatacagctggtatgcatatttattctagagcatctgctgcaggcaagcgtgttcagtgcaatatgggagcaaagaatcatgcaattatccttcccgatgctgatagagatgctacattgaatgcccttattgctgctggatttggtgcagcagggcaaaggtgcatggcattgagcactgctgtttttgttggcggttcagaatcatgggaggatgaattagtcaaacgtgcaagtggccttgttgttagttcaggaatggttaatgatgcagaccttggtccagtgatcagccgacaggcaaaggatcgtatctgtaaattagttcaaagtggtgttgacagtggtgctcgtatattgcttgatggaagaaagatagtggttcctcgctatgaagatggaaattttgttggcccaaccattctggctgatgttaaaagtgacatggagtgttacaaggaggaaatatttggtccagtgcttctcttaatgaaggcggagagcctagaagatgccatccaaatcataaacagaaacaagtatggcaatggtgcttccatatttacaacatctggcgtctctgccaggaaatttcaaacagacattgaagctggccaggtgggcatcaacgtgccgattccagtccccctgccgttcttctccttcacgggcagcaaagcttcattcgcaggagatttgaatttctacggcaaggctggcgtgcagttcttcacccagatcaagacgatcacgcagcagtggaaggagtcgccggtgcagcgggtctcgctctccatgcccacctcgcagaagtgagacgtcaaaggacgctcacgccactctccaaagctccactcctctggacatagacccacgcatggccacaagagaaggataattggtaggcatggcgacactccatgcacggccatgatactagtgtgtgctcgctttgctcttttgtctggacatcttgcatgcgcattcagaacatccaatgacgaaggtttagatatatgtgagcgctgcccattatgctgttaggattactgtaaaagccccaggtcctttgatcgagtgtcatgtgtaaacccacaataagaggagaaataaaaatgtcgccgtgctggtttgtggc

SEQ ID NO: 15536 - DNA, 949 bp, Zea mays
  Clone ID: LIB3060-019-G12_FLI
cccggcctccgctccggccagatcggctcgggtgaaccccagcccctaccgatccggatccgtccccatcgcctcgtgtgttttccgtcgagtattttagcgtgtgtgtccccccctcttcgcttcggttggtgcgtgcggctgtctcgggtagatctgtggtttggttcgccttgaaggcgcgcggcggcggtgtcgcggcttgtagcttgcgatttcacggtggagcttgtcggctgttggggtcggatttggagtttgtcatggcgtctaagcgcatcctcaaggagctgaaggacctgcagaaagacccccccacatcatgcagtgcaggtcctgctggtgaggacatgtttcattggcaagcaacaattatgggaccacctgacagtccctatgctggtggtgttttcttagtgaacattcatttcccgccagattaccccttcaaacctccaaaggtttctttcaagacaaaggtcttccatcctaatatcaacagcaatggaagtatatgccttgacattctcaaagagcagtggagccctgctttgacaatttctaaggtcctgctctccatctgctccctgctgaccgaccccaacccggacgaccctcttgtcccggagattgcccacatgtacaagacggaccggccgaagtacgagtcgacggcccgcagctggacgcagaagtacgcgatgggctgacgaacgctttcctgctcgtctgggcgccattgttcccttggatttgttgttggtcgtatgtatccctgatccatctaggatcatcgtattgtattgtagtgtatgtatgtcgtcggcctaccatcgttgccatccaccatagtgaggtggttggacatgcttcgcctatatgcacctgtgcttgccttccttcgggtcggtgctgtttggttaatgttcatcgaagacgttgatttcgt

SEQ ID NO: 15537 - DNA, 1127 bp, Zea mays
  Clone ID: LIB3060-019-G6_FLI
accaccttccggaccccaccactcccccgcgcgcgccgtgcgatcaccgccggcccccgccctcaccctggccgccttgaggaaaagcaaggccaacgccttctcctcctcctcctctccaccgaggtcgcgccgcgcgcttgccgtcacgatggccgcgtcgctgctcgtgctcgccgtggcgttcctggttggcgctggccacggcggcatcgatgggggtgcagcagctcacgtggaggtagagggctctgaggtgacctacgggagtgtgattaagctgttgcacgagaagacaaagcaccgtctgcactcacatgatgtgccgtacggctcaggcagcggtcagcagtctgtcaccggctttcctgaaggcgatgactcaaatagctactggatcataaagcctactccagattcatcgtctaagcaaggtgattccattgaaactggtggcatcatcaagttgcaacacatgaagactcggaggtggttgcacagtcacctgcacgcttcaccgttatctggtaaccttgaggttagctgttttggtggggatgaattgtcagatactggtgactattggaggctagaaattgaaggaagtggaaaagtatggaaaagagaccaaaaggtacgacttagacatgttgacacgggaggttatctgcatagtcacagcaagaagtacaaccgccttggtggtggtcagcaagaggtctgcggtgtccgagagaagcgagctgagaacatttggttggcagcagagggtgtttatctcccggttaacggaagcaagtgaaaaagcactttcagtatttaccagttttaatgttaattagcataggatcagatattttactcgctttcattcgttcttgtttttcttaagataaatgaacatgggacatgacccctagtgatatgaaatttgaatgttgggcatcgaaggtgtcgacaaaatcagaacagtacatgcttgtaattggatatttgtgatacatgtatgaccgtgtagagactcagagatgcaagtgacactttgttcacaagtagagatgctgatcatcttctagatgtgacgcagaaaagacagtcgtggtaaatcttgagttttcgccgcaccc

SEQ ID NO: 15538 - DNA, 1764 bp, Zea mays
  Clone ID: LIB3060-020-A6_FLI
ctcgagcacgtcgagctcaaaggtgaggccgttagccaggaatcccggcaacaatgacttccctttcctccgccgtggcactgccgtcctcgtgccgggcccggccggcggggggaagccggagggcgcggatggtggtgacgcgcgcggcggcgtcgagcccgaagctgccgaacgggcggcggctgcgggtggcggtggtgggaggcggccccgccggtggcgccgcggcggaggcgctggccaagggcggcgtggagacggtgctgatcgagcggaagatggacaactgcaagccctgcggcggcgctatcccgctgtgcatggtgtcggagttcgacctgccgctcgacctcgtggaccgcaaggtgaggaagatgaagatgatttcgccgtccaacgtcgccgtcgacatcggccgcacgctcgcgccccacgagtacatcgggatggtcaggcgcgaggtgctcgacgcctacctccgctcacgggcacagtccgtcggcgcggaggtcgtcaacggcctcttcctaaggtacgaggcgcccaaagagccgaacggctcgtacgtggtgcactacaaccactacgacggcagcaacggcaaggtcggcggcgagaagcggtcgttcgaggtggacgcgatcgtgggcgcggacggcgccaactctcgcgtggccaaggacatgggcgcgggcgactacgagtacgccatcgcgttccaggagcgcgtcaagatccccgacgacaagatggtgtactacgaggagcgcgcggagatgtacgtcggcgacgacgtctctcccgacttctacggctgggtgttccccaagtgcgaccacgtcgccgtcggcaccggcaccgtcacgcacaaggccgacatcaagaagtttcaggccgccacgcgcctccgcgccaaggacaagattgagggcggcaagatcatccgcgtcgaggcgcaccccatccccgagcaccccaggcctaagagggtgtccgggcgggtgacgctggtgggcgatgccgcggggtacgtgaccaagtgctctggcgagggcatctacttcgcggcgaagagcgggcggatgtgcgccgaggccatcgtggcgggctccgccaacgggacgcggatggtggaggagagcgacctgcgcaagtacctggccgagttcgaccgcctctactggcccacttacaaggtgctggacatcctgcagaaggtgttctaccgctccaacgcggcgcgcgaggccttcgtggagatgtgcgccgacgactacgtgcagaagatgaccttcgacagctacctctacaagcgcgtcgtgccgggcaacccgctcgacgacatcaagctcgccgtcaacaccatcggcagcctcgtcagggccaccgcactgcgccgggagatggagaaggtcaccttgtgagccgccgcccgcgacgtcattgccgtcgaaatggtgtcgcagctgatcggccggtgtattagtagagatttgcggctgatcgggttaatttaggccaacatgcgtgggcagtgggcgcggagaggaagagaaacaagttgtgcaagtgcagcaagtagatcaaaagtgctgcctgtttgtatcgatggatcctgcaacatatagcatctggtgatgttgagaattcggagcagttcatcgactggattctgacgccggcaagcatcgacgtcaatgaatgtctaatacttagtacatcaagacatgtaataaaactgaaactcccccgttctggttc

SEQ ID NO: 15539 - DNA, 2134 bp, Zea mays
  Clone ID: LIB3060-020-C9_FLI
agaaggatgattaccaaccttgtgatgtaacattggaaatttctacatcacactacgaccgcacacctagcaaagataagcatacttcaccaaaacaactgtctgaaaaatctccatcttcaggtgaccataggttttcaggtaggcttagtggtgggcgtagtcttgataataaaggagaaagaaagagccttacgaaatacagagatagagatggtgacatagcccaagagcgatcacatcatcaagatcgaatgccagctaaggttccattcagggagccaacaccgtcaaattcatccataagtagaggtggtcattttttgggcagttcaccaaataatcctttgccacctgcacggaacggtgacccttccttccagggtctacatgatgatgaccgtaggcctcaaaatggagataggaggttccatggtcatcaaaaaaggaatgacatgaattctgttcgtggacatggacatggctggaacagccagccaaactggccttctccagtttctaatggtttcgtccccatccaacatggtggtgctcctggttttcatccacctgtccatcagtttccaggcccacctatgtttaaccttagacctcaaatgaaattaaaccaacctggagtttcatatcctatgcatgatgctgttgataggttttcgacccacatgcgtccatttgggtggcctaatcatctggatgaatcatgcccacctcatatgcaagtttggaatggaggtagtggtgtatttcctggtgaaccctatatctatggtaggcaagagtgggatcagaatagacctcatgctggtagcagaggttgggagctgactggtgatgtatccaagggaccaaatgatgtgccggatgctgaacttctggtacctaagaaggatcctgactctgcaataactgctgtttctgattctggtggacaacacaatcttcaacctgagtctgaccaaaaggaaattggacgcttgactgctgaaaactttgaagcgaagaatcatactaaaagttcaaaaagtttggaagctcctcaaggagcacaacttgtgacttctatgctgtcaaagaatagcgtggtcttttgtaaaaactatctatccagaatcagtgtttcacatgatcttgttgagcctgagttgtacaaaaggtgtatatccttgctgggagatttggacgtaacaaaaacctctcatttggttaggaatgaaattcaggataatggaaatattggaaaaatgtcaacaaaatatggaaacctcaaccctttcagttcacgttacctcaaaagtgacaatactatctttgagagagctttggcccttcataagaaccagactcgaaagggtttaactactgcctctgcatctgtaaaaatggaagagaagatggctgtaccagaagatgaccatgacatggaattgcttgaaccagtggtgagcaatcctgctccacaacgtcacactgatgtcatggaggaaggatcagtatcaaaacatgaacttggtgatggcatagggagaactattgctgcaactataggatctggggttctggatgcacctccagaaatttcacttccccaacctgaggtggtggtggcaacaacagtaatcacacagcctaacaaggacatggaggatgtgttgcctccagcaattgaggatggtgcactacaagcaaccctcgaacatgctgttggcataccggaagttacacccgctgatgtcttgctggatgttgcaccttctgctgttggagaatcaggtgatgacatggagatcataccctctgctatggcagaacctcaactaggcaaggagcctgctcctgttgctagtcctgacagtcaagagaagcccttcatgcttgattctgagacaggtatggaggttgaggttaaggttatcgatgataatcctggggatggtagggtgagctctatagtcggcaccaaacttgattttgctgcaattgatggggattctgaagctttgttggtggaaagtagggtaaatttaagtcggatacctaattccccagaaagtacacattgaactcttcctatttcattttaattccttttctgagggtcttgtgccctcagcct

SEQ ID NO: 15540 - DNA, 1216 bp, Zea mays
  Clone ID: LIB3060-020-F12_FLI
cttctctccttttgctcggaacgcacacaccgcccgtccccgatctccgatcccctcgtcgatccaaagatgcagatcttcgtcaagaccctcactggaaagactatcaccctcgaggtggagtcttctgacaccattgacaacgtcaaggccaagatccaggacaaggagggcatccccccggaccagcagcggctcatctttgctggcaagcagctcgaggacgggcgcacacttgccgactacaacatccagaaggagagcaccctccaccttgttctccgcctcaggggaggcatgcagatcttcgtcaagaccctcactggaaagactatcaccctcgaggtggagtcttctgacaccatcgacaacgtcaaggccaagatccaggacaaggagggcatccctccagaccagcagcggctcatttttgccggcaagcagctcgaggacgggcgcacgctggccgactacaacattcagaaggagagcaccctccacttggtgctgcgtctcaggggcggcatgcagatcttcgtgaagactctgaccggcaagactatcacccttgaggtcgagtcttctgataccattgataatgtcaaagccaagatccaggacaaggagggcattccaccggaccagcagcgcctgatctttgctggcaagcagctggaggatggccgtaccctcgccgactacaacatccagaaggagagcaccctccacctggtgctccgcttgcgaggtggtatgcagatctttgtgaagaccttgactggcaagaccataaccctggaggttgagagctccgacaccatcgacaacgtgaaggcaaagatccaggacaaagagggcatccccccagaccagcagcgtctgatcttcgctggcaagcagctggaggatggccgcaccctagcagactacaacatccagaaggagagcactctccacctggtgctccgcctccgtggtggtcagtaagccatggttcatttaagctgctgctgtacctgggtatctgcgtcgtctggtgccctctggtgtacctctatatggatgtcgtcgtctaataaacatctgtggtttgtgtgtcatgaatcgtggttgtggcttcgttggtttaatggacctgttgtgtcctctgtgttgtacccaaaactcttctgcagcagtatggcttgaatccttatgaagtttgatgtttgaactt

SEQ ID NO: 15541 - DNA, 1564 bp, Zea mays
  Clone ID: LIB3060-020-H12_FLI
atgctgcacatccagggactgttgtgatggcacgagttgattgtgcatcaaaggtgaacgtggatctttgcaacaaattctctgttgaccattatccttacctggtgtggggtccgccaacaaaattcaatttggttcagtggaaaccaaagcaagagaatagtgaattggaactaattgatgatggaagaacagcagatcggttactgaaatggataaataagaagatgggaagctcattcaatttagacgacaaaaagtatgagaatgaaagtatgcacccaaaaaatacttcagatcctgaacagattgttcgagcaatttatgacgttgaggaagctacatctcatgcattgcagataattttggagcacaagatgatcaaaccagacactcgtgactcgcttattagctttttacaaattttggtggctcatcatccatcaaagaggtgtcgaagaggatctgctgagctacttattgactttgatgatcactggcatacaaacctctcattaagtttggaagacagtactacactgttgaaaggtgcaggagagaaagtatgtggaaatggagtgccacgtggatactggattttctgccgaggaagtaaaaaggaaacaagaggatttagctgtggcctatgggttttgctgcattcactaactgtccgaatcggagatggagagagccaaacaacatttacatcaatttgtgatttcatccacaatttcttcatatgtgaggaatgccgcacacacttctatgaaatgtgttcaagtgtatcagtccccttcaaatctgcccgtgaccttgccctctggctatggaccgcgcataacaaagttaacgagaggttgatgaaagaagaaaaggagttagacaatgctgatccttcatttcctaagatcatctggcctccaaagcaactctgtccattgtgctaccgttcttctagtaggacggctgatggagccatgcaggttgagtggaatgaagatgaagtattcaatttcttggttaactactacgggaagatgcttgtatcatcctacagggagacctccatgcagtcctttcaagtaggctcaatttctgacgattcttccgcatccagtgccgcaacagtacctattggagctgccctgggtatcgcccttgctagctgtacatttggggcgctagcatgcttctggaggacccaacagaagaacagaaagcaaagaaagaactggaactgaatatcttgcaccacttgcaaaccctaaactgcatgtctgcatcagaaggagcctccgtgagtgtaaattttctggaccggttgtcttggcgatgggcccaaaagagtcgaaaacagatgaaaaacatacagagtagatttagtagtgccgagtcacgtggtagtgttgcgcgacggcgcgaactttgttgcaacaggtaatacagattgaacgtgtaaactctgtccttaacatgtttctcggatacctttacctggttatcgatgtaatattatcaatttaatgagtgaaaacgctgtgccttactttatgctgagctg

SEQ ID NO: 15542 - DNA, 1743 bp, Zea mays
  Clone ID: LIB3060-021-D10_FLI
ccgctcggaatcggagcttgcatccgaccgcgagcaagcggaccaaatcctcctccatattctatcgcgtgcacgcatctggccgcctcgaccctcggcggcggcggcggcgacggcgacgacgacgatggggctggagatggaggcgatggcggggtcgatcggcgtgtcggtgcccgtgctccggttcctgctctgtttcgcggccaccatcccgacgggcctcctgtggcgcgcggtgcccggcgccatggggcgccacctctacgcggggctcactggtgccacgctctcctacctctccttcggggccacctccaacctcctcttcgtcgtgcccatgacgctcggttaccttgccatgctcctgttccgccgccacgccgggctcatcaccttcctcggcgccttcggcttcctcatcgcatgtcatgtgtactacatgagcggggatgcgtggaaggagggaggcattgatgcaactggagctttaatggttttaacgctgaaagtcatttcgtgctcaataaactacagtgatggtatcttgaaggaagagggtttacgcgatgctcagaaaaaaaaccgattgactaagcttccttctctaattgaatattttgggtattgtctctgttgtgggagccactttgctggaccggtatatgagatgaaagattatcttgaatggactgaaaggaaaggaatatgggctagcccaactccttcgccattgttacctactttgcgtgctctagttcaggctggtatatgcatggggttatatttatacctgtcacctaaatttccactctcacggtttagtgagcccctatattatgaatggggtttttggcaccgactcttctatcagtacatgtcaggctttaccgctcgttggaaatattactttatatggtcaatttcagaagcctcaattatcatatctggtctaggctttactggttggtcggaatcttctcccccaaaagccaaatgggatcgtgcaaaaaatgttgatgtattaggtgttgaattagctggaagttcagttcaattgccccttgtgtggaatattcaagtgagcacatggctacgatactatgtctatgagaggttaattcagaaaggaaagaaaccaggtttccttcaattgttgggtacacagacagtcagtgccatctggcatggactatatcctggatatatcatattctttgttcaatcagcattgatgataaatggttcacgagttatatacagatggcagcaagcagcgagcagttcattactaagcggtatcctggcctttctaaattttgcttatacattgctggtgcttaactactcctgcatcgggttccaggtactgagcttcaaagaaaccttggcatcctaccggagcgtatattatgttggcacaattgttcccattgtgtgtcttctgctgggcaatgttatcaagccagcaaggaaggcgaaggctcggaagaccgagtgaggaaatactcactcaagtgacctttacatagaagaaagatggtgaagcttcaacgaagataaggacattctagttttcaatttatttattctgtctttttgtacggtatcaaatttagcataaggataatgtggtgaccccggttctcctacctcggaactcgattgcgattgatcaatcattaaaacgtgacataaccactggattttcctttacttaatgactactcatacgtgtgtgcg

SEQ ID NO: 15543 - DNA, 2076 bp, Zea mays
  Clone ID: LIB3060-021-F3_FLI
ctcatcgtacgcagattcttggccgtgggagctccccacgccatctcccatggcgcttggcctcccagcccctccccagccgcgagctcgccgagctctccctctccccatggccacgccgcgccctgctccctctgtcttccctggcgcgcgctggtcgttcctaccaatttccttggcctcgctcggtacttctctggtcgtccttactcctgctctctgctcaagcacgccggccgccagatcttcaccgccctgctccatggcgcgccctcccgttttctgctcgctcgcgcacggctcagagccccctggtggtcgcgcgtcttctcccagccagccgagtagttcgccgagctccctccctagcggtccctggctccagctcggccggccctgttccccatggtcgccggctgcttgaccccagctccttgccgtcgcacccctattcctccatggccgcgagctccctctgctgtctgcttcgccgcgcgccaagcccccagccgaggtctcctccctgccgagtcccagccgaactcctccgtacagcgccctgtcgaggcttcccgttcctgcgcgccgtcgccttgctgctcgccttgcgtgcgcggtcctctgtccctgcgcgtagccggtttctcggttcgccgtggagcctgcgcgctcggttctgtccagttcatgtcccgctcggccgtccgcgcgacacgtcatccatggccgctgtccgtcgtcgagtccctacgtgcgcaccagctccctgtgtcgcgttccattcacctaaaccggagttcgccagccgtccatacttgccggtgtgctgctgctctagttcggatctcgcccaagtcgctgccatggttatccggtgtttggcccgcgccgattcgcgttcgctcatatcgccatcatagtgttgtcgctggtaataggcttcgcgtgcgtgtcaaactcccgcgtcgagtctttttcctgctcgccggtgcgtcctctcggctcgcttggccttaattctcatcgcgtcatcgattccgctggtcagcgtcgttcgtcatcgtgtcgcgtgtgtagctctatatacgtcaccctcctgtgtcgtcgtcgttccgtgcgtcatcaagaaattccaagaatcgagtgaagacgaagccagcagcgtgatattcaccaagtgcgcgaccaaaaagctcggacatcttgcgcgactcaagttcaattcatcgaaattattcaatcgaagaaaagatcttcagcaattaattaccgaagaaaagaaggctcctggatgacatcaaccggaacccgtagtcatgcttgcgactatcgcgtcgaattagtcagggtaagttggttcgtattcccattaactaggtctataaatagattaaatagaattgttggtcacaataaatattattaatttagcatgcgtatattgtgatgattgatttagatagctcgctaaatcaactaattaagttacacagtttagagagttaataaaaagctaagaataaaaatagattttctagtgtaatatgtcaatttgattaatggatatagtcgctgtcctgctgtgatatccatggtgcttaatgcttggttttaagtgtttcatgctttttagcgtagattatctatattatactcgttatacatgtgctcatacatgtgcatcatgcatctcatgaggtacgataaataatcgcgtgatgcggaagaagaaccaagccgaccccaagcgtgggctaatctgcaagctgaagctgatgaatcaacctgaagacggttaaatcaagcaagtgctcggtcgaaggatactcgtcaagcggacgtcacctaacaacactaacctagtgttactcaggttctaactttgtgctgttgttgatggtgttaagtgccggtgggctcggccttcttataagtctaagtactccttctatacttcttactgaggatggtcatttgagctagcatatatttcaaacttatacttttataatcactccgataaaataatgtaaaatttttgtaacttgtaaaatttggtaataagatttccgctgc

SEQ ID NO: 15544 - DNA, 1102 bp, Zea mays
  Clone ID: LIB3060-021-G2_FLI
cgcgccttcacccaggtccaaaaactgccgcaagaagaagtgtggccacaacaacgaggtaattaagctttgttttcatctgccatccaagtgttctgtaagcacgccaatattattaatgttcttagatttgctcttctaccttaatgcatacatcgtttgcaggctcgacaaccaaaaaaatataacgccccgtttggatcattgaaattgaatttcattctaataatagtaatttaggcatatatcaattaagataattcagttttatacgaaagatatttgtatactattattagcaagatgtcggagatatttatgtgctaaatttttactatagagtagtgagacgaagagtgtcatgtaagttacagagtagaaacaaattctactaatatataaaatcatttcccatcttccacactatgaatttacgatagacttatatctgaactttggaaagtgatggaatctcaaattctaaactaaataagttagtttattgagtgaattccatttcctctaaaaatgaagggatccaaacgccccgtaagagtttttcttcgttttgttgcaccgttcatactatgctatgttctccgtcatcatgtgatgctgatgtaagagtggatataaagtgtcatcaccatattcacgttttatcaatagcattgtaccagtttagattttaatgtccaagttcgtttattttcatgtaatgcttgttctagtttcttaattagtctatattaattaatctactcttttcagccatgtcctgtttagaacaatatttagaacaatacagtgtagtggcttttttgttcattctctgatttcccccctgatattacttttcagctgaggtcaaagaagaagttgtctccaggtttgccatgtgaggtttggaaagcaacattctggtgtgcgtcatgtatcagttgaatcgactcgtctaaacgtttctattgcggctgttagttgtccgaatttaagtttctacctgcgcgttgaaccttaaatactctttcaaatactccatgcggtttcggcacgtgcagcggcatgcctaaacaatactagcgcgagttcttttggctgg

SEQ ID NO: 15545 - DNA, 956 bp, Zea mays
  Clone ID: LIB3060-022-A6_FLI
ccgctgctcatctcacatccctcgagaagacgcctgctcctcgccgatcgatacgatggccgtcttctccgacctccacaccgccgacggcctcaagtccctcgaggctcacctcgccggcaaaacctatgtgtctggtgactccattactaaggatgacattaaggtcttcgccgcggtgccgtcgaagcctggcgctgagtttcctaatgccgcccgctggtacgagaccgtctctgcggctgtagcctcaagattccctggtaaggctgttggtgtaaatctgcctgcgggatcagctcctgcggcagctgctcctgcggatgaggctgaggatgatgatgaccttgatctttttggtgatgaaactgaggaggacaagaaggcagctgatgagcgtgccgccgctgccaaggcctcttctaaaaagaaagaaagtggtaaatcctccgtccttatggatgtcaaaccatgggacgatgagactgatatgaagaagctggaggaggctgtccgcagtgtccagatggagggtctgacttggggagcatcaaagcttgtgcctgttggatacggcatcaagaagatgactatcatgttgacaattgtcgacgatcttgtgtccatcgacactctaattgaggaccaccttacgcaagagcccatcaatgagtacgtccagagttgcgacattgtggctttcaacaagatctagagttcagtttctgagattgggcaacggcagcggctcagctcgtcaagtttgtgctgggatgccagtttatcccttctagtctattacagaaatgttgttcggagctgagtctattataaacatcttggtctgagtttattgttgagtggtgccagtttttttcaatatacatttatcttaaaaacagcggtactgatgtttttttgtctaaagttaatgagtttgcaatggttctgagtct

SEQ ID NO: 15546 - DNA, 847 bp, Zea mays
  Clone ID: LIB3060-022-C11_FLI
gatcctcgtcgccgacgcatccacccgaaccctcctccgcgacctcgccgtcgccgcagccttggccatgtcgatcttcgagtataatgggtccgccgtggtggcgatggtggggaagaactgtttcgcgatcgccagcgaccggcggctgggcgtgcagcttcagaccatcgcgacagacttccagcgggtgttcaaggtccacgacaagctttacatcggcctctctgggctcgccactgacgcccagacgctgtaccagcggttggtgttcaggcacaagctgtatcagctgcgggaggagagggacatgaagcccgagacctttgccagccttgtctctgcgctcctctacgagaagagattcgggccatatttctgccagccagtcattgctggacttggagatgacaacgtaccatttatttgtactatggactgcttaggtgcaaaggagctggccaaggattttgttgtatctgggacagcatcagaatctttgtatggtgcttgtgagtccatgtacaagccgaacatggaacctgatgaactcttcgaaactgtatcccaagctctgaattcatcaatagaccgtgactgccttagcgggtggggtggctatgttctgattgtgacaccgactgaagtgagggagcatgtgattaagagcaggatggactaaatcatggccactatcactataattcttagctggtttccaatgcttagaccaatgttgtgtttggattctgaagtaatattgtatcatcacagctggtatgagaatgaacggttgttttatttacccctatcttgcaagacttatgcctggatttcagctgaaaat

SEQ ID NO: 15547 - DNA, 1179 bp, Zea mays
  Clone ID: LIB3060-022-C6_FLI
cacgagcgagcaagtccctaatccccatttctaaatctctaaccctagcgtactgagcttggcatggcggcggcagtgtcccgggctcccagcggcacagtcgtgcggcgcgagcgcagcctctgtgcctaggctgcgcctgcacgtcggccggcggcacgcggtggctaataggctggaggcactgcccgagcggctgcccaccagtggtccagctcccactatggttctaaccagcaatatttcggttcagaagaccttgtacgaggttttatctgtgagtgaagacgctacatacgatgagatccgcgcagcatacagaaagcatgggaagtcctacgccatcctacatccagagcagattatgacaagcagctgcagtcatccagacagagcatcgagatcatcgcatccgaaatccaagtcggggacatgatcgtcgagagcgctgctggtgctctagagctgctgtacccatgcaggtgtggcgattatttctccatcacttcgggtgaacttagcgggatggggattgtcgtcactcgggatggagaagaagtagaagagctgcaggcgtcggattctgcatcggcttctgtcgttctgggctgtggctcctgttctctcaaaatacggctggttatagatggaagctcatgatcacatttcaggctctggttgcacgctgttcagcagtgtggtcagtttgaatgcttaacaaccacctccacatgtttgtcaaacagtatgcaattcccggtctgctgaaaatcttgcagcttatcccgatggtggttgcattgtgataaatggcattttgaccgttgttatcagctaacgaccatcgtcaagtccagctgctgggagttcaaagatgttccggtggtggttattcggtagatgtttagttaatgttgtttttctaggccaatttaatggtctcatcggtcagccattcacctaaacgatggctaaactaacgggttttttatttggtatcagctgaatgaatgctgggtgtttttgatagctgctgatgagaaagaagtgttggctgtggctgttggtgttgtattgaataacttgtgaccgtatctgtactgctaaacatgggcagcatcccatgcagaagtagaacggctatgtatctgtatctttagaatttgatattcgtaaaac

SEQ ID NO: 15548 - DNA, 1592 bp, Zea mays
  Clone ID: LIB3060-022-C8_FLI
ctatgatgttgtaaaggctcacaactccaacagcaaaattattggttttcttggaggaaccgatggattatttgcacagaaaactattgaaatcactgatgaagctcttccatcctataaaaatcaaggtggttatgacatgcttggtcgtacaagggatcagatcagaacaactgagcaggtaaaggcaacaataggtacatgtcaagcattgaagttggacgctcttgttataattggaggtgtcacatccaacacggatgctgctcagcttgctgagacatttgctcagttgaaatgtccaacaaaggtagttggtgttcctgtaactctaaatggagatctcaagaaccaatttgttgaaacaacagttggttttgataccatatgcaaggtgaactcgcagttaataagcaatgcatgcatagatgccctttctgctgaaaagtattactactttattcggatgatgggacggaaagcatctcatgtagcattggaatgtgctcttcagtcacatccaaatatggttatcctaggcgaggaggtttctgtgtcaaaacttacaatatttgatattacaaagcagatatgtgatgctgtgcaggcaagagctgaaaaagacaaatatcatggagttgtacttattcctgagggccttgttgagagtattcctgaactgtatgctttgctccaggaaattcatggactgcataataaaggtgtttctgttgagaacatctcttctcatctttcaccttgggcatctgcactatttgaatttttgcctccatttattagaaagcagctgcttctccatcctggatctgacgattcagctcaactgtcccagattgaaattgagaagcttctagcacaattggttgagaccgaaatggacaaacgcctagttcttggacatgtatgttatcacatcgtagcggctggtttgaacggctacatggccactgtgaccaaccttaagagtccagtaaacaaatggaaatgtggtgctgctcccattacatctatgatgactgtgaagagatggtcacgtggtgctgccaccagtcaaatcggtaagcctgctgtccacatggcgagtgttgacttaaaaggaaaagcatatgagttgttgagacaaaattcttctagcttcatgatggaagacatctaccgaaaccctgggccacttcagttcgaagggtcaggtgctgatacaaagcctatttcattgtgcgttgaagatcaggattacatgggaagaatcaagaagttgcaggagtatttggagaaggtgaaaagcattgtgaagcccgggtgctcgcaggatgtccttaaagcagcggtaagcgccatggcttctgtgacggagatgttgaccatcatgtcttccctttcatttagtggacaggcgaccatctgaaggccaagctgaagatgtcatatgctgttgcgctctcatgtcccgaacatatttgtgtttttttgggaaagaaacatacaatttttgttctcattctagtatcgtctacctatgtcaaactacaatatgataggacccttgctaaataattgtttcgtttgctggt

SEQ ID NO: 15549 - DNA, 1689 bp, Zea mays
  Clone ID: LIB3060-022-E5_FLI
ctgcttcagaatatattattccatacgctaagttcctgaagagcctcaatcatccggtctgtattggagcaaggatcaactttcagtgccataatgaagatgttagtgaaaggcgatctggagtggttgttcgcattagtgaaatagatcccatgaaatggcctggctcgaagtggagaagcctgctggtaagatgggaggacggtgctgaatgtaatggccaagatagagtatctccatgggagatcgagatagctggtggttctgtctctgtttctcattctctttctgcatctagttctaaaagaaccaagttgtgtcctcagggaaatttggacgttccagcaatgtggaatggttgtactgactccatggaaactggaaagttacccagggtcttgcaaggtcaagaattgatgagttttaggacttgtcatgttccgtgtgctcctcaaactgctgaggctgcaaaacttcaatcttctgatgctagtaggttccttagtaatgcacatggctgcgcattgggtggtccaacaagcagactcgcagtgcatagctctggttttacctaccaatgtgtaggcttcaatgaatctattggattctcagaggtcttgcaaggtcaagaaatttctcgggcggttcctaagttccaaggaatgatgtcggaagcttgttcactgaaagacagatatgggctgcatagttatatgcgtgccccagttgctgttaatggattatcagctacaactcaagaatgttctctcgcactatctactccgccaggagcacaagtgccctctctctaccctggtaatgttgttaaccgaactgtggttccacaacttggactggcaaggaagtttggtggtggaggtacaaatggccagcagtctggcccatttgataggccgagggaactttggaccaggccacagcatgaaacacctgaccaaatgaacttggatcagtttgagactagaagaccttcagtgcctgtagatgctgctaagcttgggtctggtggaggggaggttcgcaaaactagctgcagactttttggtttctccttgactgaaaagatcttgccagcagatgatgatgacgtcaaggaagtgagctatgagactgagtgccagaacccacggatgctggacctgttcgggtacaactgctcaacaccgagtgccgctcttccagctctgtgtgctgccgccccctttggaatgtgatgctgcttcgaatctttcgataactttgctccatgtactcttagaagttttactttcccagtaccccagtgtagtcataagctgcttttgacatcattccctttggtctgcctcaagttaagcagtcatttgcacaagtaaacgaaggttcgttggtgaaccactcctcgacatgcctcaccctgtcacccaaactattgtggttagtctcaggatacccagagacaccacattgtaacttatgtcgatgatccttcagaactgttgtgcgatgaagctaacaatttgctctaaaagtactttgcttgctctaaaagtaccggctatgtatatttaaatcagcacctgtatgagtttttttagccctcacaagccctggttgcaagtcgactaggccgtgtgattgtattagtatgctatctttttaaactgtcgcttatgagtctttattctt

SEQ ID NO: 15550 - DNA, 1143 bp, Zea mays
  Clone ID: LIB3060-023-B11_FLI
caaaagccaaaaggcatcaccgccgcgacgacgatggcagcctcgctccaagccgcggccaccctgatgcagccggccaagatcggcggccgggcgccctttgcctcgctgccgtcccgcccgtcgtcgcaactcgcctgcagggcgttcggcgtcgacgccggcgccgccaggatcacgtgctccctgcaggacgtcgccagcaggtgcgtcgacgccgcgaagctcgccggcttcgcgctcgccacctcggcgctcctcgtctcgggcgcgagcgcggagggcacgcccaagaggctgacctacgacgagatccagagcaaaacgtacatggaggtgaagggcacgggcacggcgaaccagtgcccgaccatcgacggcggcgtggagtcgttcccgttcaaggccggcaagtaccagatgaagaagctgtgcctggagccgacgtccttcaccgtcaaggcggagggcatcgccaagaacgccccgcccgagttccagaagaccaagctcatgacccgcctcacgtacacgctggacgagatcgagggcccgctcgaggtcggctccgacggcacgctcaagttcgaggagaaggacggcatcgactacgccgccgtcaccgtgcagctcccggggggcgagcgcgtgccgttcctcttcaccgtcaagcagctcgtcgccaccggcaagcccgagagcttcggcgggcccttcctcgtgcccagctaccgcggctcctccttcctcgaccccaagggccgcggcggctccaccggctacgacaacgccgtcgcgctccccgccgggggcagaggtgacgaggaggagctccagaaggagaacatcaagaacgccgcctcctccaccggcaacatcacgttgagcgtcaccaagagcaacccggagaccggcgaggtcatcggcgtcttcgagagcgtgcagccgtccgacaccgacctcggggccaaggcgcccaaggatgtcaagatccagggggtctggtacgctcagctcgagtgattcgagtgtctaactgctaggtgtccgaccgccgtcatggatcttgggaaggtgtatgtataccatggaaaactttggagagcagaggaggaatcgtgtatgtaatgtacttgttaatgc

SEQ ID NO: 15551 - DNA, 1078 bp, Zea mays
  Clone ID: LIB3060-023-D10_FLI
agcttcctcttgagccgtctctttcaaggactttgattgaagcaaatgaattgggatgcctatctcaggcgttaactgttgcatcgattttgtcagcagaaataacattgcgatcagttagcaaggacgtggtggatggaaagaggaaaaggcaggagctccctgatgggtctggctggggtgaccatatacaattgcttcagatatttgaaagctgggaccaaactggctatgacacaaaatggtgctctcatcatgatttgcaggtgcggggtatgaaattgagcaaagatgtgaggaaccaactatgtcagattattcaaaaaattgcaaaaggttcaactgatgtggatgcaaggaaaagccggaagaatgaccctgattatagaaagctgaggagagctctctgcgtaggatatggtaaccagctagctgagaggatgctgcatcacaatggctaccatactgttggctataggacccaacttgtacaggtgcatccatcttctgtactggaaggcgatgagtatggaaagtttccaatgtacgttatttatcatgagctgataagtacaactcgtccatacatgagaaatgtctgcgccgtcgagcaagcctgggttcagcctatattaaagaagctcgacaaattagacataaacagattaagtggtggttcgagtgcaccgggagattctgaacttctgggagacaataagcaagtgaactcgtcaaagaatgacgtgggtgtaaaacaatcagaggtggacagtaaaatccaggcagctcgagagcggtaccttgcacgaaaaggcaagaaatgacaatcgacacgtttaactgatcgctcagcatccttctggtcagcctgaagcttctctgaagatcataccgaggaaccattcgtgttattgtgggtggtgtatgcttcaacgtgcacaaacaagagaatttcttatgtaatcttttgtttgaggactctaaccttttcttttatttggcattactgtgatgtgaccttttccttgggccgaaatattttacaggcttttctgcatgggctagattcttttccccc

SEQ ID NO: 15552 - DNA, 1645 bp, Zea mays
  Clone ID: LIB3060-023-D2_FLI
cgggagtagtcgacgcgccgtcactgaatcctcagatcacggctagccgtaatcacgccactctgctgactcccggcgagcagtgtaacattttccttcagccatgggcaaggagaagactcacatcaacattgtggtcattggacatgtcgactctggcaagtcgaccaccactggccacctgatctacaagctcggcggtattgacaagcgtgtgattgagaggttcgagaaagaggccgcggagatgaacaagcggtcattcaagtatgcctgggtgcttgacaagctcaaggccgagcgtgagagaggtatcacaattgatattgctttgtggaagttcgagaccaccaagtactactgcactgtcattgatgcccctggacaccgtgacttcatcaagaatatgattactggcacttcccaagctgactgcgctgttcttatcattgactccactactggtggttttgaggctggtatctccaaggatggacagacccgcgagcatgctctccttgctttcacgcttggagtgaagcagatgatttgctgttgcaacaagatggatgccaccacacccaagtactccaaggcccgttatgatgagattgtgaaggaagtctcttcctacctgaagaaggttggatacaaccctgacaagatccactttgttcccatctctggtttcgaaggtgacaacatgattgagaggtccaccaaccttgactggtacaagggcccaaccctacttgaggctttggacttgatcaatgagccgaagaggccttcagacaagcccctgcgtctccccctacaggatgtgtacaagattggtggtattggaactgttcctgttgggcgtgttgagactggtatcatcaagcctggtatggttgttacctttggtcctagtggccttactactgaggtgaagtctgttgaaatgcaccatgaggctctccaggaggcccttcctggtgacaatgttggcttcaatgttaagaatgttgctgtgaaggatctgaagcgtgggtatgtggcctccaactccaaggatgaccctgccaaggaggctgctagcttcacgtcccaggtcatcatcatgaaccaccctgggcagattggcaacggctatgccccagtgctggactgccacacctcgcacattgctgtcaagtttgcggagctcattaccaagattgataggcggtctggcaaagagcttgagaaggagcccaaattcctcaagaatggtgatgctggtatggtgaagatggttcccactaagcccatggtagtggagaccttttctgaatatcctcctcttggtcgctttgctgtccgtgacatgaggcaaacggtggctgtcggagtcatcaagagtgtggagaagaaggatccaactggagccaaggtgaccaaggctgccgcaaagaagaaatgatgtgtctggctggttctgtgtttgcttgagggatacctagtggaaacgtaaaatatctcgtcttgttcacgtcattgtctgaactatgctcgcaacgtttgcctggtcgatttagaactgttattttcgttaaaaccagagtgttatttaagacttatccgaacatctggtgagccatatatggttactagttttgtt

SEQ ID NO: 15553 - DNA, 1378 bp, Zea mays
  Clone ID: LIB3060-023-G9_FLI
gcaggcagaggcaagaggcccctcaccctcaggtgatcaggtcgctagctcccggcttaactagtaggcagccatgaatttcggtgggaatggcaacgcgacgatccggtgcaagtactgcagggcgagcctgagcgtgatccccggcgagcgcgccatccagtgcgcgcaatgcaactgcgtgacccgcatccggcgggccgaccgcatcccgctggcgcggccggcgcacgtgccgccggcgttccagcgcgcccggggcaagaagcgcgccgtcctggtcggcatcacgtacgccggcgcgcgccggggctgcggcgacctgaggggccccgtcaacgacgtcaagtgcatgaggaacctcctctgccagcgcttcggcttccccggcgagtgcatcatcatgctcactgacgaccagagggacccgttcaggctgcccacgaaggagaacatccggatggcgatgcactggctggtgcagggctgcagctacggcgactccctggtgttccacttctcgggcatcggcgcgcaggtggcggacgacgacggcgacgaggcggacgggtacgacgaggccatctgcccgctggacgcgttccagagcgggcccatcctggacgacgagatcaacgaggtcatcgtgcgcccgctggtgcacggcgccaggctgcacgccgtggtggacgcctgctacagcgccacggtcctggacctcccctaccagtgccgcatgtccaggaacgggttctggcagtgggaggacgagagcccgccgtcgggcgcctggaagggcaccagcggaggccacgccgtgctcatcagcggatacagcgagggcaaaggcaacttcgccatgatgcccgacgcccacgcgtcggtcgtcggggccatgacgcacagcttcgtccggacgctggagtgccagccgcgcggggtcacctacggccacctgctcagctccatgagggccatcatgaagaaccgcggcgggggctgcgatctgcagggggccatcggcgcacccatccgcaccgtcgccaacttcagcggcgtgcaggagcctaacctgtcctcttcggagacgtttgacatttaccgcaagcagttcgtcctgtagacaccaccacaccagggtttgcccctgccggccggccgcttgtaatgaattgccgtcgtatcagaataagaaattatctatcgaccatgatatgatatgatatatcaggaaagaaggaactattacccctcaatgtaataactaagcatgttcaatgtcctctttttattagagagagagacagagagaaaacgcggaatttgagacgtgtgcatgcagtttacgtgatcaataaagttacatagaaattatttt

SEQ ID NO: 15554 - DNA, 1442 bp, Zea mays
  Clone ID: LIB3060-024-B5_FLI
atcttggcctcgtcaatccaccaccaccgtcgtcgctgagctcctcctccggcttcgcttcgctgtcttgcctcctcctcggtcgaagaagaagaagaagaaaacatgtgtccgggatccgtggagtcgtcgtcggcggcggcggcgggcaagagcgtgtgcgtgatggacgccgcggggccgctgggccacgcgctcgtggaccgcctcctccggcgcgggtacaccgtccacgccgccacgtacgcccgcgacggggaggagggcgcggctgccgccgcgctgctcggccacctgtcgtgcgccgccgacgcgtgcaggcaccggctgaagctgttccgcgccgacccgttcgactaccacgccatcgccgatgccgtgcggggctgcgccggcgtcttctgcatgttcaacacgcccgacgaccaggcccaatgcgatgagtcgacggtggagacggaggtgcgcgcggcgcacaacgtgctggaggcgtgcgcgcagacggacgccatggagcgggtcgtcttcacctcctccgtcaccgccgtcgtctggagcggcgccggcgccggcgcccacagggaggaggtcgccgacgagaggagctggagcgacctcgccttctgcaggaagttcaagctgtggcacgccctggccaagacgctgtcggagaagacggcgtgggcgctggccatggacaggggcgtcgacatggtggccatcaacgccggcctgctgctggccgcccccgggctcgggctcaccgccgcgcacccctacctaaagggcgcccccgacatgtacgacggcggcgtcctcgccaccgtcgacgtcggcttcctggccgacgcgcacgtcgccgcctacgagtcccccaccgcctacggccgctacctctgcttcagcaacgccgtctgccgtcccgaggacgccgtcaagctcgcccagatgctctcgccggccgcgccacgctcgccgccgccaagcgacgaactgaaggtgataccacagaggatccagggcaagaagctgaacaagctcatgctggagttcgccagcggggtatacggggagctggactaggaaggaactgccaggccacagatgatgcgatgcgactagggctgttgtattcttttgtacgtagtactatttgtagttttcgcccccctcacaaaaaaaaaaggagggaaatctgtttggttggccaaaatgtgccatacgctcgctgtacatggccaaacacgccacgtgtgtagcccctgccagcagcaggggtgggtggggagagcatttcagtgatcggttgccaaagaaataccatatcgtatctaggttcgtgagttacatcccatgcatgtgttacgtgacgcttatattgaactctgacaaacttgtagcgcacaattacaaacatgattacggaagaatcgtttcagggc

SEQ ID NO: 15555 - DNA, 987 bp, Zea mays
  Clone ID: LIB3060-024-C1_FLI
ccatagcctgcagccctccatccacgaactcccgttctccatttccagccatggcggtgtcgatcgagctcaccaaggagtacggctacgtcgtgctggtgctggtggcctatgtcttcctcaacctttggatgggcttccaggtcggcaaggcccgcagaaagtacaaggtgttctaccccaccatgtacgccatcgagtcggagaacaaggacgccaagctcttcaactgcgtgcagagggggcaccagaactctctagagtggatgcccgttttcttcgtcatactgctgctgggcggtctgcagcacccgaccatcgccgccggtctgggcggcatctacatcgtcgcgaggttcttctacttcaagggatacgccaccggcgttccggacaaccgtctcaagattggggggctcagctacttggcgttgcttgggctgatcatttgcacagcatctttcggcatcaacctgctcatcagggagatgctctaaactttgggtttatatgtgagctccaggctgggttaaccgcacaagttactcatggtctgagcatcaaaactttgtgacactggtcttttgggattttatagtggagttctcgtttctttctttgtctgtgtgttgattagcaaaagtagtgtgcgaatgcgtcttatagttgtgaaggaataagaggagacagatgggttgaagcgtgatacagttcttgctgcttgtcactctctgatctggtttcgttgtagatgagatggttgttaatggtttgtgtttgaggcacgatccgccttattttctaccgatctaaagccggggtgtaacaattttgaattattctggttttgggtttatgtttatgcgatgtattggctggtagcagttctgcattgactgcatagcaaccttaatcagctggtaacaattcttggacttctttatattattactagttgtgtgcccgtgcgttgcaacgggaacatat

SEQ ID NO: 15556 - DNA, 847 bp, Zea mays
  Clone ID: LIB3060-024-C10_FLI
agcattcctatcctctccccgcccgcccgtgccgccgccgcggcttcccttcctctcccgagccaagatgaatgttgaaaagctcaagaagatggcaggtgctgtgcgcaccggggggaagggtagcgtgcgcaggaagaagaaggcagtccacaagactacaaccacagatgacaaacggcttcaaagcaccttgaaaagaataggagtgaacagcattcctggtattgaagaggtcaacatctttaaggatgatgttgttattcagtttgtaaatcctaaagtgcaagcgtcaatggtgctaatacatgggtggtcagtggaactccacagacaaagaagctgcaagatctgcttccgtcgattatcaaccagcttggtcctgacaacctggacaatctgcggaggctcgcagagcaattccagaagcaggcctctggtgcttctggtgcagaggctggtgccagcgctggggctgttcaggacgatgatgatgacgttcctgagcttgtccctggagagacatttgaggaggccgcggaagagaaaaaggagtcctcatgattttgctacatgcctgctgttgttaaaccatgccattagaagggacctgttgagaactctgacctaccttatttgtgcctgtgggactggttatgtcatgatcgagaatttggtagggcgtgctggtgggattttacatgaagtatgcctcttttttttcatccatatctcccttgcttttgtgtggtaaaagtcctgttaatggtaaaggccacactttagaccaaatcaaggcaccgtgatgcatgaagataaatacaatatatcgattcaccttgcattt

SEQ ID NO: 15557 - DNA, 1506 bp, Zea mays
  Clone ID: LIB3060-024-F12_FLI
aatctttgaggtcaaggccacagctggtgacacccatcttggtggtgaggactttgacaacaggatggtcaaccacttcgtccaggagttcaagaggaagaacaagaaggatatcactggcaaccccagggctctccggaggctgaggaccgcttgtgagagggcgaagaggactctgtcttccactgcccagaccacgattgagattgactcgctgtatgagggcatcgacttctactccaccatcacccgtgccaggtttgaggagctcaacatggacctgttcaggaagtgcatggagcctgttgagaagtgcctgagggatgccaagatggacaagagcaccgtccatgacgttgtacttgttggtggctccactaggatccccagggtgcagcaactgctccaggacttcttcaacggcaaggagctgtgcaagaacatcaaccccgatgaggctgtcgcctatggtgctgctgtccaggctgccatcctgagcggtgagggcaatgagaaggtgcaggacctgcttctgctggacgtcacccctctgtccctgggtctggagactgctggaggagttatgacagtgctgatcccgaggaacaccaccatccccaccaagaaggagcaggtattctccacctactcggacaaccagcccggtgtcctgatccaggtctacgagggtgagaggacccggacacgcgacaacaacctgctgggcaagttcgagctctccggcatcccccctgcaccccgtggtgtgccacagatcaccgtgtgctttgacatcgacgccaacggcatcctgaacgtgtctgccgaggacaagacaacggggcagaagaacaagatcacaatcaccaacgacaagggccgtctctccaaggaggagatcgagaagatggttcaggacgctgagaagtacaagtctgaggatgaggagcacaagaagaaggtggaggccaagaactcgctggagaactactcctacaacatgcgcaacacgatcaaggacgagaagattgcgtccaagctgccggccgatgacaagaagaagatcgaggacgccatcgacgcggccatcagctggctggacgccaaccagctcgccgaggcggacgagttcgaggacaagatgaaggagctggagagcctctgcaaccccatcatcgccaagatgtaccagggcgcgggtgaagacatgggcggcgctggcggcatggacgaggacgcccctgccggcagcggcggccctggccccaagatcgaggaggtggactaagcggtttgttgtcagtcttgagtgtgctgcagttgctggctggcccagttgctgccgagagttatcgtcagttggtgcggtgtgtccgcttaaactttatttgtggttggttggtacttttgtggtggttatttttttggacctcgtgatagtcggtcggttcaatgttatcgcggctactggcaaaccttaagtgatacggtattcttcttttcggt

SEQ ID NO: 15558 - DNA, 524 bp, Zea mays
  Clone ID: LIB3060-025-A6_FLI
gccgtctcccttttgcgtgagcaaagaaagagagcgagaagcagtcgccatgtctggcatcatccacaagatcgaggagaagctccacatggggggcgaccacaagaataaggaggaggagcaccacaagaaggccgaggagcaccacaagaaggaggagggggagcaccacaagaaggacggcggggagcacaaggaaggcatcgtggagaagatcaaggacaagatcaccggcgagcacggcgacaagtccggcgaccacaaggagaagaaggacaagaagaagaaggataagaagaagcacggcgagggccacgaccacgacggcggccacagtagcagcagcagcgacagcgactgagatctggtgtcgcagcacaggtgcaacacaagtatgcttgctggatggaggattcataccagctgatgctgatgtagtgtttcactggtgtcatgcatgcatgtatcgtgctattataatcaaaaagaaaaaagaaataacagtcagggatggtttgtttgcc

SEQ ID NO: 15559 - DNA, 1819 bp, Zea mays
  Clone ID: LIB3060-025-C8_FLI
ccaaaagatgttattttttgatcgtcacaaggttggtgaattgaccggtttgttgacatctgatttgggttccttgaagagtgttgtaagtgataacatatccagagatcgtggactgagggcactctctgagatcattggtacactttgtatacttttcacactatcaactgagctagctccagttcttgggctccttatggtgtccgtctccgtgctagttgctattttcaagaggtcaactgttcccacttttaaatcttatggaatcgtgcaagcacgcatatcagactgtgcatcagagacattttcagctattcgtactgttcgatcatttggtggtgaaaaacgacaaatttctttgtttgacaatttggcacatgcttaccaaaataatggcacaaaacttggagtgctgaaatctgctaatgaatcattaactcgagtagtcgtctatgtctccctaatggcactttacattcttggcggtagaaaggtcaatgcgggcaaattatctgttggaaccatggtatcttttattggttacaccttcacattaacctttgctgttcaaggagctgttaatacccttggtgatctgcgtggcacattggcttccgtagagagataaattctattctttcagcgaaggacattgatgattcacttgcatatggtttagccaaagaacttgatggcaaagagtttgatgattccaatggagtgtatgaaaatggatctgttaacaaacatttcatgtcagagctgaaatcatccagtagctgtagtaatctagcctggtctggtgacattcgtctgaaagaagtccatttctcttatccattgagatctaatgtggagattttaaatggccttgaccttacaattgagtgtggaaaagtcacagcacttgtcgggcctagtggtgctgggaaaagcacagtggtacaacttctagcacggtattatgagccaactcaaggttccatcactgtcgcaggagaagacatccgtgtatttgacaaaagggaatggtctcgagtagtatctctagtcaatcaggatccggtcctattctccgtgtctgttggagaaaatattgcttatggtctcccagatgatgttgtctctaaggatgagataataaaagctgctaaagctgccaatgctcatgaattcatcatctctcttccacaggggtatgatactcttgttggagagcgaggtagtctcctaagtgggggacaaaggcagaggattgcaattgcacgagccctcttgaaaaatgctcctattctaatacttgatgaggctactagtgcactggacgcgacaagtgagcgactcgtgcaggaagctctcaatcacttgatgaagggaaggacttctctggtcattgctcacaggttgagtaccgtacagaatgcacatcgaattgctgtttgttcagagggcaggataactgaactggggacacaccgagaactggttgctaagggaggcagttatgcatcacttgtcgggacacagagacttgctttcgagtaatcacacgtcaactgcgaggaacggatcgactgcaatgtaggggattctatatattactctattttccttcagggcccatcggaacataggaattctcgtggaaatcagaatgaatttcatgggtaaaatatagaaaacagaagatgaaaaaaaacccaccttctgaatgtggccttggttataggttgtttcttatccacagaagcaacacatgaatcagaaaacacatgtatgtatcgaactttataatatattaacctaaacaaaggac

SEQ ID NO: 15560 - DNA, 1213 bp, Zea mays
  Clone ID: LIB3060-025-D1_FLI
gcgtggagcgcgcgaccccgtacgtctccaccgctgcaggaactccccccctccccggcggcccgcgcgcccaccaaccatggcagtcgcagccgccgcccaccacctgcccgttgtgccgcaccgccttgtcccggtccggcacaccagtagcagcccgccgccgcatccggcctcccgctgctccgccgcggggaagccgcccgtccagctccacgcggcgcaagcgagggcgtctgggttcgccgcgcgcgtcgcgttcaacccttccgggaactacgacctgtccctctccatgggcgaagacgagaccccgcaggtccagcctccgccgccgcctacccaagggcgcttcgaaatcgttatcaacaacgacaacatccgaacgctcgacctatcgccagtcgaagcagcactcggcgacttgagctccttgacaccagctgcttcaagaaccctgctggaccagaccgtcgggttcaccatcagctacgagagggaggacgagtacgacacgcgggagctgtcggagttccccgacatacggctgtggttcgtgaggctcgacgccgcgtacccttggttcccggtcgtgctcgactggagagccggcgagcttgccagatacgccgcgatgctcgtccctcaccagatgagcatgcggatgggcgtcgtcttcaacccggaggcgctggagctgttcgtgatgaagaaggtgttcgccgtcgacgcttggctgaagcagcagagccatcccaaaccgaggctgaagacggcggacatggcaaggatgctcggcttcggcgtcggagatgagctgttcgacctgatcgagaagtaccctgtccatcgttcgtgataaaaaaataattaaacaacaaagctgagaatagggatccgatcccacacacagaagaatcagtcgtctggtcggtgctgctgcctgctgctcataccatacccacacccttgaagtagaaactaaggcacgtttgctttgctccaggagaccaggagcgctctgatgttgtcgtgttcctcgcgtcgccttctcggcctgttgtactcagtagcgccgcagagtctctagcatgagacgacctcgaggagtctatgttgtcgtctatggatggaacagtcagcatagaccaaggccgtgacctttcctccggtgctagccctttcgcatgtatcggataaatttggttctgct

SEQ ID NO: 15561 - DNA, 362 bp, Zea mays
  Clone ID: LIB3060-025-E10_FLI
ctcactttagtaagctatttctgcaaaagtatctaagttgattcttgctaaagccttttccttgattcctatttaaccagcatatccttgagagtcattttcccttagtcgggtaaggcttgcgaaagtacactccgtactcagggttttcgaacccatgttgttgtaggtgatgagaagtactctaagtgttcctgtggctggagggcgtttccagttctgggggaggattagttaggcttgtgtataagctttggagggttcctaccttcctgctattgtaataagttatgcactttgagtatatcaggacttgtaataaatgtaactcttcctatgtaataagcttcagttttagaaat

SEQ ID NO: 15562 - DNA, 1042 bp, Zea mays
  Clone ID: LIB3060-025-F11_FLI
cgtacctggagtttttggacagggtgcacacctctgagctgaagctgagggcacaaagcctctgggaagttccacacccttggttgaatcttctgataccgaggagctcaatccgcagatttgctacggaagtctttggcaggatcctgaaagatagcaacaatggtcctatattgctttatccagtgaacaaatcaaagtgggacaacaaaacgtcagtggtcataccagatgaggaaattttctacctagtgggattcctttcttcagcaccgtctctctcaggtcacggcagcattgcacatgcgatgagcctgaacagccaaatagtagagttctgtgaagaggctgatattgggatgaaacagtatctagcacactacaccacacaggagcagtggaaaacccactttggagcaaggtgggagacatttgaacggaggaaacacagatatgatcccctagccatcctagcaccaggacagagaatattcccaaaggcgtcactcccattgtctttgtgacggttcctgctatttaaaggcttctgtagagcatacattgtacaaaagtgtaggtaaaagtatcccctgtaaagacaatatctacggaaggtagctagcctgaagaacacagcatagcgactttttcagtggccaaagatacctcaaagcagtacttcaatgtggagcaacgtcacctgaaccctgaaggtggtgagtgcaactttggaggcaatcactggtagtggagcctggagggttgtagcggtccaaggaacctgtctgttgttacagcgttgagatgagctgtgctgatcaactgatcactaaccagtgtcccgaggaaatcatgttggtctgtatgtattttccgttaacaacagtgcagaagtttgcatgagggtagtgcattgattagcaaatagcactgcctgttatttcacttgtaactggcatctcatctcaaggagagcctgcgtaactgtagcaggttatattgttttccatgagtcagaaactcagaatattaatgctcgtgc

SEQ ID NO: 15563 - DNA, 331 bp, Zea mays
  Clone ID: LIB3060-025-G11_FLI
gcaaggcgacggcggggctgaagctggaggcgcgcgactccggcctgcagacgggtgaccccgccgggttcaccctcgccgacacgctggcctgcggcgccgtcggccacatcctcggcgtcggcatcgtgctcgggctcaagaacaccggcgccctcgaccagatcatcggctagatccctacgtcgccgttgttaagatcagactcagcagcctcgatcgcgccgccggccggcaggtgcaggtggtgactttgtaacgtgtgtgcgtgcgtacgtgtacattgcatccatcttggttccaatggacatatagctcctgttgctcctct

SEQ ID NO: 15564 - DNA, 973 bp, Zea mays
  Clone ID: LIB3060-025-H5_FLI
atcaccatgcgccgcaccgtcaagagcgttccccagagcatatggtacggccctgatcgccccaagtatcttggcccgttctccgagcagacgccgtcgtacctgaccggcgagttccccggcgactacgggtgggacaccgcgggcctctcggccgacccggagacattcgcgcgcaaccgggagctggaggtgatccactcccggtgggcgatgctgggcgcgctgggctgcgtgttcccggagatcctggccaagaacggcgtcaagttcggcgaggcggtgtggttcaaggccggcgcgcagatcttctcggagggcgggctggactacctggggaaccccaacctggtgcacgcacagagcatcctggccatctgggcgtgccaggtggtgctcatgggcttcgtcgagggctaccgcgtcggcggcggcccgctcggggaagggctcgacaaggtgtaccccggcggcgccttcgacccgctgggcctcgccgacgacccggacaccgccgccgagctcaaggtgaaggagctcaagaacggccgccttgccatgttctccatgttcggcttcttcgtgcaggccatcgtcaccggcaagggccccatcgagaacctcttcgaccacgtcgccgaccccgtcgccaacaacgcctgggcatacgccacgaacttcgtccccggcaactaactgactgagcaacgccgtacatgtgtactaccatcagatccatccattcgttcgtccgtccgtcgagtgaacagtgtggtcttctctgtactctacttgttcagatcgtaggcgtgtagtagttgcaccagccggcgtatgctcatgatcgatgtgtgctcatcaatcaatgtcaatggctgcctgctgtaagcggtcgatgtaaactaagcacagacgcatgtatcgtcatcagtggatgaatcaatctatcgatggcctgtgccattcatttttg

SEQ ID NO: 15565 - DNA, 1927 bp, Zea mays
  Clone ID: LIB3060-026-B6_FLI
gaaagaaaagactgtagctagctagccaccgcgcgcgcgcacgagtagtctagctagaatacactcgcgttcaaaacaaacacacagcgtcgtgctgcgtgatctctgaccgcgtcgacaactaccgcagcaccaagcagctgatggcggccaccgtatcttcctgcctgagcctcgtccccaccgtgcaccaccgggccggcgggttccccagtgtggcactgacgaacacgcttcagcgccgtcgtcgttctcgccgctatcttgtcgtcgcctcggcgacgagagccgaacaggaggccgcccctgtgacgatcgaggacgtggacctcagctctcatcaggccgcggccgacgacggggagctcgccgcgcggtggcgggaggtccacggcagcaacaactgggagggtctgctggaccccatcgacggcgtgctcctccaggagctcatccgctatggcgagttcgcccaggccacctacgacagcttcgactacgaccgcttctccccctactgcggcagctgcaagtacccggcgaagaccttcttccacgacgtcggcctcggcggcatcggctacgaggtcacccgctacctctacgccacctgcaacgacctcaagttccccaacttcggcatcaagacggccgccaacgccaagatgtggagcgagtccggcacgttcatcgggtacgtggccgtgtccaccgacgaggagacggcgcggctcggccgccgggacatcgccgtggcgtggcgcggcaccatcacccgcctcgagtgggtggccgatctgacggccaaccagatccccctgcgcgagacgggcgtcccctgcccggaccccgacgtgaaggtggagcgagggttcgcggcgctgtacacggacaagggcgccggctgccgcttctgccggtactcggcgcgggagcaggtgctggccgaggtgcgcaagctggtggatctgtaccacgggcggggcgagcaggtgagcgtgacggtcacgggccacagcctgggcagcgcgctggcgatgctgtgcgccttcgacatcgcggagacgcgcgcgaacgtgtcgccgggcgacagggtggcgccggtgtgcgtgttctccttcgccggcccgcgcgtcgggaacgtcgccttccggaggcggttcgagcgggagctgggcgtgcgggcgctgcgcgtcgtgaacgtgcacgacagcgtgcccaaggtgcccggcgtgttcttcaacgagtcggcgttcccggagctcgtcctgcgggcggcggacaggctgggcctcggcggcgtgtacacgcacctgggcgtgctgctgcagctggaccacaaggtgtcgccgttcctcaaggagaccctggacctctcgtgctaccacaacctggaggcgcacctgcacctgctggacggcttccgcggctccggcgcggggttcgagccccgcgggagggaccccgcgctggtgaacaagtccaccgacttcctccgggaggaccacatggtgccgcccgtgtggtaccaggcggagaacaagggcatggtgaggacggaggacggccggtgggtgctgccgccgcggcagagggtgctcgacgaccacccggaggacactgaccatcacctccagcggctcggtctcaccgcgtgaagctcagcaatactctgatagtagcgttaattagtgcgtgtggcgttcgcgtacgtgcgcggggcagtcggttactctgttgccgcgcgcggcagctcagtggcgcgttcatgccgtgcatgatgcgggtgacgtgcgggatgggcacgtcgctgcctgagaagctcgcaccgttggcgttcgtgtggctgcagaaaggtcgtcttggattgtaattctctctacttatttttgtaaattgacccagaaaagctgctgcttgcagcgcc

SEQ ID NO: 15566 - DNA, 1418 bp, Zea mays
  Clone ID: LIB3060-026-B8_FLI
caaagctggcaattgttcttgtgtgtggcggttggtctctgggctggcctagtcattggttttgttactgagtactacacaagcaatgcctacagccctgtacaagatgttgctgattcctgcagaactggagcagctactaatgtcatttttgggcttgctttgggttacaaatcagtcattatcccaatttttgctattgcgtttagtatcttcctcagcttcagccttgctgccatgtatggtgttgctgtggctgctcttggaatgctgagcaccattgccacaggtcttgctattgatgcatatggccctatcagtgataatgctggaggaatagctgaaatggctgggatgagccataggattcgtgagagaactgatgctctagatgctgcaggaaataccacggctgcaattgggaagggttttgccattggctctgcagccttggtttcccttgcactatttggtgcgtttgtaagccgggctgctatctccactgttgatgttctgactcctaaagtattcatcgggcttattgtcggtgctatgctcccgtactggttctcggcaatgaccatgaagagtgtgggcagtgctgcgctcaagatggtggaggaagttcgtcggcagttcaacaacatccctgggctcatggaaggcaccacaaagcctgactacgcaacttgtgtcaagatctcaacggatgcatccatcaaggagatgatccccccaggtgctcttgttatgctcacaccactgatcgttgggattctatttggggttgagaccctctctggagtccttgctggtgcccttgtctctggtgttcagattgccatttctgcatccaacactggtggtgcctgggacaacgccaagaagtacattgaggctggagtttcagagcatgccaggacccttggcccaaaaggttctgaccctcacaaggcggctgtcattggtgacaccattggagatcctctcaaggacacgtctggcccttccctcaacatcctcatcaagcttatggcggttgaatcccttgtcttcgcccccttcttcgccgcccatggtggcattctcttcaaatggctctaagccagcgagagacgcaggataaaggccgtagttttgcaaggcgagtagagcagtatgtcagtaatacagcatctatggcatgtgcttttgctcgtccagttcatgagccccgttgtgtatttggtttccgttttcttggttggagtttttagttccaaggtccgatcatgttttgatcccataaattctcttccagccttcgagcaactgagtccatcttcctaagtcatcagccccagcgagacattgaagcatggggaaacttaaacagtatggtgatgattaatctcagcattttttttcttgcagcaatc

SEQ ID NO: 15567 - DNA, 609 bp, Zea mays
  Clone ID: LIB3060-026-C1_FLI
caccctccagcgcctccaccttcctcgccgcctcactccctctgaggtcgcagatccgtccggttagacgaagccgcccgcacccatggcctccggtgagctcgcctgcacctacgccgccctcatcctcagcgacgacggcatcgccatcaccgccgagaagatcgccaccatcgtgaaggcggccaacatcaaggtcgagtcctactggccggcgctcttcgctaagctcctggagaagcgcagcgttgaggatctaatcctctccgtgggatctggtggtggcgctgctccagttgctgcttccgccccagctgggggtgctgcagctgctgctgcccctgctgcagaggagaagaaggaagagcccaaggaggagtctgatgacgacatgggcttcagcctgttcgactgagaccctcgctacccagccattagcaaattcgcttatgctgtccaagacttatcttacgttatgtctgtaggcttttgttattacaagtactcaagttttgagtttttgagatgtggctatgacaatgtgatgaagaaccctaaaccatcgtattagagtgaaacttgtttctatatagagttccaagtttcttg

SEQ ID NO: 15568 - DNA, 711 bp, Zea mays
  Clone ID: LIB3060-026-D10_FLI
ctcgcactcatcagttgcaagaggttctggtggtcccattctgcctgtgactagcagtgaacaaggcacatggcaaatgtggagcacgccattggttcaggaaagtttaggtttgcaaggtcctcagagtcagtggtttcaacaaaacacaaatcaatttaaccatagtgctaaccttttcagtagtgaaggcagggcaagaagtcccctgggtactggtttgaatgacagtgatccatggcttcagaaagcacctttccaacaattgccacctgatacatcaagcctgttcctttcacatgaaatgccaggaaaattgcacaatgacttggctttcgggtctccaaacaaatcagcccgcgaacacccctttgggccaccttgttatttgttgcctaaggaggaactggggctggatggagctcaggaaggcggcggcgggcatgttctgtcgccgtccggtgcacatgctggcttgttttctccaacaagtcctgatgtacagccactatggccattcagtgaaaaaagagagcatagaacgaacagacttttgtaatagaaggaagggaaaatgtggagccaaggcttccttgcctcctctcatgtagggtttacggtcggatataagctggactgtgttcctcttttttgcactgcattgggccttgtttcacctgatgatgttttatgcgcattgtttccgtcgct

SEQ ID NO: 15569 - DNA, 1167 bp, Zea mays
  Clone ID: LIB3060-026-F2_FLI
cagggcgaggtcatcgagttctgcttcggggaggagcacctgtgcttccagactctgcagcgcttcacggccgccacgctggagcacggcatgcacccgccggtctctcccaagcccgagtggcgcaagctcatggacgagatggcggtcgtggccacggaggagtaccgctcggtcgtcgtcaaggagccgcgcttcgtcgagtacttcagatcggctacaccggagaccgagtacgggaggatgaacatcggcagccggccagccaagaggaggcccggcggcggcatcacgaccctgcgcgccatcccctggatcttctcgtggactcagaccaggttccaccttcccgtgtggctgggagtcggcgccgccttcaagttcgccatcgacaaggacgtcaggaacttccaggtcctcaaagagatgtacaacgagtggccattcttcagggtcaccctggacctgctggagatggttttcgccaagggagaccccggcattgccggcttgtatgacgagctgcttgtggcggaagaactcaagccctttgggaagcagctcagggacaaatacgtggagacacagcagcttctcctccagatcgctgggcacaaggatattcttgaaggcgatccattcctgaagcaggggctggtgctgcgcaacccctacatcaccaccctgaacgtgttccaggcctacacgctgaagcggataagggaccccaacttcaaggtgacgccccagccgccgctgtccaaggagttcgccgacgagaacaagcccgccggactggtcaagctgaacccggcgagcgagtacccgcccggcctggaagacacgctcatcctcaccatgaagggcatcgccgccggcatgcagaacactggctaggcggcttctcttcactcacctgcagagtgcaccgcaataatcagcttccggatggtggcgttttgtcagttttggatggaaatgccgaactggcagcgtctgttttccctatgcatatgtaatttcctgcctctttatattcactcttgttgtcaagtccaagtggaaaatcttggcatattatacatattgtaataataagcatcgtacaatctgcatgctgttttgtaataattaattaatatcccagcccattggatggacttgttt

SEQ ID NO: 15570 - DNA, 687 bp, Zea mays
  Clone ID: LIB3060-026-H7_FLI
ctagccgccggtctcttgctctgatagcttgctccaggacgtacgtacgtacgtagatcgatccatcgatcgctagctagctgacgaccatggcgtccctctcctctgccgccatcaccgccccttccttcacggccgcgcccgctcgcgcagtggtcagcaggaggtccttcaccgtgcgtgcctctctccgcaaggccactgccaccgccgccgtggccgttgccgccagcgtcctgcttgccggcggcggcgccatggcccaggaggtgctgctgggcgcaggcgacggcgggctcgtcttcgagcccagccagttcaccgtcaaggccggcgacaccatcaccttcaagaacaacgccggcttcccgcacaacgtcgtgttcgacgaagacgaggtgccgagcggcgtcgacgcctccaagatctcgcaggaggagtacctcaacgcgccaggcgagacctactccgtcaccctcaccgtgccgggcacctacggcttctactgcgagccgcaccaaggagcaggaatggtcggcaagatcacagtcaactaaagctagctatccattccatgcatctcgatctgtatgtactccgcccgtcgatggatgatgcatccatctctacttgttttcctcacatgtacaacaattaatgcaacaaattaagtacgtactttggggg

SEQ ID NO: 15571 - DNA, 1243 bp, Zea mays
  Clone ID: LIB3060-027-B9_FLI
gaactatgtaggtgattggaaatttgatctcgcttgctctgctgagaaatggaaaggatggtggaagtatcacagggaaaaatcttctgtttgctgtgtttcttggttgtatgattgtgggcattgtattaatgtgtttactttcgaaaagagatgagaaaaaagataatacttcaacgcattcctcatttggagctatgttgaagtacatcattgcgccacttaaggacaaaagaatgcttctcaccattcctcttatagcatattcaggtttacaacaggcatttgtatgggcggtattcacaaagagtattgtaacacccgttcttggcatcagcggcgtcggtggagccatggcaatttatggtgcagcagatgtagtttgttctttggttgctggacgattgacctccggacttcgctcagcagcatttatagtgtcggttggagctattcttcaggccatagtcctgttctggctgcttcttttttacagtccaatggatggactgcttggcgcagcgataccattagtcataggtgccttgtggggtgttggtgacggtgtcttgaatacacagttaagtgcattacttgggctgctgttcgaagatgtcaaggaggctgcctttgcacagctgaaggtgtggcagtcgggcgccatcgcagtcatcttcttcctgagcccaagcatcacgctgcaagccatgcttctcctgatggccgcggctctcgtcatctcctttggctcattcctgttccttacccttgtcgttgagaagtcatcgcccgtcagagcctgaagtgcgaaaccgtttcccgatgtccagaccggcgccagcgtgacttggtcagtgttaccagtggcctgggcagcgccatcgttgtatcccaatttcaccggaaacgcagcatccgtcgagtgcgatttgtggcacagtggtaccatttcaggcagccagtacctgaaccgaagctgtagcagttcgtgcaatggggaaaccgtcaatttgggcacgcttcttgctttgccagtagtggtcctttctccttttgcaatgtctgcactgcagcaatgttgttggaaaaaaaagatgttgtaagaaatgttgtttcatttgtaccacgtcctatcagagtggtctttttttttttgaaagatctatcgctctgcttttaagaaagcacagaaggtacacaaacagcatttaggttcatacaagacaaggaaaaaccaacagtc

SEQ ID NO: 15572 - DNA, 1050 bp, Zea mays
  Clone ID: LIB3060-027-C1_FLI
gtgagaggctccaactcgcaactccgcagctgagcacgccgaaaagctcatcagtgctcatcccctgctggcccgttctcagtcccagtgagaggctccatgaagatcctggtcgcggtgaagcgggtggtggactacgctgtcaaagtgcgcgtgaggccggacgggaggggcgtggagacggccaacgtgaagatgtccatgaatccattctgcgagatcgccgttgaggaggcgctgcggctccgggaggccggcgtcgccgctgaggtcgtcgccgccaccgtaggccctgcccagtccgccgacacgctccgcaccgcactcgccatgggcgccgatcgcgccgtccacgtgctccacgacccggaccctgcgcggcccctcctccctctcgccgttgccaagatccttcgcgccgtcgcgctccaggagaagcccggcctcgtcatcctcggcaagcaggcaattgatgatgattgcaaccaaactggacaaatgttagctggattgctcaagtggccacaaggaacctttgcctccaaggttacattggacacagaaaaacaaaaagctactgttgagcgagaagttgatggtggaattgaaaccatctgccttgatctgccagcagtgatcaccacggatttaagacttaaccagccaagatatgcaactttgcccaacataatgaaggcaaaatccaaagttattaagaaagtcgccgctgaagaccttggcgtagatattagatcagacatggaggtgattgaggtcaatgaaccaccaaaacgaaaagcaggggtgattctttcatgtgtcgacgagctccttgacaagttgaaaaatgaagcacgtgtcctttaaccatttgtatattattcctcgctgaatatggtctgacgttcatttatttaagttctctctccaaatgttcagacttcagaccatttacaaataaaataagtgttaacatgaaccaattaagatactacccctgaaacatttacctgctgaattccttccaaatagctgtttacttgattgtgt

SEQ ID NO: 15573 - DNA, 646 bp, Zea mays
  Clone ID: LIB3060-027-C5_FLI
ggagcctgaaagatcgagaagccaaacccacaggcagagaatagcacggtttcgtccatccgatccgcgacgatccacagccatggcgatggcttacaagatggcgacggaggggatggacgtgaaggaggagtgccagcgctggttcatggagatgaagtggaagaaggtgcaccgcttcgtggtgtacaggatcgacgactgccgctacgccgtcttcgacttcgacttcgtcagcgtcgacaactgccagaagagcaagatcttcttcatcgcctggtcaccggcggcgtcgaggatacgggccaagatcctgtacgcgacgtcgaagcagggcctgcggcggctgctggacggggtgcactacgaggtgcaggccaccgacccctccgagatgggcttcgacgtcatcagaggccgcgcgcaatgagagcgtgattggcgttggtgtgatgagctgagcctcccgatgatgccggtctgacgaggcttcgcgtgtgtttgctttccccccggttcttccgagagatggtgcagtgcaggggcgtggtgtgctgatgctgatgggtggagttactggagtagaagctgagggagtggcagcggattaatgaaacgtccatctccgcgacgtagaattccactg

SEQ ID NO: 15574 - DNA, 562 bp, Zea mays
  Clone ID: LIB3060-027-C8_FLI
gacgccgaacgagcacagcgcgccgatcccgttcaccttcagcttccccacgctgaacaccacgcactgcggcgcacgcgccgccttgtcgtccttctccttcatgacatcttccgcctcgtcctcctgctccacctgagcagcaaacttgccgccgtcgtcggcggtggccttggcgtcagcagggctctggaacggctccttcgcttcctcggcgccctcggatgaggctatcgtcggatcgccgccggcagcgctaggcgcgacggaggaggacttcttggcctcgtcgtccggcacgacgccgatgtccttgcactcgtcgtcgtgcgcgtcaacgacgtcgtcccctcctggcggaggcagcaggtcgtgctcctctgcttcttcttgatcgtcaaggttattcttgctgccgcggtggctcacggaggaggagcttgtgtggtctggcagcaggagtcacacacctcctcctcctcctagtcctagtcctgtcgcaagcaagcagctagccggccggtgcaacaacgaacgctgcgggatctcgtatctacagcac

SEQ ID NO: 15575 - DNA, 836 bp, Zea mays
  Clone ID: LIB3060-027-F4_FLI
cgcctccttcgctccaggaaggggaaggagcgcgagcggaacgaggagcaggaatctggcgctctccgcttcctcctccaacggtgcagcagtgccatccctgacaacagattcggagaagaagggcccagtgataatggaaattccactggaccaaatccggaggccactgatgcgaacgcgggccaatgatccagtcaaggtgcaagaactcatggacagtatccgtgtcatcggcctccaagtacctattgatgtgttggaggtcgatggggtctattatggcttctctggatgccaccgctacgaggctcaccagcgccttggtctcccaaccatccgctgcaaagttcgccgtgggacaaaggaaacactgaggcaccatatgcgatgagttatattttattcagttacaaagtgatctgtgtatctagagctaaaacagaagcttccatggtcttttcgtcgtctcgtctgcaattctccatacctgtaaatgttgtccaaacagagtggtgaatagtacttctgtacccagcagcatcagaaaatgttaattttgcctacaacactcttttcgatcagtggatggatgagtaccacccgctcagtagatcattccatttctacgagatttttgtaaaaaaagaaaaatgcagcagcagtcggcacgctgtgtcatttagatcatctagaaaaccagaaaaaacgagtcatgtaacttgtttggctcgtgcaaaaaaatattcaaaaccaagtttgcttatactggatgctgatgtgtcatgctatgttggggcacactaatgaaagtttggagatttaatttatatgtc

SEQ ID NO: 15576 - DNA, 1304 bp, Zea mays
  Clone ID: LIB3060-027-G7_FLI
cttccacgtccttccgggtcctatcgctcctctccgtcgccggtggagctcatggcatcctccatggccgccgccgccaccgccctcccgctgccgtccgggacgacgcagaggccgtctgcccagggccgcctcctcttcaccgccgcacccgcccgctcccgctgccgctccctccgcctccgccccgccggccgccggtcggcccgctcctcgcctcgggccaccaaggctgtggtggcagcgttggctgatcctctcaaggtcatgatatcaggagctccggcgtccggcaagggcacacagtgcgagctcatcaagaccaaatatcaactggcgcacatctccgctggagatttgttgcgggcggaaatcgctgctggctctgagaatgggaagcgggccaaggaattcatggagaagggccagctcgtgcctgatgagattgtcgttaatatggtgaaggaacgccttcggcaaccagacgctcaagaaaatggttggcttttggacgggtacccaagaagctattcacaggccatggccttggaaactcttgaaatccggcctgatactttcattctgttagatgttccagatgaactccttgttgaaagggtggttggaaggcggcttgatcctgtaacagggaaaatatatcatttgaagtattctccgccagagaatgaagaaatcgcttcaaggcttacacaaagatttgacgatacagaagaaaaggttaagttgaggctggagacttattaccaaaatatcgagtccttgctatcaacatatgagaacattattgtcaaagtgcaaggagatgccacagtggatgctgtctttgctaagatcgacgagctgctgggttctatcctggagaagaaaaatgaaatggtttccagcacatgagcaaggtaaaaatgattgggtgcagtgcagatccgacaagttcatgtaatgcaagtcacctctcatgataggaacttctccaggggaatatatctgaagcacaggacgacacgtacaagtaatgtaagccagtctcacgtaatggaaatttctccatgtggatgtggtcaaagcataggaatttttttcctccaattattaactgtacgcgaatggaagcgacagatcattcgtaggttgtgagggcttcagagatcatctgctgctgtacatgttttgttgctgtcttgtgaacatacatgtcttgttgtttctcaactggaggaatgctgttaacctgctgtatcatttccttgaatggcttatgtgagagggaggaggacctgagcagc

SEQ ID NO: 15577 - DNA, 1031 bp, Zea mays
  Clone ID: LIB3060-028-H1_FLI
ccaccacggcaccaccacactgtgcagcagcctcctttcgtctcgtagttggctggggttgccaacgcgacacctcgtcggaatccggtcgcgcgacctccccttctcgccggccggagcgggtgcgccatcaccatggacccggaagcggtacggaaaagcctggagcccaccgcaactgtcgaaaaaatcaccggctccacccctgcgcggctccacttctacgaccccttcgtcctcagcggagtcagcatcgaagccgccgagcacggtcgcctcctctgctcctttgtcgtcacccctcgccttgcgagtcccgcggggtacctccgcagcggtgtcacagcgacgctcgccgaccagctgggatcggccgtgtttttctgcagcgggctccccagcagcggggtatccctcgaaatcagcgtctcctttgttgacgcggctgccgtcggggaggaaatagaggtcgagggaaagctgttgcgtgccggcaagtcagtcggtgtcgtctctgtcgatttcaggaagaaaaagacaggaaaactgatggcgcaggcccgtcacaccaagtatcttgtggcatcaagcagattgtgaggctgcccccttctgttaacaagatgtcaacataattgcgcccgaactgtccattactgatgccattattaataggcagcaacgatacaacgcttgtagtatatcctttatgtcaaattttttttgtgctgtatatttatttacatatgaaatccaagtatcagtggtgcctctgtgacagccaatcaagcgtgatcagataaggtcttgttagcgtgatcagataaggtcttgttcggttattctaattttacttggatcgaagtgtattggaatgtattgtgatagatttcgacttgttatgaatttaaaccgattcaatactacccaatccacatggattaatgctgaaacgaacaagccctaagacattgttcggttattctaattccatgtgtattggaatggattgaaatagattttgacttact

SEQ ID NO: 15578 - DNA, 1195 bp, Zea mays
  Clone ID: LIB3060-028-H9_FLI
agaagaggagatgagggccaagaaggaggagctgtactgtgtggcgtgcaataaaaagttcaaatcggacaaacagtggaagaaccacgagcagtcgaagaagcatagggataaggtttctgaactgaggatggcctttagggaggaggagtctttgaaagaggcagaggagggggaaggtgattggaatgaagttgatgtggggtttgattttaagcctacacaggagtcagatgatgagagtgcattttcagatgctgcagaagagttagctgaagaatttgaggaaggtttggaggtgcatgataaagagaacggtgataaggatttcgatagtgcagagcaggaggttgggtcatatgatgaggcaagtgtattggaggcaatgctatcaagctgcaagaacagaaagggtggttatgtggctcctccagaggaggctttgtctggtactgctgaggatgacgatcatcatagaagttctgaagttaataatgcaaaaaggaaaggacgcaggcgacgggcagcaaagaaggagcaagatgaaagtaattatgctggcaatgagcatcatggtaaatgtgaggttcagcctgagggttcggtccatggtaatgatgttgatgatatcatggaagggccatcctcttctaatgtcaacaatggttcagtaagcaaaggagataagcagaatggtgaaaacacgaatcctaaaaagaacaagaaaggcacaaaaaagaaaccaactgtttctactgatcagaagagtatgtcaaaggctgaccagaagagcacatcaaaagggaagaaacaaaaggaggtctcgaaggcacctagtaatgattgcgatacttgtggaggaacttttgagtcgaggaacaagttgttttctcacttggaagaaacaggtcacgcaatgctgaagacgcggcagaagaatcgtcgttgagggaaataagttgaacttccaagcacgtagttggttctgctagttaccacataacagcatggttctcttatgttttggcgcacttttttatctgtagcgaacatattttttttctagattctttatgtgtagtgtggagatgatgtttttgtttataaggccatatggtaccgggggtagggggggtataccgggcgggaaagacactgataattacaatatgtaacattatttcattatttgtgc

SEQ ID NO: 15579 - DNA, 715 bp, Zea mays
  Clone ID: LIB3060-029-C9_FLI
gttgaggaagttgatgagaatccaatctctccgttgcaatgcattatataaccacagcgctaccagattatctgtagtccctatccacgcatcacgctctcaggccctaaggtacctgtgtatacgattggggatagaagtgccaaatgttgcagtcctcgtgggtgaaagcggcgattcagattacgaggaactgctggggggtctccataggaccgttatcctaaagggcgagttcaacatcgccgcaaacaggatccacacggtgaggagataccccctgcaggatgtcgtcgccctcgatagctcaaacatcatcggtgtcgacggctacaccacggatgatctgaggtctgccctgcagcagatgggtatactggcacggtaacaccttccggagcttccgtttccactaccaggtcaacgaagagaaacgagaaaacagacagaatggtgacgaaacaagtgcgaccgtttccatgctcgatgggaatgccgattttgcattgtaggctgtagcggttgtgttcgtgtgtgtgtgcccgcgcgcggtggtggcctattcttgtgctgtgaataactgcccctcctttgtttgtgatatgccaaaattttgaagtgagtacagtacaaccaaacatgttgatgatggaaaaacgaatggagaaaggggaaaaacaaacaaaaatggtttgggacggcagtgttccatggt

SEQ ID NO: 15580 - DNA, 862 bp, Zea mays
  Clone ID: LIB3060-029-D9_FLI
gtcgcgccgaccacgctcgcccagaccatactgcagcacaagcggtggagcgagggcaacttcggcatcttcgtttccaggtactgccccttcgtctttggacgacggggcaaaaccaggttgccgcaccagatgggctactccatctacgggctatgggcgcccaactcgctgcctacgctgtactacgctgtcgtcccttcgctgtgcctgctcaagggcacccctctgttccctgagctcacgagtccgtggatcgcgcctttcgtctacgtcgcggtcgccaagaacgtctacagcgcgtgggaggcgctgtggtgcggagacacgctgagagggtggtggaacgggcagaggatgtggctggtccggagaacgacctcgtacctctacggcttcgtcgacaccgtcagggactcgctggggctgtccaagatgggcttcgtggtgtcgtccaaggtgagcgacgaggacgaggccaagaggtacgagcaggagatgatggagttcgggacggcgtcgccggagtacgtgatcgtcgcggccgtcgcgctgctcaacctcgtgtgcctggcagggatggcggcggcactggatgtgttcttcgtccaggtcgctctctgcggggtgctggtgctcctcaacgtcccggtctatgaagccatgttcgtcaggaaggacagggggaggatgccgttcccgatcacgctagcctccgttggctttgtgacgctggccctcattgtgccattcttttgactttgaggtgctaataatacgtgtacgggcacacgcacgttcgcatgtatgacgattatgggcaacaggcgtgtaataccactaatacctattaaacactccc

SEQ ID NO: 15581 - DNA, 2091 bp, Zea mays
  Clone ID: LIB3060-029-E5_FLI
agagtggcagtgctaggtttgggcaggaggacgtcattaaggaggttgtgggaagccagagaagggcagatggatctggtgagcccggggatagcatggaggtggacgagcagaaggcaaaagaagttgggatagagttgcctcacgcaactgatgtgctgcacaaaaacgggtcagatggactagaaatgaacgatgtttctggattgcgcactgttggaatcctgaatacatcttctgcgaaggaaagtgacgttcatagtttatccaataagatgaaacatcctaatatttccagagagcagcaaacaaggacaagtaacagtaatgctgctcaccatgcaacaaatagtattactgatcaaaccacagctttgccagatgctacaattcgcatcatcaagaaccagcttacgacagcaaagatgtaccttggattgtttgcttctaggggtaatcatggcttcacaagggagctccgtgcacggatgagggatatacaacgagcactaggcgatgcaaggagtgatcggcaattacctcataatgtccacagcaaaactagagcaatggagcagacactggtgaaggtcaggaaaattcatgatggctgctcaagtgctgtgaataggctccatactgtccttcactcaacagagcagcaactcgaatcaaacaaaagacaagctaactatctagcacaagtggctgcaaaatctctacccaagggtctccattgccttacactgcggcttacaaatgagtactatttcactaactcaaagaataaagactttccctacgtggagaagctggaagaccccaaactctatcattatgccttgttttcagacaatgtattggctgctgcagtggttgttaactcaactcttgtccatgctaagaaaccagaaaaacatgtattccacattgtgacagatagtcttaactatgctgcaatgaaaatgtggttcctggctaatccctttggtaaagccgctattcaggttcagaacattgaagagtttacatggttaaactcaagctacagtccagtgctgaagcagttggaaacgcggtttatgattgattactacttcagaactgggcatgctaggcacgatgaaaatcccaagtttcggaaccccaagtacttgtcaattctcaaccatctgaggttctatctccctgagatcttcccaagacttaacaaggtgttatttctggatgatgatactgtagtgcagcgagacctaagtgcgctttggttggtagatctcaaaggcaaggttaatggtgctgtcgagacctgtagacaggacttccataggtttgataagtacctcaacttctcaaaccctcttattgccaagaattttgatccacatgcttgtggttgggcatatggcatgaacatgtttgatttgtccgactggagaaagcaaaacatcactgaggtctaccatacctggcagaagttgaatgaaaacaggctattgtggaagctaggtaccctccctgctggccttgtaaccttttggaaccgcacgttccctctcgatcgttcgtggcatcaattaggacttgggtacaacccaaatgtcaacgttaaggatatcaggcgagcggctgtcatccactacaacggaaacctgaagccctggcttgagattggattgccgaaataccgcaagtactggtcagcacacgtcaattacgatcaagtgtttctacgggagtgcaacataaacccctgaacagcaaatagtggtgcatggtttatatccttttcttttcaatgatttcttagaccaattctttgtgctctaggtaatttaaattgcctagagtgcttattctttgtaactgatgtctttcctgatgtaaaggtgccagcaggttggcggtaggcttggatcatacaaacagttagtagccaaaggcatatcccgttttgtgcttataaatgctaatatggtagataatttttgactgtatgtatgaattgaatgctatgttagatgccctcgcaaacagtacagtttgcgacgacccatttccactactgcatcctgtgatctgttgtctgtt

SEQ ID NO: 15582 - DNA, 1934 bp, Zea mays
  Clone ID: LIB3060-029-F4_FLI
acatggccaaagaaagaggggcccaaattagtatctccttggcaattgaatgatgaaattgagtagcaatacttctttttaaagaaatcttttgatgatggtggctcatgccttggcccttttgaacctccacccgtaataggggtggtaatggatcgcgatccaaatgttccttcacaaattcttaggtccttaaataaattttagttcaaaaatgaatagaaatagagcccgaacctaatccgagccttaaattttatagtgtaaaatttagagtccattgtcacccctccgtacacagctattactaatttgttgctgtattgatcatagcatgttttgacctcaggctatgcatgaataattgttctgaatcttgtgcatgttttgacctccagcagaggtttgtaccactttaatttagcagtttattctacatttgcttatgaacggacttggatagctattgtgtaggaggagattagcatggtgtaagaggcctgattttaatttatcatcaaatcaagtttatgtatcaattttgtttgcgtatctaaatcctaccatgtcatatatctgcagatgcttagtgtgctggaaagtgcaataaagcgagactacttatcatcaaactttgaaacgacaactgagttgcttaattcaagcacacaagattttgctactcagaattcggctggaggttctggatctgccactgcacttccatgggttcctgacactactgctgctgtagccttgagattgttagacttggatgcttccatctcatacacccttcatccaaagttgggttcaaataaggagcaagaatctggagatttcatgaaacttccaccgagatatccttctatgaataagggcaaacaagaaatagaacagttcaggcctattggttttgatcaacaggatggaacgttgctacctaacagcaatggtcgtagaggtcggggaaggggaggtagaggaggcagcaggggaggtagatctcgtggtcgtggtggtagggttcccagaggtattggcagctcttccaggattcagttcagggatgacaatagtatgctctatgggagagccccacgaaagaatgcacgtggtggccgcggccgtggacgtggacgtggacgtggacttcgaactgttagacctcggcaaccatccgagctcagtgccagatcaattccaaaggcaaacctattgggcagttttagcatgttaagtaagacaaatcacactggcactacgcattctcccgagagctcaggtgcagaagagtgggcctttgagaggagggaatatgtgaaggatgatgagaacaatttggtctctcaatccgatgagtctgaggaaaatgtcgaacctatgaatgaggaatatggtgagcatatttcaggctatccaagagacaattccgactccagacccgtacagatgatgggtgatgggagcgacgataatgatgaggatgctgaaggagatgagggtgaggaagatggagaggactatgaagctgaagatcctggtgatgaggatgatgacgttgagatggatggggatgatgatgtcgaggtggatgaggatgatgacattgagatggatgaggatgatgacattgaagatggtgatgacgacgacggtggagatggagcagccaacggagatgaggatggaggtggtacatcatcatattcttcagagtatagtgaatgatgagtgattgaagttgtgcaggcttgtggtaaatgatgtaacagaggctttggtgggctcaccaacgctaatgctgacttgaaaaactatttaggaggttgccagttctaaactgtcttgtgtggcttgttattagatagaagccactcaacattagaagatcggccttgtgtgtatacatacataccaattatcaaaagttg

SEQ ID NO: 15583 - DNA, 2084 bp, Zea mays
  Clone ID: LIB3060-029-H4_FLI
gcggccgccgcccggcccgtgcctccgtacggaaagcggacggggttcgtgccgcgacggccggaggacttcggggatggcggcgcctttccggagatccacgtcgcgcagtacccgctcggcatgggacgccgtgatgataagggcggatccaagatccttgcgctcaccgtcgacgcacacggcagcgtcgccttcgacgccgtcgtcaagcagggggagaacgcaggcaagatcgtctactctaagcatagcgacctcgtgccgaagatagccactgccgattcccaggcgacgtcggacgacgacgaggagcagaagcagatcgaggagacaactgaacggaccaaggccgccttggagaaggttgtcaacgtccgcctctctgcagctcagcccaagaatgtgccgactcatgattctgagtccaagttcatcaagtataagccgtcacagcaatccgcggccttcaattcaggtgcaaaggagaggatcattaggatgtcagagatggcggtggatcctcttgagccaccaaagttcaagcacaagcgtgtgccccgggcgtctgggtcaccaccagtgccagtgatgcactcgccgccacggccagttacagtgaaggatcagcaggattggaagatcccaccttgtatttcaaattggaaaaatccaaagggttacacgattccgcttgataagaggttggcggctgatgggaggggtctgcaggaggtgcagatcaatgataactttgcaaagctttctgaagcattgtacgtggcagagcagaaggcgagggaggcagtgcagatgcgctccaaggttcagagggaacttatgctgaaggagaaggagaggaaggagcaagagctaagggcacttgcacagagggcacgtatggagaggactggtgccccacctgcaccatcaggtgtgcctgctggtggtggcaggggagcaattcaggatgttgatgaagttatggatatggagcaaccgcgtgaaccacgggaatcgcgtgagcagcgcagggaatctagagaagagagggaaggaaggattgagcgtgatagaatccgtgaggagcgcagacgcgagagggagagggagaggaggctggaagccaaggatgctgcaatgggcaagaagagtaagatcacaagggacagggatcgtgatatcagtgagaagattgctcttggtatggcaagcactggtggtgcaaaaggtggtgaggttatgtatgaccagcgtctgttcaaccaggacaagggaatggactctggttttgccacagatgatcagtacaatatctactctaagggtctcttcacagcgcagtccacgatgtccacgctatacaggcctaagaaggatggggattctgatgtatatggtgatgcagatgaacagctggagaaggttatgaagactgagaggttcaagcccgacaagggatttactggtgcttcagagaggactggcaagcgagacaggcctgtggagttcgacaagcaggaagaaaatgatccatttggtctggatcagttcttgactgaggtgaaaaagggtaagaaagctgtggagaagattggaggtggaggaaccatgaaggcgagtggtgggtcctcaatgagggatgattatgacggtggatctgggaggtcccgcatcaactttgaaagggggcgctgaggtatttgctctgcttctgcaggtttggaatgctttctcaaatatcttctagcagaatgtcataagaagctgaactctgataagaaagagcatggctcctgtgctgttatatagctcatgtgcctactttcagtggttgtgcttaaggtgtactatatggatcctatgatgtctatgtactatgcgtgtatctgttcattataggagctatgaacttcgtttatccatgttccatcaattgttacgaacttatgatacatgttattgggctctatgatttcatcagttaccattttgggatatggatggactcaacgtggctatttgttgccatggttgctgcacatgtgctcattctgtttatgaatttcttggtggtgcctatt

SEQ ID NO: 15584 - DNA, 1292 bp, Zea mays
  Clone ID: LIB3060-030-B2_FLI
caaatcgaaccgcgggcagcgcgcacgcgcagcgactgccggcgatggcgagcctcaccctgccgccggcgccccccaacccacgccaggacgccatcgacctccacaaggccttcaaagggtttggatgtgacagtacaacagtgataaacatacttactcatcgcgattcggtgcagcgtggactcattcaacaggaatacagggctatgtatcatgaggaactctcccaccgtatttcatctgaactcagtggaaaccacaagaaagctatgtcgctgtggattcttgatcctgctggacgtgatgcaactgttttgagagaagctctaaatggtgacactatggatctgagagcagccactgagattatatgttccaggacaccatcacagttgcaaataatgaaacagacttattatgctagattcggtacttatcttgagcatgacattgctcaccacacatccggtgatcaccagaagcttttacttgcatatatggggattccacgctatgaaggtcccgaggttgatcctacaattgtgacacatgatgcaaaggatttgtacaaagctggtgagaaaaggctgggtacggacgagaagatttttatccgtgttttcactgaacgcagttgggcacacttggcatctgtttcttctgcttaccatcatatgtatgaccggaaattagagaaggttatcaagagcgaaacttctggaaactttgaatttgcacttttgactatcctcagatgcgcggaaaacccagcaaagtattttgctaagctcttacgaaaggccatgaaaggtttaggcactgatgacatgacacttataagggtggtggtgacgaggaccgagattgacatgcaatatatcaaggcagagtacttgaagaagtataagaagccattagctgaggctatcaactccgagacatcaggaaactatcggacgttccttctttcacttgttggtcatggccattaggctatgtttcgaccatggggcatgatatttctatcgatccaccctaaatgcagcgacctacctggaaaacttatgatgttgccatttatctgtcgtgactcctggatctaactgccacatatcacatatgcggtccctagtatgcttgtttaaagtattcgtgtatatatttccatctgggtttcttgttggaagattctggatggggcaccagatcagctgttgctggtcagtggtcacagtgggcttgacttgtgtctctatgacgccaatattattatgtcatgttcttgtggt

SEQ ID NO: 15585 - DNA, 808 bp, Zea mays
  Clone ID: LIB3060-030-D12_FLI
cgcactccgcggggctcggcgggcacgacggcgggccgcgctgccacgcggtggagatcgacgccaagatcctggggctggaggccatgatccgcgtgcagtgccacaagcgcaaccacccgtcggcgcggctgatgacagcgctccgcgagctcgacctggacgtgtaccacgccagcgtgtccgtcgtcaaggacctcatgatccagcaggtcgccgtcaagatggccagccgcgtgtacacgcaggaccagctcagcgccgcgctctacagccgcctcgcggagcccgggtctgccatgggcaggtaatcaaggaggagagctgctcagctcgcctgtggctgccggaataggggacgacactgatactactgctactcaccaccggactgtcctgtcgtcgtggtcaccacggttacaacacgataggcagaaagattcaggagggagacgacgacgatgccgatgctgtataaactttagaaggatggatggatggatggatgatgataccgagcttctgctcctgttcatcatcatcttctcgtgtttttgctagtagcgtgttaattagcaggattaagcaaccaacaagcgtccaaccgttgttgttaattaagtacatgttgttgtgagctgtgatgatgatggatccaccgatgttagggttcgattggatcgaaaactgtgtatagtatatggatcggccgtcgtcctatccggtggaggtggacgatgccctgatcctgatgtatgtatttttacagcaggatttcgctttgcaatggagtcagcctttttgatcc

SEQ ID NO: 15586 - DNA, 758 bp, Zea mays
  Clone ID: LIB3060-030-F4_FLI
gcacaatggacgccgccgtctccctctccctgcccctgcaccacgcccacgcccacggcccgctcccgctcccgcacccggcgccccaccacctacactgcgcggtcccgctcaggcaccacgccacctccgcgtccgccgtaaccgcgccgccgcccaagcctgacgttcaggctcctccatcggcgcgcctgagccccgccctcgccgcgccagcgccaccccgctcgtccccggccgccgcgcgctcctccagccgcgccgccacgggatacgcggcagcgctggccgacgcgtgcgtccgcgcgggcacgctgcgccgcgccgcgcgccacgcgcgcgcgctcctccgcctccggctagagcggcccctggaagagggcgccgccgcggtcgaggctgccgtgacggtcgcggggcagcagctggacgcgcgggtggccgcgctcgtcaggatgctcgtcgccaagggcagggccgggatgctcgccgaggccctggccgagttcgccgccatctgcgaccacctgctgccgacgcgcccgcgcgcgcgccacgcctactagctaatacccaacaaacagcacgaaacacttcatccaccagcgtttgtactcgtgcatggccttcgttcgccatggatgcatgctctgtactcttctacaagcaaattctgctacatggcgcctagccaacgttgtgtacttgtgttgccattggttatcagtacaacgctacggagcccataaatcttcact

SEQ ID NO: 15587 - DNA, 822 bp, Zea mays
  Clone ID: LIB3060-032-B4_FLI
ctcagagctagaccaaaagggaaggaattagtgcgatatgaatcccctattgaacactgcccgagtgtagatgatgttaaacgagtgcttaatggaactgcaaacagcttcagtataattgatgcttacccaaggtactttcgagttactggatcaggtgaagtccggcgattagaagcagcgatagattcagtaagtggcgaattgctattaaataatggcactccttggtggtcattctatgatacaaacccatcagatttggcaggctgtcaagggctgaatggtcccatggctatagttgtttctgaggagacacctcagggcattattggcgaaacactcagtaaatttagcatatggagtttatatattacttttgttctagctgttgcgagatttattaggcttcagtgctcagacttgagaatgagaataccatatgagaaccttccgtcatgtgacaggctacttgacatctgtgaaggaatatatgcagcaagagctgaaggagagttagaagtggaagaagttctgtattggacattggtaaacatctatagatcaccacatatgctgcttgaatacacaaagcctgactagggcacccgttctgctaaggaagccattctgcaaaaaaattccatgtaatgtagtaatgtacaagtagaacacttccttcctttgaggtcacaacgaagctaacttaatcctctcccccccttgtgtcaggacaaaaaacgtgcaaataggctttgtagttgtagttcgtttttgctaacatgtatacggttgaccattatttttggagaagtatacatc

SEQ ID NO: 15588 - DNA, 1965 bp, Zea mays
  Clone ID: LIB3060-032-D8_FLI
tgcaatcaatcactcttcccgtacttatctcgaaggcataaagtttggtgattttcgctacaccgagaacaatttcagccagaaacttaatggattggattcatctgatgcacatgcattaaccagcagtgatatgaatgctcctagatggaccagcacttgtaaaatcgctccctacgcaaaccacagctatcaaactggaaaacaaaatcggctacatgtgttgccttcagatgatctgcaatttgctcatagagatcacgctgcaggaacagagaagccaaattttgagaaagttggcagtggtgcaataccatcagcggatttgtgcatcaaggatgattttgataaaaggtttcaagaagatcttgatgaagcagtgcgccaaagccttggatacgatgcttatcctgctggtacaataagcacttcaaatgaaacagaagtgtatggcactggccttaaaaatgccgctggtgaatacaattgtttcttgaatgtgattattcagtcattatggcatataaggcggtttcgggacgagttccttaaaacatcatcactgcacaagcatgttgaagatccttgtgctgtctgcgctttatatggtatcttcattgacctgagcaaagcagccaagggacacggagaagctgttgcgcctacttcattgaggatcgctttgagcaaatcctacccgaacagcaaattctttcaggagggccagatgaatgatgcatctgaggtactgggtgtaatctttgagtgtttgcataagtcatacacttcgcgtactgtctgccatgatggagtctcggcggctcaaatatacttcatttttccacaatattaatgctagttcactccgaaccgcgaagatgatgtgtccagattcttcatttgatgaacttttgaaggttgtcataatgaatgatcaactagcttgtgatcaagacgttggcggctgtggaaaaccgaatcacatacaccacatcctttctactcccccacatgtctttacagttgttttgggatggcagaacaacaaagagaatgtggatgacatatctgcaactttggctggtatttcaactgagatagacattagcatattctaccgtggcctagatcaaggaagcaaacacaccctggtgtcagtggtttgttactatggccagcattatcattgttttgccttcaaggatggacgatgggtcatgtatgatgaccagacagtcaaggttgtaggtagttggggtgatgtgctcgtgatgtgtgaaaagggtcacttgcaaccccaagtgcttttctttgagtctgcaaattaatcattcttcagagtcgtaaagtgttgtgcagtggttaacatgccctcaaatatagggtttttacctgtggccgtgaagattagaaatagagtagcaaattcgttttgagcgggggtatagagtagcaaattcaacagctgcgttggtctctgagctttggtcgagcccctcgtaataagtagtcacctgaggattaaaggagagctgtttacccctctgtttttttaacctttggtatacttgctgaacttcggatccttcatctgccaatgagatttcactgccgatcaagttggtggggacgcattcgacatgaactgccatccaacaattctagccggatctgcctaaagctcttcattatgcaccagttatgtatagaattttgtgcttacaatgaggtgacaggtataggagtgtgactgttttgaggccagaaggtttagagaatggaaggaaatggaattgttggtgcggtgtgtatctgtggagtactgtttgaaaagaggaacgatatctggaatacggtagactttgagaaatctgtagtacacgagtctatgtaaacagggactcgatgagattatgtgagatgagtatagcgatgaataccagactccttatcactactgttttt

SEQ ID NO: 15589 - DNA, 1687 bp, Zea mays
  Clone ID: LIB3060-032-F7_FLI
ccagagcaaagccgcagagatgatttggaatcgatcggatacgttcttctgtatttccttaggggaagtcttccttggcagggcttgaaagcagccacaaagaaacagaagtatgacaaaataagtgagaagaagctttcgactcctattgaggctctatgtaaatcccatcctgtggaatttgcttcctatttccactactgccattctctgacatttgatcagcgtcccgattatagtttcttgaggcatgtctttcgagaattgtttgagcgcgaaggctatcaatttgattatgtgtatgactggactttgttgaagtgtaagcaatcccagaaggctaaggttcagcaaggatgctctcatgatgcaggcgtaagcagccgtccagttgcaacaaacgtggacaagcaccaagttggtgttgcacgcccaattaatgcttcaggtctgcttgaagcagaacaacgcccggcaatcagaatgcaattaaacagccgttccaataatctgcatcctgagagattgggagtgtctgctagtcataataatgtactgctgcaatccacgtcacttgacaatgctgatgctccaatggaccacgcgacacattcaaaagcacaggggtccattgatccacacactcgtggaagttatagtccagggccctctaaccgcacttaaccttttgcattgttcgtaaaagcttgcgggtccatgcagtaaacaattggatcctttacaaacctaataatggtgacacattctatgcataatgaaaatttggggtttcacctggatagctttcattttaattacgggctgcagcagtgcgacaatgtgcattctacttggattgagttacaactttttaacttgtataagcttccattgtgttgaacacaaaattacaccatgcaaaacatcgcgaagaggtatctgggaagtttatgattggttagcatgcacattcaatgacatatgcatgcatcagttaggacaacgcctcttcgctaaaagtgaatatccgaccagtattgacctgcagtttccagtgtcttgacaccaaatcgccatacaaaaactacagagtggtggtatacgggaagttcatggttggttagcatacaccctctttgctgaaaggctgtcatattctacttggattggccgcagcttgcaatgtatgacaccaaatagcaccatacaaagactatgaagaggtctgggaagcttatgattgggtagcatccatgtatctataactgtgaccgcaactttgaagaaacacatgctgtggctcatggcctcgagataaaaaaaggttaaattgcaatcgacaacaatctggttgggcagaggtaaatatcatgccgtgctcctgtcatagacatggttgcctgtattttatttgaatgagggttgaatagcttataacattgtgaggaagtcctaccacatattgatttttcatgttggtgttttttttgttggcattttctctccagttgtcataaaaacaatgaactgtacataatttcttagaagggctgttcttaagtgttgaggtggaatgagatgatttacttgataaaagtgtacatatttaggtatccctcatttttctgattgcatcaatatctttcaatgatataacgctggttccgaagtgaatgtttttttagtt

SEQ ID NO: 15590 - DNA, 3017 bp, Zea mays
  Clone ID: LIB3060-032-H1_FLI
gttctgcatgtcttcaaagggttgtgaccccatatagccggatgtcagtcaattcatccatggcgatcaatccattcctcgagcaggccaaggttcttctctgggttttgaggaaggacccatctgcgatgctcatctaattaaggttacctggtcatcttgctactcggtcgcctacaggatcggatagcttactctatctataatcacaccgagcaaactgtccatcctagctacaatgggtagcacgcacaaggaagaagtaggtgtcctggaggaaatacttgacgggagaaaagagccgaggaagctatctttatcagttctaaaacacatcacaaatgacttctcgcacgagcgaataatcggttatggtgggtgcggagaggtttacaagatgaacagggcatcctgcaaaacggaagcgtcgctgtgaagaaaatcttcagcaacctaaatgttgaagataaggaatttgatcgagagattcagagcatgatgcaggtgaagcatccaaacgtagtgcggtttattggctactgttctaacacagagcatgaactgatgagaaaagaaggcaagtatattaaggtcgaggtgcgagaaaggctgctctgtttcgagcatatcagcaacggaagcctccgcagccacattacaggtatgtttattgcctgtctccatttgatgatacatacgtataccattagcacactcgagtgaaagaagagttcatattttttattccactattagatggactaagagggcttgaatggcacgcacggtataaaataattaagggaatttgtgagggcctacatcatcttcacatggaaaaaaacatcattcacatggatcttaaacctgccaacatactagtacatgatcaaatggtaccaaagattgcagactttggtctatcaaggctggctgaagtatcacgtactatgagcaatgaacggcttttatccctgtaagttaaacatatatataataatatacagagagggagatatagacagttcattgcttatactgaaatttgattcttcgttatgccataatgttgcccttgtcgtcgtcgtcatcatcgtattgtcatgcagaggatactgcgctccagaataccaataccatggcaaaatgtcccttaagtctgacatctatagtttaggtgtcataatgctggagctggtgaccgggagcaaggaggagccggacattactaatgtaagtctcactattcagaactacacttaaatctgaaatagttgcgttcacagcattgttaaatggcatcatgaaaaggtacttcgacggtggagccataggtggaaaaaatcaggacagcgtacaccatcatttcaacgccatcaagtgagtaaatgcataggtttggctaagagatgcaaagaagtagaaccaacaagaaggccttctatatgtgatatacttgctgccctaggcaaaatggaagatatgaattgcagtgatcaacaagtggacgaggaagtcacttatctggaggacatgctaggaatcgagcctcttgatctgcatttcctagtcgaacctaccaagcagatatcctgctcagtccatctgaccaacgctacgaatgactgtttcgccttcattgttcagacgacgaacccgaagcagtactgcatacagccggacagaggcgtcgttccaccacgatctgagtgtagtgttgccatcgtattatcgcaagaaccgacgcataataagcgatgcagcatggaggacgagctaagcgtgcagagcaccagagtggatgagggtgtgacagctgcggatgtgagtgaagcgttgttcactggaaaggaagatagaacggtcgatcacgtgagcctgatggtcggtttcgacatgtcgccatcgccacctgaggaacaaacggaggacttcacgtttgcaccactggcgtcgttgtacgacgaggagccacagttaagcgcggcgaaggtatcagtatggacatccaatcaggtgcgtgtgtgtgctttctcgctctggattccttcgcctgattggatcatgcatgactcgctctcagagtgcgcgtttacagttggggcgttctggtcgcttctctaagaagaagctagtgtctattctgaaatcctggcgagcaagattaaaggtatcatcccataagaaactcgagactccaaagcatgactgtgagattcctgaagctgtagagcatgaagaagttgccgcgcccaggtgtcccaaaggaccactgccacagcgcgatctttctccactgggcgaagcatgttctaggatgaacatgacggcgatccatgagatcctagtgaacagacattacagagatgatgacctagacccaaacgtgccgtcgctcgaggaatggacacagcagagcagggatatgttggatgataggaaacgtggggacttcacttttcgtgataaagatttccgagcagccatagactggtataccaagtgtatggatgtggggccaaagaaggcgtcaccaacagttctcgttcgacgcagttgctgccacctcatgtgcggcaacctggacgccgccctccgcgatgcaatgcaagcgcagcgtcagtatcccgactgcccaacctcactgtacatgcaagcagtggcactttcaaagctagggatgcatagtcaagccatgggcatgctgattgaggcgtcggagatggaagcgaatcagaaaaagacccgaaaagcagcttaagaagactcaacatgggcgaaacctatataccttcgttttgtttctgtaagctattcttgattgttgtatctgcttgccaaattgtctaggttggagtggaattgggaagctttacctcttggggataatgcatttcttgttgtattcccctctgaggatgaaatgctccgtatggctgatattgagtataagctcaagagtggaatttctattcatatggattaggcctggagatgctaatccggcctattttttt

SEQ ID NO: 15591 - DNA, 1829 bp, Zea mays
  Clone ID: LIB3060-032-H8_FLI
tccgatcggcagctcctggccgctgcccactcctccccgctctggctcttcctcgcgcctcgcgcgcccacccaccttcacgcgctctcccagctagatcgaccccactggcaatcgcgcaggctcccctatcccttcctgttccttcaaaaagactggactggatcttcccagagttcccgttcggagagccgccggatcttcttcgacgaggcttcgatctgctgctctccgtcggcgtgttggggacttgcaccttatccgaagatgtcttttcggagcatggttcgtgatataagggaaagttttgggaatatatcgaggcggaactttgaggtgagaattcaccacagagggaagtctcttgggtcttcaggtgacttgcaagacaggcctgctgaagttcagcaaagcaggtgggctagccttcctcctgagttgctctgcgatgtgatgaaaaggttggaggaagatgacagtagctggccggatcgcaaggatgttgtttcctgtgcatctgtttgtacaacctggagggatatgtgtaaggatattgttagaagtccagaacattgtgcaaagctcacatttccagtatctcttaagcagcctggaccccgagacggggtaatccaatgtttcataaaaagggacaaatcaaagctaacgtaccggctctacttgtcccttagctctggtgtgcttgatgagaacgggaagttcctgctagcagcgaaaaggagccgcaggatggcgcacacggagtatgcaatttttatggactcgaggaatttctcccgatcgagcactggctacattgggaagctaaggtcaaatttccttggaactaaatttatcatctacgacacacaggctccgtacaatggcgggagagtttgcacacaggaacgtgcccccagccgtcggttgtcttccaggaaagtttcaccaagagttccaagcggcagctaccccgtcgctcaggtgaactacgagctgaatgtgctgggaacccgagggcccaggcggatgcagtgcgctatgcattccatccccgcatcagcggtggagcccggcggcgtggtgcctgggcaaccgaaagagctcctcccgaggctgttcgacgagtccttccgcagcaccgcaacttcctctttctccaagtactccgtcgcggacagctccatggacctgggcagctgcccgttctccgaggtcgaggtgggcgggggaagtctgcgagaaggtgacgagtcggagaaggagaggccactggttctgcgcaacaaggcgccgaggtggcacgagcagctgcagtgctggtgcctcaactttcgcgggcgcgtcaccgtggcctcggtcaagaacttccagctgatagctcctgcaaagacgcagccgcagccgcaggcctccggccccccgccgccgccgccgtcgtcgtcgtaccatgacccggtgatcctgcagttcggcaaggtcgggagggacatgttcaccatggactaccggtacccgctgtcggccttccaggccttcgccatatgtctgacgagcttcgacaccaagctggcctgtgaatgaatgaatgaatgaatgaatgaatgaatgaatgaatgaatgaacgaacgaacgaacggtgagagagtcgttcgttttatgtgttccaaagtgataagcattctgagccttggcatgtaaataatttaagaagtaggtgtttgattcaagtattgtattgtttcgtgagacaagacaatgttgcttctgaaacctaaaagtgtttcttggtcagtgaagcaaatctactaaactagctgcctgcaatt

SEQ ID NO: 15592 - DNA, 950 bp, Zea mays
  Clone ID: LIB3060-034-A1_FLI
cagctagcccacatagcccttccagcaacgcgcgatcgaagggttgagagctattggaagcaagtacgtgcatggcgaggtttgcgctcgtggcgtgcgccgctgccacggcggcgctgctgctcggcgtggcggcagcggacgtggcgtcgatcatcacgcaggacgtgtacaaccagatgctgcccaaccgcgacaacacgcagtgccccgccaacggcttctacacctacgacgccttcatccaggccgtcaacttcttcccggggttcggcaccggctccagcaccgacgaactcaacaagcgcgagctcgccgccttcttcggccagacctcccacgagactaccggtggcacgacaggtgccgccgaccagttccagtggggttactgcttcaaggaggagatcaacaaggccacaagtcctccctactatggacgcggaccaattcaattgacagggcaggccaactaccagcaagccggggacgcgataggcgaggacctggtgaacaacccggacctggtgtcctcggacgcggtggtctccttcaagacggccatctggttctggatgacggcgcagtcgcccaagccgtcgtgccacgacgtgatcctcggcaactggacgccgtcgagcgccgacgcggcggcggggcgggttcccggctacggcgccatcaccaacatcatcaacggcgccaaagactgcggcgtggggcaaaacgccgccaacgtcgaccgcatcggctactacaagcgctactgcgacatgctcggcgtcggctacggcgacaacctcgactgctactcccagcagcacttctgatgaactgctgttcgacttgactgctagcactgttgctacagtataagatctgtgtccggacgtgttccatacatattttattattttaatacaataaaggctgatgatccggttatatat

SEQ ID NO: 15593 - DNA, 1509 bp, Zea mays
  Clone ID: LIB3060-034-B5_FLI
agccacagccagaacaccagcagacagcagcatcagcagggaggaacacgatgagcggcgccggtccggatctgcagctgccaccggggttccggttccacccgacggacgaggagctggtgatgcactacctctgccgccgctgcgccggcctgcccatcgccgtccccatcatcgccgagatcgacctctacaagttcgacccatggcagctcccaaggatggcgctgtacggcgagaaggagtggtacttcttctccccgcgggaccgcaagtacccgaacgggtccaggcccaaccgcgccgccggggctgggtactggaaggccaccggcgctgacaagcccgtgggcacgcccaagccgctggccatcaagaaggcgctcgtcttctacgccggcaaggcgcccaagggcgagaagaccaactggatcatgcacgagtaccgcctcgccgacgtcgaccgctcggcgcgcaagaagaacagcctcaggttggatgactgggtcctgtgccgcatctacaacaagaagggcggcgggctggagaaggcggcggcgccggcggccggcggcgaccacaagcctgtgttcgccacggcggcggtgagctccccgccggagcagaagccgttcgtggcggcggcgggcgggctgcccccggcgttcccggagctggcggcgtactacgaccggccgtcggactcgatgccgcggctgcacgcggactactccagctgctcggagcaggtgctgtccccggagcagctggcgtgcgaccgggaggtgcagagccagcccaagatcagcgagtgggagcggaccttcgcctccgaccccgtgaaccccgcgggctccatgctcgaccccgtcgtcggccacgccggcggcgacccgctgctgcaggacatcctcatgtactggggcaagccgttctagacgacaccgcccatcatgtcctgaggggaggtgggggtggcgaagcatcctcggctgcggttggttggttgattgatctgtcttgggcagcgcaatgcaatgcaaccgcacggtgtgggctttgactcaggcgagccgccattgttgacttgcaaggaggatataatatgaaactatagctggattacatggagaggcggcaatgagaccgtctggccccgccggaagggagacggagacggagacggatggcgcagtgcatcgggtgtggtggatcgtgcgcggcatgtgtgtgtgtggctgtacatatacatactgtacatgattggttcagtgcagggtttctgttccttcattgattagttattatactaataagtactagtaattttgtaagggcttgtagttgcagtctccgtactggtggtaggtagtgcaggccatattcgtcatcgccaagcttcgagtgtacttactcctacaatatatattttacagtatatattgtagctgtgttggctcttccggaaaaaaaatggaaggggaaaatagggattatgttattttgatt

SEQ ID NO: 15594 - DNA, 1456 bp, Zea mays
  Clone ID: LIB3060-034-E6_FLI
caaccagcaaagtgagtgtgatcgatcacacactgcacacactgccatggccgtcatgggcaaggaggacgagcaggagcagcagcagcacaaggaggaggaggtggtccaaggagatgtgcgagtcgtcgtccagcaggagacgtcggcggacgaggaggccgagtcggcactggtgcgcaagatctccggcctggccgccgccatcgccaggctgccgtcgctgagcccgtcgccggaggtgaacgcgctcttcaccgacctcgtcacggcctgcatcccgcgcagcaccgtggacgtggagcgcctgggcccggagctgcagcgcatgcgcgcgggcctcatccgcctctgcgccgacgccgaggcgctgctggaggcgcactactccgacctgctggccgccttcgacaacccgctggaccacctgccgctcttcccctacttcaccaactacctcctgctgagccagctcgagcacggcctgctggcgcgccacgtcccgggcccgcccccctcccgcgtcgccttcgtcggctccggcccgctcccgctcagctccctcgtgctcgcctcgcgccacctccccgccgccgccttcgacaactacgacatctgcggggacgccaacgaccgcgcgcgccgcctcgtgcgcgccgacgccgcgctcgccgcgcgcatggcgttccgcacctccgacgtcgcccacgtcacccgggaactggccgcctacgacgtcgtcttcctggcggcgctcgtgggcatggccgccgaggagaaggcgcgcgtcgtcgagcacctcgggaggcacatggcgcccggcgccgcgctggtggtgcggagcgcgcacggcgcgcgcggcttcctgtaccccgtggttgaccccgaggagatccgccgcggcggcttcgacgtgctcgccgtgcaccacccggagggggaggtgatcaactccgtcatcatcgcccgcaagcccctcccggtcgtcgacgagcacgccgtcgccggggtggggcacgcgcacgcgcacggcgccgtgctcagccggccctgcctctgctgcgagatggaggcccgggctcaccagaagatggaggaggtggccatggagcagctgccgtcctaggcacaagatggattgccccggccggcagcccatgcaatcgcattgcatctatctcatcgatctacttacgtgtctacaccacatgcgtgataataatctgcagattgacctggctactagctggtatattgtcaccgtgattatattaagtttttgtttaacaaaagggtagaagtcgaagtccgagccggcaaaagaaaaaatactggagaaaaaaaatagtgcacgaaggagacggaggcagagcgaacaggctggcctaatttcatttgtatgctaatgttacgtgtgtcaatgatgatggagtggttaaattattagtaattctcg

SEQ ID NO: 15595 - DNA, 1647 bp, Zea mays
  Clone ID: LIB3060-034-G1_FLI
ttcttctcgtgctgtcacccctttcttcaatcgcctcccgattcccgcggggctcgcagatcccggaaggacaccccgccgcccccgatgagccgccaccgggtcgagacctgcgactcgtggcggcccccgcggaagaaccacgccggtgcgccgccgctcctccgcgcggggcctcggctcctcgccttcgcctcgctctccgtccgcgacggcggggactccgccgcggccgtcgccaaggcggttgaggaggcggttgtcgtacgatccgatgaggtgaaggaggcggtggccggggaggagaggaagaagacgaagtcggcggagcgcaggctgccccccgcggcgcagctggtgagccatccgctcgcgctgctggcgctagtacccaacagcgccgcgatctttgccgcgggggccgccgcgggcactgtagccaagaccgtcaccgcgcccctcgaccgcgtcaagatcctcatgcagacgcatagcgtgcgggtggcgggagagagtgccaagaagggtgttggatttctcgaggctatggcagacattggaaagaaggatgggcttaagggttactggaaaggaaaccttccacaggtcattcgcattattccttacagtgcagtgcaactcttctcgtatgaagtttacaagaaaattttccggagaaaggatggagagctttctgtatttgggagacttgccgctggtgcttgcgcgggcatgacatctacacttgtaacttacccactggatgttctccggcttaggctagcagttcaatctggacacagcactttatctcaggttgctcttaacatgctgagagaagaagggctggcctccttctatggaggcttgggtccatctcttgtagcaattgcaccttacattgctgtgaacttctgtgtttttgacctgatgaagaaatctgtaccagagaagtacaagaatagaccagaaacatctctagcaaccgctcttctttcagcaacatttgcaactttgatgtgttatccgctggacactgttaggagacagatgcagatgaaaggcacaccatacaatactgtttttgatgctattccaggcattgtggagcgtgacggtctaactggtctttatagaggttttgtgccaaatgcgttaaaaaatctaccaaatagcagcattaaactgaccgtgtttgacacggtgaagacactgatagctactgggcagaaggagatggacaaattaattcaagaaaatgaggagaaaagaagctaggaaaagagccttggtcaatcttgaaggctttggtagaaagcatgcctctttgcagactccatattgctatgtttcctcgtttgctggtgacatattttaggatctaggcagcgcatctttctgttccttttcaaatagatctagtttccagtgctttccgtagcatccacattcatagagatagaggtgggcattgagttgtgatctctttatctagtgtcggtagcattcccctacagatcttacctattttaatagaggatagtgtatcaatgtgaccgccccagattctttaaatgtaattattatacataatagccagaacaatcaaatatcatggagcacaggagcatgttctccttgtcaatg

SEQ ID NO: 15596 - DNA, 1408 bp, Zea mays
  Clone ID: LIB3060-034-G3_FLI
gaaaattctaccattctgattctttttcttttgctacaatacaatacacttttacattgtcattttccaacaataacactataatatttttgaaacaagaaatttggtcatgggacatagttgtttgtcctaatgcagctagctcatttgttttcctttgattcagctacaacatcagtagccacattcgttgttctggtagtcactgcactctatctttcactgaagaaaagatataatgaagcaatacatctcaaagtagaaatgtttctcaaaacatatggcacatcaaaacccacaaggtacactttctccgaagttaagaagatagctaggcggttcaaggaaaaagtaggccaaggtggattcggaactgtttacaaagggcagctaccaaatggtgttccagtggcggtcaaaatgctagagaactctacaggagagggagaagacttcatcaatgaagtagcaaccattggacaaatacatcatgcaaatatcgtccgcctcctaggtttttgctctgaaggaacaagacgtgcgcttatttatgaattcatgcctaatgagtcattggggagatatatattcttgccgcaagagctcctagtaccagaaaaaatgctagatatcgctataggcattgctagaggaatggagtacctacatcaaggatgtaaccagcgcatcctccactttgacatcaagcctcacaacattctgctggactacagcttcaatccaaaaatttcagattttggtcttgctaagctgtgtgccagggaccaaagcattgttaccttgaccgcagcaagaggcacaatggggtacatcgcaccagagatatattctccaaatttcggtggggtatcatacaagtcagatgtttacagtttcggcatgctggtgttagagatggtgagtggaaggaggaattcagacccaggtatcgagaaccaaaatggggtgtatctaccagagtgggtctatgagagagtagtcactgggcaggacctcacacttagtaagaaaatagctgatcaggagaaagaaacagtgaggcagctggccattgttgcactctggtgcattcagtggaaccccaaaaacaggccatcaatgacaaaagtggttaacatgttgacaggaaggttacagaatttaccaataccacctaagccatatgcctagcctgaaagacatcctatgccataaaacatggaggatatacaccatgttttaggaagcatgaaaagcagttatgcttactttcatgtgtgagcttagtaatgcttagcaatagattacacagtatttggatcattccactgtatcagacacatgaactgtgactcttaattttcaatgtgtggtaacttaattagagacgtatcacattgaatttgac

SEQ ID NO: 15597 - DNA, 1522 bp, Zea mays
  Clone ID: LIB3060-034-G4_FLI
ggggagctcgccgcgcggtggcgggaggtccacggcagcaacaactgggagggtctgctggaccccatcgacggcgtgctcctccaggagctcatccgctacggcgagttcgcccaggccacctacgacagcttcgactacgaccgcttctccccctactgcggcagctgcaagtacccggcgaagaccttcttccacgacgtcggcctcggcggcatcggctacgaggtcacccgctacctctacgccacctgcaacgacctcaagttccccaacttcggcatcaagacggccgccaacgccaagatgtggagcgagtccggcacgttcatcgggtacgtggccgtgtccaccgacgaggagacggcgcggctcggccgccgggacatcgccgtggcgtggcgcggcaccatcacccgcctcgagtgggtggccgatctgacggccaaccagatccccctgcgcgagacgggcgtcccctgcccggaccccgacgtgaaggtggagcgagggttcgcggcgctgtacacggacaagggcaccagctgccgcttctgccggtactcggcgcgggagcaggtgctggccgaggtgcgcaagctggtggatctgtaccacgggcggggcgagcaggtgagcgtgacggtcacgggccacagcctgggcagcgcgctggcgatgctgtgcgccttcgacgtcgcggagacgcgcgcgaacgtgtcgccgggcgacagggtggcgccggtgtgcgtgttctccttcgccggcccgcgcgtcgggaacgtcgccttccggaggcggttcgagcgggagctgggcgtgcgggcgctgcgcgtcgtgaacgtgcacgacagcgtgcccaaggtgcccggcgtgttcttcaacgagtcggcgttcccggagctcgtcctgcgggcggcggacaggctgggcctcggcggcgtgtacacgcacctgggcgtgctgctgcagctggaccacaaggtgtcgccgttcctcaaggagaccctggacctctcgtgctaccacaacctggaggcgcacctgcacctgctggacggcttccgcggctccggcgcggggttcgagccccgcgggagggaccccgcgctggtgaacaagtccaccgacttcctccgggaggaccacatggtgccgcccgtgtggtaccaggcggagaacaagggcatggtgaggacggaggacggccggtgggtgctgccgccgcggcagagggtgctcgacgaccacccggaggacactgaccatcacctccagcggctcggtctcaccgcgtgaagctcagcaatactctgatagtagcgttaattagtgcgtgtggcgttcgcgtacgtgcgcggggcagtcggttactctgttgccgcgcgcggcagctcagtggcgcgttcatggcgtgcatgatgcgggtgacgtgcgggatgggcacgtcgctgcctgagaagctcgcgccgttggcgttcgtgtggctgcagaaaggtcatcttggattgtaattctctct

SEQ ID NO: 15598 - DNA, 3374 bp, Zea mays
  Clone ID: LIB3060-034-H1_FLI
aaatgggactacttgagattaaacatggactgctacaagttgcagagacgttagattttcttcataacaatgctcatcttgcccatcgagctatatcacctgagacggtctttataacttctaacggatcttggaagcttggtgggtttggttttgctctttcagttgatcaagccacaggtggtttgacttcatcacagctattccattattcggactatgatgtcgaggatacagctttacctcttcaaccgtcgttgaactatactgcaccagaattggttcgaagtggagattctaaagttggctctgcttgtgatatgtttagctttggatgtctagcttaccatctggttgctcgtagaccacttctggactgccataacaatgttaaaatgtacatgaatgccttgacatatttaacaagtgaagccttttctaatattccttctgatttggtatcggatttgcaaaggatgatatcgatggatgcagtatcgcgtcctagtgctgtggcctttacaggttcttctttcttccgggatgatacgaggttgcgcgctcttcgtttccttgaccatttgcttgtatgtttttgttattcccctttagtttattttcgttaataagtttaaaggctgctatctggtgtgcttctttgctgtctgaaaatcacctttgactagattgtttgagttatacctgtcaacatagcaggaaagaatcttgcctgcttgactagagaatgaaacggcacaatttggtacctaaaatggtcctgatttttaagataacattcctttcaggagagagataatatgcagaagacagagtttttgaaggcattatcagatatgtggaaggattttgattcccgagttcttcgatataaagtatgttcagtactgcaatccatccttgtcttcttccgaccaatgctacccccatgtgtccactctctgtgagcatcattttgttatgtaccacttcattgaagctcctgaaacctggatatgttaaattatacatctacccagatggccagattccataatgtttggttgctatcagcataccctgtatggagtattggaaataaataaaataatatataaacctcaatttctatatcttaaacttgtcacaatatgaatcaattctctagttgacacattccgacattgtgtttctgtttgtgcttttcaaactgttttgtccaggaaaaagaacagccttatatttatttgatccattggttatttcaaagctgactcacactttgcaaccaggttcttcctcctctttgtgctgagttacgcaacatggttatgcagccaatgattttgcctatggttctaacaatagcagaatctcaggataaaggggattttgaacttgcaacactgcctgcgcttgttccagtgtttacttcagcatcaggtgaaactctacttttgcttgtgaagcatgcagatctcatcattaacaaggccacacaggaacatttgatatcacatattcttccaatgctggttcgggcttatgatgacaatgatccccggttacaggaagaagttctgcgtcgaacagtatcactgtctcgtcaacttgacaccaagctagtcaaacaggctgtgcttcctcgtgtacatggattagctctaaagaccacagttgccgcggtgcgcgtgaatgcgttgcgatgtttaggagatcttgtgccatccctggacaaagaaggtatattgggtatcttggagaccgttcggcgttgcacagctgttgaccatactgcgccaactcttatgtgcacacttggtgttgctaatgcaatctataaacaatgtggtgtggagtttgctgcggaatatgtgattcctctcatcttcccattactcacagcacatcaattgaatgtacaacaatttgccaagtatatgctatttgtcaaggacattacaagcaagatcgaagagaagcgtggtgtgactgttacagataatgggaacacagaggtaaaagcatcaccttcattggcaaacgggatccattctgaacctatgccaggacaaataccagctgcaaagagcagccctgcatgggatgaagactggggtcctactaagaaaaccggtgttccatctctctcagttgattctagtgcacaaacaaagcaaccctcagtacacccttttgacttcagtactcaaacaaagcaatccacaccactcccctttgatttgagcacccaagtaaagcagccatcattagtttctcatgctacagcagctacgatcccacctgcgcaaccacaaccagtacaatctcttgtgcccagttcaggacctcaatcttctggctcatgtgcccctgttgacattgagtggcctcctcgaagaagctcgtcatccgacttcagtgcatccttgtctattagcaaggagaatgaatctggaaggctatctagcgatggacttgacgatattgatccttttgctgattggcccccaaaacctagcaatgttactagcattacagcaaccgagcatcgtccaagcataaatcaaaatatttctggatttagctcaggtaacatagggtttggtggcagcgggaattctatagggcaagcgaaaagcaaccaaatgagctggtcaaacacgtctaatctgatgggcatgaactcaactggcagctatttgaatcagggcagtgcagctctaggttttggaaatccaattggaggattgagcactggcctctccaatccaagcagttccagtacaggcctgagcatgatgcaaccaaaatctgattttggatcactgtccatgtcggccaataatgccgcaaatggcccacccagacttgcccctcctccatctacttcagttggaagagggcgtggtagaaatcaaggacaatcagcactctcccgagcatcaaggcctcctcattcgaactcgtcatcaggacaacaacctatcctggatttactttagtaagagatgcttgcctctattcttggcgatgacgattgtcaatgtgtacatcttcaaacctttgtaaggtgagcatcatactgttcttttggacatgcatgtggtgaaagcatatatatattttttgttcatttcgaagctggctggccttggtttatagtctgaaggagttctacttcggggaatctggatcttgcagaggttaccttctctcatgcttagggttttgatttgggcattgaggctatcttcatattggtgacagaagaaatgtcgttgtgtatgtttctgtctaaaatcggctgtagcttgtagagttgatgaatatagttgacatgcttatctgggctgtgaagttttgaatgtttcctt

SEQ ID NO: 15599 - DNA, 1695 bp, Zea mays
  Clone ID: LIB3060-035-B1_FLI
ggaggtcggtagtttagttttcagaagccaaattaaattaaaggctgtctgtctcactcactcactcactcccagaagagagaagaccacaccacacaaacaaacacctctttggtttctacaaatagaggacgcactgactgagctacaccggtaaaagctgccaaggatatatatcccaccagtcaggaatgcccgcaaccagacatttcagtacataacaggagctgaacaactaacgtacaggctgacagcagcagatgtatcatcagcaacagctccacacccataaccagcacctgtcctcgtcaaggccgggcttacctcctgagaagcagttcctcctgcacggagcaggaggcggcggcggcggagatgcagggctcgtcctctccaccgatgctaagcctcgcctgaaatggacacccgagctgcacgagcgttttgttgaggcggtgcatcagctcggaggcccagacaaggccacgccgaaaaccatcatgaggctcatggggatccctggactcaccctgtaccatctcaagagccatctccagaaatacagactcagcaagaatctccaggcccaagctcatactgccagcgcaaagaatgcgttggtaggctgccggacgggagcagacaacgccctatgccaagggagtgcttcaccgccgccaccaccgccgccgccgcacctgaacctagatccgccgcagataaacaggtcaatgcacataagtgaagccctccagatgcagatcgaagtccagagacggctgcatgagcagctagaggttcagagacacctgcagctgcggatcgaagcgcagggcaagtacctgcagtccgtgctggagaaggcgcaggaggcgctggccaagcagagcggcggcgctgacgagacaacgacgacgcagcagcagatgctgccggatctcatctcgagagccacggcgacgaggcgcggccatgtccagcaggagcacctccacctgcagcaccacctcggaggcgacgggtcggtggacagctgcctgaccgcgtgcgaggggtctcggtgccagagggagagggaccaggacctgctgtccatcggcctctcgtccgctccgcctcccactcccagcagaggctacaacgacagaggaggaggcggcagcgccagctgcgaggagttcctgcagtttcttgacgagcccggcagaagaggagcaggaggaggaggagggtcctcggatgagcagcaggagctggacctcagcatcagcggcggcaggagcaatccaaggcctcgcggcagccaaagccaaaggatcgacctgaacggatccagctggaactgaatggtcgttcttttagcgatggtctccttcctcgtagctttagctgcagtagggaaaatggcgaggatcacagcaggtgccctgtgtgtgggtgcacttccatgccctgcagccatttgcagcaaataactaagcagtgactgatgatgatggtgaattggcatgcgagaaagagaacccatatgcacgttctcctttgacgtctgattgattagttaactctataagtagatctgtattccagacatggaaaagtacacggctgagatcctctcatcagtttcaggaatgtacagagctcccagcggatgcacacgaatccatgctgctgcttctgccttggcccacc

SEQ ID NO: 15600 - DNA, 1846 bp, Zea mays
  Clone ID: LIB3060-035-B11_FLI
atcatcgaggccgggttcccggcctcctcccccgacgacctcgacgccgtgcgctccatcgccatcgaggtcggcaacccggcgccaggacccgccggggaggaggacgccgtccacgtgccggtcatctgcggcctctcgcggtgcaaccggagggacatcgacgccgcgtgggaggccgtgcgccacgcgcgccggccccggatccacaccttcatcgccaccagcgacattcacatgcagcataagctcaggaagacgcccgaccaggtggtcgccattgccagggagatggtggcctacgcccgcagcctcggatgcactgacgtcgagttcagccccgaggacgccggcaggtcaaatagagagttcttgtatcatattctaggggaagtcataaaagctggagctacgactctcaatatcccggacactgtcggatacaatcttccttatgaatttggaaagttgattgctgatataaaggcaaacactcctggaattgaaaaggctatcatttccactcattgtcagaatgaccttggtcttgcgactgccaacacactagcgggcgctcgtgcaggagcacggcagttagaggttactattaatggtattggtgaaagggctggaaatgcttctttggaggaggttgtcatggcaattaaatgccgcagagaactgttagatggtctctatactggaatcgattcccgccatatcactttgacgagcaaaatggtgcaagaacatagtggacttcacgtgcagccacataaagctattgttggtgccaatgcgttcgctcatgaaagtggaattcatcaggatgggatgcttaaatataaaggaacttacgaaattatatcgcctgatgatattggtctaacacgtgcaaatgaatttggtattgttcttgggaaactcagcggaaggcatgctgtgagatctaagctagtagagcttggatatgaaatcggtgacaaggaatttgaggacttctttaaacgctacaaagaggttgcagagaagaaaaagcgcgtaactgatgaagacttagaagcgttattgtcggatgagatattccagcctaaggttatttggtcccttgctgatgtacaggcaacatgtggtacacttgctttatctacggcaacagtgaaattgatagcaccagatggagaggagaaaatagcatgttcagtcggaacaggtccagtcgatgcagcttacaaggctgttgacaaaataatccagattccaacggttctccgagaatacagtatgacatcagtcacagaaggcattgacgcaatcgcgacaactcgggttgttgtcactggagatgtgagcaacaacgccaaacatgccctgactggccagtctttcaaccgctccttcagcgggagcggggcatccatggacattgtggtgtccagtgtcagagcttacctgagcgccctgaacaagatctgcagtttcgctggcgccgtgaaagccagcagcgatgtagctgagaccgcaagcgtcccgagcacagaatgagctcccgtttggttcagagtgacatgttgttcaaaatttctgctggaaggatcgtcccttgagcttaggacaggcaggaagtcttgggacctatgtagtgtacaatttctgtgtgtcatataccgtgctcgttgccagtttgtactgtaccatatataaaccatagaatctgttgccatttagaagtctggccaaggtcagctgtaatgcttcacatgcttatagcctggaaacattaaacattgaaaaacccgagcagtgaataaaggatgcccaaggtagaaactctgatgaatcatcc

SEQ ID NO: 15601 - DNA, 1019 bp, Zea mays
  Clone ID: LIB3060-035-C8_FLI
gccgatggactcttggtggtgagcagcgagagatagagagggtgaaactacatatgcatatacaaatacatgtagctagcggcgtagtactggatactgtgccatacggagtatagtatatatactcgctgtattagcagtagaggcggccgtgcagcgatcggtcgacgatggttgttgccgccatgagagacgagggagaggagggacgacgacgggcggtggtggcgatacgggactacgatcccaagacggaccgcgacggcacggaggccgtcgagcgggagtgcgaggtcggcccggccgccgccgccggcgggatgtcgctgcacgccgacctgctcggcgaccccgtcgcgcgcatccgccactcgccgcactacctcatgctggtagctgagacgtccgggccggacggccggatcgtcgccctcgtccggggaaccgtcaagtctgtcgcctccggcaagagccgccctggcgcgcccgccttcgccagagtcggctacattcttggcctccgcgtcgcgccttcccacaggcggatgggcatcgcgcggcagctggtgcatcggctggagcagtggttcgagctgatgggcgccgagtacgcgtacatggccaccgacaggtccaacgaggcgtcgctgcggctcttcaccggccgctgcggctactccaagttccggacgccgtcgctgctggtgcacccggtgcactcgcaccgcctcagggcgccgcgccgcgccacggtggtccgcctcggcgcccgcgacgccgagcggctgtaccgcagccggctcgcgcacgtcgagttcttccccgccgacatcggcgccgtcctgggcaacgcgctctcccgcggcacgttcctggccaccgtgggcggctacgagtggggcggcgtcgaccgcttcctggcgtgcccgccggcgtcgtgggccgtggccagcgcgtgggactgcggcggcgtgttccggctccaggtgcgcggcgcgtcgcgcctgcgccgcgccgcc

SEQ ID NO: 15602 - DNA, 1292 bp, Zea mays
  Clone ID: LIB3060-035-D4_FLI
caagaagggaaaaaaaaagagggacaggaaaaaaaatcattctcgtttcgctctccgctagaccccgcccgaatcaatggagattagggctccgccgacgagcctgaggctcgcgccgccgcccgccgccgccagcttccgccgaaccccgcttaggacctccttccttcgcggcagcgtgtcacttaaagttgtgcaagtacggcagtcaaatgtcaacagatttaagtgcaatagcatacgaagtaacctctttgataggctaacaagggttgtcaggtcctacgcaaatgcagttctaagttcgtttgaagaccctgagaagattctagaccaggcagttctggagatgaatgatgacttgacaaagatgcggcaggccactgcacaggtcttggcatctcaaaagcggcttgagaataaatataaagctgcagaacaagcttctgctgattggtatcggagggctcaacttgctcttcaaaagggtgacgaggatcttgctcgtgaagcccttaagcggcgtaaatcatatgctgacaatgcaagctccttaagatcccagcttgatcagcagaagggtgtagttgaaaatctgatttcaaatacccggcttcttgagagcaagatagcagaggccaagcagaaaaaggataccctaaaagctcgtgctcaatcagcaaagactgctacaaaagtgagtgaaatgttgggcaacgtgaatacaagtagcgccctttctgcatttgagaaaatggaggaaaaagttatggcgatggaatcccaagcagaggcactcggccagttagcaactgatgatttagaaggaaagtttgcactgcttgagacttcatctgttgatgatgatctttcacaactgaaaaaggaattgtctggaagctctttgaaaggagagcttcctccaggcagaacagcagtcagcaactcaggtgctgggcgccctttccccgacctagagattgagagcgagctaaacgagctgcggaggaaagccaaggaatattaggttcattccttgtcgattcagcaggcctgacggaatctcatttccaagaaaatatagtgcagctgcagattgctccattgcgcgtttcgaaagttgaaacacaagtgcgcattgactgtttgttaaagagtatggaatcggctaatttctcggcattttccccctcgagtgacatttgtacagctatccataaaattgttgtaaatcactactctctctagagcctttttttcatactatatataaagtcaaagttcgaagttcc

SEQ ID NO: 15603 - DNA, 1403 bp, Zea mays
  Clone ID: LIB3060-035-D8_FLI
ggtttggtgatgctgatgccggtgccgcatgtctatattgggtaggtgacgctgaggcctcgttccccaatcagacttgttcggcctcttcgacggcgtgcccgtctccccgagctcattcgccatgccttcctcagcctccgcgagaggaggacgagggctcctcttgccggcggctgctgaggcggttgtggtgctaatattgggtgcagtggcgccagcggcgggttgttatccgcgcgtgttcagcttcggggactcgctggccgacacggggaactacccgttcgtctacggcaacgactctgggtctggcggggccgcgctccggccaccctacggcgagaccttcttccaccgcgccaccgggcgcgcctccaatgggcgcctcgtggtcgacttcatcgcggacacgctgggcctcccgttcgtgcgaccgtatctgagcggacggagcgcggaggacttcgcgagcggggccaacttcgccgtcggcggcgccacggcgctcagcccggactttttccgtgcaaggggtttcgacaccatgggaaacaaagtggacctcgacatggagatgaagtggttccgcggcctgctcgacctactctgtcccggcaatctcgccggttgctcagatatgatgaaccaatctctcttcttggttggagaaatcgggggcaatgactacaacggacctcttctttctggagttcccatggagaaaatccgtgccatcactccgagtgttgttgcaaaaatttcttctacaatcagcgaattgattcggctaggagccaagactcttgtggttccaggaaacctcccaattggatgcatcccagactatctgatgatattcaagagcaataaggaagaggattatgaaccacagacaggttgtcttaggtggatgaacgagttctcacagtatcacaacaaggttcttgtggagcagctcaagaagcttcgcaagcttcatcctggagcaaccatcatctatgctgattactatggagctgctatggaaattttcctttcccctgaacaatatgggatcgaatatcccctagtggcttgctgtggtggagaaggaccctacggtgtgtccccatctacaggctgtggattcggagaatataagctgtgcgataatccagagaagtatggatcatgggatggcttccatccatcagaatctgcatacagggccattgctatgggcctgctactaggttcctacacaaggccgtcgatcacttccaccaccacttcatgtccacagcttatggagctcggctcttctgctgaatacaaacccctctacgacctgtagtaattttgtaattatattttattgtgtgtactccctcgcccagttctatcagtaccattttgtaagt

SEQ ID NO: 15604 - DNA, 906 bp, Zea mays
  Clone ID: LIB3060-035-E8_FLI
accacacacacacacgaagagccggcgatgaaaatgtccgcttccgttgctgccgcttcccccaccctccgcttctcctccgccactcatcctctccaccgaccgctccgccggcggctcccgtccgttcgatgctccctcgccgccgccgccgccggccccggtgtccgggcgccccctgagctcgtcgactccatcctctccaaggtgaagggaactgaccgaggagtgctgctgccaaaagatgggcaccaggaagtggctgaggtcgcgctgcagctggggaagtattgcatagacgaccccgtcaagtccccgcttatattcggagaatgggaggttgtgtactgctcggtgccaacctcgccgggcgggctctaccggacgccccttggccgcctggtattcaaaaccgacgagatggtccaggcggtggaagcgcctgacgtggtcaggaacaaggtgtcgttctccgtctttggcctagagggcgcagtgtcattgaaaggtaagctgaatgtgctggacagtaaatggattcaggtcgtgtttgaagcgccggaactgaaggtcggctccttggggtttcagtacggtggcgagagcgaagtcaagctggagatcacctatgtcgacgagaagatcaggctagggagagggtccagaggctcgcttttcgtcttccttagacgatgatagaatgtcatgcatgtgtgttgagacttcagacccacaagcaccgatgaggggtggcgctgacgcggtcgtttgtacaatactgtgttcaggatttctatacgtttatgtaaaaattctggcgtccagctgggtaatgcagacttagcctgatgaatgttgttgcgtagtttgtagcatccattattagtgctgtaagatgatgttttg

SEQ ID NO: 15605 - DNA, 1059 bp, Zea mays
  Clone ID: LIB3060-035-F11_FLI
cgctctccaacgccacagcttgcgcccgcaatggcactcgtctccgcctcctcgtcctccaccaccgccgtcacggcgctccccaggaatgggcagcgggcgtcgtcctccttcctcggcggcaagacgctgctgagacaggccgaggcggcccggccgtcgttcgccgtgcgcgccgcggcggaccccaacaggccgatctggttccccggcagcacccctccgccgtggctcgacggcagccttcccggcgacttcggctttgatccctggggcctcggatctgacccggagagcctgcggtggaacgtgcaggcggagctggtgcactgccggtgggcgatgctcggcgcggcgggcatcttcatcccggagttcctgaccaagatcggcgtcctcaacacgcccttctggtacaccgccggcgagcagcagtacttcaccgacaccaccaccctcttcatcatcgagctcatcctcatcggctgggccgagggccgccgctgggctgacatcatcaagcccggaagcgtcaacaccgaccccatcttccccagcaacaagctcaccggcaccgacgtcgggtaccctggtggcctctggtttgacccgctcggctggggcagcggctcgccggagaagatcaaggagctgcgcaccaaggagatcaagaacggacgcctcgccatgctcgccgtcatgggcgcctggttccaggccgagtacaccggcaccggccccatcgacaacctcttcgcccacctcgccgaccctggccacgccaccatcttccaggccttcacccccaaatgaggagttgaacttattattagcattttgaggagtgctaccacacatgcatcgtcaggttgatggccgatatatatgaaacttcacattttttttggtggggaaggactgctgagtagactgtcaatgatggaatgctcgtggtgcgagtgcgatgcatggtgtacttgtactatgttgtaaccagtgtaaaaaggggatactcgttagatgttatgccatgttcactgaatcaacggcttgatgatt

SEQ ID NO: 15606 - DNA, 1045 bp, Zea mays
  Clone ID: LIB3060-035-F12_FLI
ctccccgacctcccagctctagagtctagacagccacaggcaggagctccacgagtccacgtgacctcagacctcacacattcacagtgtcacgctgcctcaacgtcatgtctctcctcgcctcccccacgccgttcggcgtgaccgccatccgccgccgcgtcgccccgcttcctctcctccctgctggcggtcgcgccgccctgcacgtggccctcgcgcgccgcggcggggtctcgtcccggacgcagcggcgcctcgaggaacgaggaggcaagaagcgccgcggtggggtcgtggcgcccgacgtggacgaggacgcggcggaggcgggggtggctgagtgggaaggggagccgctggggttcgaggtgtcgacggagcccatgccgcggctgccagacccggagacgcccgacttctgggagggacctcagtgggaggccctcggcttcttcgtgcagtacatgtgggcgttcggcgtcgtcttcggcctcattgcttgcggtgtcgctgtggccacttacaacgatggtgcaacagatttcaaagacacgcctgcttacaaggagtcccaatcacaggagttccctgaggagtcagaatcatcaagcgctgatgtgtttgaaggcaatccgactgaggtagcaccagctctcgagtaggactatcaaggaggcacgggagaaaagttgtctctcgattcaagctatagcctatagggcttcgccttcgcaatatagatgcaaaggtttggttgatgatgctaagaaaattggctggtaattattttgtactgaattttcccttagaattaaatatagatggctagtgtctagtggtgatatgatgggattcgtctgtattattcttccaaacagtggggggcaaaagaaagagagcaagcattgctgtctatcctgtattttgcattcatcatgcccctatgatggcttttggcacttagtccaggggaaatgtataattcaacacaaatacattctgtaccggcacaatccataattaaggaacatgtagcattatc

SEQ ID NO: 15607 - DNA, 1089 bp, Zea mays
  Clone ID: LIB3060-035-F9_FLI
gtgctgtagacattggaggtggattttccttaattggagatattgaaaaattggaaaaaaatgtgacttgacctgtgctgcaacaaccttaaactaggaggggcttctaattcttcatctctaccaacagttctctcctgttactttttaaaccaataactttttcaagtttgtgcagatgcacacatccttgagccaaaatagaaaaaaaatcatagaagagttctttggctgtcacgtgattcaagagtattaatgatatacaaaagtttgctttatggcaagtcaggtaaccacaaattttgggcaatgacagggatgtgcagtggtggtctcttaaaagaattttgtgttccagcgtagctatttccactgcaaactatcaaatcattacaaactgctgggaacatgctccatcttattatcgaagcctgtatctcgagaaagttgatcgatacatctgcttatttatggcctggttatgttgtaccatctgggactttaaaagatacagctttgccccaagaatccccttggttaaactttatgaaagggtctcgactttcaggaccccttattgatgctctggtcgcatctcctgcttcaagttcaagctctgcaaggtgaggtctgttcagtttggccagaaaggcatcccctacctgaacacctacgacggccgcaccatccgctaccccgacccgctcaaggccaacgacaccatcaagatcgatctagagaccaacaagatcatggacttcttcaagtttgacgtcagcaacgtggtcatggtgaccgacgggaggaacaccgggcgtgtaggagtgatcaagaactgggagaagcacaagggcagcttcgaggtcattgacgtgctgcttggagctttttgcatgctatgtctagttttctcctatttgttgtacaagaaaacatagaatggaattcaaatttggtggtcgcaaaagtgtggagacttgaattcatataaagttaggcttaacattagtgtaaaaagttgtattttagtttagatttagagtacacttatgtataccttgtttgacaatacttatttatgatatattg

SEQ ID NO: 15608 - DNA, 1547 bp, Zea mays
  Clone ID: LIB3060-036-C1_FLI
caaagatccaagctccccacccttcctcatggtcatggcggcacctcgtgttctagttctgccttaccccgcccagggccatgtcatccctatgatggagctctcccactgcctcatcgagcacggcgtcaaggtcaccttcgtcaacaccgaggtaaaccaccgtctcattcttggtgccttggcgaccggagacaaagaactcggcggggtcgacatggtgtccataccggacggcctgggctccggcgaagaccggaaggacctcggccgtctcaccgactcgttctccaaggtcatgcccggcgagctggagaagctcattacaagcatcaacgccgatggacgagagcgcgagaaggccagctggttgatcgccgacgtgaacatggcgtgggccttccctgtggcgaagaagcacggcctccgaaccgccgggttctgcccatcgtcggcggcgatgttcgcgatgaggatcagaattcctgagatgataagcgacggcgttcttgacgagagaggctggcccaagcggcgcggcgcgttccagttggctccggcgatgccggccatcgacacttcggagttctcgtggaaccgcgccgccgacgccaaggggcagccgatcatctttcagctgatcctccggaacaacgcggccacgcacctcgccgagaccatcgtctgcaactccgtccaggagctggagcccggagccttggcgctcgtccccgacgtcttccccgtgggcccgctctcctccgacaagccggtcggctgcttctgggccgaggacgcctcctgcgccgcgtggctggacgcgcagccggccagctccgtcgtgtacgtcgcgttcggcagcctcgccgcctacgacgccgcgcagctagtcgagctggccgaggggctgctgctgacctcccggccgttcctgtgggtggtcaggccggggtcggcgggcgagcagcaccttgagcagctccgccgccgcgccgcgccgcgcgggcgcgtggtgagctggtgcccgcagcagaacgtgctggcgcaccccgcggtcgcctgtttcctgacgcactgcggctggaactcgacgatggaggcggtgcggaacggcgtgccgctcctgtgctggccgtacttcaccgaccagtttctgaaccagagctacatctgcgacgtgtggaggacgggactgaaggttccattgccgccagggacggcgcacggaacgggactcgtggggagagacgttgttcgggacaagatcgaggagctgctccgtgacagtgagacgaaggcgagggcgctcgcgctgcgggacctcgccagtcgggcagtcggcgatggaggttcgtcgcgccggaatctcaggcagttcttgggccttgtgcgaggatcggagagctaaagctgcaattttggggctactgttgtgtttgcgaatcgcgatgccaggacaaaggtctgcaccctgcagtctgcaccgtgaaaaatcctgtttcgatgttctgaaaaattgaaaaacatgtacaatatatcctgattgg

SEQ ID NO: 15609 - DNA, 1986 bp, Zea mays
  Clone ID: LIB3060-036-D1_FLI
atcctatgctgccacatcgaaggaagatgatgacttcctcaaatcttgcccatcgcatcgatgccacaagcatggaccagagatccggttcccctttcggcttccaagccaccctccatcctgtggcacacctgggatgcaattatcatgctctgggcatgacaccatccttgatcatccagttcttggctcctgcagagtgacagcaatatattacaggcatcgtgtcatgaatgtcatcccgccagaggactcatcgtcacactgccaacttcagaagcttgttaaaagaaatcaatcaactgatgtgtacacacctgtagcacatcctgtctcagtagttgtaggatgctcaagagaagcaacaaaccaagatgatattgcaggcccaagctcttgccggagcctcattaacaatgcaaaccagctctggtacctggtggatccttctacagatatgtctactcttcccatgggttgcgaggttgttgcaaagggaatcccagtaccctacacttacgacaaaaatggtccaaactataacacattctccggaaggtcactcttcaacgaaaaggcaaatagaacaatcaattttggtgaaacatcattcaattggaacctcaacaacatcaccggctcttgtcaaaggtgtgaacaggaagggaaacattgtggattcagttcaaacaggcgacaagcattctgcctgcatcacggttcacatgtcatcctcattgcagctacaacatcagtagccacattcgttgttctggtagtcactgcactctatctttcactgaagaaaagatataatgaagcaatacatctcaaagtagaaatgtttctcaaaacatatggcacatcaaaacccacaaggtacactttctccgaagttaagaagatagcaaggcggttcaaggaaaaagtaggccaaggtggattcggaactgtttacaaagggcagctaccaaatggtgttccagtggcggtcaaaatgctagagaactctacaggagagggagaagacttcatcaatgaagtagcaaccattggacaaatacatcatgcaaatatcgtccgcctcctaggtttttgctctgaaggaacaagacgtgcgcttatttatgaattcatgcctaacgagtcattggggagatatatattcttgccgcaagagctcctagtaccagaaaaaatgctagatatcgctacaggcattgctagaggaatggagtacctacatcaaggatgtaaccagcgcatcctccactttgacatcaagcctcacaacattctgctggactacagcttcaacccaaaaatttcagattttggtcttgctaagttgtgtgccagggaccaaagcattgttaccttgaccgcagcaagaggcacaatgggggtacatcgcaccagagatatattctccaaatttcggtggggtatcatacaagtcagatgtttacagtttcggcatgctggtgttagagatggtgagtggaaggaggaattcagacccaggtatcgagaaccaaaatggggtgtatctaccagagtgggtctatgagagagtagtcactgggcaggacctcacacttagtaagaaaatagctgatcaggagaaagaaacagtgaggcagctggccattgttgcactctggtgcattcagtggaaccccaaaaacaggccatcaatgacaaaagtggttaacatgttgacaggaaggttacagaatttaccaataccacctaagccatatgcctagcctgaaagacatcctatgccataaaacatggaggatatacaccatgttttaggaagcatgaaaagcagttatgcttactttcatgtgcgagcttagtaatgcttagcaatagattacacagtatttggatcattccactgtatcagacacatgaactgtgactcttttaattttcaatgtgtggtaacttaattagagacgtatcacattggatttg

SEQ ID NO: 15610 - DNA, 380 bp, Zea mays
  Clone ID: LIB3060-036-G6_FLI
acagccagtacgtgctccaccggggcatccctacgctcggcgacggcggcaaggcgacggcgacggctgccgcgtcggcattggggacggcagaccggttagcggtcaggcagcggtcctacaccgagctgcagctgttcaacaggaggtggaagaaggccgtggcggaggacgggtgctggaccgacccttacccgaacccggcgacgaccaccggctgaccgttggacggagcgaggcagcgcagggaagtacagtagttggtagctgtcagattgaccttgcctagaagatggtagtagatcatacactcgcattaatttacaggttcacagagagctatacatataatgtacagaactacagattgttttttttcc

SEQ ID NO: 15611 - DNA, 2200 bp, Zea mays
  Clone ID: LIB3060-036-H6_FLI
tcctcattcgcgaaaagaaaaacacaaggcgaccgcagagggcaggacaggacagagacgccgaggctaggcagtccatctgttggggtggccagtggggatctcgccggccgggaggtctggggggcgggggctgccaaacttcgccatattggtgaatcactgaatccgcccctgccagcaaccgttctgacgtggcggggtggggcaggatccaaatggcggcggcaatagaggaactgcggctcctgggatccatccctgtactggaaggtccgggagaggtcgacggcgtggtgggtgaggaagggcgaccgcgaggcggcggcgacgacgaggagatcctgcgattcatggactcggtggacagctacctgctcctcatggactccctatcctccgctcttcgtcaggtatgcgatcctgcagtattggtatttgttccccaacatggcatggtctattcactcttgattcagcggaacacatgcggcgaaatactaatcggtcggtgtaacaagaaacacagtcctttgctttagtaatttgcacaatgttacaaaccctttgagcagaaccgtgtttctacccattcttgttgtaacataacctgaggagtgaggaaaatggattcgaggtttgagagatgcaccatcataaatcttgtgcatgggtcttaccaaatcctttggtagaacatgtctcctaccatggagctaagttagactgatgtttttaaagacctttacagctgtacctgcacatgtgggaattcaaggatatgagatttggagttagggagatacacactatcaacaaattatgaatagtgtgtatttgtagtgctctatcctgtttttcatttacctcatattgtgcgatatgttgcactgccaactgcattttgtagcctgtacttaattacagtgccctggattaaccttgattcactcttgcaaagatcaattttccaaagcctgtccgttctctattatgttcaacttgtagtgagtaatgactatgtgatgtttggacgtgatgctccgacatactcttggcttttgatttttggattgagagtgaaagttatctttgcctgtttccgccacactgtatcatacaacatgaatacagggctggcttgacctggcaagtgctcgccattctatgggcacatcacgcgtttcgagtacactgtttgatcacaaggagcagtctgctgccactaagcttcaagttgttgatcatgatggcctgaaatcatcagagtcaataccacactttgctctatcaaagtggtctttgcaagaagaatgtcactccacctatgatctcagtgagagagattttactgagccaaagatgaggcatcgaggatcagttactaccccagaaaagggaaaccatgaaagtgcaaacaccacaacactgtctacaggtgctgatgctagcaatcgtgtaagtttggtacaaaagttcctttcttcaaaggcattggaatgtcagatagtgaaatactgcttagagggagcaaagatttatgactaattcatgagctatgttcaatgcaaaaacataggttttatgtgcttgagttaccagtggctgaaatttgccccttgatatgcttgatccaagatatgccaatggttaacataaataccacaagaataatatattgcagtatgctaagccaatttcagttaggtttctatcaacagctgggtatggaacagctgtattttggtacagtgaataagaaattgctatacttctgggatgttcagatttgttgattctccttttggccattttgcacattaggttcaaagagcgagatcaaaagcattatcagtctttgggggattggtatccccaaaactaagaaccgcccaactttcatttgaaacaggttttgattcttcgtgacaaaattgtatccagattaaactatttttttatctaactgtacttgtatttgttgcagcacttgacttgattgtggagctagcaaattcaaggtcgaatatgttagctagtttctcccacttaaaagagtgaagacattatgttatgagattttgtaccttgggcaccatctattcagcactcatgagatcgcagcaactgtaaactaagttttgagatccagtatattttaagaacgactaaatagcatataatgcttgctatgctgatt

SEQ ID NO: 15612 - DNA, 1417 bp, Zea mays
  Clone ID: LIB3060-036-H7_FLI
aagaggatcaataaccttcatctgcagatgcagctgcagtgcagtcataagcgtactagttagtgtcatgtcatctcatcaggactctgattgatcaaatcaccgtacatgcacccggcccgcagtgggcgtgcaccacgagcgtggacttctcgctggcgcagctgatccaggtgatcatcctgctgagcaccggcggggccaacggcggcggctacctcgcctccaagtacgtcgtgcttgccatctacaccgccatcctcgtcgtgcacggcctcatcaacagcctgcacatccagtggctctcctggttcggacagctcggagccttgtggaacgtcgcgggcgtgttcgtcctcgtcatcctggtcccgtcggttgccaaggagagggcgagcgccgagttcgtcttcacccacctcaacaccgacaacggcatgggcatccacagcaaggcctacatcctcgccgtcgggctgctcatgagccagtactccagcattggctacgacacgtcggctcacatgacggaggagacgaagaaggcggactggagcgggccgatggggatcgtgtactcggtcgctctttccagcgtgttcggttgggtttacctgctggctctcacgtcggtggtcaccgacatcccgtacctgctggacaccagcaacggcgccggcgggtacgccattgctcaggccctgtacgacacattccgccggagatacggcaccggcgccggcggcatcgcctgcttggtcatcatcgccgtcgccgtcttcctctgcggcaccgcctgcgtcaccagcaactccaggatgggctacgccttctccagggacggggcgatgccgttctcgcacctttggtaccgggtgaacaagcaggaggtgcccttcaacgtcgtctggctctctgtgtccgtggcgttcgtcatggcactcacgtcgctggggagccaggtggcgttccaggccatggtgtccatcgcgacgctgggtctctacatcgcctacgcgctgcccatcttcttccgcgtgacgacggcgaggaagtcgttcgtcccagggccatttcacctcgggagatgcggcatcgctgtcggctcggtggccgtgctatgggtggccctcgtcaccgtgctcttctgcctgccggtggcgtaccccgtcgccaaggacaccttcaactacacgccggtggccgtcggcggcgtgctggtgctcagcctcgtcgcgtgggtgctccacgcccggttctggtttcgtgggcctatcacaaacgtctgacgttgtttgcaggcttcggtagttactttcgatgcattttatgtagtgtcaatctgttttaatatgtcattgaacataaacatgaatatgaatatactcctatacacaggtattgtggttggaactgg

SEQ ID NO: 15613 - DNA, 969 bp, Zea mays
  Clone ID: LIB3060-037-F11_FLI
gacagagacagagagagaggggcaggaattgaattccaccgacccacgcacctctaggtcaccccgctcccacccctttcctctatttacctccacctatatagctccccataattccccgggcctcccctctcttgttaggagtacacacttctccttagaattggagctgtacgagccacccagcaactttcttcatcatcttcttcagctctctctctgtccgtcgacacaccaagctagccatgcgagagaagaagggtagagaagaaggagaaagaaggagaggaaggtagccccctttccatggaaggatccgccactgctgagggccgctcagggttacgacaaatggcgagtgtgagctctctcgtctctcctatataaagggaggacgcgccttggcgcaaaagcaagccccgcgcgccaatggccaaccgagcagaaggcgccgccgcgggtgaccgcgaggctctccagaacctcttccttgacgtcgcgcgcgtgctggtggtgttcggccggcgaacccgtgctggcgttcctcagcctcctgctctggctgctcggcgtgtggctcctcgcgctggtgctagtgctagcggcaggacgcttcccgcacttggcactggccgccaccgccatggccatcgccatcctgaagaacttgctcgccttgtggaactagcttcatcggtcgatcgatttgcagatggtgaggtatttactagagccttgagtatgatttaccaagtgaataaggagggattggactttcttgcttgctatatatcagagtatatatgatcatatatagctgtgactgagttgtgacctggctgttgtcgctcgcgtggttcgttcagtttgatgtatttatgatatatttaatctgctacgtaaacatggtttcatttgctacacgtgatttatattcataattcgtatgatatggttgctttaaaaatt

SEQ ID NO: 15614 - DNA, 2241 bp, Zea mays
  Clone ID: LIB3060-037-F12_FLI
ggaagaaaaaaaaaataactccaccattcccttccctctcgcgagctcagatcacgcgaagcaaggaaaaaagaaaaatggcgcagctggtggagacgtacgcgtgctcgccggccacggaacgcggccgtggaatcctcctggccggggaccccaagacagacacgatcgcctactgcaccggccgcagcgttatcatccgccgcctcgatgcgcctctcgacgcttgggcctaccccgaccacgcctaccccacgaccgtcgcccgcttctcccccaacggcgagtgggtcgcctccgccgacgcctccggctgcgtccgcgtctggggccgctacggtgaccgcgctctcaaggccgagtttcggcccctctcgggacgcgtcgacgacctccgctggtcccccgacggcctacgcatcgtcgtctctggggacggcaagggcaagtccttcgtccgcgcatttgtgtgggactctggcagcactgttggtgaatttgatgggcactcaaagagggttctgagctgtgacttcaaaccaacacgtccatttcgcattgtgacatgtggtgaagattttctggctaacttctatgaaggaccaccattcaaatttaagcattccataagggatcactcaaattttgttaactgtatccggtatgctcctgatggtagtaagtttatcactgtgagttctgataagaagggtttgatatatgatggcaaaactggagaaaaaataggagaactttccactgaaggcaatcatacagggagcatatatgctgttagctggagtcctgacagtaaacaggttctaacagtttctgctgataaatctgcaaaagtatgggatatcatggaagatgcaagtgggaaattgaatcgaactttgtcttgccctggtataggaggtgtggatgatatgcttgttggttgtctctggcagaatgaccacctcgtgacagtctctcttggtgggacatttaatgtgttctctgcaagcaacccagaccaagaaccagttacatttgcaggacatttgaagactgttagttctttggtcttctttcctcaaagtagcccaagaactatactatctactagctatgatggtgtcatcatgaggtggatacagggtgttggatttggtggcagattggtgcgcagaaacaacactcaaataaaatgttttgctgcagtagaagaagagcttgttacctcaggttatgataataaggtcttcagaattcctcttaatggaaaccagtgtggagatgctgagtcagttgatataggcggtcagccaaatgctttgaaccttgcaattcagaaacctgaatttgcactgatcactactgattccgggattgtgttgctgcacaattcaaaagtcatttctacaacaaaagttaactatgccatcacgtcatcttcagtgtctcctgatggcacagaagctgttgtgggtgctcaagatgggaaactgcgaatctattccatcagtggcgatacactcacagaagaagctctgcttgagaagcaccggggtgctatcacttccatacattattcgccagatgtttctatgtttgcttctgctgataccaacagggaagctgttgtgtgggatcgagcaagtagagaggtcaagctgaagaacatgttgtaccacacagccaggataaactccctggcttggtcacctgacagtcgattggttgccactggctcactggacacctgtgcaattgtctacgagatagacaagccggtagccagtcgcgtcaccatcaagggagcccatcttggtggggttcatgggttaaccttcctcgacaatgatattctggtgactgccggtgaagatgcttgcattcgtgtttggaaggtggtgcagcaataggccgctcttcattctggtgtgcaatgagaatgtctgtgctgttgattggaataaacttttttttgttggtttggtggctgttactcacggggtcatagcatggtttgttgctttatctgcgatttgtgctctaaatttcctttacaattctttttgagctgtattatttttgcttgttttttttcaggaagactcctttgtaagtggatccggtatccctgcatctgattttgttaggagttgtgagaatatagggatactgttgttgctttttctaccccaggtccctaaaatagtcgttaataactgacttcgctgtggttaagttttt

SEQ ID NO: 15615 - DNA, 2203 bp, Zea mays
  Clone ID: LIB3060-037-F7_FLI
ttttaacaatttaattgtcactttcatgcttcagagcacttactcagatctcagtatgcaaatgatagatcttcactatttatgttattagacaaatgaggattgagaaacattcaactttattcatgcatgcatgttacttttgctttatttttttagcaacttagtcacttttttcctggtttgctagtgtgtatcagtaatttctaaacattcatgactaaacgaacacaagatgacagtatttttgttttatgctaaatcagcctgagtcatgggatgacgatgacgatggtacatggaagcctagaatgatacctaatccagaatacaagggaccatggaagcggaaggtttatttactttatactagttataatttcttaaccttttgttcatttgaatatttatgtactcatgacttttctctctcagaaaattaagaatcctaactacaaaggaaaatggaagaccccatggattgtcaatccaggtgagagacatatatctgatcttctgctctttacatattgtcatgtagattatgtctactgtctgttgatgacagttttgagtatttctcttggcagtaagtttacttcatatctgtctttgaattgaatcttgcacgcttgacccagcattaactaaactatcttttgcagagtttgaggatgacccagacctatatgttctgaaacctttgcagtatgtggggattgaagtatggcaggtatcaaacatcataactgggcaaagacgtgtgccccatcacaatctttggttgtatcaaataaattaaaccctatctgaacttactactaccatggtatacaggtcaaagctggttcagtttttgacaacattttgatttgcgatgacccagactatgcaagacatgttgtagatgaaacttttgctgcaaataaggaggtagaggcacggcatgttatgatccatgttgtccctccgtaggaacccttgtctcattttatttctatgctgcaggctgaaaaggaggcctttgaaggagctgaaagaaagaggaaggctagagaagaagaggttaattaacatggaatcttactctctttctgctctggtcgctgttgcctgttaacaattctgaaactgtgaatgtgagccttggaggagttaacaggacgttgcttttccacaggaagcacggagggcacgggaggaaggggagagacgaaggcgggagagggatagggaccgcggcagggaccgatacaaggatagatataaggtacatttcttccattttccatactgggtcattattccctgttgcaattatgttcgtcttgtccttgtcatatagggggcctttttttcttggtttgcagttcaatattccatccccttaacttatcactagccttcttaaggattatcatctgtcaaaagtttcaggctgtaggtccttgcctccctgtaggtcgttgatataaaggattgtatggatattatgacaacaatatatataggcagggccagcacaccaatgaagaatttagaattcatcactcccgtggacgaaattagcgaaaatatgtaccagtgttcatagatcttagctgcatagttttaagtctcaatagtatggcacagtgctttatatatcgaccatatgctgcgttgctgacatttttgttcctttcctctgcatctgcagcgtcataggcactacgactaccatgtaagttacgaagtagcttcatttcttttcttggaacgccctaagctacaccagaaaagctacctgacgttataaattgtttgtttcgtgttcaggacgagctatagatcctgtattcttttgaaatctgcacgatattggatgtctgtctacggagagcgcacgtgcaaaacttgtatgttgtactcacggatgaagctgaacctgtgattttggcgatgggtagagattggccatcgcgtctgtaactaaatttccacgttgcgatgcaatatgagctgtagtactgtcctcgcactactatttaccgtttgtgctgcatatgtgatataaaccttcaagaaacacacacacgaagggtctgaatgagcacggcctttgttgtttgcttcttataaaaaagaactgttttatctgtgtatacttgccctactttttgctatttccaagcagctggacagaaactgactactgtaccag

SEQ ID NO: 15616 - DNA, 1444 bp, Zea mays
  Clone ID: LIB3060-038-D4_FLI
ccctccttttaccttctcccattcacgccccgtctctttcgtggccttccttttccggcggccacaagtgggcgagcggcggcgcccttcaccaggtcttcgtcgggcccttcaccggcgacgagcatccaccagaaacgtggagctcagagcattggtgcctctttcctctttcaccaaggattccggtgccttgtttcacaagacaaaaaaagtctcaagggtcttgattcttgtatgaactcaagatttatggtggatcttggagctgtgggatgctaagcctggtctagctactagattatgaactctctgctgatctaatagcatttctacaagaattcttttgctggaaggtttattagttatttgcaacaatgaaggaacatctaatgcttaatattgatgacctaagcattcttgagcctaacgaggtcattgggacagtcaagaataaatcatctggggaaaccattgcacatccaccctccatggctcatgccattttagcagtgggagaaagcatggtttctgaagcggaacctcttctgcaagtggtggagtgtcgcatttgtcaggaggaagatagtatcaaaaatttagagagtccatgtgcttgcactggcagtctaaagtatgctcataggacttgtgtacaacgatggtgcaatgagaaaggagatgtaacatgtgaaatatgtcatgagccttatgaacatgggtacactgcacctcccagaggccatcctgatgaaactaccattgatataagtggtgggtggacaattaccggtaccgcatttgacttgcgtgatcctaggatacttgcagtggcacaaaaccacatcatggaagctgaatatgatgattattctgccacaaatgcgagcactgctgccttctgccgctctgctgctcttgttttaatggctctcttattgttgagacacgcactgactctaactgatgaagatgacgacgacacttcagcgatgttttcactttttctgttgcgtgctgctggtttcctgcttccgttctacatcatggcttgggcaatcagtatcttgcagcgccgcagacagagacaggaggcagctgctctagctgcagcggaggtggcattcatcctgcagtcaggccaaggaaggggagtgcatttcaccatcgcaccggactccccggccacaccacagcatgaaccaccacaaccataattacatctatctaggagtggctgtggccgccgccgatcgattatttccatgggttacccaaggatttatggctgtctagtgcagaagcagataatttctgcccaagtttcctgtcattaatgtacttgcgtgttcgtgcgagttggctagtgcattttgcatgtcgtcccgggactaacgggatgtgtatataatatattttgtaacagagacatctgggttctatg

SEQ ID NO: 15617 - DNA, 1423 bp, Zea mays
  Clone ID: LIB3060-038-D6_FLI
tgtgattctcctcttcagctcttctcgcccattccagctccgactgcgccggtgggggaccgcgcaccccagcggcgccaggcgtccacgggatggtggttcttgtggctactgccgctcggtggcccgggggaagcacggccgcccgggcgcgcccgccggctgcgaggggcagggcccccatccgcttcgccgccgagcccgagcacaaggcggccacggtcaggtttgaaaaatatagattgttatcatggatgaaaccaataaggcatgacgtcagggcccaaatgtccaatgtaaatgttggtgccggaagttatggaggagatgaagcaaatggccatggagaacatttggatacctctgctaccggagaccccaacaaattagcaaaacaactttcaggatctcgttacctgcaacccgttggtgtcatgctatttctgtgtgccctggcaactagttttttcgttttctttaaaggacaatcatctgcagttgtagctatgctggctaaatcaggtttcaccgcggcatttacactgatttttgtatctgagattggagataagacgtttttcattgctgcactactcgcgatgcaatatcaaagagcactggttttacttgggtcaatggctgctctctccctgatgactattgtgagtgttataattggacggattttccagtctgtgccagcacagttccaaacaacgctacccataggagagtatgctgcagttgctctgctggcattctttggtttcaagtcaataaaagatgcattagcacttcctgataatgccaacgggaaccttcaagggaattcagaaagtggagaactggctgaggccgaggagcttgtcaaggaaaaggtctctaaaaatctcaccagtcctcttgaagtcctttggaagtccttcagtcttgttttctttgctgagtggggagatcgctctatgcttgctacaattgctttgggtgctgctcagtctcctttgggcgttgctagtggagccattgctggacacttgattgcaacagcctttgctattcttgggggagcattcctggccaactacttgtccgagaagctggttggcttgttaggaggagtattatttttgctctttgctgctgcaacgctttttggtgtattctaatctatctgaagaatttgctgttaggtgaaagacttcgcagttccagtttggtctttagattttgaagatgaggggcaaacctaagtaggcttggcacatgctgtatgtagatagacgttatccttatcagagatgatttcgatgtgcccaaaattctaccagacagactggaaactgcatcacatggacagcttacagaagttaccattcaaataatttgattagatttgtttaataagaaggtactgttttgtgct

SEQ ID NO: 15618 - DNA, 1094 bp, Zea mays
  Clone ID: LIB3060-038-G6_FLI
gcagcttctgcttgctctggggggaaggagagagagagagcgagagagagagagagatctagtagagaggctagtaggtggtcctcgaacgaagatgttggcggtgttcagcgggcaggtggtggaggtgccggcggagctggtggcggcgggcagccggacgccgtcgcccaagacgaaggcgtcgcagctcgtggggcgcttcctggccgcgtccgagccggccgtgtccgtgcagctcggcgaccacggccacctcgcctactcccacaccaaccaggcgctcctccgccccaggtcgttcgcggccaaggacgaggtgttctgcctgttcgaaggggtgctggacaacctgggtcggctgagccagcagcacgggctgtcaagcaagggcgccaacgaggtgctcctcgtcatcgaggcctacaagacgctgcgcgaccgcgcgccctacccggccagcttcatgctcgcccagctcaccggctcctacgccttcgtcctcttcgacaagtccaccaactccctgctcgtcgcatctgaccccgagggcagggtgccgctcttctgggggatcaccgccgacggctgcgtcgccttctccgacgacatcgacatgctcaaaggctcatgcggcaagtcgctcgcgccgttcccgcaaggctgcttctactccaacgccctcggagggctcaagtgctacgagaaccccaagcacaaggtcaccgctgtccccgccgacgaagaagagatctgcggtgccactttcaaggtggtggaagggtctactgtcctgacggcgctgcactgatcgatcatcatcaggcggaggcgatgcgacgatacagaactttgtacatgcgtggtgggtgtaacatagtggctggcaacaagccatgctcatgcaaaccgatgaatctatctctgtatcatgcatcgatctcggttgcttgctagtccagactccagactccagacatggctatatatagctggtgctaataaataggagtataatcgtcatatcgatcggttgcgtgtggaatgccaatcaagtgtgtaatctgttccaaataacaaacctatgttcctcc

SEQ ID NO: 15619 - DNA, 646 bp, Zea mays
  Clone ID: LIB3060-039-F11_FLI
gttcctgtgggtgctgcgggaggacaaccgcagaagcgagggcgccgacgccgacgccgcgacgctggccggcggcgggcgcggcatggtggtggggtggtgcgaccaggtgcgggtgttgtcgcacccggccgtgggctgcttcgtcacgcactgcggctggaactccacgctggagagcacggcgtgcggcgtccccgtcgtgtgcgtgccgcagtggacggaccagggcaccaacgcgtggctggtggagaggatcgggaccggcgtcagggccgccgtcagcgacaaggacggggtgctggaggccggcgagctgcggaggtgtatcgacctcgctacctccgacatggtgcgcgccaaggccgccgtgtggagggagaaggcgcgcgccgccgcgtcgaaggcggctcgtcggagaggaacctcaaggcgttcgtcgccaagcagatcgccggcgggaataactaggccgtcagctctcgtgcggtcgacataggttatgggactcgatctacaactgtacttaattaattgttgctctaagcgcatgtgcaagtgcaaacatgtgtgtcaacgtgataatattgatattctctgcaggtgtgtgtctacgtgataatttatataattctcacttaatatt

SEQ ID NO: 15620 - DNA, 1290 bp, Zea mays
  Clone ID: LIB3060-039-H5_FLI
catgcctctcactctccctctccctagcggtctccacatgtgagaaacgcctctctagtaattaagcagcatggcagagaagatgtcgacgctaatcatcgtggttgaccttgattgccgcaagtgctaccacaagatccgcaagattctctgccaactgcaagaccatgagaggatccgcaccatctccttcgacgacaagagcaagacggtcaccatggtgggcccgttcgacccgcagcggctcgcgtgcaagctccgctgcaagggcggcaaggtggtgcgggacgtctacatcgtcgacgccaacggcggcggcggcggcggcggcaagcctcctcctccacagaacgtgccggacgacgggccacccgcgccggcgccggcgccagtgaggagcggcgggaagagcaagaacaagaacaagaacaaggacaagcagcagcagccgccgccgaccgagcggcctccgtcgcctccgccgccgccgccgccggagacagcgccgggacctccgccgcccgaggcgatgatgccgccgtccccggtccacgtccaccaccacccgcctcctccgcctgaccgcgggatggcggcggtggtgccccagccgcagtacgtggaggagaggccgcccagagcggagctggagcctcagccacccatgtcgcccccgcccaaggagatgaggccccccatggacctgcctcccgcgccgccgtcgccgcagccacagcaccacccgccgatgcctgggaacgagaggccgccgccaccgccgatgccgacgccgatgccggcagagtgcgtgatcccgacggtggagatcccgtcgtggccggcggcgccgcccgtggggccgtgcgggtgcccgtgctgcgcgccgtgctaccagggctactacgaaggctgcaggtgctactgctgcggcaggctgtacggcacgaccgtccgcccgttgccagcgccgtgcggggcctacaggggctgccggacgttcagcgacgacgacccgtcggcggcgtgtagcgtcatgtgaagaatggtggtgttgctttggatttgacaggaacatgcatggtgaactaatagctggtgatgcgttgaacgaataaatgtgttcattaggcagggggttgcgttatgctgtccattttgttcgtgtctctccatgactgctctgcacggatcggagcatatgttcttgctgtcaacgtgtgattggccatagctagttactatatgagtgttcagtgctgttcaagacaaatgggatcggattcttcagct

SEQ ID NO: 15621 - DNA, 2175 bp, Zea mays
  Clone ID: LIB3060-040-E2_FLI
cccattcaccgccaccgccaattccataccgtcctccgccacctctgctgagagcgagaagagatggcaggcaagggtgatgggccggcaatcggcatcgatctcggcacgacgtactcttgcgtcggcgtctggcagcacgaccgtgtcgagatcatcgccaacgaccagggtaaccgcaccacaccctcgtacgtcgccttcaccgactccgagcgcctcatcggagatgcggccaagaaccaggtcgccatgaaccccatcaacaccgtctttgatgccaagcgtctcattggcaggaggtttagtgatgcctctgtccagagtgatattaagctgtggcccttcaaggtcattccagggcccggtgagaagccaatgatagttgttcagcacaagggggaggagaaacagtttgcagccgaagagatctcctctatggttctcatcaagatgcgtgagatcgctgaagcttaccttggcagcacgatcaagaatgctgttgtcacggtccctgcctatttcaacgactcgcagaggcaggccacaaaggatgctggggtgattgctggcctcaatgtgctgcgtatcatcaatgagccaaccgctgctgctattgcctatggtcttgacaagaaggcaaccagtgtcggtgagaagaatgtcctcatctttgaccttggaggtggtaccttcgatgtctccctccttacaattgaggaaggtatctttgaagtcaaggccacagctggcgacacccatcttggtggtgaggactttgacaacaggatggttaaccactttgtccaggagttcaagagaaagaacaagaaggatatcactggcaacccgagggctctccggaggctgaggacctcttgtgagagggccaagagaactctgtcttccactgcccagaccaccattgagattgactcgctgtacgagggcattgacttctactccaccatcacccgtgccaggtttgaggagctcaacatggacctgttcaggaagtgcatggagcctgttgagaagtgcctgagggatgccaagatggacaagagcagcgtccatgatgttgtccttgttggtggctccactaggatccccagggtgcagcagctgctccaggacttcttcaacggcaaggagctgtgcaagaacatcaatcctgatgaggccgttgcctatggtgctgccgtccaggccgctatcctcagtggtgagggcaacgagaaggtgcaggacctgcttctgcttgacgtcactcctctctctctgggtctggagactgccggaggagtgatgaccgtccttatcccgaggaacaccaccatccccaccaagaaggagcaggtgttctccacctactcggacaaccagcctggtgtgttgatccaggtgtacgagggtgagaggacccggacccgcgacaacaacctgcttgggaagttcgagctctccggcatcccaccggctcctcgtggtgtcccccagatcacggtctgcttcgacatcgacgccaacggcatcctgaacgtgtctgccgaggacaagacgacggggcagaagaacaagatcacaatcaccaacgacaagggccgtctgtccaaggaggagatcgagaagatggtgcaggacgcggagaagtacaagtcggaggacgaggagcacaagaagaaggtggagtccaagaactcgctggagaactacgcctacaacatgcgcaacacgatcaaggacgagaagatcgcgtcgaagctggctgccgacgacaagaagaagatcgaggacgccatcgacgcggccatcagctggctggacgccaaccagctcgccgaggcggacgagttcgatgacaagatgaaggagctggagagcctttgcaaccccatcatcgccaagatgtaccagggcgcgggtgccgacatgggaggctccggcggcatggacgaggacgctccggctggaagcggtggccctggccccaagatcgaggaggtggactaagcggtttgtgtcaggtctcgtgtgtctgctgcagtggctggctggcccagtcgctgctcgatttatcgtcgtcgtcgcggtgtatccgcgttagaaccttttgttggtgaacaatattatcgtggcacgcgttttaagtaatacggtattctggttcggttt

SEQ ID NO: 15622 - DNA, 785 bp, Zea mays
  Clone ID: LIB3060-040-E8_FLI
agatccttgttgatggccctcatgacattgatcgctgcgcttacgtcactgagaccgtccttgctgcctgctacaaggcgctcaacgagcaccatgtcctcctggagggtaccctcctgaagcccaacatggtgactccaggctccgactccaagaaggtgacccctgaggtgattgctgagtacaccgtccgtaccctccagaggaccgtccctgctgctgtgcctgctgttgtcttcctctctggtggacagagcgaggaggaggccacccgcaacctcaatgccatgaacaagctcagcaccaagaagccgtggtccctgtctttctccttcggccgtgccctccaggcgagcaccctcaaggcctgggctggcaaggtggagaacctggagaaggctagagctgccttcctcgccaggtgcaaggccaactctgaggctaccctcggcacctacaagggtgatgctgccgccgacaccgagagcctccacgtcaaggactacaagtactgagttgcttctctttgcgtgcccgttttggaactcctgcctacgagctaggttgcggagtgtggtttgctcgttagagcttattttcggacatccaaaaaacatgcttcctatgtgggatgatggttatctttatatttgtatgttaattagtctctttgctgttaaatttcgtgtaagttggtcctgccgatggagaatcgagcagctccctttttttgttctatcaactatgctgtaattctggctatgtatcggcaaaaacaattctat

SEQ ID NO: 15623 - DNA, 804 bp, Zea mays
  Clone ID: LIB3060-040-G7_FLI
ggccaaccttcgtcacccctcgtagcttctttaactggggcaaaagcgcgagagaaaccgagacgccgccgccgcagctgcagttctcctaccacgacgtcgagccaccgttccccatgtcgctcgtggcaaaaacacacctcagagaccgtgagctcaggtgctgctacaaggccaccgtggacggcttcagtgctacggacttccaccggcggtgcgacttcaagggcccctgcgtcgtcgttggctacaccgacggtggcttccgtttcggcgggttcagcccggaggggtaccgaagcacggacgactactacgacacgctggacgcgttcctcttctactgggcggaatctacggaggtctcggcgccgcccgtggtgctgcccaaggtgggcgggagcggcgcggcgctgttcgactactcccgcggcgggccacagttcggcgccgacggcctgctcatcggcccgccgctcaccgccgtgatgggcgtgttcactggacccgactccagcgccggcgtcggcgacctccgcagcgctcgctcgcggcttggcctgtcgtacgcgaggcggccggacgggaaggagagcctgttcggcgacgagggcagggcccagctcgtggaggtgctcgtcttctgcaatccgcagatcgcgagcctgtactgactgctcattgttactagcttgcagctagagtctgtataaactattcattatcgcttaatttggagtctaaaacataccaataataacaatgtaaaattgtgggtacggttaattagttgattattaagtt

SEQ ID NO: 15624 - DNA, 972 bp, Zea mays
  Clone ID: LIB3060-041-A4_FLI
gcgtcgccagcaggtgcgtcgacgccgcgaagctcgccggcttcgcgctcgccacctcggcgctcctcgtctcgggcgcgagcgcggagggcacgcccaagaggctgacctacgacgagatccagagcaaaacgtacatggaggtgaagggcacgggcacggcgaaccagtgcccgaccatcgacggcggcgtggagtcgttcccgttcaaggccggcaagtaccagatgaagaagctgtgcctggagccgacgtccttcaccgtcaaggcggagggcatcgccaagaacgccccgcccgagttccagaagaccaagctcatgacccgcctcacgtacacgctggacgagatcgagggcccgctcgaggtcggctccgacggcacgctcaagttcgaggagaaggacggcatcgactacgccgccgtcaccgtgcagctcccggggggcgagcgcgtgccgttcctcttcaccgtcaagcagctcgtcgccaccggcaagcccgagagcttcggcgggcccttcctcgtgcccagctaccgtggctcctccttcctcgaccccaagggccgcggcggctccaccggctacgacaacgccgtcgcgctccccgccgggggcagaggtgacgaggaggagctccagaaggagaacatcaagaacgccgcctcctccaccggcaacatcacgttgagcgtcaccaagagcaacccggagaccggcgaggtcatcggcgtcttcgagagcgtgcagccgtccgacaccgacctcggggccaaggcgcccaaggatgtcaagatccagggggtctggtacgctcagctcgagtgattcgagtgtctaactgctaggtgtccgaccgccgtcatggatcttgggaaggtgtatgtataccatggaaaactttggagagcagaggaggaatcgtgtatgtaatgtacttgttaatgcaaattcgggctgtcgctttttt

SEQ ID NO: 15625 - DNA, 1282 bp, Zea mays
  Clone ID: LIB3060-041-B7_FLI
cacaccaccaccttgggcgccgggcccttccatgctttccttcgctcgtcgacaagaacaagatatatagtgctagctgttctgtgctgcggtcgtcgtcttcttatataagacgccaacgacgcatgtcctcggagcctgccgaggccaggatatagaggcgtcgccgggccgggccactgcacggtcggcggatatggctgtcgaagcgcacagcctcctcttagcaggagggcacaagcaactcaccagcgcgggatggccttggacgaccggcgacgaagctagatgcgcgacggcgcgaccgagccaccagcaggctttccagctccagcaggcctcgtgtgtgggcgtgggcgtgggcctgccggcggcggctccggtctcgtcggccgcggcggcgccaccagcgccgatgatagcgcagcagtacgctgctggcggacggctgttcgtgggagacgcggcggagagcggcgtcacgttcggaggaggaggtgcggtgcagcaggaggcgccccggaagcggaagcgcgccgagcaggggcagacgccgccgccggttcttgggaccggcgcggccgacgtggcggcgcagtttcaacagcagctcgtcgacgtcgaccgtctcgtcctccaacacgtaagtttacctttgatgagcccggcggtgccggccaatgcctcgatctgcgcctgcggggccggggttgtctagtacgtgcgtcgtcatcaacgattcaacgtgcactgactgtgactgatggagaggtggcgtgttaatttttgcggcggctttgaacaattgcagaccgccaagatgtgggcggggctcaccgagcagcggcggcggcacgcccggcaggtcgtggccaccgtggaggccgccgcggcgccgcggctgcgcgcaaaggaggaggagatccagcggatgcggcgcgtcaactgggcgctcgaggagcgggtcaagagcatgtacgtcgaggcgcacatgtggcgtgacttggcgcagtccaacgacgccgcggtcaccgcgctccgcggcgagctgcagcaggcgctcgacgcccagcagacgcgccgccgcgccgacgacgccgactcgtgctgctgcggggagaacgacgtcttcatcaccggagcaggcgcggcggagaacgaagaggaggccgggacgtcgtcgtcgtcgggccacgtcatcagggcgtgcgccgtgtgcggcgacaacgcggccgacgtgctgctgctgccgtgccgccacctctgcgcgtgcgcgccgtgc

SEQ ID NO: 15626 - DNA, 973 bp, Zea mays
  Clone ID: LIB3060-041-C4_FLI
gcagcgcatgcaggggtagcaatggcgggggagacgaagaagggcctggtgctgctggacttctgggtgagcccgttcgggcagcgctgccgcatcgcgctggcggagaagggcatcgcctacgagtactcggagcaggagctgctgggcggcgccaagagcgacatcctcctccgctccaacccggtgcacaagaagatccccgtgctcctccacgacggccgccccgtctgcgagtccctcgtcatcctcgagtacctcgaggaggccttcccggaggcctcccccaggctgctccccgacgccgcctacgcgcgcgcgcaggcccgcttctgggcggcctactccgacaaggtctacgaggccggcacgcggctgtggaagctcaggggcgacgcgcgggcgcaggcgcgcgccgagatcgtgcaggtggtccggaacctcgacggcgagctaggggacaaggccttcttcggcggcgaggcgttcgggttcgtggacgtggcgctcgtgcccttcgtgccgtggctccccagctacgagcggtacggggacttcagcgtggcggagatcgcgcccaggctggcggcgtgggcgcgccggtgcgcgcagcgggagagcgtggccaggacccttcacccgccggaaaaggtggacgagttcatcaacctgctcaagaagacctacggcatcgagtagtagagcggactactactagcagaggagatggtaccggccgtacgtacgtggctgccatgcagtttttgtttcggtttgtttaaacgggactccatgaatggatggaactcttcttgggctccgtgtgctacatacacatctgtaaaggtgaactaaaatcacggtaaaaactcggaaattagtttgtaaagggtccagcccccctcctttataaatagagaggtatacggctgatttgtaatcatcaatcgaatcaatacaacatctatttcgc

SEQ ID NO: 15627 - DNA, 935 bp, Zea mays
  Clone ID: LIB3060-041-H11_FLI
cagattcttgccaagatcgtggtcggctgcgacggagtgaactcgccgatcgcgaggtggatgggtttctcggagccccggtacgtcgggcacatggcgttccggggcctcgcggagtacgccgacggccagccgttcgagcccaaggtgaactacatctacggccgaggcgtccgtgccggctttgtccccgtctccgcaaccaaagtctactggttcatctgcttcaacagacaagatccagggcctaagatcaccgaccccacggcgctcaagaccgaggcgctggagctcgtccgcggctggccatcggacctcctggcggtgatgcgcagcacgcccgagggcgccgtggtgaggacgccgctggtggaccggtggctctggcccgggctggccccggccgcgtcgaggggcggccgggtggtgctggccggcgacgcgtggcatcccatgacgcccaacctcgggcagggcgcctgctgcgcgctcgaggacgccgtcgtactggcgcgccgcctcgccgacgccggcgcggacggggcccaggccgccgccgccatgcgcgcgtacgaggcggagcggtgggcgcgcgtgttcccgctcacggcgcgcgcggggctggtgggcgcgctcgtgcagtgggagaacgcggcggtgtgcgcggcccgcgacggcgtggtcatccccaggctcgtcaggctgggaccgttcctggagcacaccaacttcgagtgcgacctgctcgaaccggcgccagagtcgtcatgacacctgcacactagtttctccggcacaatgtaactagtagtatattgattaacctcttcttcgaaagatcgattaacctctgattgacatgtactcccactatccgaaaatagtatttattttagggtgaatttatacattatttaatatatgtgaatttatac

SEQ ID NO: 15628 - DNA, 1459 bp, Zea mays
  Clone ID: LIB3060-042-D1_FLI
ttctcttcaagtgccactcccatccaccacaaggcttggcttggtgggaagaagacaaacgccggcacgcgcacgcagacacgatggcgatctgcagcgcgcacactaccacctccctgcgctccccatgcacgaccgtctcgaacgcaggtctgaggcagaagcaagtcatcttcgtcaccagcaacaggaggagcggcggcggcaggaggcacggaggggcaaggagcttccaggtctcgtgctccgtcgacaagccggtggtgattggcctggcggcagactcagggtgcggcaagagcaccttcatgcgccggctcaccagcgtcttcggtggcgccgcggagccgcccaagggcgggaacccggactccaacacgctcatcagtgacaccacgacagtgatatgcctcgacgactaccattccctggacaggaacggcaggaaggagaaaggtgtgaccgccctcgaccctagggccaacaactttgatctcatgtatgagcaggtgaaggcgatcaaggaaggccaggcagtcgagaagcccatctacaaccatgtcactggcctcctcgaccctccggagcttatcgcgccaccaaagattttcgtcattgaaggtctgcacccaatgttcgatgagcgagtgagggacctcttagatttcagtatctacttggacatcagtgatgaagttaagtttgcatggaaaatccagcgggacatggcagagcgtgggcacagccttgaaagcatcaaggccagtatcgaggccaggaaaccagattttgatgcctttattgatccgcagaagcagtatgctgatgctgtgattgaagttctgccgacccagttgattcccgacgacaacgaaggaaaggtgctgcgtgttaagctcatcatgaaagaaggggtgaagaacttcaacccggtttatctctttgacgaaggatcgaccatcagctgggtgccttgtggaagaaagctcacatgctcttaccctggcatcaaattttcctatggcccggacacttacttcggaaacgaggtatctgttctggagatggatgggcaattcgacagactagatgagctcatctacgtggagagccatctaagcaacctttcaaccaagttctacggagaggtgacacaacaaatgctaaagcatgcagacttcccaggtagcaacaacgggacaggtctcttccagaccatcattggactgaagattagagacctctatgaacagattgttgctgagagggctggtgtaccagcggaagcagcaaaagtttaacgatctatgcattcagatgtcctaaaactacagctctccgaactcaatgggagtaacaaccttcgcatctgttgggatatatggcgagctaggaggtatagaaatgtcattgcagaactcaggaaaacgtgcaatggaatttcttgaaatccctcttg

SEQ ID NO: 15629 - DNA, 817 bp, Zea mays
  Clone ID: LIB3060-043-B3_FLI
ctggcttctcctccccctcttaccaagtcctcctcgggttagggttccttagggttttgtggaggggcgatggcggcggctgatgtggagtaccgttgcttcgtcggcgggcttgcctgggccaccagcaacgagtcgctggagaatgccttcgcctcctacggcgagatcctcgactccaaggtcatcaccgaccgggagacggggaggtctcgcggcttcggcttcgttaccttctcctccgagaactccatgctcgacgctatcgagaacatgaacggcaaggagctcgacggccgtaacatcaccgttaaccaggcccagtcccgtggcggtggcggtggcggcggtggctacggcggcggtcgcggcggcggcggctatggtggcgggcgccgtgacggcggttatggcggcggtggcggctacggcggtcggcgcgagggtggtggcggcggctacggaggcggtggcggctacggcggtcggcgcgagggtggtggtggcggctacggcggcggcggcggcggctggagggactgatgtgtgggcccatcctggcttcggccgagttatcttatctatctatagtatcgtgttaccgttcgcttctgtcaccgtgttagtgtccgttctacctttggattaggtgttggtacccctgttgttccctttgtttgctcccgctatgaaacgagacgagagaagaatgagcaaggtttttgttcgcagctatttttgtccaatgatattgatatgttgttcccctgtctgttgctggattgttgtgtggctatacaaatatcaacaaactgtt

SEQ ID NO: 15630 - DNA, 1278 bp, Zea mays
  Clone ID: LIB3060-043-D10_FLI
taatatttcagaacaagtccgaacgaactgaaggagaggaggaggaggaggaggaatggcggacgcagccagaggcctcgggtcttcgtctctcccggtggctaacgtgcaggcgcttgcggagtcttgcaacgacaacggagccgatgcgccggtgcccgggaggtacctcatcaaggatcctagcgccgaggaggtcgtagccgccggcgacagcgcctgcgcgattccggtcatcgatttccgcaagctgctcgatccggggtcgtccgaggaggagtgcgccaggctgggagccgcgtgccaccactggggattcttccagctcatcaaccatggcgttccggccgaggtgactgggaacctgatgaaggacgtagctgggttcttcaggcagccgctggaagccaagaaggagtgcgcgcagcaggccggcagcatcgaaggctacggccaggccttcgtcgtgtcggaggaccagaagctggactgggcggacatgctcttcctcatcgtgcggccgagggaggccagggacatgcgcttctggccgacgcgccctgagtccttcagggattccgtggacgcgtactccttggaagcttcgaagctagcgtaccgcctgctggagttcatggcaaggggcgtgggtgccgacccggcgtcgctgcagagcatgttccaagggcaggtgcagggcatgcgggtgaactactacccgccgtgccagcaggcggcggaccaggtgctgggcctgtcgccgcacagcgaccccaacgggctcaccctgctcctgcagatgagccacgacgtgcacgggcttcaggtcagcaaggacggcaggtggttccccgtgcaggctctccccggcgccttcgttgtcaacgtcggtgacgcgctcgagatcgttagcaacggagcgttcaggagtgtcgagcacagggccgtgatacacccgaccaaggagcggatttcggcggcgctgttccacttcccggaccaggatcggatgcttggtcctctgccggagctggtgaaggaaggcgacacagtgcggtacgcaacgacgacttaccaagagttcatgaagcgattcttcgctgcaaagctcgatggaaagaagctcatagagagattcaagctacagtagtagctacgacctctcagctcgaacaaaaaataaattcacttgtaactattaataatggccagttattgaacggtttgcttgtctaaaatgttaacgcgcgcaacctcgggtatgcattactgtgttcc

SEQ ID NO: 15631 - DNA, 1004 bp, Zea mays
  Clone ID: LIB3060-043-D4_FLI
cacgcgcgcagtcactcacgcacgcccccagctctctccttctccctgctcgctcgctcgccatggacgctccgagcagctggaagagtcctgcgcgcgccaagtgaccggagaagctgcgagatcagagtagttgcttgccgctcccgtgccaccaaattagattggacgtagctagcagctagctgagccgtagtgcgtagcggcagctaggctgctagctcgatcgttatagctgcgtactagtggtgtcgcagcagaagcagtagccagcttcagtagccgatccggtggtaaaagcaactttttttggacatggcggcggagggagccccggtgctggtgaggcatgctggcggcgtggaggagctgcggcagctcccgccggggttccggttccgccccacggacgaggagctcgtggtgcagtacctccggcgcaaggccttgggcgcgccgctccccgccgccgtcatccccgtcgtccgcgacctctacagcctcgacccctgggacgccgtcgacgtgccggccgcccctgatgcgagcagccaaggcgagagatacttcttcgcggtgcggccggcgggcggcgtcggaagtgctaggagggcgaccgcgagcgggcggtggaggccggcggggaaggagaagccggtggccctgccccgcccgtgcggcggcgggagcctcctggtgggcgtgaagagggcgatggcgttcgttccccggcggaagaagaagaaggcggcggcggcggcggccctggcgatcggctgggtcatgcacgagtaccgcctcgccgcgccgctgcacaagcacggctgcagcctggcccaggctcagggagagtgggtcgtctgccgcgtcttccagaagggcagcggcaggccgaggaggaggaggcaacgaccggtgtcaccgtcaccgtcgtccgctagcagctgcgtcacggacgggtcgtcgtcgtcgagctcggacatggacgaggtcagcagctagct

SEQ ID NO: 15632 - DNA, 904 bp, Zea mays
  Clone ID: LIB3060-043-D5_FLI
ccgccaccaaccgatccggcgccctccagcatggcgggggcgggggcgaaggcggcgggagccctggctctggcgctcgtgctcgcgctcgcgggggccaactcggagggcgacgcgctctcggcgctgcgccggagcctcagggaccccggcggcgttctgcagagctgggaccccacgctcgtcaacccctgcacctggttccacgtcacctgcgaccgcgacaaccgcgtcacccgcctagatcttggtaatttgaacttatctggtcatctggtgcctgagcttgggaaactggagcatcttcagtatctggaactttataagaataacattcaaggaacaatcccttctgagcttggcaatttgaagaatctaataagcttcgacttgtacaagaacaacatttcggggacaatacctcctgcccttggaaagttgaagtcccttgtattcttgcgtctcaatggcaatcatttgactgggcccatcccaagggaactcgctggaatatctagtctcaaagttgttgatgtttcaagtaatgatttgtgcgggacgattcccacgtctggaccatttgagcatattcctctgagcaactttgagaagaacccgcgcttggaaggtccagagctacaaggcctggccatatacgacaccaactgctagagggcaccacgaagaaaagaactgctagaaagtaacgagcgaacaaggttaccagaaattgggcgatatagatttactaggtctggatctgtaatcctccctgcatagctcttattcgtaactcgctgtcggcacgaaagttggtgtgtgttttagcagaatgctttctgtccgtgaaagtaaacttgaaactgcttattacgactgaaatgatattgtcgttcccccctgc

SEQ ID NO: 15633 - DNA, 2055 bp, Zea mays
  Clone ID: LIB3060-043-E5_FLI
cagattttggtggggaggttgagcgtgttctgaacatggtggaaggagttcttctagtggttgattctgtagaggggcctatgccacagacaaggtttgttctgaagaaagctctagaatttggacatgctgttgttgtagttgtaaacaagatcgacagacctactgctcgtcctgagtttgtggtgaattcaacatttgaactatttattgaattaaatgcaactgatgaacagtgtgatttccaaacagtctatgcaagtggaattaaaggaaaggccagtctatctcctgacaatttagctgatgacctaggacccctttttgaggcaattcttagatgcataccagagccacgcgttgagaaagatggtgccctgcaaatgcttgtatctaatactgaatatgatgagcacaaaggaagaattgcaattggacggctgcatgcaggagaacttcagcgtggcatggaggtcaaggtttgtacaccagacgatgcttgcagggttggtaaagtgagtgagctttttgtttatcagaacttcagccgtgcccccgttgaatctgttagtgctggtgacatttgtgctgtatgtggaatcgatgatatcatgatcggggaaactatagctgataaagttacaggaacaccattgcccactatcaaagtggaggagccaacagtcagaatgtctttctccatcaatacatcaccttttgttggacgggaggggaaatatgttactagccgaaatctccgtgacaggttgtatcgcgagctcgaaaggaatttggctatgaaagtagaagacggggaaactgctgatacatttcttgttagtggcagaggcacactacatctcacaatattgatagaaaatatgcggagagaaggatatgaatttatgattggacctccaaaggtcataaacaagacagtcgatggaaaactactagagccttatgagatagctgctgttgaagtcccagaggagtccatgggatcagttgttgagcttttagggaaaaggcgtggacagatggttgacatggaagctaacgggacggagggaacaacattgctgaaatacaagattcctaccagaggccttattggacttcggaatgcaattcttacagcttctcgtggcagagctatattgaatacaatctttgacagctatggcccatgggctggagatcttagctcacgtgatcagggatccttggttgcttttgaagatggaagcactacttcttatgcacttcttaatgcacaagaaagaggtatgttgtttgtccaaccagggcaggatgtttacaaaggtcaaattgttggtatccatcagagacctggtgatttagcaattaatgtgtgcaagaaaaaggctgctacaaatgttcgttccaacaaagaaactacagtggttcttgatgaacctttaagctacagtttggatgactgcatagagtttatccaagaagatgagatagtggaggttactcctgcaagcatccgtatgtgcaagaacccaaaagtttcgaagaaaaagtaacataatcgcatccatttgtcgtcaatgcatcttctacacatagaagctgcatgctccgttgccaggtctcgtatgagtgacggctgcacggcgtcctcaagtcagtaatcaggatatttttggtggtctacagacaaagactaaaggtcgccagattaagatagaggattatatggcagttttgtgatgaataaatcagccgatacctggagtagtattatttggccacggataaggcgggcactgtttctcatctacttctccctgttctttttatttgtcgtgttttagttcaaaaatgaactagacgacaaatatttgagaacgaagttagtattacacatatattgtgtaggtcatacgtaggactataggcattgtacacgattctttcgacgctagtaaagactggaagaaagctttagcaaatggattagcacacaactgctgctacagactcttatttatttgtaattcaagccagtctataagttgcaac

SEQ ID NO: 15634 - DNA, 1574 bp, Zea mays
  Clone ID: LIB3060-044-A8_FLI
cccgctccttgctcgcctccacccgcggccaccaccgccctgcggcccccgccgcttgctagcctccaccgcgccgcgagtcacgccgttcatgcaccggctggtcctggagcacgggaggacgagcatgtcctggttcggccccagccccaaggtgaccatcgtcgacccggacctggccaaggacgtgctgtccaacaagttcggccacttcgagaagctcaaggtcccggcgctgtccaagatgctgggctccggcgtggccagccacgagggcgagaagtgggtcaagcaccggaggatcctcaaccatgcgttccatcttgagaagctcaagcgcatgctgccggcgttttctacgtgctgcgaggagctggtgagcaggtgggcggcggagtcccttggctccgacggctcgtgcgagctggacgtctggccggagctgcagaacctgacgggagacatcatttctcgcaccgtgttcagcagcagctacagcgaagggagaaggatcttccagctacaggtcgagcaagcttcgcttgtcatgaccaacattcggaagatcatgatccccggctacatgtacttgcctaccgcgaacaacaggaagatgcgcaggaacaacagggaggtggagtcaatcctgcgagagataatcgggaagaggatccaggcgatggaacaaggcgagggcaccaaagacgacctggtgggtctactgctggagacaaacatgagagacgacatggggatgacgatcgaagacgtgatcgaggagtgcaaggtgttctacttcgtcgggatggagaccacgttggtgctgctcatgtggacgatggtggtgctcagcatgcacccggagtggcaggaccgcgcgagggaggaggtgacggctctgttcggcagggacgacaagcccgagtatgacggcctaagccgcctcaaagtcgtgaccatggtgctctacgaggtgctccgactgtacccgccggccacctccgtcgtccgacaaacgtacaaggagatggaggtcggaggcgtcacctaccccgccggcgtgatcctggagctgcccgtgctgctcatccaccacgacccggacatctggggaggcgacgcgcgcgagtttaggcccgataggttctccgagggcgtgtccagggcctccaaggaccccggcgcgttcctcccgttcggttggagcccgcgcatctgcatcggccagaacttcgcgctgctggaggccaagatggcgctctgcatgatcctccagcggtttgagttcgggctcgcgccatcctatgctcatgcgccgcataccatgataaccttgcatcctatgcacggtgcgcagcttaagctcagagcaatatgatctcgacacgatgggtgtcccatcgttgatgccattgttatgtataaccttacaattcagataggcattcggccctgttaatgtctgaaataagtatcttcgcgttggcattttgtaatgtgcttttcacgtaccattggtgctttattgccttttgtatataaacatgtggatatatgtaactcatacattacac

SEQ ID NO: 15635 - DNA, 560 bp, Zea mays
  Clone ID: LIB3060-044-E11_FLI
gtgaggtacctgatcgagagcatccatcatcgctcagatttgcggaagaagatggcagagaaatctcgtaattcagtaccatccggctcccaggggcaaactgcaaagccaaggccattccccgtgcctgatgggataccgaaaacacaggaagagctcaccgaagaagaggaagcgttgatgccagagtctccatacacaaggttgctgagaaggatgggtagataccctgaatggtacaccccacgccctgatcatgagactgactgaatcaagtcatctaccatccaggtgtcccttttggaagttttgcagcatgataatctgaagctgaagctcgttttatggtatgtggtaatattttagtgttgcacctatgctgctttgcagattagacttgtccttttctacttattaatgaaaaccggtgtgtgcggtttatgctgtaaatacctggagtgttcagaatatgttttgttcgaggttctgtgtactgaagtacggagtactaatgaatttccttgtacataacatcgaataaaatcactgggttttacttt

SEQ ID NO: 15636 - DNA, 1660 bp, Zea mays
  Clone ID: LIB3060-044-E7_FLI
gtgctctgttctgctgcgcctgcggggcttcagtgcagcgcgtgcgccgtgcggtgccgcccgccagccaccctcgccgtcgggtcgccttgccacgtcgccgcccgcgcccccggcccaccacctgaggccggtcgcccatccataacgcccgcagtccagtccccaccaggcaccagcccacatctcttctcccacagaacagactcccacgccgtctccgccccctccccttcacggctttgcgcgcgtagatcggaggaatggtgagcgcgtcgagcctgctgctcccgtcgtcggtgcgggacctggcctcctgcgtctccgacggcgccgtccgcgtcgcctgcaccaccccggcgtccacgttcacggtctcctcctcctcgccgtcgccgccgtccacgctctccgtcgccgtctcctaccgcgccacgccgcaggtcgcgtcgtcgccgccgctcctcctgcgcctcacctggtcgcactccccgcgcgggcagccgacgctctccttcgcggggcccacggcgtcgtcgcccgccgtcctcctccggcgccgcaggggcacctactgcctcccctcctcctccgcacacgccccgccgctcgcgatcttctgggacctcacaggcgccaggtacgacggggcgggctcgtcgtccccggagccggtctccgggttctacgtggtggccgtcgccagcgccgaggtggtgctggccgtgggcgacctggcggcggggttcgtgaaggcgaagctggagggccagatcccgcgggcgcgctccatcctggccgtgtcccgcgtggtcgtcgtcgcggcggcgggtccgggcgccgcggcgcacacggcgcgggtgcggttcgcggagggcgcgccggagcacgaggtggccgtgggctgctgccgcgggctgggcggccggcccggggaggaggacgagctgtgggtcagcgtggacggcaagcgcgccgtgcacgcgcgccgcctgcgctggaacttccggggcaaccagacggtgttcgtggacggcgcgcccgtcgacgtgctctgggacctgcacggctggtggttccgccgcgacccgccgggctgcgccgtcgtgatgctccgcaccaggagcgcgctcgagagcaggctctggctcgaggaggaggccagggcgcccgggttcgcgctcctcgtgcaggccttcaggacgccgccttgatcttttttttggccttggtgcttggtggtggtggtggatgccatggataagttcgtttgcactttgcagccccctgattgtcgatgaagttgagcagatgctctgctgccagtgcctgctgcttcatgtttttcctctgccttttgacctggggatctggtgcctggtgtttagcaatccaaattcgaatccaacagggcaacggtttgcgttgacaatttagatgtttgggacgacaccatggatttcttcatgtggtttatggtatacaacaaaaaagaggagagattggtttgtgctgtttaggtcttgatcaagcactaactgcttgctttcgagtacacctagagaaattgatgctccgtatccgactgtatcttgttgctcttcactattttgtctattgatggttgcagcctgtcataatgaagggccattttggttcc

SEQ ID NO: 15637 - DNA, 1369 bp, Zea mays
  Clone ID: LIB3060-044-F10_FLI
cgcgtttggattttgctcctttgctcccttctgaaagggtcaccatgtctgcctttgtggggaagtacacagatgagctgatcaagaccgccaagtgcctcgcaacgccgggcaagggcatcctggcctccgacgagtcgacgggcaccatcggcaagcgcctgtccagcatcaacctcgagaacgtggagtcgaaccggcaggcgctccgcgagctgctcttcacggcgcccggcgtgttcgactacctctccggggtcatcctcttcgaggagacgctgtaccagaagacctccgacgggaagccgttcgtggacgtgctcatcgcgggcggagtggtccctgggatcaaggtcgacaagggcaccgtggagatcgcgggcaccgacggcgagaccaccacgcagggcctcgactccctgggcgcacgctgcgccaagtactacgaggccggcgcgcgctttgccaagtggcgcgccgtgctcaaggtcggccccgcggggcaggggcagccctccgagctcgccgtcaggcagaacgtcgagggcctcgcgcggtacgcgctcatctgccaggagaacgggctggtgcccatcgtggagcccgagatactcaccgacggcggccacgacatcgggacctgcgccgccgccacggagcgcgtcctcgccgccctctacaagtcgctcagcgaccacaaagtcctgctcgaggccacgctcctcaagaccaacatggtcacccccggttccgatagccccaaggtctccgcggaggtgatagcggagtacacggtggcggcgctgcggcgcaccgtgccgccggcggtgcccggggtggtgttcctgtcgggcgggcagagcgaggaggaggcgacgcagaacctggacgcgatgaacaagctggaggtgctcaagccctggacgctgtccttctccttcggccgcgcgctgcagcagagcaccctcaagaagtgggtcggcaagaaggagaacgtcgccgccgcgcaggccaccttcgtcatccgctgcaaggccaactccgaggccgcgctgggcaagtacgccggctccggcgccggggacgccgccgcctccgagagcctgtacgtcaaggggtacaagtactaaagccgccactgctgactgtgccgacccaatccttgtgtcccacgtcgcagcgctcggactgtgccgagatatatgtgctacactagtgtttgtgtactaaattctcttctcttcgtccggctcctatttgagcaaaacatacacacacacacacacaacacgttgatctatttgcagctcgcaatgtacagtattactggaacataagtgcaatatatatagatgtgaccatcttactt

SEQ ID NO: 15638 - DNA, 2115 bp, Zea mays
  Clone ID: LIB3060-044-G7_FLI
cgtagtgcggagctccagtgaaggaaccaaacagcgcaacacacgaacacaccaggcggcaggctccaccccgtccttttcctgccttttccccccgtcgagttaatccatccagtcgccaaaagctttgctaaatttcacgtgtctcgcctcgagtcgtccctaatccgacgatgccttgttctactcctaaaaaaacccaaagatcctgactttctcttgctgctagcctcccttttcccttctcccttaatcgcactgttggaagctcttcgctgtcacccccacccacctccggcgctcttttttagcattttccttgggctctggactccaaaatcccagccttttgtttgcttctctgtctcctgctgattggtgtccccgggtccaggactcttgatttgctcctcgcgggggttcggtcccatggcggcagctgcgctggcaatggcagagcaggtggtggccgagctccgagtgaggtgtgagacgccgccgtcgatgctgcgcgaggtggccgtggagatggcccgcgagatgggcgcggggctggagaaggacggcgggagcagggtcaagatgctcctctcctacgtcgataagctccccacagggagagaggaaggattattctatggattggacctaggaggaacgaatttccgcgtcttgaaagtgcaactaggtgggaatgcgaagcatgtcgttgaccgtgactccagagaagtcggcattccgccacatctgatgtcagggagctcctcggagctttttggtttcattgcttctgaattggccaagtttgttgacgatgatgagaagtgcgctaacatttcgaatggcaagaagcgagaaatagggttcacgttttcgttcccagtgaagcagcgttctgtagcttccggtacgcttgtcaagtggacaaaggcattttccattaatgatgctgtaggcgaagatgtggtggctgaactgcaaacagccatggagaagcaaggtctggacatgcatgtagctgcattgattaatgatgctgttgggacgctggcgggagcaaggtactacgacaaagatgttgtcgctggtgtaatatttggcactggcacaaacgcagcatatgttgagaaggcaaatgctattccaaaatgggagggtgagctgccccattcaggagacatggtcatcaacatggaatggggtaacttcttctcatctcatctccccatcactgaatatgatcaagaattagataaggagagcttaaatccaggagaacagatttacgagaagttaacgtcaggaatgtatttaggtgaaattgtaaggagggtgctccttaaaatatcattgcagtccgccatttttggtgatattgaccacactaagcttcaaacccatttccttctgcggactccacatatttcagcaatgcaccatgacgaaacatctgatctgaagattgtggccgaaaattttgaacaaaacctagagattacaggcacatccttggaggctcgtaagctggtcgttgaaatccgtgacattgtggcgacaagagcagcccggctggctgctgcggggcttgcagggatcctcatgaagatcgggagagatcacagcgtcgaggaccaacggtcagtcatcgccatcgacggaggactgttcgagcactacaccaaattccgccggtgcttggagaccacactgggtgagctgctaggagacgaggcgtccaaggcggtggccatcaagcatgccgatgacggttcaggaataggtgctgccctgattgcagcttcacagtctcagtacaaaaacgacttagtggccgtcaagcatgcagatgacggttcaggagtcaagtatgcagaagacaagcgtgcagatgacggatcagaaataggtgctgccctgattgctgcctcgcaatctcagtagagagatgtccgagtggtatagaggtagcaagtagctatgatttgtttccaacgtcttaactgtccagcgtctgcagtttagcatgctagagctggatgcgatctgtaaccaaaaccaggcttggccaactggctgttcataattccaataacagcagggttgcagatgtctcct

SEQ ID NO: 15639 - DNA, 543 bp, Zea mays
  Clone ID: LIB3060-044-H10_FLI
gctacccggcaccaccaagagccatgtacggcgaccaacaccacaatcacctcgctgctgctggtggctacacttcctattccaccaatgctgctgcaggtaaccatctcttgtaatggccggccgatcgatcgatcgagagctcaacaattcaagtgtcctgctatagctagctactacgacgtcgtgctacgatcgtatcggtttcggttcgttcctacaaatatagcctagagatagagtgtctctgtctgtgtgatcgatggtattgttatgatcatatagaaaagaccagtgtagcatgcatatgcacttgttgcaatgtttgctttcaagaagaaactggagggaggagaggctcggtttggatgctgatcatgcacaaatattactagtgtctacagctgctacttcattatagctgctagcatggtcacttgttttatgtttcttcttctgctgcttttttatctgatccctttgttagggtttactactactatcgatcatttggggtcaagtaatgtgtactggtgtacgttc

SEQ ID NO: 15640 - DNA, 193 bp, Zea mays
  Clone ID: LIB3060-045-D10_FLI
aaggaaatcttttgatcaaaatatgacacagaagcaagcggatttattgaaaagggagaaagatgttaaatctttggaggctaaactttctaaaagtgagcaggcattgaatgataagaagaaatcaatggaaaacttgcagaatgatcttgatgccaaatctaaggctctgaagagttgggatgaatcattg

SEQ ID NO: 15641 - DNA, 1691 bp, Zea mays
  Clone ID: LIB3060-045-D3_FLI
cctggaaccaggatagggacagagacggagccacggtcgcacagagcagtcttagctccggccacggccaccgggagtagctctggccatgaggacctcaacggctacctgtgctatcctccctccgcctacctgctcctcccgtagtttaccgctccgcagcttcatcggtctccggtggtccgccccccgtttccaggttagggagcgagctggtgcgtccgtagcggttgtcaatggcaagccgggatgcagcttcagactcggagtacctactttaaatgtttgtcaatctcgccaaaggtctgttgtcattagaaatgaacatgctcaaaatgctgaccttccacgaaaatattcaaaaagagagaagaaaccatttcctatcccagtgctggagttaaggcgccgagcaaaggagaggatgaaggcagcacaagggaaaccgaaacaaccaatgcctccaccaaaaaacggaatgttagtgcgtagacttataccagttgcatacaaagtgtacaatgcaagaattttgctgatcaacaacttgaagaggcttatgaaagtagtaccagtaaaaggctgcaagtattgcagcgagatacatgttggatctgttggacatcctttccgaacatgccgaggaatgtcatcagatcaacgtagaggagaacatgactggggaagtactctagtggaggcagttttcttacccgtcgaagcctatcatctagaggaccgtctagggaatcgcattcctcatgatcagaggtttactgtaccccgcattcccgctctcgtggaactttgcatccaagctggagttgacctccccgagtaccccacaaagcgtcgaagaaagcctatcattaaaatcggaagaaaagagtttgttgatgcaaatgaagacgacctaccagaaccagagcctgacagatttaggcagccacttcttgaggaactacgttatgatgagattattgctccatctagcccagaggagacggtggctcttgccgaggagacacttgaagcgtgggaggccgttcgggacggagccttgaagcttatgaagggctatgcagtgagggtttgtggatactgccctgaggtgcatgttgggccaactggccacaaagcacggaactgtggagcttttaagcaccagcagaggaatggacaacatggatggcaagcagcggtgctcgatgacctgatacctcctaggtacgtgtggcacatgccggaatccggggaagaactgcagagggagctaaagaccttctacggtcaggcaccagcagttgttgagatgtgcattcagggtggcgcaaaagttccggagaagtataaagccactatgagactagacataggaatcccctctagtttgaaggaggctgaaatggtcgtctgatcctcccaatgatctgggcagatttgatcaacctgtaattgagttttttcctttgtgttgaaaagatgatgtcgtcaccaagctccatcgtggcttgacataggttgaatctgttagccaatgtgtatatatcagaactcagatgagatgattctcgttcggttttctttcagtccgcaacgatatgtttgtgtatttctttagaaacaaatgtgctatactgtgctgcacctacctcttgatcacaggcagtataattcatgccttgcaaaat

SEQ ID NO: 15642 - DNA, 981 bp, Zea mays
  Clone ID: LIB3060-045-E1_FLI
cccgcgcgtgcgagaggcccaagaaacccacagcagccgctagccgtacgatggcggacaccggtgacgtcgccgccgccgccgaggcctcggcgcgaccggcgggcagcagcagcacccagccgctggcggggcgcgtggcgatcgtgacgggcgcgtcgcggggcatcggccgcgccatcgccacgcacctgtcctccctcggcgcgagcctggtgctgggctacgcggcgcgcgccgacgaggcgggcgcgctggcggcgtcgctcccgcgcgcggtggccgtgcgggcggacgtctcggacgaggccggcgcgcggtcgctcttcgacgcggcggacgaggccttcggcggcgcgcacatcctggtggccagcgccggggtgctggacgacacgtaccccgccgtggccggcaccgccaccgaggccttcgaccgcgtgctcgccgtgaacctgcgcggcgcgttcctgtgcctccgggaggcggccaaccgcctccgccgcggcggcggcgggcgcatcgtcgccgtgacgtcgtccgtggtggggagcctcccgccgcggttcggggcctacacggcgtccaaggcggcggtggaggcgctggtgcggaccatggccaaggagctcgggggcacccgcgtcacggccaactgcgtcgcgcccggggccacggccacggacatgttcttcaagggcaagagcgaggccatggtgcgacacgccgtggagacaaacccgatgcagaggctcggcgagcccggtgacatcgcgccggtggtcggcttcctgtgcaccgacgccgccgagtgggtcaacggccaggtcatccgcgccaacggcggctatgtgtgatgtgatctttagctttcacagcttcttggtgtccatcgtcgttttcctttgccacgcactgtttcgccatcttgttatctttacctttaaccttattatcattctagcacaaattcataggaat

SEQ ID NO: 15643 - DNA, 2271 bp, Zea mays
  Clone ID: LIB3060-045-F8_FLI
ctccctccgtgctcagcttttcttgggcgtacttccctgctcgtcgtgcttggctgccgcccctgcagtggtcgacctcgcctggtcgtttcagcatcgtgcagccatgaagctctgccctcgccaagctcctctggttataccttggcctccagctcgccagaccgcggtcgtccttgctcctcggctggccgcgcacagctttcgctatccatagccgccgtcgaagctcccatggcgccgttcttccctgaagctcccctgcaccgcgtctctctctctctggtctccttccagccgtgaagttccctgcgcgcctgcgccatgccgatctcccagcgtcgcgcgctgcggcgctccagccatggccgccaagctcccctccagttttcccccgcgttttgccctctgctcgctcgcgcctttgtcgagctcggtccccttcagcagtgctcgctctggccatggaatccacccacgtgccgttccgtggaagtcccagctcggttctgtcttcagccggcgtttctccctaatgcgcgctcagccttgtcgttcctctgcgcgcaaattctctgttggccacgcgcgaagctctctattcgccgccgatttcgccattgaattttcaagctcaccaacgctccagctcattgttatcgccaagtccttccccagtccgcgtcataaaattcactcggacacgatctcgtcgtcgttccgcgcgtcagtaaaaaaatcccaagaatcgggtgaagacgaagctagcagcgcgatattccctaagcgctcgacaaattgcttggatcggaaaatcgctaccgatctcgtggattcgtgtcagctgtggaaacggtacgttaattaatcgctcgatgcggaagacaacccaagtcgaccccaagcgcaggctaatccgcaggatgatgctgatggacaaacctgaaaatggtcgccaagtggacgtcgtctaacaacactaacctagtgttacccaggcaagccccggtgcatgcaaccccttccttgtgttttaaataattttcgcacactttaagtctagtgaaatgtgcattaggtttataggagttgcttggaaaccctttgatgcattgccttccttgatatccatacctttatagatacttctggtgaagtatcaaaatatgatttacaaaaatgcttagccctgcttagatcttgtggttagaggttgtcttttgcaatactgcctagctcaggggttatcctgaggaaggatggcttctacctgcaagaatatattttcattgggagcatggtgggatcttactgcaaagttccctgtgatgctcttttcatcctaaggaacacaaacaatcctaaggatggaagtacttaaatcgggacttgggttaggaacaggtgatgttctacccaggttgattaaggattggatgcgtatgttggcctgctgaccgaggaccctttaactggtcacatgcctcgtcatgggtaagctttgcctcgggtagactaaggccagaataagataacacggaatgggcgtggagcggtggcgagagtagcgtgtaccctccgtggcaagaggctggacggtggtgtatctgtgctctcggttcgcgtgaacctgatctggtcttaagaaccccggtggcgagttgacatatgcaagggttaagtgctacatatgtcgtgtgattggagatcctcagctgagtataatcgattcggatcgtcgtaccttcgcggttatgaagacttggtcactgacctgcaacctaagtcaggatgtgaacattatgaataaaaatgatgttgtattgatgagatggtgaaagtagaccatatgcaaatagagtctattaatacttaatctggcattaaaatattgaaagtaaggactcactttagtaagctatttctgcaaaagtatctaagttgatttttgctaaagcctctccttgattcccaaatccagcatacccttgagagtcttttccttagtcgggtaagacttgctgagtaattccatactcagggttttattccctgttgtttttcaggttttaactttgtgctgttgttgatggtgttaagtgccggtgggctcggccttcttataagtctaagtaactcttctatacttcttaatgaggatggtcacttgagctagcatatatttcaaacttatacttttgtaatcactccgatcatgtacaaagtaaaatttttgtaacctgtaaaatttggtaataagatttccgctgc

SEQ ID NO: 15644 - DNA, 690 bp, Zea mays
  Clone ID: LIB3060-045-H12_FLI
ctaaaaacacgttttattttgggacagagcatcaaatatgattgaatgcggttgcaacgctatgggtagtgtgtctactctatatatcatcgagcgagcgagctagtgatccaatctttcttgtaccactaagctagtggccacaactcgttggcaacgaggaagcagcaagccgagaagctacgccgcgccgccgccatatatggcacaggctgccggcaccgccgatgccactgatgaggctccactgctgctggcctcgtcggcggcggggtcgacgccgtcgccgccaggttcagcaccgcgccggaacaggttcgccttcgtctgcgccacgctcgcctccgtcaccaccatgctacatgggcttacgaccgacccatatacgtgccctgcagacctgacgctgatgagcggcgcggagctgttcatgcgggaggacgtggggctcaccgacggcgaggtcgaggtgctggcgggatccatgaacgtgttcatgctcgcgtccatcctcgccgccggctgggtggccgaccacctgggccgccgccgcaccctcgtgctcgccaacgccttcctcatggccggcgcgctcgccatgtcgctcggcaccagcttcgccgcgctcatggcggcgcgcttcgtcaccagcgtcggctccgggttcgcgcgcgtcgtcgcccccgtcta

SEQ ID NO: 15645 - DNA, 3365 bp, Zea mays
  Clone ID: LIB3060-046-A6_FLI
gtggaggtcagcggggattgaggaggaggaggggaagaggcgaggcaggaaatcaagcgggaatccaagaaccgtaaggatgaccatggtggagaggaggtacggtccctgtaccagccatggttccttcctcctacggctgctgctgctgctgccgttcttcttcctctgcttcatcgatgtgccgccggccggcgccgccgccaccacacagtcgcctccactagacaacacgcaaaaggctatcatgaacgatgttgcgagtctggtgaactccggatccgccaacaccaggtggaacaccgcggagtcgaatccgtgcaactgggaaggaatcacctgcacaagtaacacttcttcctcggccgtgactcggatcgccttgtcaaactatggcctcgccaactcctccatctttgctcccctctgccgtcttggcactctgcggtaccttgacctttccagaaattttttagcagatttgtccgccccgttcttcgcctcttcttcttcttcttgctccatgaaggaagggctgcagtcacttaacctgagcaccaaccggctggctagcccgctcggtgagttggccggcttcccccagctacaagttcttgacctgtccttcaattcctttgccagcagaaatctgagtgcggaattgggttatttccccaagttaaggagcttcaacactagttccaatgacttgaatggtgatgttcctaccagtatggtcggctctttggaggagctggtattgtctagtaataatttgagtggtccaattcctctgcgtttgtttgaatatgaaaatcttactctgctagatctcagccagaataatctgaccggtgctattccagataacttcacgagtctctccaagcttgagactttgctcctttctggcaacaaattgattggggaaataccatcgagtctgtctaatgtgacaacactgtctaggtttgcagctaaccagaacggtttaactggacccatccatagctggattaccaagcatatagggatgttggatttgagttacaacaagctgaatgggacaatcccctcagacttcctctcgcatcaggggttgcagagtgttgatcttaccagcaacttgcttaacggagccattcctgccaccttgtctcaaagcctctaccgcttgaggcttggtgggaaccagcttggtgagaacatcccagggtcagtttgtgataccatgggcttgacttatcttgagttggatgacaaccaattgacaggagttataccttcagagcttagcaaatgcaagaacttgacactgttgaatctggcatcaaatcgtttgcatggtttagtgcccagtattaccggtgaacttgacaaactggtagttctgaagcttcaaaataacaccctcactggacaggttccaagtacattttctgaattaaagagcctaatcacattgaatctcagtaagaattcactcagtggagcgataccaagcggaattttcgagttgccaaagctttcgaacttgtatttgcagggtaaccagtttagcggttttattccgttctccatcagttcatcaaaggatctaatcgagctcaacctgggtgataatgctctgactggtaacatcccaaccatgccaaccactgtgaccacatctcttctgaatcttagtcataaccttcttgacgggtctattccttcaaacatcaactctttaggtgaactagagattcttgatctttctcacaatgccctgtctggtgctgtgccatcttcactatggagcctgcaaagcctgacactgctggacctttcctataataatctgtctgggtctattcctagattcggtccaagtcaaactgtagatattgtcggaaatcctggtcttgtaattgtaaatggtacaggaaacaataatgacactcctactactggtaagaaaaagaggcactatttggtcgtcatcatcttcaccattgccggtactcttgttggattatgtgtgcttgctcttattattgtgatgtcattatcaaagagagtgtatcgtgttgaagatgaaggattaccagctggagaatctgtaccacaaataatcagtggtcgcctcataactatgaacagcatccacacctctgcagttgacttcgtgaaggcaatagaagcagtctccaaccatcagaacatctttttgaagaccagattctgcacctactacaaggctgtaatgcctaatggctcaacatactctgtaaaaaaacttaattctagtgacaagattttccaaattgggagccaggagaagttttctcatgaaattgaggttctagggaaactgaccaattcgaatgtcatggttccattggcctacatcttgactgcagattgtgcctacctaatctatgagcatgcatacaatggcactgtatctgatttgctacatggtggaaaatcagaagttatagactggccgtcacgatatagcgttgctttgggggtggcccaagggctgacatttcttcatgggtgcactcagccggttttgcttcttgatctgtcaacaaggaccatccacttgaagtcaaaaaatgagcctcagattggagatatcgagctttacaagattattgacccttccaggagtacgggaagcttttcaaccattgctggaacagttggttatattccaccagaatatgcatacactatgaggctgacgatggctggcaacgtctatagctttggagtcattttgcttgagctgctgacaggaaaaaaatcggtcagtaatggcactgagttagccaagtgggctctcagtctttcaggcaggcctgatgaaagggagcagatccttgacaccagggtctcaggaacttcaattgctgttcatagccagatgctgtcggtcctgaacatcgctctctcttgtgttgcattctctccggacgctcggccaaagatgcgcaacgtcttgaggatgctcttcaatgcaaagtgaatcagaagcagcctgcaatcagatcatagataaattttgggtgcagttccagcctcgcgtagtttatggatgtcagtgataagtatacaggctgcccttatatagttccataggagatagaaccctagcttatagtagatcattatatgttttatgaattgtgtaattaggtatctgctttgcagtgagtggctatatggtttataagctgtcaaatgtagaggtgcttataagcaaagttgggtattgttctcataggtagggctaggaaaaaaaagctcgagctcgatgagccggcttgcgctcgtgggggcttggctcgtagcggctcgacgcttagaatgag

SEQ ID NO: 15646 - DNA, 1310 bp, Zea mays
  Clone ID: LIB3060-046-A8_FLI
aggggctaggaggaggcggatcggggagcggagatcctagccggagggatggcgaagggcggcgtggagaggggcgcgctgctgccggtctcagcggacgacggcaagggaaacggcggaggggcaggcggcgacgatgccgtgctgttcaaggggtccgccatgacccgccgcggcggcaccgccgcgctctcttacatggcatgctccgtgttgctagtgatgtttaacaaagcagctctctcttcgtataatttcccttgtgcgaatgtcatcacactccttcagatggtgtgctcaacgtgccttctttatgttctgagacgattaaagatcatctccttcactaatagtgatccatcagtgccttctgattcactattctttgtgccgtttaggttattactacgcaccacacctctttccttggcttatttactctacatgctagcttcaatggaatcggtccgtggagttaatgttcctatgtatacaactctacggcgcacgacagttgtgtttacaatgacaatggagtatttcctggcaaagcagaagcacaccccacctataataggcagtgtggctttgattgtattcggagcattcgttgctggagctcgagacttgtcatttgatgctcgtgggtatgctattgtctttgtggccaacattacgacagccatttaccttgctactatcaaccgtataggaaaatctagtggcctcaatagctttggcctgatgtggtgcaatggacttgtctgtggaccttcagtactgttattgacatatattcagggtgacctaaagagggccatggaatttccgtacctttattcccctgggttcatgactgtgctgctattttcgtgcatcctagcatttctactgaactacactatcttctggaacacaatcctgaattctgcactcacacaatcgatgtgtgggaacttgaaggatttcttcaccgttggaattggttgggtgctatttggtggacttccttttgatcttcttaatgttataggacaaggactaggctttctgggctctggattgtatgcctactgcaagatcaaaggaaagtagacgctgatgtctagtgggatcaactgggggtagacggtggtgtgacttggtgtttcattcagggccagtgtgcttaacaaaagtagcgttgtttatgctgtttgctcctacatatgggagagaaattttgtaggtttcctgtatgtattagacttcagccctaatgaacactgcaaaactgaaaaggaaatagagtataccgaatttttactgtt

SEQ ID NO: 15647 - DNA, 1630 bp, Zea mays
  Clone ID: LIB3060-046-A9_FLI
agtacacttgggcacttggcatcgcggccgaggtccccgaaaaagagccatgctgggccctaatccagacgtgatattttctcgcgattttgtcacgttagcggccagctacatcctgacgatcctgtcacccgctcgatcggcgggcgctggagcgcgcgcatctagctttgtgcaagtttcacgggatctctagctttgtcggcggcacatgagcagctccaagcacgccgcgggcgccgtaggcggcaaggccgcgcgcgcctgcgacagctgcctgaggcggcgcgcgcggtggtactgcgctgccgacgacgccttcctgtgccagggctgcgacgcctcggtgcactcggcgaacccgctcgccaggcggcacgagcgcctgcgcctgcgcccgacggacccgcactcgacgacgctcgaggccggcgtggcgacggcgacgtggaagaagcgccagcagcaggtcgcgccggcgtggtccaagcgcaaggcgcgcactcggaggccgcacgtcaagagcgtcggggagctcctgtcgaggaagctcgtcgtcgtgcctgaggtgtcccccatcgaatcgtcggaggagcggaaggccgaggaggaggaggaagaggaggaggggcagctgctgtactgcgtgccgacctttgaccgcgccctggccgagctctgctcgccaccgcctccggtcgatgacccgacggcctcatcctgctgcagggatgacgtcgacggcgccgtggagaacaacacaaaggcaccaccggtcgtggtcgcggaatcgcccgtgcagcagctcccggacagctttgccggcttcggccccacggacgccgagctcagagagttcgccgcagacatggaagcccttcttggccagggcctggacgacggcaacgagctggatagatcgttctacatggagagcctagggctaatggcgcagcaggcggaagacgtcggccggataaagatggagcccaacggcatcgtaagctcccgctcccgcggcgagggcgctcccgggtttggccctacggagatgaagccagaggcgtcgtcagctgctgctgaggtgctggacacagacttcaactgctgctcgcccacggtgatgatggataacgaggatgaggacagtttcgaacagaaggcgtcggcgagcaacgctgccgccgccgccgcgggtacgcaattcttgaagaggagcctggatctcagcctcaactacgaggccatcatcgagagctggggaagctcgccgtggaccgatggccaacggccaagcgtccagctcgacgatttctggccccacgcccacctcacggtacgtttatttccaaattcacgctgctcctcctcctcgaccgatcgattgcgagcgctgtcgacgcgtgcttaattatgcttcgacttgcaaagtacaatcgggttcatgtgccaggtttgcgtgcagggctggatggcgggaggaggacggttgggtggggaggcggcggtgactccacggctggggatgggcggcgggcgagaggcgcgggtaacacggtaccgggagaagcggcggacgaggctgttcgccaagaagataaggtacgaggtccggaagctcaacgcggag

SEQ ID NO: 15648 - DNA, 2503 bp, Zea mays
  Clone ID: LIB3060-046-B1_FLI
gacctcccttccacttaaaccacgccaaaaaccagctcgcgattcctcccactggcctgaatctgacccgccccgccatccccaccgccgcgcctcttccgggcagccatggacgaggccttcgcgcgcgcggtggaggacggcctcaagctcaccaagcgcctcgtcctgcccagcgggggcgggatgccgccgccgccgccgcgcccgcacctggcgatggaccgcgacgaccccgccgcggcgctgcagcagctcatgccggcggcgcccatggcgtacgccgtcgtcgtcgacccggccgccgtcgacagccccgacgtacccagctaccagccccacgtctacggccgcctcgacccgcccgcgctcatcccgctccagatgcgggaggtcgagctccgcgtcgactgcgccgccggctgcgccaccgccgaggtcgccctgcgcgcgcgctggtggctgcactgcatcacgcgcagccgcgcgtgccactgccgcatcgtcgtgcccatggctcaccagggttcaattctaggcgctgaggttactgttgggaaaagatcatacaatactcatgtaattgatacagaggataactgttcagtgaagattgcaatgcccgagagtgggggtcttttaaaacaggaatttttttccttgacaataccacaggttggaggtggagaagatatatttgccacaatcagatggtcacaaaaattgctatatgacaacggacaattttctgtcgaagtaccatttcgtttcccgcagtttgtgaaccctttgccaaaggttttcatgaaaaaggagaaaatacagttgattgtgaatagtggtgtgactaaggagattttattgcagggaacaagccatcccttgaaggaaaaaagtagacaaggtgagaagttgtctttcctgcatgaagcagttgttgagaattggtcaaccaaagattttaccttcgcatatactgtttattctggtgatttgtctggtggagttcttgtgcagccctcaaccttgcgtgactatgatgacagagatatgttctgtctttttcttttacctggaaataacgagaacagaaaggtcttcagaaaggctgttgtttatatcattgatacaagtggaagcatgcaaggaaagcctcttgagagtgttaagaatgccctgtccactactctctctgatcttattccaggagattacttcaacataataacatttaatgatgagcttcactcattctcatcgcgtttggagcaagtaaatgaaaaaacaattggaaacgctattgaatggatgaacttaaactttgtcgctcagggtggcactaacatcatgcatcctttgagtgaggcaatgactttgctgtcaacttctcacgatgcgcttccacaaatctattttgttactgatgggtcagttgatgatgaacggaatatctgccatacattgaaaactcaacttattaaaagtggatctaagtctcctcggatttctacttttgggctaggttcatattgcaaccactatttcttgaggatgttggcatcaattggtaagggtcactatgctgctgcatttgatacaggatcaattgagggtcgaatgcttcaatggttccagaaagcttcaagcacaatagtgtcaaatgtttccattgatgccataaagcatattcaagattttgaagtggattctgtatatattccagacatttcagcaaaatatccattgtgtgtttctggaaggtacaatggcaagcttccggagacacttatcgccaagggtcacttggctgacatgagtgaaatatctattgaattgaaagtccaacatataaaggatatacctcttgataaagtattggcaaagcaacagatggatcttctcacagcaaaagcatggcttatggagaacaaggagcttgagcgaaaggttgtgaaattaagcatacaaaatagccttccttctgagtacacacgcatggtactacttcaaaccagtctggacaaaatagatccagcacaacaggcgaagaataaaccaacgaaacagagcagtagcgcagatgagctgccagcgatgccgctaggtggcctagcggtcggatttggcgacgtcgcggcaacaacagagaacctgacaacaggattcggagacatgaaagcagccgagaagtttgtgatgttggagaaggccgctggctgctgcagccgcatggcggactgctgctgctgcatgtgcttcatcaaggcgtgcagcaagatgaacgaccagtgcgccatcgtcatggcgcaggcctgcgccgccctcgcgtgcctgggatgcttcgagtgctgctcagagctgtgctgcggcgggcccaactgaggcaggccacagcaaccgagcaagttggtcagaatgtgttgttgtatagtgatgtaaatgctcccagcaatgtatagaatttggcatcacgtacgtgtttatctaacttggcttgatcagt

SEQ ID NO: 15649 - DNA, 1336 bp, Zea mays
  Clone ID: LIB3060-046-B12_FLI
aacttcccttcatactctccatcttcccctccccagctctaatcaagcctacaacataatcaacatgggtgtcattgagaagctcagccgcaaggccggtgtcatcgtcggtgacgatgtcctccgcctcttcgagtacgctcaggagaagcagttcgccattcccgccattaacgtcacctcttcctccaccgtcgtggctgccctcgaggccgctcgcgaccaaaagtcccccattgccctccaggtctcccagggtggtgccgctttcttcgccggtaagggtgtcagcaacgatggccaggccgcctccatcgctggtgccatcgccgctgctcactacatccgcgccattgcccccacctacggcgttcccgtcgtcctccacaccgatcactgcgccaagaagctcctcccctggctcgacggcatgatggatgaggatgagcgctacttcaagctccacggcgagcccctcttctcttcccacatgatcgacctgtccgaggagcccgttgactggaacatctccaccactgccgcttacctcaagcgtgctgcccccatgaagcagtggctcgagatggagattggtatcaccggtggtgaggaggacggtgtcaacaacgaggatgtcgacaacaactccctctacactcagccgaggatatcctggccatccacaacgccctctccgccatctccccctacttctctatcgccgctggcttcggtaacgtccacggtgtctacaagcccggcaacgtccgcctgcaccccgagctcctcaagaagcaccaggcctacgtcaaggagcagaccaagtcccagaaggagaagcccgtcttctttgtcttccacggcggctccggctcctccaaggaggagtacaaggaggctatcagctacggtgtcgtcaaggtcaacgtcgacaccgacatgcagtacgcttacctcagcggtgtccgtgactacgttctgaacaagaaggactaccttatgagcaccgtcggcaaccccgatggtgaggacaagcccaacaagaagttcttcgacccccgtgtctgggtccgcgagggtgagaagaccatgagcaagcgcactcaggtcgcccttgaggacttcaactgcaccaaccagctgtaagatggttgctggtgtcgtttgagccattgaaaagccaggaagggaaaacaagcttagcccccatttttctttggagacccgattggggtttgttggtgatattgttcgtatgtagcgatgtattttcgatacgtgataatgaaatgccatgtcctccggacgagctcacgctcgtctgaaaccgaatacc

SEQ ID NO: 15650 - DNA, 1092 bp, Zea mays
  Clone ID: LIB3060-046-C10_FLI
atccccttgcggcaaaaccttgcgcgcaacaatggccgcctccctcccgaccaccgccgcgcgcctcgcggccccggccttcgcctaccggtcgcccaaggctccctccgccaccgccctcccgcgtgccgccgccttccctgcaatcgccgtcgcggcggcgcccctgcgcccgcgccgcgcgccgaggccggtggcggcccgggccgggggcgaggagcgggagacgatactgctccccgggtgcgactacaaccactggctgatcgtcatggagttccccaaggaccccgcgcccacccgcgagcagatgatcgacacctacctcaacacactcgccaccgtcctcggcagcatggaggaagccaagaagaacatgtacgcattcagcacgaccacctacaccgggttccagtgcaccgtggacgaggagacgtcggagaagttcaagggtctgcctggggtgctgtgggtgctccctgattcctacatcgacgtgaagaacaaggactacggaggtgacaagtacgtgaacggcgagataatcccctgcacgtacccgacgtaccagccgaaggagcggaggacgtccaagtacgagagcaggcggtacgagaggcggagagatgggccaccggcggccagcaggaaaccgaggcagcaggcaccagctcagactcagaccgagtcggcgtcttcgtgacgagctctgcaggcattttgtccacgtacctacctacctagaagtagaacaagagaggaggacgcctaaaattctgtcgcattgggcaccgcgtactggactggacaggcgggtcgggatccatcatccatcgtcagccagaaaattgtcgctgtccaagcagcctgggcagcttgtgtgtgactgtgtgtgctgatatcttgagctagctgtggcagaaactggaaaccctactgtgtgtgtgctgatatcttgtcatagcgagctgtgtgatgccgactggtgtagagctgtatcgctgattgcgtgaaaccgaaatgctgtggctttatttagactgatgttgtcacttccagtcatcggatcactcccagcactttgttcgttcc

SEQ ID NO: 15651 - DNA, 2324 bp, Zea mays
  Clone ID: LIB3060-046-E4_FLI
agcgcgccgtgcggaggcggtggaggaggaagcgccgacgatttggacagcgcagcgacggaaggggagcagcaggcggacgaggagcgagccgccaggaggacgacggccgtcgccgccgccgccgccatgggcgagtcgctgctcaccgcgctctccatggacaccgccacggcccaccacccgcaccagggcccctccaccttcctctccatggacaccgcctcccacgacgacttcgacctcttcctccagccacaggggcccttccgccgctgcctacatgccgcggcggtcgccccccctgacatcaaccttcccctagccgccgacccgtctccgccacctctggcgtcgctcgacgccaacgttgacatgctagatgtcggcctcggcggctcgcagcactacgactcggattcgcccgctgccgctgggccagtctcggccccggcagcagccgcgaccaccatggtcgccgtgtcccacaccaagggctccggttccagtgctgcgcgcaagtgcgtcaagaggaatgttagcatctggggagcgtggttcttcttcacccactacttcaagccagtcatgtctgcagacaaggctggcaaagcgaaggcagccaccaccaccggcgggaacggcaatagcgccacactggacgctttcctggtgcagcacgacatggagaacatctacatgtgggtgtttaaggagcggcccgagaatgccctggggaagatgcagctgaggagcttcatgaatgggcactcacgccttggggagccacagttccctttcagcgcagacaaagggtttgtgcgctcacaccggatgcagcgcaagcactaccgtggcctctctaacccgcagtgtcttcatgggatcgaaatcgtgagggcgccaaatttggcgggtgtacctgaggctgatttaaagaggtggatggagctcactgggagggacgccaatttctcggtcccaactgaggcgagtgattttgagtcctggaggaatctgccgagcacagactttgagctcgagaggccagcaaccgcggctcctgcaaagagcagttcacatgggcaccacaagaagttgctgaacggttctggccttaacctctcgacacaaccatccaatcacagttctggggatggcatggagatcacagccacctgtaacaagcgcaggaaggattcctcaccgaccgcaatggaagaggactgcagcaattcgaattcggacaaggcccaagacatggatgtgagccacaccttcgagccatcatggatgaatgacttctcaggtgtgatgcgccatgcttctggaccagtaaccgctgcaaaaacaatatacgaggacagcaagggctacttgatcatcgttagcctgcctttcgctgattttcagaaggtgaaggtttcatggaagaacactctcacaaatgggattgttaaggtatcatgcactagcgttggtcggatgccactcctgaaaaggcatgatcggactttcaggttggcggatcctgctcctgagcattgcccacccggagagtttgtccgggagatcccactccctacccgaatccctgaagacgccactctggaagcgtactgcgatgaaacagggacagggctggagatcattgtcccgaagtttcgcgttggccctgaagaacacgaagtgcatgtgtccatgaggccaccctcgtcctggtgccaatgaaacctgtttccaagcttgcggggggagacacgcatacggtgtggaggtttgccgtaaggctaaggctactgcacaacaaatgcagctcagttttgctaattttgatgggaaaccagtcgttaattgattgaagcattctggtagttggccgccgcagcgtttggaacattttaggaaatatgctacgggtcgcaaggaacatgcttgcattacttagttcttgtatggggatacacctagtgtgttacatttcgtttccgttgtgtcgaaagactggttgtctgctcgatgtgccccgacacgagcaacaatctgtttgtgttgtacacagaatggcaactggatgtataggggcatttatagtcattttccatagattgaggtttgctttgtgggcatcgtgtaaaattcgtctcagattgatggaaactaggaagaaaaagaagatggcagtgtctttagggtttggcaaagttgtaatggggattaggcggtgctgtagcattctgtctagtttccaggaatttgtagaagacaaaatgtaaatctgttgttccgtcatcaatatagaaaagtggtctgtgtctaccagc

SEQ ID NO: 15652 - DNA, 1552 bp, Zea mays
  Clone ID: LIB3060-046-G11_FLI
actcagtgtcgccactctcctctccacacacacacatacacacacgtaacctagcttctacacggatcgggatcccctgcagtactgcatgggccactgccgcgtgggctccgcgtgcgacagggcccacgcgcagtgacccaacggcacggtgcagtacgtcagaggatccgtgtcccttctacaccaccttgcgcaagaattttagctttcagctgcattagcatggaaggagacaaaggcaaccgatatgggaaacaggtcgccgtggtcacaggaggcaacagggggatcgggctagaaatatgcaggcaactggcttccagtggagtcaccgtagtgttgacagcaagggacgcggagcggggcgcgggagcagccagcacgcttgggcaacaacccaacgtcgtcttccatcagctggatgtcggcgatccgtccagcgccgcacgcttagctggttttatcgaggagaagtttggcaggctggatatattaattgatcaacaatgcaggaattactggaacggcaagtaacgtcgacgatccagaagcttttcgtctggaggttggttaaccagtaactactactcggaatgcaagggtttggcttgaagggagcaatatcattttattattagaaaaaaaatgtctagtagtctagtctagcagtaaaagagatacagatatatttttctcgtgtggaaacagctcgcgggcatggatctcatgcagaggatcgaagcaatcaacaggcacagcacggaaccgtacgagcaagcagagaagtgcctcaacaccaactaccacgggatcaaggctgtcacaaaagcgctgctcccgcttctacagtcctcgtcccatggaaggatcgttaacctgtcgtcctactatggactactcaggtttttcagcggagacgaactgaaagaggagctcagcagcatcgacggcctgtccaaacagaggctggacgagctgtcagagctgtttctcaaggacttcaaggatgggcagctggaggctcaagggtggccgaatgaaggagggttcgccgcgtacaaggcgtccaaggcgctcgcgaacgcctattcccggatccttgcgaaggagcacccgtcgctgcgcatcaactgtgtgcatcccggctatgtccagacggacatgaacttcgggtctgggcatctgacggtcgaggagggcgcgcgggccgggagctctcatgctggccatggagcccaagggaggcgtcactggcgcgtttttcgaccacaccgtggttgcgtccttcgtgtaatatgctcgcccttgcactcgcaccgttagctatcgcagtaataaaattccacagaaccaaaggaggatacactattaggtcctgaatcagatctgttctatcccctcccctgggaaaatatcctctcgctgtcgctgggtagatggccgtccaatttcattttggttgccgatgagtgttctcattcgcagcgaattagtctatcttgtatgattcatctgttatgaatataaaagaaataagaatcctcgtatc

SEQ ID NO: 15653 - DNA, 1611 bp, Zea mays
  Clone ID: LIB3060-046-G8_FLI
agttgccgcaagcacagaaccaactgctgttttcactgatgtgggacgggtcaacggtacttcagcggaaaggtttagatctgcagtgagtggaagaagagcaaatgttcttggtgagattacccagattgatacacgaagtctacttcttgagaaagccaaggcaactgtccgcaaaaaattgcaggagttaaacattacatcatcttcacgatttgcagagagaagaggatctgaaggaaagctaaatccttgtggcaacaacataaaggtcaatggtgtcctctctgacaaacctggcaagggagtcaagctatgtagctcaagaagcatagaaatccaagtgcctgatactgatgacaagaatccagagcagcgccgtgtacctgtgtcaattgacgtcccagaccccgacttccatgatttcgataaagatcgaacagagaaggcatttgacagtgatcaagtgtgggctacatatgacagcgaagatggcatgcctcgcctatatgtaatggttcagaaagttctttcgatgaggcctttccggatccgcatgagctttctcaactcaaagtcaaatatcgaactggcacctataagctgggttgcctccggtttccagaagacatgtggcgatttcagggttgggagatatcaggtcagcgaaacggtcaacatattttcacacagagtgagctggactaaaggtccccgaggcgtcatcaggattgttccccagaaaggggatacatgggccttgtaccgcaactggtctcctgattggaatgagcttacacccgatgatgtgatatacaagtatgagatagtagaagtcgttgatgatttcaccgaggagcaagggctgaccgtcatcccgttgctgaaggttgccggattcaaagctgtcttccacagacacatggatcccaaggaggtcaggaggataccgaaggaagggctgttccagttctcacatcgagttccttctcgtcttctgaccggtgaagaaggcaacaacgccccgaaaggttgccatgagctggaccccgccgcaactccagtggaccttcttaaggttatcacggagctcaaggaagatgcggtgggcgcagactgctaaataggagaagggggcaactctgaacactgaagataggtagctggatgtctggacgatcagatcccacttggttaatgacacggtgcaagcacatgatggtatctaaagctctactacgtcatcttatttttggctgatgacttggacaatactgccagggcaagcagcctgcgtgacggagttctgacccttttaattcttaggcatttctaacatttgatttcatctctacacgaactgattaaatggccattgggaggagactgcacacggcatcatcggtgaggaggttagtcgacgggaggttgtttacttgtttgtgttgccgctctgtaatgtactgtaggaggcaagtctgagtcgagggacaagagctgcaaggcttggcttgcccgtgtaccccgcatttgtgtaccctgtttttttacttgtgatgttgtatttccttcggttttatagtaattcatcgccatgatgttgaacctgat

SEQ ID NO: 15654 - DNA, 808 bp, Zea mays
  Clone ID: LIB3060-046-H11_FLI
gttgcattgcattctcaggagtgggtactccatctcaaggacgggatccatggcgtcgctgatggcgcccatggcgggcgccttcttcctgctgatgaactcgagcgacttcttcctgtacctgagcacggccgtgatcggcacgtgcacgggcgccatcgcgtcggtggccgtgtcggcgacgagcgagctgttcggggccgagaacttcggcgtgaaccacaacgtggtggtgagcaacatccccgtgggctccctgtgcttcggctacctcgcggcctacctgtaccagcgcgcggcgcggggcagcagcagccaccagtgcatcggcgccgcctgctacagggacacgttcgcggtgtggggcgccacgtgcgccgtcggcacgctgctctgcgccgtcctctacgcgcgcggtcgtcggccgcgcagctccgccgggagaagtaaggacggcacgtgcctcgcccgcttagctatagctgcctcgtgtctgtcatcgtaggtgcatggtacgtacgtagcagggcttagctgcagaagtttctgatcgatcgtctgagggctccagaagaagtttctgatctgagggcctgattaatcacacaccacccatcgatcgaccaagcatcatctacttgtaggctctacagatgatgatgcttttgatccttgcttctttttttagtgtgtgtgtgtgtgtgtgttcttggagtttctcttgactgatcccgatggaaggggggctacagaagaagccttggacgaggaggctgatcatgagtagatattgtgcagcaggttggcc

SEQ ID NO: 15655 - DNA, 1129 bp, Zea mays
  Clone ID: LIB3060-047-A2_FLI
gtcacatactttccgcgcctcttcttctgcgcccctctcctcccaaactgcggatagagcagcgagccatcgacacgatcgcgagcgcaagcacgtacgttgtcggaagctcaagttagaagaagcaccagtgctgatcgatggcggcccaggctctcctctccggccggcagctgctgggccgccccgtgcagtcggccgtctctaggtcgtcggcgaggaaggcgcccttcgtcgtcagggccagctccagccctccagccaagcaaggtgccgacaggcagctgtggttcgcgtccaagcagtccctctcctacctcgatggcacgctgcccggcgactatggcttcgacccgctgggcctctcggacccggagggcaccgggggcttcatcgagcccaagtggctggcctatggcgaggtgatcaacggccgctacgccatgctgggcgcggtgggcgccatcgccccggagatcttcggcaagatgggcatcatccccccggagaccgcgctgccgtggttcaagacgggcgtcatcccgcccgcgggcacctacaactactgggccgactcctacacgctcttcgtcttcaacatggcgctcatgggcttcgccgagcaccgccgcctccaggactggtacaacccgggctccatgggcaagcagtacttcctcggcctcgagaagttcctcgccggctccggcgacccgtcctaccccggcgggcccctcttcaacccgctcggcttcggcaagaccgagaaggagatgaatgagctcaagctcaaggagatcaagaacggcaggctcgccatgctcgccatcctcggttacttcatccaggggctcgtcaccggcgtcggcccgttccagaacctgctcgaccacctcgccgaccccgtcaacaacaacgtgctcaccagcctcaagttccactagaacgtggtgcatcagcatacctgctgctgccgccgccgccgccagttgtttgctgtggaaagctagatgcatgcgtgttgtaaaggaacctgaagcgttgcatcggtcatgattcatgcatggccagcctgctgcctgtaacaacaaactagtattgatcttattgagaccggaaactgtattgc

SEQ ID NO: 15656 - DNA, 1435 bp, Zea mays
  Clone ID: LIB3060-047-A8_FLI
tgcaacaagaaaatcgtcttatttaagagacagatattgtacattttggaaaccgtcctattaagatttaaacaaaatgacttacaaggcagtatattcttaaaaaacaatgaacaacacatcaaaaagacaatatcatggctacgaagagtgtttcccatgctcttcacaaaaataatgaacccatattattctttagtcgaggataatacaaataatatcttgggacgagtctgataccctagcagcctcggcaatcctgagagccatgatagatttgtatgttgcgagctctgtgttcgtcatgagaattggaccttgttgcgcagtcgaatagctctttgtacaacctattttgccgcacattcagcttgggcaactctctgcaatgctacctcctcttcatcattgtcatgcaataaaatttcaagctttccatgaccaacttggctttttgtctcttgaaagatctctttcgcttcatgacagacttttgtgatagatgccctcgccttatgggtgcacccaatatatgtgaatcgaatgaagtagaaggcatttcagtaatattctcttacggcatcaaggagcctgcaagtcatcacaatacagagttagcagttcagcataaataatttcacatttttactagttcacttgctcctacttaagcaacccttagttattcggtactttaaaatcaatttaaggaaaaagaatgcatgtctctatcaaaaacaagtgctttgattaccaagcacctgcttgatcttcttaaaagttaaatacataatgcagtgcatgtataagtagtagaaagaatagaaatgcaacagacttgctcatacccaggtctaagtagtagaaagacaatgtatacttttggtaggatgcagagcataaaaatagttgcaagttttgtgaaattgaaaggtcgaagaattaccagtagatcatatgaacaaaggtcatattttagtaaatgtagcaaaaaaacagtgaagaatagaacttgcacactttctttatagacctgaaaagggaacttcctgcttagtgatgcaataacaacatgcccgccaggcagtacacagatatccctaatagctttagtatcaggagggggtagatcttctccattccatgtccatgaaacatgctaatctgttgaaactaagaattgatatgcgaaaggtgaatattcaccaaagtttgctataaacattggtactcacatgaagtcattaagcaaaacttgtattaagagttaagacatgtgcctttgtaagtttgtgttcagcacaaaatccatgtacccttccccaagtgaacacgatttgactggatgcatctattacccacaacccgagctccatcaaccaaaaactcattatacaaaacatgcagcaattatgagtcagtgaatgataaagtt

SEQ ID NO: 15657 - DNA, 1102 bp, Zea mays
  Clone ID: LIB3060-047-C10_FLI
ctggtcgggtttgccagttccctcaaattggcaaatgcatgggtttgaccgtccaatctacacaaatgtcacatatcctttcccattgaacccaccatttgtgccggctgataatcccacaggttgttacaggacagtctttcacatcccaaaagagtggaaaggtcggaggatcttgctgcactttgaagctgttgattctgcattctttgcttgggtaaatggagtactagttgggtatagccaggatagcagacttcctgctgagtttgaaattactgattgctgccatccttgtgattcggacaaggaaaatgttcttgctgttcaagttatgaggtggagtgatggctcttatcttgaagatcaggatcactggaggttgtctggtattcacagggatgtgctcctactatcaaagccacagatttttatcacagattacttcttcaaagcaaccttggatgaaaatttcagtttagccgatattgaggttgaggtggagattgactcacacaagcaagaccaggagcacgtcccaactttgtctattgaagcaacactcattgataactctggactatctaacagtatagatgctgatctttcatccgctaatgcagtcaatttgaaaccgaagccaaaacgaactcgaagcccttgtcttggttttcatggttatgtacttggtggaaaaatagaaaatccaaaactttggtctagtgagcatcctaacttatacacgcttgttgttctccttaaagatgccaatgggaagcttattgactgtgaatcatgccaagtgggcattcgtaatgtggtcatggcacacaagcaaatgctcgtcaatggatgtcctgttgtgctaagaggtgtcaacagacatgagcaccatccacgccttggaaagacaaatttagaagcatgcatgatcaaggacctgattttgatgaggcaaaacaatatcaatgctgttagaaatagccattacccacagcacccaaggtggtatgagttatgtgacatttttggtctttatgtcatagatgaagccaacattgagacacatggttttgatgaatctaacactttcaaacatcct

SEQ ID NO: 15658 - DNA, 1050 bp, Zea mays
  Clone ID: LIB3060-047-C2_FLI
aaaataggggaagaaaccgctatactgatgtgttgccatttgatcaaagcagggtacagttagagtcttcaacaggcaatgattacatcaatgccagccatatagagattgctggcagaaatctaacgaagttcatttctactcaaggaccacttgccaatacaattgaggatttttggcagatggtatatgagaaccactgtcctgtgattgttatgctcaccaaatttgatggtcttaagtgtgatgagtatctaccattgagcaagggacaggctgtttttggaaaatttaccattaagatcacaaagttcaggaaagatggtcagttattgttgcgtggtgtggagattcgacaggatgagtcagatgaagtgcgatctcttctccacattgagtatccggagtggcctgaccatggggtgccaaacagcagtgctgatgtaagaagaattctaaaaagattgtatcacattccaagagagaggccaatagttgcacattgcagcgcaggcattggaagaacaggtgcttataccaccatccataatacaatagagaggattttacttggagaacagggggctgctgatcttgttgaaactgtcaaaaaatttagatcacagcgacctggaatggtccaaacagaggagcaatacaaatgttgccaccatgcaatcagagatgaactggaagatcttgtatcgagttcaaaaattgagccgctttcgaggaacgggtaacgctagcagtgatgttctactgacctatctgacagcgtgatacctctttacttgctccattcttcaagcttcggcgatagccgttatgaacatcatgacttctgaaatgttgcgttttatctggagttttaaagcctttacaacattcttcaaccttctatgatctaacattcattgtggtgtatgcatgaaattagaatttagattgatgatatattattgattgtgcccgcccccacacccccacagattgtatttttggttaatggtgtatgcatgaaatatgatgcacaggaaagatttggtt

SEQ ID NO: 15659 - DNA, 1342 bp, Zea mays
  Clone ID: LIB3060-047-D1_FLI
ccgagagctatacgctcggccgttttctgcatcaacggtggcaggcggagcaaccggacacgcccgccgccgccctactcccacctgcccccgtcttcgttgccggcgacgagcacccactacaccagattaacatcctataccatggcctctctgccttgttcacaaataaagttaagcaaagtacttgtcaggaggaagtttcatgagagtggacagaccaatttgccaagtcctcttcactggaaacccttgcgaccaggctgttttgaaaatcttgtgctgcgatgcaccaagaatttgtcatgggaaacatctcttccatatgcctctgcagaggatgatgccagtatcatcaagggaacaggtgttgttgaacctattgatacagaagaagctccacagattccaatcctccagagtgatgaagatgttgtagaggtaaagaatgaaccttcttggcatcttaaggcatttaaactgccaatgtggctagtagggccttcaatcctgttggttacgggtatagttccaactttatggctcccattgtcttcagtgtttcatggtcccaacatcgctggccttctatctctagtcggacttgacttcatttttaatatgggagcaatgttgtttttccttatggctgatgcatgcggccgtcaagagaacagtatttttgacctgaaaaggcagataccaatttcctacaggttctggaatctggctgctaccatagtaggctttgtggttccatttgccctgttttttgcatctcgcaggggcactctgcagccacaactaccattcgttccatttggagtgctgcttggaccgtatcttttactcctatctgtacagatgttgactgaaatgcttacatggcactggaaatcgccggtatggttggtagctcctgtggtttatgaaggctatcgggtactacagctgatgaggggtctccagttagctgacgaaatcagtgcgcctgactggatggtgcaaagtcttcgtggcctggtatcctggtgggtactcgtccttggaatccaattgatgcgcgttgcctggttcactggactcaattttgctagaaattcaagctatggagcaagtggtgatatgaaccaataaatcatgcaagaaaaacttgaggccgaacatctttgagaacctgcaatgcctgagcaatcgttttgtgacgctttttgtagctgtggtaaatagtgcagtttctcttttgctggagcaggaaccaggctgctagatacttcatactttgaactgtgtaagtattgtattgtagttagtatacaggaacatgaacatttgagatttg

SEQ ID NO: 15660 - DNA, 1327 bp, Zea mays
  Clone ID: LIB3060-047-E10_FLI
ttcagaacaagtccgaacgaactgaaggagaggaggaggaggaggaggaatggcggacgcagccagaggcctcgggtcttcgtctctcccggtggctaacgtgcaggcgcttgcggagtcttgcaacgacaacggagccgatgcgccggtgcccgggaggtacctcatcaaggatcctagcgccgaggaggtcgtagccgccggcgacagcgcctgcgcgattccggtcatcgatttccgcaagctgctcgatccggggtcgtccgaggaggagtgcgccaggctgggagccgcgtgccaccactggggattcttccagctcatcaaccatggcgttccggccgaggtgactgggaacctgatgaaggacgtagctgggttcttcaggcagccgctggaagccaagaaggagtgcgcgcagcaggccggcagcatcgaaggctacggccaggccttcgtcgtgtcggaggaccagaagctggactgggcggacatgctcttcctcatcgtgcggccgagggaggccagggacatgcgcttctggccgacgcgccctgagtccttcagggattccgtggacgcgtactccttggaagcttcgaagctagcgtaccgcctgctggagttcatggcaaggggcgtgggtgccgacccggcgtcgctgcagagcatgttccaagggcaggtgcagggcatgcgggtgaactactacccgccgtgccagcaggcggcggaccaggtgctgggcctgtcgccgcacagcgaccccaacgggctcaccctgctcctgcagatgagccacgacgtgcacgggcttcaggtcagcaaggacggcaggtggttccccgtgcaggctctccccggcgccttcgttgtcaacgtcggtgacgcgctcgagatcgttagcaacggagcgttcaggagtgtcgagcacagggccgtgatacacccgaccaaggagcggatttcggcggcgctgttccacttcccggaccaggatcggatgcttggtcctctgccggagctggtgaaggaaggcgacacagtgcggtacgcaacgacgacttaccaagagttcatgaagcgattcttcgctgcaaagctcgatggaaagaagctcatagagagattcaagctacagtagtagctacgacctctcagctcgaacaaaaaataaattcacttgtaactattaataatggccagttattgaacggtttgcttgtctaaaatgttaacgcgcgcaacctcgggtatgcattactgtgttacatccgtttgcttcctacctactgtcgcatgagttatccaaatgataaattttggt

SEQ ID NO: 15661 - DNA, 879 bp, Zea mays
  Clone ID: LIB3060-047-F3_FLI
ggggctgctgtacctgcacgagcagtgcgaccccaagatcatacacagggacgtcaaggctgccaacatcctgctagacgactgctgcgaggccattgtcggtgacttcgggctcgctaaactcctcgaccatcgggactcccatgtcaccactgcggtgcggggcactgtcggccacatcgcgcccgagtacctctccactggccagtcgtcggagaagaccgacgtcttcgggttcggcatcctgctgctggagctcgtcaccggtcagacggcgctggagtttgggaagacggcaaaccagaagggagccatgctggactgggtgaagaagacgcaccaggagaagaagctggacgtgctggtggaccaggggctgaggggcggctacgacaagatggagctagaggagatggtgcgagtagcgctgctgtgcacgcagtaccttcccggccaccggccgaagatgtcggaggtggtccggatgctggaagcaggggaagggctcgcagagcggtgggaagcctcgcactcgcagtcgcagagcgcggactcgcacgagttcaaggtgcctgacttcactttcagccgctgctactctgaccttaccgacgactcgtcgctgctggtgcaggccgtcgagctgtcgggcccgagatgatgatgacgacgacgccgccgccagtttgcactttgtacagcatgcatattaaggaccgagaatcctgtgtggactaccatactagaatagctagctatagatgtgtattagattaactgtacaaaaagaagagcgtgtgaggtttgtactgatttggatatttacagaattagtagtcgagacaataagaccaagtaaaaaagagcttttcattgttc

SEQ ID NO: 15662 - DNA, 1254 bp, Zea mays
  Clone ID: LIB3060-047-G10_FLI
atcggaaagcaacgtcgttgccccccccccccacctcgtcacgagtcagagagctacacaacaaccatcctgttcccgcccgcatacaggactctagctagctagctagcgttgttccgttgtggttgctctcgctcgctctcgttcggtcgatcatggagtggagggacagcttcttggacctggcgctcatcccgctcagcctgctcctccccatggcgtaccacgcctggctgtggcgcgaggtccgcctccgcccgctgcgcacggccgtcggcatcaacgccgccacgcgccgcctatgggccatcggcatgatgaaggacaacgccaagaacgcggtgacggtggtgcagtcggtgcggaacgtcatcatggggtcgacgctgatggccacgacggcgatcctcttctgcacgggcgtggcggcggtgctgagcagcacctacaccatcaagaagccgctcagcgacaccgtgttcggcgcgcacggcgagtacatgatggcgctcaagtacgtggcgctcatgctgctcttcctcctcgccttcctctgccactccctcgccatctgcttcctcaaccaggccagcttcctcatcaacacctcggcctgcctcttctcctcctccgccgactccgacgccgccgtcctcggcctcccgctgccgcccaccagggactacatcggcgacgtcctggagcgcggcttcaccctcaacctcgtcggcaacaggctcttctacgccggggtgcccctcctgctctggatcttcggcccgctcctcgccttcctgtcctccatggtcatggtccccatactctacagcctcgacgtcgtcaacctcatgggccacagcggatgcgtcgtcgtcagcggcaaatctgcggagatgaacggcgggagcgagtgcgcgcgtgccgtctgaagctgccggacttgtgtcctcaacaaaccatatgcatgcgatccgtacatgtgattcggttgagactgttgccgcgcgcaacggcctgtgatgtgtcgagcaccaaggagacggcatgttgttcgtcgtcgtcgttctctcattcatgtggggttataggctagccgcgcgccgtcgtagctgatgctgatgtactaggaaaaccttcgttgcatggatgacacggaacccataccccacgcggttcagttgctttgctgctcttggtgctcgacaagttgacagtgtgtgccactacaacacatattccaagtcggctttatct

SEQ ID NO: 15663 - DNA, 1433 bp, Zea mays
  Clone ID: LIB3060-047-G11_FLI
ggacgctgactccctgcccaacaacatcaaggatttgctacacgagcacactgttgcagacgatgtcgcaggaagcaagtgcctggtggtgcgcggttgggcgctacacgtggccatcctggcccatcctgccagtgacggcttcatggcgctctgtggatggggctccactctggaggttgttgcagccggtcttcccatggctgcctggccctttttcgccgaacaatttatcaacgagcagctcatcatggacgtgcttggtattggattgtctgtcgctgtgatgaagccaattgaaaatgttttgattgccagtaacatgggtggtgctgttgtgatgatatatgctcctgttttttggtcttgcctgacaagcttcacacttggaatccatggtcagatagttggggttctatgtttgccatttctggtaattcaactgaatatcagtatagctgtccagcaaaggttcttgtgggatccaggtggtgatcagtgttgcttactgaatttgtttattcatggcttgggggacttgcagatgcaacaagctagtctgtcttttgtcacgaagacaggatggctggtgattatcctttccttgctgctactccaatgggacaagccaaaccttcggggtcttaacaaatccaagtgcattcagcgtggcttccgtcgatgctatgtacatgcttgtccaagcaggtggtctgactggcttccgtcggccgagttttggtataatagctcgttccattctgctaccggtcgatctccttttgaggacttatatggttatgcacctcgccatttctgtattacttcatgtgatggtccctcagctggcctaaatgcattcttgcaagacaaactggttatgaccaaactgttacagcaacatcttttgcgcgccaagcaatagatgaagtctatggatgataagcaccgcactgagtgtgaatttgctgttggagatctgaaggccgtgggtgtgctaacgtcctggtatctccgttgctgcctgccactgactctgcttggcacattcatgaacagatattggagcgacatctggtcgtcccaaccttcctcgttggcaacatgggaagacttggaagcactcaagcacacctttcctcaggctccagcttgggggcaagctggttctcatggaggagggaatgtcagtatcccttcatcagtcactggaggtcaggcagagcatgttcgaggagatgcagcagataatgaagctacaaggctcgcaggccaagcaccaaggtttataggccagaatgggctaaatagttgctaggccggcctgtgtgccggagtataatatataagccaaacttagggcagagaaggggatgaaatgaacctgactctgaattctactatctactatcgtctccctgttcttcacctct

SEQ ID NO: 15664 - DNA, 1077 bp, Zea mays
  Clone ID: LIB3060-047-G7_FLI
ccgggaacaagggccccgacgtgcccatcttctcggtgcagcagccgtcgttcctgcacgacttcgccgtcacggagcggtacgccatcttcccggagatacagatcgtcatgcagcccatgggcatggtgacgggcggcgcgcccgtggggtctgactccggcaaggtgccccggctcggcgtgctcccgaagtacgccacggacgagtcggagatgcggtggttcgaggtgccgggcttcaacatgatgcactcgctgaacgcgtgggaggaggccgacggcgaggagctggtgctggtggcccctaacgtcctgtccgtggagcacgcgctggagcgcatggagctcgtgcactcctgcgtcgagaaggtgcgcatgaacctgcgcacgggcgccgtgtcgcgcaccccgctctcggcggggaacctcgacttcggcgtgatccacccgggctaccttggccggcgcaaccggtacggatacctcggcatcggcgaccccatgccgaagatctccggagtggccaagctggacttggaccgcgccggcacgggcgactgcacggtggcgcggcgcgacttcgggcccgggtgcttcgcgggggagccgttcttcgtccccgacgacgtggagggggacggcaacgaggacgacggctacttagtgtgctacgtccacaacgagcgcaccggcgagaaccagttcgtggtgatggacgcgaggtcgccgcagctggacatcgtcgccgaggtgcagctgccagcgcgcgtcccctatggcttccacggcatgtttgtcacgcaggccgagctccaggcgcagcagcaatgatcaaagcaccgaacactcgtccagtgtttacgtgctggggatctgtagcacatgattccaggagaaacacacacaaacacccatcaggtgcatactgaatagattgtagtaagaacaactctaggccacatagcattcacgaattatattgtagtgtaaatgtagcagaacccataaaagagttcatgagtagaattgatacgaaatcacaaaaaaaaattattggaatagaacaatgttcatc

SEQ ID NO: 15665 - DNA, 1152 bp, Zea mays
  Clone ID: LIB3060-047-H5_FLI
gcccgtttcagattcgtgacgtactccctccctccaaccacgcccggccagccaaacttgccatggcgctgccgtcgtcctcgacccccaccgcgtcggctccggcctccctcggcgagcggtggccgccgctggagtctacccccgcagttttcaaccagttcgtgtggtcgctaggtgtcccagaggacgacgtggagttccacgacgtgtacgggctcgacgccgacgcgttggatatggttccccagcctgtgctcgccgttgttctctgcttccccgatccaccacaggatgcaagttacccttcagaacaactcttaatttctggagaaaaggaaacacaggaccaggtttactttataaaacagatcgaatcattgggaaatgcttgtggaactattgctctactccatgctgttggaaatgcatcttccaaagtcaatttagtggagaattcatgcttggacttgttcttcaaatcaactgctaccatggacccatatgagcgtgctgtgtgtctggagaaggatgatacaatggcaagggctcacttacttgctgccaatgatggtgccactgagctcagtgatcttatagaagagcactacatttgttttgtgtatgttaacggaacactttatgagcttgatggaatgaaggatggacctataaagcacggaccctgttcttctataagtttgctgcaggtttagagaatacattatctgtgatggaaaccctgaaatcaaagaccacaagaatttttgtggtcaatcgtcatgggttcatagctgatggagaagaaggggtatggatagataggagctctatcctctatccgttcaggaaagaagattgcatcagagtatcagacctagcggtagcggcagaagtttctttgccctcttcattaggtgccgtctgaggtgtggttctttgtatctatgtttgctcatattgtaagcggttttgtgtggttgtttgtgtgtatgttttcttatattgtaagcagcttgtttgttgttgttggaatataagtgaactgtccatctatttccaccatcttaagcttttggatttgaactaattgatacatgtaacttaataattgatacatgtatcttaatatggtgttaaaagtctagattc

SEQ ID NO: 15666 - DNA, 2095 bp, Zea mays
  Clone ID: LIB3060-049-A3_FLI
ttcccctgctcggcctctgaggtttcccagtagcggctcctagcatcttctccgcgcgcagcttgcttcctccctctgccgctcgtctccatctctccatctcccagcagaccgcgcccagctccagccatgagcgccgacgtcctctctctgtgcttgatctcccagtcctccgctccctgaaaccttcacccacatgtttgtgaaggtccggtagtggagatcttgcgaggtccactgctctgcgctcctattccacctgtctcatcccctcatcatgctcgacacttgctccctggcagcatgccgtagcagcatctgtgcttggtccatgctccactgtgccgtgctgtttctctgcacgcgtcaagctcacgcgctgaatccagccccatgttgacgcgttcatgttccaacttgtcgtgccgcgtcgtcatcactttctgtcacgagctcgattcccgttgtcatcgggctttgtgcgtgctcgcgtttgccgtcgagtcgttgaacccgtcatcccctgctcaaccctaccccgccagctcgctccagatacaatctcgttatcgtcccgcgcgtcatcaagaatcccaagaatcgggtgaagacgaagctagcagcgcgatattccccaagcgctcgacaattgcctggatcggaaaatcactaccgatctcgaggattcgagtcggctattgaaacggtacgttaattaatcgcgtgatgcggaagacgagccaagtcgaccccaagcgtgggcttcttcgcaaggcgatgctgatggacaaacctgaagatggtcgtcaagtgctcatcgactaacaacactaacctagtgttactcaggcaagccccggtgcatttgccacctcccttgatatttttaaaatctttctcacttgcttgatgcattaggtgataggagttgattgctaaaacaattcctgcattaccttccttgaatttgattaccttccttgatcccccgttttacaaaagattttgatgcttagccttgctttagaaaaacaaaatgttttgtttttacaaaagatgatgtggcaaaagtgggtgggaggtttttgaaaataaaatttgatggtggatccatcagggccttgatggattcaacatctggaaaagatgtacctctgccaggtaccaaactttgggtttgaaatgattaagctgagaccgggcgggtgacttgcacgagaaaggagtctcggtgtagtgtctccgtctgagtcgattaaggaccttgtcgatgtaggcttgatgatcgaggaccctttaactggtcacatgcctcgtcatgggtaagccttgcctcgggcagactaaggccggaataagataacacgaaatgggcgtggagcggtggcgagagtagcgtgtaccctccgtggcaagaggctggacggtggtgtatctgtgctctcggtttgcgtgaacctgatccggtcttaagaaccccggtggcgggttgacatatgcaagggttaagtgctacatatgtcgtgtgattggagatcctcagctgagtataatcgattcggatcgccgtaccttcgcggttatgaagacttggtcactgccctacacgtagcattccactaaagatgatgggtttttgttaagaaattggctagtgcaggatcagtgattgaactagggtagaaagaactctagttacaggtaattctacttaacttgacaaataaaactggattttaaggatccactttagtaagcatttctgcaaaacagagtctttgattattgaaaagccttaccttgactcccatataaccagcatacccttgagagtcttttctttagtcgggtaagacttgctgagtaattccatactcagggttttattccctgttgtttttcaggttctaactttgtgctgttgttgatggtgttaagtgccggtgggctcggccttcttataagtctaagtaacccttctatacttcttattgaggatgatcccttgagctagcatatatatttcaaacttatacttttgtaatcactccgataaactaatgtaaaatttttgtaacctgtaaaatttggtagt

SEQ ID NO: 15667 - DNA, 1977 bp, Zea mays
  Clone ID: LIB3060-049-B7_FLI
tacgtgcgtgactacagttgcatgctatggccatggccaccacttcgccggcaactgtgcagccatcatcatacaagcacacgagccgcggcgcggcgcggtgctgccctcctcctctgctgtcctggaagacacgaagctttgggcagcaggtgacgacaagggccacggcggcgagctcccgtgggcagcccgccggcgtggcactggcagggggagaagagggcgacagtatcaggcggctgcagaacgggtcggacgtgcggggcgtcgcgctggagggcgagaaaggccgggccgtggacctcacgccgctggcggtcgaggccatcgccgagagcttcggggagtggctgcgagaggaggagctccggctccggggccaggagcccgagcagctgcgtgtgtccgtcggccgcgaccccaggctgtcggggccgcggctcagcgcggcgctctttgcggggctcgccagggcgggctgctccgtcttcgacatggggctcgccaccacgccggcctgcttcatgagcaccatactgccacgcttcaactatgacggctcaattatgatgacggcgtcacacctcccctacacccgcaacggcctcaagttcttcaccaagcgcggcgggctcacctccggcgacgtcgagaacatctgcgaccgcgcagcgcacaagtacgtggcgcggaagacgggagtcggcggcggcggcaggggcacgccgccggtggtgatgcgcgtggacctgatgagcgcctacgcgcagcacctccgcgacatcatcaagcagcgcgtggcgcacccgacgcactacgacaccccgctgaggggcttcaaggtggtggtgaacgcgggcaacggctgcggcggcttcttcacctgggacgtgctggagaagctgggggccgacaccacgggcagcctccacctggagcccgacggcaggttccccaaccacatacccaacccggaggacgccaccgccatgtcgctcacccgcggcgccgtgctggcgcagggcgcggacctgggcgtcgttttcgacaccgacgtggaccgcagcggcgtcgtggacgccgggggcgcggccatcaacggcgaccgcctcatcgcgctcatgtcggccatcgtgctgggcgagcacccgggcaccatggtggtcaccgacgcgcgcgccagcgacgggctcacgaggttcgtcgagtccaggggaggccgccactgcctgtaccgcgtcggctaccgcaacgtcatagacaagggcgtgcagctgaacgccgacggcgtggagacgcacctgatgatggagacgaccgggcacggcgcgctcaaggagaactacttcctcgacgacggcgcctacatggtggtgaagatcatcattgagatggtccggatgaagctggcaggggtggagggaggggtagggagcctcatcagggatctgcaggagcccgccgagtccgtgctcctccggatggacgtcatgggtgagcccaaggatgccaaggaaagggccacacatgcagtcgaggcttttaagaactacatccaggaggacaaacttttcggttgggtgctggacgactgcggggattgctcagttgccgagggatgtcttacggacacaaacaatgatcccatcaatgttgatgcacacatgtacagagcaaaactatacgacgagaatcagagagcagtaggcatggtccacattcgtcaaagtgtgcataatcccaacatagcactaaacatgcagtcctatgctcctggtggctgcaaatccatggcaaaggatcttcttgagaggttcttgctggcaagcggactgaatgagtttgttgacataagccaagtagagaagtttgtccagtagttcttatgcttattatagaatcttagatttacctactctgtatatgaacctagctaggagttcactactgttgcgagtgtacatctattacatt

SEQ ID NO: 15668 - DNA, 1801 bp, Zea mays
  Clone ID: LIB3060-049-G2_FLI
cgctttgcaacgcctccgctgcaatcagcccccgcggcgagattgccctgcccctgagtgctagttctcgccgttacgtaaggcttcttggccttgcgtcctccgtctttcgttgctgatacatcgaggtattaaagaagctgcctggttccgggcagcagaggtcgccgccgcctgcagcaatggccgacttctcctggctcacggtgcttggcttcctattcctcaccttcaactcaggcatggcgatttatcggtccaacggtgacgccggctccgtcgctttcgtcgtggtatcttatctcgacctggtggccctgttcgcctgcttgcgctactacgagcagttggatcagcagcactcccaaaagcgcgcgagggtcaaggctggggtttggagcctcacgaccctccttactatcatgttcagttacaaggtggctgagattatgcccctgccagtcaaacttgttgtctggtcgatggcagccgctaccacctgtggcggcttctacgctttcttcgtccacagcgagaagcctgtcatgccagcggcggcgccacggcccgccgcggccaaggatgcagcctccaactaggttcgtttgccaccacaaggcgcatactgccggccttggttcggcaccgcgcgttagatcccagggccaactaggttgttctctaattcctaatttcttggccttttctcttccactctccgccattttagctgtcgcctcggttgttttagcttgccggcgtggacagactggcagatctggagctcggcgcgaccagatccggtgctgctgtgcccgatggcagaggagatctctctggtttactctgctaagagtcaaagaggagctgatgacgacaactaagcttgggttaccgataattgagcctgttctctgcacgagaagaaatttccggcctcacctagtactaataagtatgctggatagtcccccagcacgggagttaattgtatcaagagaagtggagaccaagggcagagtagaactacagaggatatctttgtatatggaggctacatgtgaacaagaaaggagaggaggaagactgtagatctgaagaacctaaggagaaacaatcagagtacttgctggaacacatatatcttccatgataaaagttagatttcttgtttggtgctcatgcatgggttccatatgttcttcccgtcttattagaacatatctattggactaccatgcataaaaagccgtcgtttcataaactattgggactatacggcaccaatgaagctattgatgctggccggcaagctgacagcgaggtgaaagcttttcaaaacgatattccgagtggaagagaaaagaaaataaaagaaatagcaggttattttagaaaaaaaatagttggcccatatgtaacgcgcggtagctttaagattattatctccagcagcttattcatatattatacatatattcaaatttcactctgtgaatagtagtctagaatacagtagtgttttgagtaaactatggataaactgctggacaaggtctaagacaagtgctgcgtggtggcaacaaacgacacttagtcttgtttggtggcaatgacattggaggggctaaagttttttcgctcctaaacaagctcctaagaatcttacgtgttatgttgcattatggaatatctatgtatctgcaaattctctgtagtatgtatgtacctcggatgtgctctatgtggctttgtaattttgaacggaggaagtaataataagataaatggatggcgtaac

SEQ ID NO: 15669 - DNA, 638 bp, Zea mays
  Clone ID: LIB3060-049-H11_FLI
ccgccgccagccctaaggtcgcgccgtcagccagcccgtctgccgtcgtgaggtactgaggaatttttctggtaatcagcatggcactgtcatcaatgtttaagagaataaatgtgaaagatttgacctccaaggtttcagtctataccagtgctacaggcgctgggccacgaaaaggactgctggatcaacaaaaaatggtcgcgattccaatccaaagtatttgggggtaaagaagtttggtggagagaaagtactaccagggaacatcattgtccgccaaagagggacccgcttccatcctggaaactatgttggcatgggcaaggatcatacacttttctgcctgaaagaaggcaatgtacgctttgagcgcaacaaactctcaggcaggaaatgggttcatgttgatccagttgctggtcatgatcttcaccccatttacgcagatggttttgctactacatccgacactgagccaatgcaataaatgtgcttggggatttgggctgtcattttgttccaactcattcagctgccattttacagtttcatgtgtaaactttagcaggcttgaacgtagctggatcttttctttgtaatcataactactttgaataatataagttatacactgt

SEQ ID NO: 15670 - DNA, 1807 bp, Zea mays
  Clone ID: LIB3060-051-A4_FLI
gcatcttcctaccccgtcccgatccatccatggcagcccctaccgtcgtcttactgcccgtgtggggtgctggccacctcatgtccatgctcgacgccggcaagcggctgctcacccgcgggggtcgcgcgctctcgctcaccgtgctcgtcatgcgagcgcccacggagcagctcgcggccgatctcgacgcccacatacgcagggaggaggcatcgggcctcgacgtccgcttcgtccgcctccccgccgttcagcccccgacggacttccacggcatcgaggagttcatctccaggctggtacagctgcacgcgccccacgtcagggcggctatctccagcctggcttccccggtggcagcggtcgttatggacttcttctgcacggcgctgctcgacgtgacccgcgagctcgccgtgcccgcgtacgtctacttcactgccagcgccgggatgctcgcgttcttcctccgcctcccgtcgctccacgaggaggtgacggtccagttcgaggagatggagggcgcggtggatgtgcccgggctgccgcccgtgccgccgtcttccctgccggtgccagtgatggacaagaaccacccgaattacacgtggttcatgtaccacggcaggcgcttcgccgaggccgacggcatcatcgtcaacacggctgccgagctcgagcagagcgtgcttgctgccatcgccgacgggcggtgcacgccgggtgtccgtgccccgacggtctatccaattggcccggttatctcgttcagccccccgcccactaacacagaacatccgcacgagtgcgtgcggtggctcgacacgcagcccgcggcctccgtggtgctcctctgcttcgggagccaagggttctccgcggcgccacaggcgcacgagatcgcgcacggcctggagcgtagcggccaccgcttcctctgggtgctgcgcggcccaccggcacccggcgagcggcacccgtcggacgcgaacctctccgagctgctccccgatggattcctcgaaaggaccaagggcagaggcctggtgtggccgacgaaggcgccgcagaaagagatactagcccacgccgccgttggtggtttcgtgacacacggcggctggaactcggtgctcgagagcctgtggttcggggtgccgatggcaccgtggccgctgtacgccgagcagcacctgaacgcgttcacgctggtggcctatgtaggcgtcgccgtggcgatgaaggtggacaggaagaggaacaatttcgtggaggcctcggagctggagcgagcggtgaaggagctgatgggcggtggcgaggaagggaggaaggcgagggagaaggccatggagatgagggatgcctgcaggaacgccgtggaggagggtggctcatcctactcttcactacgaaggctatcagagaagatatgtaaagtcgacaagaacctatgagtctgacgatgagaggcaattttacatcacattctttattgctgtaaactagcagtaagagaggatgtgattgattaaggttgagaataaattcttatcattgaatataaattagatgaatgatatattttatctaaaaataaagtaaaaatcaaacacctataatttggcaatttctattatatatatatttcaagtgttcatagatgcttagaccatagagccttggccttgtgtaattgtgtttggtacttaggtatcacgtatctctgtcgttaccttcaaataaaaagtgtaataagggggctgttgaaatcagatgtctaaatttgaatttgagtttcttc

SEQ ID NO: 15671 - DNA, 480 bp, Zea mays
  Clone ID: LIB3060-051-B10_FLI
cgcttgcgaggtggtatgcagatctttgtgaagaccttgactggcaagaccataaccctggaggttgagagctccgacaccatcgacaacgtgaaggcgaagatccaggacaaagagggcatccccccagaccagcagcgtctgatcttcgctggcaagcagctggaggatggccgcaccctagcagactacaacatccagaaggagagcactctccacctggtgctccgcctccgcggtggtcagtaagccatgggtcatttaagctgctgctgtacctgggtatctgcgtcgtctggtgccctctggtgtacctctatatggatgtcgtcgtctaataaacatctgtggtttgtgtgtcatgaatcgtggttgtggcttcgttggtttaatggacctgttgtgtcctctgtgtgttgtacccaaaactcttctgcagcagtatggctcgaatccttatgaagtttgatgtttgaactt

SEQ ID NO: 15672 - DNA, 1183 bp, Zea mays
  Clone ID: LIB3060-051-C11_FLI
cgcttgcttttctcaagtcacagggccggcccagcccaaaatccttttcaccgctacgacctccgtgctccggcgatgcagcggatttcgctacgacttctgcgctcctcctacaccgccgcctccgcctccctctccaccacctcctcctccctccgcggcctggcagtatcccatggcggttggaccacccgaccgtcgctgcagcctccggtgcgaaccgcggcgccggtcgaactcaccaggtggccgccgcggaggggttactcccagttcgcgagcgggttcaccccgctgaagccgaagccgctgggatccatcctcgacatcgaacgcgccaagggcctctcccccgaccacctcgtcgccgcatgggatgactatcatttaggaaggggtcatataggtgcatctatgaaagcaaaactttaccatctcttggaacaaagatcagcttcatgccgtcactttgttattccgttgtggaagggaagtggatacactactatgttcatgcaagtccagatgccatacatggtatttacaggacttgaagactataaagcacgaggcacacaagcaagtccttactacacagtcactcattacacagagtttgctgagaccaaggacactgtgcttattcgaggagatgttgtttttaccagcaaactaaccgattcagaggcaaagactcttctagagactgctcactcgttctacctgaatgatgtgagatacagactcgtggagcgcttcaacaaagagactcatgattttgagttcggggacgtccttaaagtgcttgacatgccaaccatgtgacccagtttaattcccaaccaatagcaaatattcctagagcacattgattttctgtcacctcaaatcctcaatttagcacgggagattgctttcttgcatcatcagaggcagtaagatggagccactggatatcatcctgccttcgctcattgagcattccgtgtggattttgttgcactgattacaccatagacaattttgctgtttttttaagcagttgatgattttcagggatttgagacataagttatattttttgctatatcattgtacccattaggtccataatgacattttgtaccatcttgatgtatttcccctgaatatttttgtggaaaccataaaccaatttgtttgt

SEQ ID NO: 15673 - DNA, 1455 bp, Zea mays
  Clone ID: LIB3060-051-C3_FLI
cacgcgctcaccgtgctgcctccaccaccgatggctctccctcccggcgcaggggcggtggcgccggcgacgcccttcgccgcgaatccgtgccgtctccggcgggcgtctggtcctcctgccgccgcccttcggctcgggccgctcttctggccatgggaaaaggtgaaaatcggtcccctttctgtttcccccatgggttttggaacatgggcatggggaaaccagctactttggggctatcaagaaagcatggacaacgaacttcaggattgcttcaatctggctctaaggaatggcataaacctttttgacactgctgactcttacggaactggaaggctgaacggacagagcgaacggctactcggtaaattcatccttgagtttgaagggaggattaaatctccagatgatgtggtcatagcaactaagtttgctgcatatccttggcgacttacatcggggcagtttgtcagcgcctgcaagtattctcccgatttgtttgtttcatgtcttctttggaaagattacaacttgataggctcgggatagggcagctgcattggtctactgctaactatgcacccttgcaggagcgtgccctctgggatggactagttgaaatgtatgaaaagggccttgtaagtgctgtcggtgtcagcaattacgggccgaagcagcttctgaagatccacagctatctagcttctagaggagttcccttgagctcagctcaggtgcctgcagggaaacagttggctctgcatgtttatataactcccagttcagtatcgcatcatctgtattctgaaagctcttagtcgtacaggttcagttctcgttactgagcatgggtgacgatcagatggagctgaaaagtgtgtgtgattcattgggcattcgcatcatcgcatatagcccgcttggattaggaatgctcactgggaagtatggtgcttctaacctcccaaaaggaccaaggtcagtgctgttccgacaaatccttcctgggctggagcctctgctgtcttgcctgagaaggattgccgaaaagaaggggaagaccatgcctcaggtaagtgcttaccgagcgcagaacggcttgctgaaacgattctatgatcgcaccagcctaccagcacgtcgcaactacgatgcgcgatcgtcgaagtgttcctcgtgattcaaagatgatgccccgtactaccaacgcaggtggccatcaactggtgcatgtgcaagggcacagttcctatcccaggcgtcaaaacggtgaggcatgtccaggagaacctgggcgcgctcggctggaggctgagttctgccgagatctcggagctcgagtccgcagcgatggcggctccgaggaagatgatccagaatgtcttccagactgcctgaccgtgctgaatacatgtgtgtgtatgcatgtttctgcaatcgtctttactg

SEQ ID NO: 15674 - DNA, 855 bp, Zea mays
  Clone ID: LIB3060-051-C6_FLI
cttgaacatccaactgatccaaccaccgacccgggcgagcaagccatctccgtttccttgccagtcccgcgagcaccattcaccacaccagcgcagccgccatggccgacgtcgagaaggccacccccgtggccgcaccggccgagggcgcgggcggcgacgtggccgccgggagaaccggcgcggtggccgccctgctgcggcggtggcggacccaggacctgctggaccggtcggggtccgcgctgcgcgccgcggcgtgggcgttctccctgctggcgttcctcgtcatggcctgcaacgagcatggggactggaggcagttcgaccgctacgaggagtacaggtacatcgttgccatcggcctgctggccttcgtctacacgacgctgcagctcctccggcacggcgtccgcctcaccggcggccaggacctggagcccaagaccggcctcctcgttgacttcgccggggatcaggtaaccgcctacctgatgatgtcggcgctgtcagctgcgatcccgatcaccaaccgcatgcgcgagggcgctgacaacgtgttcaccgactcgtcggcggcgtccatcagcatggccttcttcgccttcgtctgcctggcgctctccgccctcgtctccggcttcaagctcgccaagcagacatacatctgatctgatactccgtacacggacacttgcatatacacttcacatatttatttgctccgttgtgtacagtctgaattgcgtgcgttgtgtacagtctgaattgcgtgcgtcatttaccattgttctcattgtatacatagatttggttcattgtgactgtataagagctacctcccaatttgaacgt

SEQ ID NO: 15675 - DNA, 947 bp, Zea mays
  Clone ID: LIB3060-051-D3_FLI
cctgagttcctcaccggcgaggcgagcacggaaaaaatcgcatggccttgcagcacgcaggtccagctagctctacgctgaccaccggccgtcatggcaggagcgccgcagccgtcctccgtcggccaccggcgggttctaggagccgtttgagggcgcacgcgcagaaacccgacgccggatcccgtggcgcgggagccgagaccgcgacgtcgtcctcatcctcccgctcggagaacgccgtcctcaaggccgcctggtacggctccgagctcctcggcatcgccgcgtcgcttctccggcccgcgccgtcgtcgcctcaggagggggatgctggcggtggcggtgacgcagagggcgaagcggcggcggtggcgggggccctggacctggaccacgcgggagtggccgaggccattaaggcggacttcgcgcggtcgtacttcgtcacagggaatctcacgctgagagcttacgaggaggactgcgagttcgccgacccggcgggctcgttcagaggcctgctgcggttcaaacggaactgcaccaattttgggtcgctcctcgagaaatcgaacatgaagctcaccaaatgggaggacctggaggacaagtcaatcgggcactggcgtttcagctgtgtcatgtcgtttccctggaggcctattctgtcagcaaccgggtatacggaatactactttgatgttgaatcggggaaggtgtgcaggcacgtcgaaaattggaacgttccaaagatggcgctccttcggcagattttcaggccgagccgatgggtctgggagaagcgttaaagcctgcagtggccgttgttttatgttccaaaccaaaatgcatgtgcgtgtacgtactagatatgtaaaagtacactcagaagaataactcgtatatatactagcagtatataaaatgtggatttacaaaaaaac

SEQ ID NO: 15676 - DNA, 628 bp, Zea mays
  Clone ID: LIB3060-051-D6_FLI
ggcaccaacccagcgcggcgccaccggcgacccgtacccccttccccggagagcgatggcgacggagctgacggcggcgcagctgcgcgcgtacgacggcaccgacccgtccaagcccatctacgtctccgtccggggcaaggtctacgacgtcacctccggccgcggcttctacggccccggcggcgcctacgccgtcttcgcgggccgcgaggccagccgcgccctcggcaagatgtccaaggacgaggccgacgtctccggggacctctccgggctcaccgacaaggagctcggcgtcctcgccgactgggagaccaagttccaggccaagtaccccgtcgtcgcccgactcgccgccgacgcctgaactcggcagtctcggtgtaaatttactctgtcctgcctcttgcggtgttcagtgttgtgcttgcttgcttgttgctagttgctttgctacccaataatctgaatggaaggacgtatgtgatgtgcctgctgaatagctcgagctcctagtccttgcatacactgctgtgctaccacatgacatgatgtactcgtgtgtgctttggttgttgtgtaattccatgaccatgatcagtaatctgaataaaaaatattggag

SEQ ID NO: 15677 - DNA, 569 bp, Zea mays
  Clone ID: LIB3060-051-F3_FLI
ctcgacaatggcactccaggcagcctacgagtacctgcagcaggccgtcggccatggcgcgtggtcgtccacgcagacgctgacgctgctgctcatcgccgtacccaccgtactactgctgctagcgtccctcgccaagagcacgtcgtcgtccggtaggggcaagccgccgctccctccctcgccgccgggcaccctccccatcgtggggcacctacaccacatcgggccccagacccacatctcgctccaggagctggtggccaagtacgggcacaacgggttccgtttcctccgcgccggcgccgtgcccaccctgatcgtgtcgtcgcccagcgccgccgaggccgtgatgcgcacccacgaccacatcttcgcgtcccggccgtggtccatggcctcccacatcctccgctacaacacctgcgacgtggccttctcgccgctcggcgaatactggcagcagaccaggaagctgatgaacacgcacctgctcagcaacaagaaggtctactccttccgccatggccgcgaggaagaggtgtgcctcgtcgtggacaacctccgcg

SEQ ID NO: 15678 - DNA, 1361 bp, Zea mays
  Clone ID: LIB3060-051-G8_FLI
catcactcgcggactcgcctcgtgcgcttccatttccactccgacccggccggcgacccgccccccggtccccggagcgaccgaggcctcgctcaccgacatgtgggccctcaacaacgccaaggccggcggaccctgcctcacgccgcggcacccagcgccgccttcccttgcgtcgccgtcgacggcatcggctgggcggaggttctggaggcgcagccccgtgtgggcgcccctggtggcggtgcgcgcgtcggggggcacgaggaaggacggctccgtcggtggcgaggccagcggcgaggaagccgatagcaaggcgtcgtctgccgggcatgatgatgcatctaccccaacaggggatacctctgctgggttgaaccaaccgcatgacgagccaaaaacaagcaagccgattaatgtttctagcagcaactactggcgagatgtcagggcaaaccttgtgcgtcgggaacaggagctattagtggatccaagtactccaacagagtcgaaggcgtcctcaggagatccattacagctccctcaaaagtgggctcatgctattacgatgccagaggcaggatgcgttctggttgctaccgaagcgctagacgacgacagcatcttcgaaagaaccgtcatcttcctcctcaggctcggtacaaggggcacgttcgatggcccgtttggagtcatcatgaaccgtccgctctacacaaagatcaagcacgtgaacccgatgttccgagaccaggcgacgcccttcggcgactcccccctcttcttcggaggccccgtcgacatgagcatgttcctggtgaggaccgacgacagcgcgcgcctcaaggggtttgaggaggtggtgccaggcatctgctacggcttccggacggacctcgagaaggccgccgccctgatgaacagcggcgcgatcaggacccaggacctgaggttctacgtcggccacgccgcctgggactacgagcagctgctgggcgagatcagggcggggtactgggccgtcgcgtcctgcagcacggagctgatcggcgatgccttgatgggcgacccttctcgcctctggaccgagatacagcaactgatgggaggataaagtgtagtactctctgagctcagccaggaacagaagcagggccggccgcgtaggtgtttgctcatttgagatgtaataatttgttatgggtaaggttgtggtcgagtctgtacataattggaatagggtgactcgcttgttagttgcccctagcctcgtgtagcaactgctgtgcgtcgaatgtactgaaacaggctctatataatgcctgcctgcctatgtatttcagcaattggcgaacgtg

SEQ ID NO: 15679 - DNA, 1939 bp, Zea mays
  Clone ID: LIB3060-051-H2_FLI
atcgtcacagtggtagatttgcgctgttacacatcactgcactgcacaggcacagatccacatgggctccatcgttgccgacgccgatcgccggccacacgccgtgtgcgtgccgttcccagcgcagggccacgtgacgccgatgctgaagctagccaaggttctccacagccgaggcttccacatcaccttcgtcaactcggagttcaaccaccgccgcttgctccgctcccgcggcgccagcgcgcttgacggcctcccggacttccgcttcgccgccatcccggagggtctgcccccgtccgacgccgacgccacccaggacgtgccgtcgctctgccgcgccaccatggagaactgcctcccgcatttcaggagcctcctcgccgagctcaactcctccccggacgtgccgccggtcacttgcgtcgtcggagacgacgtcatgagcttcaccctggaagcagccagagaggtcggcgtgccgtgtgcgctgttctggacggccagcgcctgcggctacctgggctaccgctattaccgcgacctcatggagaagggcatcttcccgctcaaagacgccgagcagctgacgaacgggttcttggacacgccgacggactgggcgctggggatgagcaagcacacgcggctcaaggacttcccaagtttcgtgcgctcgacggaccccgacgagttcatgttccacttcgccctgaaggtgacagagcagatagtcggcgcggacgccgtcatcctcaacactttcgacgagctcgagcaggaggcgctcgacgccatgcgcgccatgatcccgtcgtccgcgtccatccacaccatcgggccgctcgcgttcctcgccgaggagatagtgccccgcggaggcccgaccgacgcgctaggctccaacctctggaaggaggacgtgtcctgcttcgagtggctccacggcagggcgcccaggtcggtggtgtacgtgaactacggcagcatcacggtgatgacgaacgaggagctggtggaattcgcgtggggcctggccaacagcggccacgacttcctgtggatcatccggccggacctggtcaacggcgacgccgccgtgctgccgccggagttcctggaagccatcaggggccgcggccacctggcgagctggtgcccgcaagaggtggtgctgaggcacgaggcggtgggcgtgttcctgacgcactgcgggtggaactccaccatggagagcctgtgcggcggggtgccgatgctgtgctggcccttcttcgcggagcagcagaccaactgccggtacacgtgcgtggagtggggcgtggccatggagatcggccaggacgttcggcgggaggcggtggaggagaagatccgagaggcgatgggcggggagaagggaatggagatgcagcgccgcgcgggggagtggcagcagactggtctccgcgcgacgcggcccggagggcgctcatacgccaacctcgacaagctggtcgccgacgtgctcctctcgggtactagcggcaagagttcttaaaatctcaggagggtttcacttcgcacaccgccaccgtccaatgattcggactgaacatggatggtatggtagtacaccaaaagagaagtttgtgtgaatgtcgaggcaaacccgtaaatcatggagcatgtgatggaatggaaggaccgaaggagccagtagcggaagaagttacttctcgtagcaggcaaaaattggaatatgaaaatctggaagccaagagggttaatccctaattactatattttctatctgctagctgtattcgttgcaaatgcacacggtctgctgtttgtacgagtgtctggtaggcacctctacgcttaattaggttttgtccaatttttatttagtaattacattaaaaaatcgaagatcgaagttaatactaggtgt

SEQ ID NO: 15680 - DNA, 1429 bp, Zea mays
  Clone ID: LIB3060-051-H9_FLI
ttctcatgatccatattgttatggatatatttgagatcatgatttctatgattaattatcttttatatgtcatcatcataatgttaatttatggaattaaaatgatatggaaaatgcctataattttaacacaccaaaaacctaatgttaggcatttttctgtcagtggttttgctgctgtgctaaagcctgatccatttgatggtaaaaacttcttgatttggaaagctaaaatggtattgtggcttactgtaatgtcttgttttcatgccgctgagggcaagcctgtcaacttacctcctgaggatgaggctaagtttaaggctgaagacaacctctttcgaggagcagtaattagcgcacttgatacaaaattccagaaaagctatatcatccttcctacagggaaagagctgtggaatgcacttattggaagtttggagtaactgatgctggtagcgagctgtatctcatgtagcagctgtatgactacaagatggttgagaaccgatctgtagtggaacaggctcatgagtttcaggcactagctaagcaactcaaactttttctgtgtcctttgcctgacaagtttgtggttggcggtataatcgccaagttgccaccttcttggaaggactttgctacctctctcaaacataagagacaagagttcaatgtggaagagctcattggtactcttgatgttgaggaaagggctagaacaaaggacaatggaaaaggtgtggagacctctactgctaatgtggtgcagaagagaaacttccgcaagttcaacaagaagaaaaaccagaacaaacaagagaatacaaataaacctgttcaaatagcacaatttaaaaagaagaagaacaacaacaagggaaagggaggatgctttgtctgtggcagtgatcaaccttgggctagagagtgccctgatcgcaagttcacacaggacaagaaatcagctaatgttgtaaccactgaaactggagatgaaacatctgggtatggtaattctttaccatttgttctttcagtttgtaattcacctgagtggtggatggacagtggtgcaaatattcatgtgtgtgctgatgcctctatgttctcctcctaccaggtcgggaggtctggcgccttgttaatgggaaatgggtcgcatgctcatgttcttggtgttggtacggtcattctgaagtttacttcgggaaagacggtgccattgaagagcgtgcagcatgtgccctttatcaagaagaatctcgttagtgcttccatgctatgtcgagatggatacaaagttgttcttgagtcaaataaatgtgttatgtcgaaacatggtacttttgttggtaaaggatatgactgcggaggcttgttccgcttatcactgcatgatgtgtgtaataaaatggtgaattctgtt

SEQ ID NO: 15681 - DNA, 1048 bp, Zea mays
  Clone ID: LIB3060-052-A5_FLI
gagagatctcgatccgcacacctcacgcctctcttcctctcgccccaaggacaacgaaaacatcaaacaagagaaccaaaggaaacagagcaagagcatcgctctcgaagcaaaacgcgcaccacgccgtcgccggccggccacttcgcacgtacgtaggacgcgcacgcaccggtgcatatatggggctcctgaaccagctgtgggacgacacggtggccgggccgcgcccggactccggcctcggcaagctccgcaagtacgcctccttctccccctcgtcgtcgtcgtcggcggcggtggcggcggcggcggcggcgggctccgcgccgcctccgggcgccgtgacgcggagcttgaccatgctgcggcggccggcggcgctgtccgtcgtcacgtcgccccgcagcgagtccagctccgcgccgtcgtccccgtcgcccgcaagcggcgctccggattcgcccttcggcgcagctgcagcgacgacgcccaggggagagggctggacgaagaagctgcgcgggaaagccaggatgggcggcggcggcggtgacgacgcccccggcacgccgaggagccccaccgtgtacgactgggtggtgatcagttcgctggacctctgaagcccaagccaagacgagaactgcacaaggaaacccaccaccaccatcaacacagctagcgaactgaaggagggagggggcagaggggccatggccatgtaatgtaacgaccaatctctttcagagcttctggtgacgtgtccagttactatatacatacatacgttaacggtgtactatgtgtcttgttgtaaatgtcacccctgcgaggtgttgccgattttgtaagctactacgtactactacgctcggcatgtcaccgtgtgcaagtgcaacacaagtttgtaaaaatgactagctagtagtagcaatgctgttgctgtacgagtaggcctccctctgctttgtacaggggtagtccaacaagtatatggtttgctggtgccatgtaaaaatgtatatagaatcctacgttcacgccc

SEQ ID NO: 15682 - DNA, 1316 bp, Zea mays
  Clone ID: LIB3060-052-A8_FLI
cgctgcttcaagaaaccaccgagagcccaaccgcacaggcaggagagagagcagggagccagggacagtagcgtggggccggggagcaacgatggaggggaaggaggaggacgtgcgcctgggcgccaacaagttctcggagcgtcagcccatcggcacggcggcgcagggcgccggcgccggggacgacgacaaggactacaaggagcccccgccggcgccgctgttcgagcccggggagctcaagtcctggtccttctaccgcgcgggcatcgccgagttcgtcgccaccttcctcttcctctacatcaccgtcctcaccgtcatgggcgtctccaagtccacctccaagtgcgccaccgtcggcatccagggcatcgcctggtccttcggagggatgatcttcgcgctcgtctactgcaccgccggcatctccggaggacacatcaacccagctgtgaccttcgggctgttcttggccaggaagctgtccctgactagggccatcttctacattatcatgcaatgcctgggtgccatctgtggagctggagtggtgaagggcttccagcaggggctttacatgggcaacggcggtggcgccaatgttgtcgcccccgggtacaccaagggggatggccttggcgctgagattgttggcaccttcatcctggtgtacaccgtcttctcggccaccgatgccaagaggaacgccagggactcccatgtccccatccttgccccactgccaattgggttcgcggtgttcctggtccaccttgccaccatccccatcaccggcaccggcatcaacccagctagaagccttggcgccgccatcatctacaaccgggatcatgcgtggagcgaccattggatcttctgggtcggccccttcatcggcgccgccctggctgccatctaccaccaggtgatcatcagggccatcccgttcaagagcaggtcttaagctgccgcgggtgtgctgagacatgcatgccagttcggaaggacgagcgtcttcctgtggggagtgtcttgtctgcccacgcctagtttctctgctgaatctccatctctcttcccttcaagactgctcactgctgcactgctctgttatctgaacccagaactttgtgtactcctgtaccgagctgtgtgtatgttttttttttcttccatcgtgtttgttgcaagggttcccgtatccttttatgcgttgggatcgtggcaagaaagggcagatatcatgtggaaacgtgggtttatctatcagctggatttttcatccaagtggaaccgattcagaatttttc

SEQ ID NO: 15683 - DNA, 1013 bp, Zea mays
  Clone ID: LIB3060-052-A9_FLI
cgataaaatccgccgcggccgcctccacccacctcgacgctcgcttctccaaatccccccttcgccttgcgagggggcggaggggaggtggtagtggtagggtatacaggagtgctctgcccatggagaaggcggggcaacaacgccatgttatcggcggcggcggcaagaaggcgcccgcgctggggctgcagaagcagaactcgtggtcgccggacatcgagcgcgacgaggcgtgggagcgccggcgcaggggcatgcgccgcgggggcacggcgctgcgccgcgcccgcagcgtcacggacgacgacctcgacgagctccgcggctgcatcgacctgggcttcggcttcgagccggcgcacgccgccgcgtgcgcgtgcgcctgcgcctgcgccgggaggaaccgcctcctggagacgctgcccgcgctcgacctctactacgccgtccacggcggggcggcggaggcgccgccgtgctcgtgcggcgccgcgtcggaggcgtcctcgtccgaggagtcgccgctcggcagccccatgtccatactctctccaggcgacacgccggagacggtgaagatgcggctgaagcagtgggcgcaggtggttgcgctgtccatgctgagccgccactgagctctccgggccacggccgccgctaccttgtcgcattgggagtagagagaaaaaaccattcgagatgcacacaacagcagaaggaaggaatctccggcggtcgcctcaagcagaaaaaagacgaagagaaaaaaaaatctgttagggtttggtcatttggtgggccgccgccgccttccaccttgctcgtcctatcttggactgctagctaatcatctttcttccaccatgattgtatgattccgttggagacaaaacatcatgcctaattactttgcttgcttattaatcctcttgcttcccccctaatccatattagtttctcatcttcgtgtatgtacatggttcctttcaagaggcagattaatttccatc

SEQ ID NO: 15684 - DNA, 1295 bp, Zea mays
  Clone ID: LIB3060-052-C5_FLI
ctcgatcgccaataatggagtttccgcaccaccaccaccaccacggccatcgccgcgacgacgacgaagacgaccgcagaggcccgcctcccccggtctacggcggctacggccagccaccgccacccgacccgtacggccgcgcgcccgtcgaccccgatccgtacggtcgacctccgccccagtccgcgtacggtggggccggggacgcctacggccacagcggccaaggctacgcgcccccgccggcctacggcgccgggggcgggtacggcaacgtcgtccacgtcgcgcacgaggtcggcgacgagaggccttactacggcggcggcggcggcggtcttggtggcgcctacggaggcggtggctccgagtacggccacgagggccgaccgcaccacggcggcggcggatcccagtacggccacgagacacgcccgcaccacggcggcgggggcggcgccccgcctgtgaggcagcagacgtacaggatctactgcaaggctggggaggaccagtacagcctcgcctcccgcgacggcaaggtctgcctcgtgcgcacggaccgtgatgacgacgcgcagcactggatcaaggacatgaagtacagcaccagggtgaaggatgaggaaggctaccctgccatcgtcctcgtcaacaaagccactggagaggctctcaagcattcccttggccagtcacaccctgttcttctgacccgccataatccagactccctggacgagtctgtcctgtggacagagagcagggacgttggggatgggttccgctgcattaggatggtcaacaacatctacctgaactttgatgctttacatggagacaaggaccatggtggtgtgcgcgacgggacggcccttgtgctgtgggagtggtgcgagggagacaaccagcgctggaagattgttccctggtgaacaaggaaatgtgtgaccgagcccgcaccaaggaggagctcctgccgtaataagtgaagtgattggtactgaagtttctggaaataagaggctcttctgagatgcctgtttgtgtgagtatttgcgtttccattccgttttcatgataataaaacgcattgattattaatatatgtaatgtgatgctacactgagtggcagcgttggtatatatttgtaagaattaagaacccattgttgttggactaagcgtgacgagtgatgtactgatgtatgaacctttgcttgatgcatatgctcttctgctcctaccgtgggcttcgatgagtcgattatatatatgagtatcatgtttat

SEQ ID NO: 15685 - DNA, 377 bp, Zea mays
  Clone ID: LIB3060-052-C7_FLI
gcctcggcgccgtcgagggaggcacgtaaggtgcgcgcgaagcgagcgaggaaggtggccccggcgcccgcgcagcccaagcccaagccagcccgcgccgccgcttccggtgccggcaagaaggtcaacaaggccagcgcctgattagcggcggccgtcctggtccccccgcgcgcgcctccgtgtattatactagccggtagtagcagtaggagttgcaagtactagcagcgtggtagtcgtgatgatgttgtggtcgtcgtctccgccggcccgatcgatcgggcgctctgttccgccgtgtggcagagttttgtaaataactagtctggtgtgatgcgctcatggcaataaagcgcgcgcttctagcttccttg

SEQ ID NO: 15686 - DNA, 898 bp, Zea mays
  Clone ID: LIB3060-052-C9_FLI
ggcacggcacggcacggcacgaccgagctccagtctgcccccgcccccatccgcacgtccgccttgatccggcaaatggcgtcgccggcgcggcggctcctgcagaccaactccgtgcagtacccgacgctccccgcggccgacccgccgagcccgctggccgtcgactccgacgtggtggtcatcctcgccgcgctcctatgcgcgctcatctgcgtcgtggggctggcctccgtggcccggtgcgcgcgctcccgcgccgcgcccgccgccgccaggagggggctcaggaagaaggcgctcagggcgctgccgagcctcgcgtacgaggacgccgtggcggcccgggccgcggacggggcggcggaggtcctggcggagtgcgccatctgcctctcggagttcgcgccacgggaggaggtccgcgtgctgccgcagtgcggccacgccttccacgtcgcctgcatcgacacctggctcgccgcccactcctcctgtccctcgtgccgccgcgtcctcgtcgtcggcgacgcctccagtaagcgcccgccccagcctaagcgctgccgcaagtgcgaggcggccatggacgagccctcctcgtcgtccggttccgccggcgacacgcctgccggttcctgacccttctcacgagtgccacagccacgccgccgccgccgccagtttctagcaactgggctggcgatcttagctccactggaattccctcatcatcaggcgccgccggtttctagcaactgggttggcaatctttagctccactccacttcattccaaggattcgaacgttgatgctgtaaattgcaggttggtcgattatgtacatatttattttcagattagaaacatgctaaagtatcgtgtgaatgtgaatctc

SEQ ID NO: 15687 - DNA, 807 bp, Zea mays
  Clone ID: LIB3060-052-F10_FLI
cctagctctatagctcgagtattgcttgctctccacaagaaacaaggcagagcaccaacaatggccgccgcctcctcgtcctcggtcctcctgctgctcctggccgccgccttggctggcatgagcgccaacgccgccaccttcaccatcaccaacaactgcgggttcaccgtgtggcccgcggccaccccggtgggcgggggcacgcagctgaacccgggcgggacgtggaccgtcaacgtgccggctggcaccagctccggccgcgtgtggggccgcaccggctgctccttcaacggcaacagcgggagctgccagacaggcgactgcggcggcgcgctggcctgcacgctgtcggggcagccgccgctgacgctggccgagttcaccatcggcggcagccaggacttctacgacatctcggtcatcgacggctacaacctcgccatggccttctcctgcagcaccggcgtgcggctggtgtgcacggaccctggatgccccgacgcgtaccacaacccccccgacatgaagacccatgcatgtggcggcaacagcaactaccaagtcaccttctgcccgtgatcggccggaataggctctgcatttgcatgggctagtgatttggattttgcaggaataattctgatttggatttgcacaataatatataagcgtgcattacacgtgcacgcatttgtatgtacgcgcgtatacgtcgtacctacgtagctggatttgtgtgcgtgcttcgtaccaaatattaataagaataaacaaatatgactcgtgtcatacatatacacg

SEQ ID NO: 15688 - DNA, 2193 bp, Zea mays
  Clone ID: LIB3060-052-F2_FLI
gcccggccgcacagactcgatgccgcgcggtgctacggtggccctcttcgccggtccatcgaggaggcctgccgtggtgctctcggcggtctttgattccacgcaggaagagccccgggcggtgcgcgcggcgcggatttggcggcggcctcatggcatgaacggggctcaggcgatccgaacatcatagaagaaagaagcgacacataacaaccggacagggccacaaggaggtctctctctgggataaccacccaaattacaactcaagaagcaaacattattgatcaatacggatcacctcgtctgctagatgtttttatggaaagaaagcaacggccaagttcttggagatggatgccaatgcttccggttttgctgtcggagcgaatcatgaggaaggaaggaaacgcatggattgctgtggcaactcgctcgagtacagggatgatccgagcctttaatttcctctttacccacaaaattagtgctgtgctgtagtgtactactagtggttggtgcgcgctgggcagtccatgtgactacattttcgaaatggtttcacgtaacaaagagagattaattaggggcgggtgtgtgtgtgtgttatctatatcatgctatgctaactaccaaacagcctagaattgtacccaaatttaataaaattacttgctttgcccaaaaaaatagtaattctcacttttacatgagtccagcaatgtaaagttcgaccaaatcgataaatacctagaatttatgatgcaaagtagatattatattaactgtaatatatatatatatatatatatatatatatatatatatatatatgcatacatttatttagagatataaatattgataccattttgtataagtttaactataacttaaaaagtccagcccgtgtaaaacccagaattatattctttctgaaacaaagaaagtattaagatttaaaatgacaaatacatccttaaatttgtgttcatgtgctacctaggtcctactttttctacaatcccaactcatttcctcatcatcgagtttatcatctggctggcaggtgaagaggtgggctgtcctgacggagacataataagtggagacagatataagaccacacaacctgtcaaccaccttcacaatggccgacagagaataaatgaagacagataaccccactccacccaacgctccaaagctctgctgagtccttgctccaatggctgaactagcgaccagcctggtggtcgccccagtggtttccctgttgaagaagaaggttgtcagccttctcaccgaccagtacaaggtgatggagggcatggagaagaactatgacaccctcaagctcaggttggaagccatcgaagcggtcatcgttgatgctgagaagcaggggcctcgccgcggtgtgcaggaatggctcgagcaggtcaagacggcagcgtacaaggcacacgaggtctttgatgacttcgagtacgaggtgctccgccgccgggccaaggagaatgggcacatcaccgagcttggcgttatggacagggtaaaactcttacgcacaatcgtgttgcattccgtagtaggatgggctataggcttcgcaggattgttgacaccttcaaggaccttatggaagaaatgaaaacctttgaattcaacaagcttgagcccaaggcgactgcggcatcgttggagttgcgtgagatggatttcctcattgatgatcatgaagatattgttgccaggtctagacatgatgagaggaacaaaatggttaacatattggtcaatgccaatggtcgtgttgtcggtggtgatcttatggtcgttcccattgttggaatgggaggactaggcaagaccaccctcgctcagctcatccacaacgaccctcaggtcaaggagtacttccatctacgaaaatgggtatgtgtgtcagatgattttagtgtccttaatcttgccaacaagatatgtaatgcctcagagagagacctcgaggaagcagtgaagaagcttcaagaacatcttaacggaaagaggtattggctggagcttattagttattagtaactttactttctttgccttgtatgatgtttttatttcattatttactaaacactcattacatcgtgtcatattgtgtgtacctaatggacttctttgctgatatttact

SEQ ID NO: 15689 - DNA, 728 bp, Zea mays
  Clone ID: LIB3060-053-A10_FLI
tgacggttgctctagatccgttcatcctggtggttttgtgaggtcgaaagcggcgagcgaattagaagatgctggacaagctgtgggacgacgtggtggccgggcctcgcccggagacgggcctcgagaagctccgcaaggccaccaccgcccgtccgctcgtcatcaacaaagacgcggacggcggcagctacaagcgggcgcagtcgatgccgtcgaccccgacgacgccggtgacgccgtcgtcgtcgtcgtcgtcgacgacgccgcgcggcgccggcaacgtgtggcgcagcgtcttccacccggggagcaacctggccaccaagggcatgggcgccaacctcttcgaccggccgcagcccaactcccccaccgtctacgactggctctacagcgacgagaccaggagcaaccaccgctagatcgggcgagatggatggacagtgaagaggccatgtttgctggtccttgtggttatctaaaacgcacgcatgctctattatagctagtcatcactatatatatacttgtgtttgtgtattgttgttcttgttctgctggtgtctccgccgtttaatttgacctatgttatggagtgagtgatatatgtgccgtcactcctagtatatagtagtgagtgactagttggtatgtgtagtactgtactatcttttctccatatgcatgttttgccagcgcgtaatgaatgtaatgtcagtactgct

SEQ ID NO: 15690 - DNA, 2365 bp, Zea mays
  Clone ID: LIB3060-053-A5_FLI
tattattattattattattattcggctcctgctcatcagctgcagcagtcgtgctccggaccggagaagtcgaaatggaggagaggctgttcgccacggagaagcacggtggccgggcgctctacaggctccacgccgtcacggtgttcctggggatatgcctggtgctctgctacagggcgacgcacgtcccggctgccggctccggcggcagggcggcgtggctggggatgctcgcggcggagctctggttcggcttctactgggtcatcacgcagtccgtgcgctggtgccccatccgccgccgcaccttccacgacaggctcgccgccaggttcggagagcggctcccatgcgtggacatcttcgtgtgcacagcggacccgcggtcggagccgccgagccttgtcgtggccacggtcctgtcggtgatggcgtacaactacccgcccgcgaagctcaacgtctacctctccgacgacggcggctccatcctcaccttctacgctctgtgggaggcctccgccttcgccaagcactggctcccgttctgcaggaggtacggcgtcgagccacggtcgccggccgcttacttcgcccagtctgagaagcctcgtcatgatccgccgcacgccttgcaggagtggacgttcgtcaaaaacctatacgatgaaatgacggagcggattgactccgctgctcggacgggcaatgttcctgaagaaactagagcgaaacacaaagggttttctgagtgggatacgggtattacctcaaaagaccaccacccgatcgttcagattctgatagatgggaaagacaaggctgtagctgacaacgaaggcaatgtgctgccgacgctggtgtacgtggcacgagagaagaggcctcagtaccaccacaacttcaaagccggggcgatgaacgctctgatccgagtatcgtccgtggtaagcaacagccctatcatcctgaacgtggactgcgacatgtactccaacaacagcgacacgatcagagacgcgctgtgcttcttcctcgacgaagaaacgggccacaggatcgcgttcgtgcagtaccctcagaactacaacaacctcaccaagaacaacatatacggcaactccctcaatgtcatcaaccaggtggagctgagcggcctggacgcttggggcggcccgctgtacatcggcacgggatgcttccataggagggagaccctgtgcggcaggaggttcaccgaggactacaaggaagactgggacagaggaaccaaggagcagcagcagcagcaccgcgtcgacggcgagaccgaagcgaaggccaagtcgctagcgacctgcgcctacgagcacgacgacgaggacacgcggtggggagacgaggtggggctcaagtacggctgctcggtggaggacgtcatcacggggctggcgatacactgcagagggtgggagtcggtgtacagcaaccccgcgagagcggcgttcgtcggcgtcgcgccgaccacgctcgcccagaccatactgcagcacaagcggtggagcgagggcaacttcggcatcttcgtttccaggtactgccccttcgtctttggacgacggggcaaaaccaggttgccgcaccagatgggctactccatctacgggctatgggcgcccaactcgctgcctacgctgtactacgccgtcgtcccttcgctgtgcctgctcaagggcacccctctgttccctgagctcacgagtccgtggatcgcgcctttcgtctacgtcgcggtcgccaagaacgtctacagcgcgtgggaggcgctgtggtgcggagacacgctgagagggtggtggaacgggcagaggatgtggctggtccggagaacgacctcgtacctctacggcttcgtcgacaccgtcagggactcgctggggctgtccaagatgggcttcgtggtgtcgtccaaggtgagcgacgaggacgaggccaagaggtacgagcaggagatgatggagttcgggacggcgtcgccggagtacgtgatcgtcgcggccgtcgcgctgctcaacctcgtgtgcctggcagggatggcggcggcactggatgtgttcttcgtccaggtcgctctctgcggggtgctggtgctcctcaacgtcccggtctatgaagccatgttcgtcaggaaggacagggggaggatgccgttcccgatcacgctagcctccgttggctttgtgacgctggccctcattgtgccattcttttgactttgaggtgctaataatacgtgtacgggcacacgcacgttcgcatgtatgacgattatgggcaacaggcgtgtaataccactaatacctattaaacactccagtctccc

SEQ ID NO: 15691 - DNA, 728 bp, Zea mays; identical to SEQ ID NO: 15689
  Clone ID: LIB3060-053-A9_FLI

SEQ ID NO: 15692 - DNA, 1260 bp, Zea mays
  Clone ID: LIB3060-053-B10_FLI
ttttattatggtgacaattcattgttgccgtgagccgtgagcgtgacattgttgtgcgccttccactgccagtaatggaagcaggcgccggggaagcagcagcaagcgcaccgcgcagactgaccctgccgtggaaggtgcggctcctgctcctctgcctcgatgtcgttgccggtctctcgatgcgtcgcgacggcaccatcaaccgctccatcttcaacctcttcgaccttcgtgccaccgccagcacgcgcccggacaggcagggcgtccggtccgccgacgtggacgtggacgtggacacgtcgagcggcctgtgggcgcgcgtgttctggccgtcgccggaggcgtccgcggccccgctccctgtcgtggtctacttccacggcggcgccttcacgctgctctctgcggcctcgtacgtctacgacgccatgtgccgccggttctgccgcgagctgggcgccgtcgtcgtgtccgtcaactaccgcctcgcacccgagcaccgctgccccgccgcgtacgaggacggcgtcgccatgcttcgatacctcgcctccgcgggcctccccgacagcgtcgacgtccccgtggacctctcccgctgcttcctcgccggggacagcgccggcgccaacatcgcccaccacgtggcgcagagctggacgacggcctcctccccgccgtgtcccatccccgtccgcctcgccggcgccatcctggtgcagccgtactttggcggcgaggagcggacggaagctgaggtccggctggatgggaacgtgccggtggtgaccgtgcgaggctcggactggatgtggcgggcgttccttccggaaggcgccgatcggaaccactccgccgcgcacgtgacagacgacaacgccaacctggcggacggctttccgccggtgatggtggtgatcggtggcttcgacccgctgcaggagtggcagaggcggtacgccgacgtgctgcggaggagggggaaggaggtaagggtggtggagttcccggacgccattcacacgttcttcctcttccccgagctcaccgactatggtacgctcgtcgaggcgatgaaggcgttcatacgcgagcaacgcatctgatctaattctgcctcacggatcaccgacctacgtggacctacatggtccgtgcaaataattttgtttcccatgcacgtaatggtccctacatggtccgtgcaaataatttctctataaaccactattcaagtctcccatatatttattc

SEQ ID NO: 15693 - DNA, 807 bp, Zea mays
  Clone ID: LIB3060-053-B9_FLI
ggaattgccgagcgagcgagcttgcgccgtgcgcgatggagggtgacgagaagtcggcgggcggggcccctgcttactggggcctgggcgcgcggccctgcgacgcgtgcggcgccgaggcggcgcgcctctactgccgcgcggacgcggcgttcctgtgcgccgggtgcgatgcgcgggcgcacggcgccgggtcgcgccacgcgcgggtctggctctgcgaggtctgcgagcacgcgccggcggcggtcacgtgccgcgcggacgctgccgcgctctgcgcctcctgcgacgccgacatccactcggcgaacccgctcgcgcgccgccacgagcgcctccacgtggcacccttcttcggcgcgctggccgacgcgcccaagcccttcgcctcggcggcgccgcccaaagcaaccgacgacgacgggagcaacgaggacgaggcggcgtcgtggctcctccccgagcccgaccacgggcagaaagaaggcgccacgacggaggtgttcttcgcggactccgacccgtacctcgacctcgacttcgcgcgttccatggacgacatcaagaccatcggcgtccagcagagcgggccaccagagctcgacctcgccggcaccaagctcttctactccgatcactccgtgaaccacagtgtgtcatcgtcggaggcagcggttgtgcccgacgcggcgtctggcatggcgcccatggtggcagtggtcagcaggggcctggagcgggaggcgcggctgatgcggtaccgggagaagcgcaagagcaggcggttcgagaagacgatccggt

SEQ ID NO: 15694 - DNA, 811 bp, Zea mays
  Clone ID: LIB3060-053-C8_FLI
cgcacctgttcaagaacagctcgggctccaaggtcttgagctggagccagaggtttggcatcgcagttggcgtggccagggggctgtcttacttgcacgagaagtgccgggagtgcatcatacactgcgacatcaagccagagaacatcctccttgatgaggagatgggcgccaaggtcgcggacttcggcatggccaagcttgtcggccacgacttcagccgcgttctgaccaccatgcggggaacgatgggctatctggcgccagagtggctcgcgggcgcgccggtcaccgccaaggccgacgtgtacagcttcggcctgctcctgttcgagctcatctcgggacgccggaacaacggctcctcggaggcagggtccaactccgctgtgtacttcccggtgcacgccgccgtcaggctgcacgcgggggacgtggccgggctgctagacgacaagatcgccggggatgccaacgcgaaggagcttgagagggtctgcatggtcgcgtgctggtgcatccaggatgaagaaggcgaccggccgaccatggggctcgtcgtgcagcagctggaaggtgttgctgatgtcggcctgccaccgatcccgtcacggcttcacatgctggcgatgatgaataaatgtgccgtcggtggggaagcagaggttgaaccctgttcaaatagcggtagcaaaatagacacagaagtttgaaggtactacgcaggtccgataggtaattgtagtttcagcatgcgagtcccattgttcatatgcctgtttgccgtagctgctaaactgtgattcttcgc

SEQ ID NO: 15695 - DNA, 857 bp, Zea mays
  Clone ID: LIB3060-053-D2_FLI
tgcggccatggaggacgaggagcacgaggtgtacggccaggagattcccgttgacggcgaggacgtcgacatggctgccggcgacgatgccaccaagctgcaggaacttgacgatatgaagcgccggctcaaggaaatggaggaggaggccgccgcgctccgcgagatgcaggccaaggttgccaaggagatgcaaggtgtagatcccaatgcaaccacatctgaaaacaaagaggagatggattctcggtcagtattcattggaaatgttgactatgcgtgcactccagaagaagtgcagcagcacttcaattcttgtggaactgtcaacagagttacaatcctgactgacaagtttgggcaaccaaaaggttttgcttacgtggaatttgttgaagttgaagctgttcaggaagctatcaagttgaacgagtcagagttgcacggtcgccaactcaaggtggcaccgaagaggactaacgttcctgggatgaagcaaccccgcggtcgaggtttcaatccgtaccatggccacccctacatgaggccgtatggttatagtccttatggttatgggagattccccagattccgccgcccgcgaagaccttatttttgaagctcggttcccatttagcagaacatgggcgataatcggccgcgttctgttatttcatagcttattcaggacgttcccatgcatgtttctgtattgacgatgcttaagctttgtactgtattgtatcagttatgcaagacgattatgatttagttacacgaaatgcactgttgtgatgctacttggggtgcgccacttttgggcctcgaatatgattgtataagctgatgcattattt

SEQ ID NO: 15696 - DNA, 1259 bp, Zea mays
  Clone ID: LIB3060-053-E2_FLI
aatgtaccttgggtcagttacaggacttgcattttcccccttgctgatacataagttcggttggccatcagtcttcttttcatttggatccctagggcttgtttggttcacgacatgggcaaccaaggcatatagttccccacttgaagatcctggaatcagcgctgcagaaaagaagcttattgctagtcagagcacagcaggcgaacctgttaaaacaattccatggagattaatactatcaaaaccacctgtttgggcacttatagtttctcatttctgccataactggggaactttcattttgctcacatggatgcccacatactacaatcaggttctgaaattcaacctcatggaatctggccttatctgtgttcttccctggttcaccatggcggtttctgcaaatgttggtggttggattgcagacacacttgtcagcagaggagtatctgtgacaactgttcgtaagatcatgcaatcaatcggattcttggggccagcattttttcttactcaactaagccatgttaattcgcctgccatggcggtgttgtgcatggcttgtagccagggaactgatgcattttcgcagtctggtctatactcaaaccatcaagatataggccctcgatatgcaggtgtactgcttggtctttccaacacggctggggtcttagcgggtgtatttggcacagcagcaacaggatacatcttgcagcatggttcttgggacaacgtattcgagttatcagtagtgctttatctggtagggactttggtatggaatgtattctcaactggcgagaagattcttgattgaagggtgtatgtacacagtgtgcttacagttcgtagtgacaaactcatttcggatcgacaacttgacccctggacataatacacttcaagataacaaatgtgtcatcgcgcagcacgagaagtatcaacctctacatcccggatattaaattgcctggttgtgatgttgctctggtagagacgatttgaagcatatggaattatggatgagttgagcgatgcacccgttccgagcatgccactgtatattgtgttgagcataggtatcatgtacagcatggtagaaagattcgtcatacagagtagttttttttttacttgtacaatttttccctcttgaatagtttgttcctgtaacagcccgacgtagataaaaacaaggaaacctggggatgggggtactactaatgcaaacatttggtgaatatttatcc

SEQ ID NO: 15697 - DNA, 1196 bp, Zea mays
  Clone ID: LIB3060-053-F2_FLI
ggatctcaaagggatgttataaacatcaacgaggatgtcacgattgatgatgcaatgaatgataaatctatgccagattctggacgaaaggtgactaatctactaggccaatttgttaattccacttggtctccggtctaatccacgtttttgtcatctctttggagatgaaaatgtgatttagcagcattagcagctgtcatgatcgtcatgcaatatctattttggattgggtagcagcgaacaactcaacaacacttggacatttcaacatgaaatgatctccatgagaagaatgtccgcctgacttcagtagaccaggacaatttagtttgaagatgctggatcatttctgtgatgattaagtctttgtcacttcaataagcgtcctgtatggtgttgcctgtagccctgtatggccgaagctactaaagcaggtaattagggtttgataaagttaaagcaaccgagtcccaaacttttgatcttgattcgtgcaaacggggacgatgcaacacattttcaaggtattctggacctttatgaagcatgctctgggcaggtcatcaacaaagacaagtcttctgttcactaaaaatacgagaagtgagacgaagatggcggtcatgcaagctctaaatttaacacaagggactttcaacgacagatatctgggcttaccagttcgctttgggcagtccaggacaaaaacttcttagtacttaaatgataatgtgacaacgtattcaaggttggaaagaaaagctgctgtcaaaagccagtaaataagtgctgataaaggccgtagcacaaggaattccaacatatgctatgggatgctttgacttaaggaagacttgtctgctcaaatcagcaatgccatattcagatattggtggagtcaacaggacatgggaaacaaagtgcattgggtgaattgggctaaaatgaaaacgctaagggcttgttcgtttcacggttagtccatgtggattggttagtccatgtggattgggtggtattgagtcggtttaaatccataacaaatcaaaatccattccaatacacttcagtccacatgaaactggaataatcgaacaaggtctaaagagttgtgatggaatggagtttagagatatcgtagtatgttcttttataaacttagtcaaaactaaacaagttcaacttcaacttat

SEQ ID NO: 15698 - DNA, 1568 bp, Zea mays
  Clone ID: LIB3060-053-F8_FLI
gtggggcgagaaaagggaagcaagctgggagagaagaatcacaccgggccgtgccgatgggtgtttacgagtagcagttgtatctcgttgacctcaccgcctgcagggcaccaaggaggagatgacttccccgaagcgggcagcagggcgggaagggtgcggatgcttggccgccgtcgcgcggggcctccgcggggcgtgcttccggccggcggtgacggcggacggtgacggcggcggctcggccaagggcagccacgttcacgacgcagcagagacaagatatctgaatgctagcaatcgggagcttggtgatcattttcagacaaaacgcgatggtgaaaatggtgttgatgcatcaattgaaaagagaacacccaagctacttcagtttacctttcaagagttgaaatctgccacgcttaacttcaggccagacagtattcttggggagggtgggttcggttatgtattcaaggggtggattgagccaaacagcactgctcctgcaaaacctggcacaggggttactgtggcagtcaaaagtttgaagccagatgcgcttcaaggtcatagagaatgggtggcagaagtggactttctgggacagttgcatcataaacaccttgttaagctgattggatattgtattgaggatgatcaaaggttacttgtatatgaattcatggcacggggaagtcttgaaaatcatcttttcagaagggctcttcccctaccttggtccaacaggatgaagattgctctaggtgccgcgaaaggactagccttcctccatggaggtcccaaacctgttatttacagggattttaagacatcgaatgttcttcttgatgtggagtacaacgcaaaactatctgatttcggtttagcaaaagctggtcctcagggtgataaaactcatgtatctactcgggttgttggcacctatggttatgctgcaccagagtatgtaatgacagggcacttgacatctaagagtgatgtttatagcttcggagttgtgctactcgagatgttgactgggagaagatcaatggacaagaagcggcctacgggggagcagaacctggttgcatgggcaaggccttacctaaatgatcggcgaaggctctatcagcttgtagatcctcgcttggggctgaactactctgtcaaaggggtgcaaaaggtcgctcagatctgccactactgccttacccgtgacagtaagtctcgcccatcgatggatgaagttgtcaagcaactcacaccattacaagatctaaacgacatggcatctgcttcgccaaggcctcgctcaactcagcgcggaaaggtgcatcgatgacaacccggttctgttgtaagaagagcagtgtggtcctggttgcttgatgcttgtttggtttaattgtatagcaaaattaggtgttgcctgccgatacctggagatgtgacaccgcctgatgtgtcgctcaggtcagtcacactgctctgctgtttggctggttgccaaagcaagataacgatgtatctggttgcatcatgtaataattattataattacc

SEQ ID NO: 15699 - DNA, 1293 bp, Zea mays
  Clone ID: LIB3060-054-B1_FLI
ccttcccgtccatcgccgtcgccggggcttcctacaacttcaaaatggcggctaccgccaccgccatggctatagcaactatctcccccgccgctccgattccatccgcgcccttcccatcccttcccctccccctcggcctccgcctccgctctcaacccctcctcttcgctgcttcccgccgccgcttcctccatgttcccaaagccgcctcctgggacgaatccgtccccgaggatggtggagatgcggaggaatccgttgccgctggggacgacgaggacgaggacgagaagccgcggcccgagccggtgtcctcctccgagttccagttcgcggcgccacccgagggctacgtcgagcccgcggcgtttgacgagctaccgccggagtccccagaagacgtggcggcggcgtacgaatctctctacgggccggccttcagcggcgagacattgctggggaacaatgtctttgaggtcaaggtggtcgaccccatcgacatggaccgggagcagcgcccgaacgacgatttcaccgagcgcgtcgtgcaggtcaaccgcgtcaccaaggtcgtcaagggagggaggcagctctcctaccgcgcaatcgtcgtcgttggcgacatgaagggccacgttggtgtcggcgtgggaaaggccaaggaggtcacggaggccatcaccaaggccgccatgaacggccggcgcaaccttgtcacagtgccgctaactaagtactccacattcccgcacagagctgatgcggactatggagcagccaaggtgatgctgaggcctgcttgccctggatctggtgtcattgctggtggagccgtgagggttgtgctggagatggctggtgttgaaaatgctctgggcaagcagctgcgcagcaagaaccccctgaacaacgctcgagccactatcaaggcgacgcagatgatgaagcagttcaaggatgtcgctgaggagcgtggtattccaatggaggagctgtggaaatgataaaaacaattcgaaaccaagaccccccccccctttgtagcattctttctcctgtcgctgtaattttcttaaggtcttcatttttctgctgtatctatgggatgaatcccgcctcacggtttcttttttgcatctctcttctgagattctgtgtgtgagaattgagtccatgagatctgaccctatatgcttgctcttcacttctgtacactgctactggtggaaattcagaccaaagaatgaacagatttagcgcgaaaatgcatcttgtctgtacacaccgact

SEQ ID NO: 15700 - DNA, 713 bp, Zea mays
  Clone ID: LIB3060-054-B12_FLI
ccccggccattcactcacccacctagctagtcatcactagtcacgttcgtccaccagagacaacaatggccatggagacgtgcttcagagcgtgggcgctgcacgcccccgctggcagcaaggacaggctcctcgtcggcaacctggtgctgccgtcgaagcgggcgctcgcgccgctgtccgtgggccgcgtcgccacgcgccggccgcggcacgtctgccagtccaagaacgcagtggacgaagttgtggtggcggacgagaagaactgggacgggttggtgatggcgtgcgagacgccggtgctggtggagttctgggcgccgtggtgcgggccgtgccggatgatcgcgccggtgatcgacgagctggccaaggactacgccggcaagatcacgtgctgcaaggtgaacacggacgacagccccaacgtggcgtctacctacggcatccgcagcatccccaccgtgctcatcttcaagggcggcgagaagaaggagagcgtcatcggcgccgtcccgaagtccacgctcaccaccctcatcgacaagtacatcggtagttcatgagcatgccatgccatgccatgcatacatgcatcgacgactaaacacatatgtgtatctctagtagcctttgcatacgggatatgatcaattcaagcagccagccgtctgctactgctgtgttatatataccatacctccatgtcg

SEQ ID NO: 15701 - DNA, 1774 bp, Zea mays
  Clone ID: LIB3060-054-C12_FLI
gacccaatcgccgcaaacccctccggaatttcttatcccccctcatctgctccacctccgacctcgcgcgagacgagcaagcccaagtatggccggagcagcagcagccgccgtggcgtccggggtctcggcccggccggccgcgccgaggagggcttctgcgggacgccgcgctcggctgtcggtggtgcgggccgcgatatccctcgagaagggcgagaaggcgtacacggtgcagaagtccgaggagatcttcaacgccgccaaggagctgatgcctggaggtgttaactcgccagtccgagccttcaaatctgttggtgggcagccagtagttttcgactctgtaaagggttctcgtatgtgggatgttgatgggaatgagtacattgattacgttggttcctggggtcctgcaatcatcggccatgcagatgataaggttaatgctgcattgattgaaactctgaagaaaggaactagctttggtgctccatgtttgctggagaacgtattggctgagatggtcatctctgccgtgccaagtatcgaaatggtccgctttgtcaactcagggacagaagcctgcatgggagcgctccgcctcgtgcgcgcattcaccgggcgggagaagatcatcaagttcgaaggctgctaccatggccatgccgattccttccttgtcaaagccggcagtggtgttgccacccttggcctccctgactcccctggcgtccccaagggggccacctacgagactttgacggcaccctacaatgatgtcgcggcagtgaagaaactgttcgaggacaacgcgggggagattgctgccgtcttcctcgagccagttgttggcaacgctggtttcatccccccacagcctggtttccttaacgctctccgcgacttgaccaaacaggatggtgcgctcctggtcttcgatgaagtgatgaccggcttccgtctgtcttacgtggagctcaggagtacttcgggatcacccctgacgtgacgaccttgggcaagatcatcgggggtggcctccccgttggtgcctacggtgggagaagggacatcatggagatggttgcccccgcagggccgatgtaccaggcaggaactctcagcgggaaccctctagccatgaccgctgggatccacacgctcaagcggctgacagagcccggcacctacgagtacttggacaagatcaccggcgaactcgtccgtgggatactggacgtcggtgcgaaagcagggcatgagatgtgcggaggacatatcagaggaatgtttggcttcttcttcaccggcgggcccgtccacaacttcggggacgccaagaagagcgacaccgagaagttcgggaggttctaccgtggcatgctggaggagggcgtgtacttcgctccctcgcagttcgaggcggggttcaccagcttggcgcacacctcccaggacatcgagaagaccgtcgaggccgctgagaaggttctgaagcggatatagggggtccgcttcaagcaagcatgcagagagcatttcctcgtatctacgttcttgtactcttagttctatatgccaccgaggttttgtattgtgcagcagcaggacagcttctgtaagttcctctttctgaattagtgggtcttgtttttgtcagtgccaataaatctctggtccacgattacggtttcgttgttgtactgatgttcagatacaggattgtctagaaccttttttttttagaaaaaaaaacaatatccacattagt

SEQ ID NO: 15702 - DNA, 939 bp, Zea mays
  Clone ID: LIB3060-054-C3_FLI
aaggagggccacatcatggtctgcaagatcgccgagaagtacctgtcggagaaggcggcggcggcggtgcaggcgctgctgccggagtcggcgggcggggagctgtcgacggtgtgcccgtgggcggaccaggtgcgctggcactaccactgggccagcccgctccactacgccaacaccccccaagtctgcaacttcaagtattctcgggactgccacaattctcgtggccagcaagggatgtgcgtcgtcggggctatcaacaactacacggaccagctctacagctacggccagaagacttcgtataacctgacggagagcctgatgttcctggcacacttcgtcggcgacgtccaccagccgctgcacgtaggcttcgaagatgacgagggcggtaacaccatcaccgtccactggtaccggaggaaagcaaacctccatcacgtgtgggatgtcagcattattgatacggcaatcaaggacttctacaacaagagcatggataccatggtagaggctctcaagatgaatcttacagatggatggtctgacgacatcgtccactgggaaaattgcaagaacaaacacgcgacctgcgcgaacgactatgcgattgagagcatccattattcctgcaactacgcctacaaagatgtggagcaagacatcactctaggagatgattattttttcagtaggtacccgattgtggagaagaggttagcgcaggctggaatcagattggcgttggtacttaatcggatatttggtggaggtgaagcggatgatataccactacaagtatagtaacagctctaataaaaggaagcatagctattacaaggatttgtccattacgtcgtctatacatcaataaattggcatgaatttgtaactccattgctatacatcaataaattggcatgaatttgtaac

SEQ ID NO: 15703 - DNA, 1160 bp, Zea mays
  Clone ID: LIB3060-054-E9_FLI
ggacagggtcaccctggccggcgtgctccgcccggaggacgaggtggtggaccgcgctcttgcagatgcgcccgacacggagctcacccgcctcgccaagaactacttcagcagcacgaaccaagcgtcgctgctctgcctctcactccgtcgggcgctccgccgggcgcggtcgctgtacgggcccatcacggacctcctcgcgctcatcccgcagtcgccgcagctcgccacgccacactgcgactgtgcgttcgacgccttcctcctgttcgaccaaatgcccaatccgttcccggcgcccgcggccgggttccagtgcatgcaacgaagtttctctgggctcaaaaaccacctcgatcttcgtctcctcagtgtccgacgcaggcgccgttggctccgctgtgccaagcgcggatcaggtatctgccttattgcctgcgccaccggcgctgccgtcgcaggcctcgtgcttgcgacacacgccattaccgcgctgctggcgatggcccctgcttgtgctgcatccaattcttgctgctgtccactggctgcttcgatgaaacgcctgcagaggcacatggaccggctcgacgcgactgctaggggcacctacgtcttgaataatgatgtcgctacaattgaacggctggtgggtaggctccatgccactgtggagagcgacaagatgcttgtccgccttgggctggagcgcgggagggggcaacaccacaccatagaagaggtggtaaggcagctcaggaagaaccaccccagcctgcaacggcagcttgctgaccttgccgagcacatctgcctctactttgctgctgtcaaccgtgccaggttactccttgtgcaccacctgaatgcgcaatctgatgctgaaagtgagtctccattgtcatgacctcattagccccaagcaatctgacactgggtgccatgatcatgagtttcagttaaaacaattagctgtatcttgaaattcttgtctcgagacctcatctatcgtgccaagtgatgcacaaatttcttgctttaatagtttagacctttttatgttcaatatatttgatcttctgtactttcagaattattactgtagcgatgtaacaatgctatgtttctgaataaacacgaagtcttaacattttaag

SEQ ID NO: 15704 - DNA, 1515 bp, Zea mays
  Clone ID: LIB3060-054-G2_FLI
tcgcttctctattgcaagatttagatggctactatcctttgcaattgatcaagaatggtgagctattctaaggaagcttctgaacaatatacctgttgtcctggagtgtcacagatggcaaagatttgcgcttagagaaggaggaagaacggtcggtgctagagtcatctccaaagttcttagctgatcagtttccactttcttctctgtagtctggttgcaactgttgatggttagcacattctttatcttcaattattggaagaaacatttttgcgccaattacatgaaagtggttgcagttttaagggtctgttcaatccctctccaagatattgtaggtgtatgaaatcttctaagcaaactgttaaatacattgcacccgatcagaagggatgctctataatgcagcctggtaaacctccctcctgggcccagctgtcctctgctttcagtgtgaaactactgatttgggtgttgctgattttcatcatgattttttcagtttgtctcatcatttatcatccgcactcagatctagccttggccgggagacaccgcgacagaggctggacgtgctcttcccgtcctcatgccccatgccgctgcgcgctcttcccttcacctctcactacacggcggctgcggggcaggggtgaaagaggcgaggcttctccagcttctcgaggccggagaccgtttgctcaagggtgtcgttcttgacggcctcctccgacagcgtggacgcgtggttctcaaccatggccttggtcacggcaggaagcagagcctggtgccagagaagctcccagtgccccatgtgttggcagcatatcagcatgaaagatcctatgagccaagagctactagaggctgttgaacaagagaggaacatccgatctaatccttcacgtaatactgctgttttccaccatccaatgctgggtgattttgaggttaagaaactccatcaagaaaagcagttaggaatgatggtggacaaaggcctggtagcaactaggacagggttgagtcagtaccacctgtctcactggcctagaatgtttgaggtgatcaggatgctggaaggagacatgctcacagagagatgggaggtgtcgcagaacgtggacatgccagagttcgtctcatcggagctcctacttcaaaagtacatggattttgcagcggacgaatgctcgcttggtgtagaagccatggagctctctggactaaggtgaccatctgatcgatcgaatcggccatcacacaggtcgcataggtgtcttgccatatcaagcctatattattgttgtattacattggacacatagggaagggaaaaaatccggtgaattatagggtgtgatctgtctgcctatacttgtggtggcattcatttgtgcaaatgattttgatatattgatgtagagaatatatatgttgtttatttctatgtaatcgttgcacactataattttatcaaacaacttttgtattgttgcaaggggcgac

SEQ ID NO: 15705 - DNA, 3163 bp, Zea mays
  Clone ID: LIB3060-054-H10_FLI
ggcccctttgcctccgctccaccgtcgcaggtcccttttgcctccgctcaaccgtctcagagtccttttacgtctcctccacagtctcagggcccattcgctgctggaccgccgcctacgggcccttttgctgctacaccagcaccttttcgctctccgctgtcatcccttgcgcagccacaatctcccacgcaaggcgctttgcctccaccaccaacatatgcgaggccgctgtcacaaccactacaggcgcaagggtattaccctggtgcaccaccttcgaaccctcaatttccgatgtcaaggccagcatttcaacaacctgtgcagaatatgccacctcctccaatagggtcagctgccacatttggtaaccaggcagcttatcaaagtggcgggcctccagttggaggcacacttcagagtttagtggaggacttccagtcgttatcactgagttctgtgcctgggtcacttgaccctggtgttgatgtaaaagggctgccaaggccattggatggtgatgaggagccagttaagcttatagagtcatacccatttaattgccacccaaggtacttcaggctgacaacccatgcgattccggcatctcagtcattggtctccaggtggcatttgcctcttggagctgtggtgcatcctcttgcagaatcacctgacggggaggaagtgccagttatcaactttgggtccgccggtgtcattcgctgtcgaagatgtaggacgtatataaatccttatgcaacatttgcagatgctggaaggaaatggcgctgcaatctttgcacattgctcaatgacgttcctggggagtacttttgtgctcttgatgctagtggcaggaggtacgatactgatcaaagacctgaactctctaagggaactgtagagtttgttgctccaacagaatatatggtgcggccaccgatgccgccgtcctatttctttcttattgacgtgtcagtgtctgcagttcgaagcggattgcttgagattgttgcaaagaccataaaatcatgcctcgatgaacttccaggttttccgcgaacacagattggattcttaacctttgacagtaccttgcattttcataacttcaagtcttctttgtcacaacctcaaatgatggtggttgctgatttggatgatgtttttctgccattgcctgatgacctcttggttaatttggtcgactcaagacatgttgtggaatcatttcttgatagcttgtcaaatatgttccatgacaatgtaaatgtggagtctgctcttggtccagcacttaaagcagctttcatggttatgagtcaaattggggggaagttgcttgtcttccagagtactttgccatctcttggtattggtcgtttgagacttcgaggagatgatgttcgtgcgtatggaacagacaaggagcatactctgagggtacctgaagatcccttctacaaacagatggctgctgaattcacaaaaaatcagatcgcagtggacatattttctttcagtgagaagtactctgatatagcttctttggggtctttggctaagtatactggtggtcaggtgtaccattatccatcattccaggcacctacacatggagacaaacttaaacttgagcttagtagggaccttacacgagagactgcctgggaatctgttatgcgtatcagatgtggaaaaggagtacggttcacaacctatcatggtcatttcatgctacgatccacagacctgttagcccttccagctgttgactctgataaagcttttgcaatgcaattgtcgctagaggagacattaatgaccacccaaactgtatacttccaagtggcattgctatacacatcatcctctggtgaaaggcgtatcagggtccacacagcagctgcacctgtggtcacagatcttagtgaaatgtaccgtcaagcagatacgggtgccattgtgtcattgttgggtagaattgcggttgaaaattcactgtctgataagctggacagtgtccggcagcagttacagttaaagcttgtcagaagtttgaaggaataccgcaatttatatgttgtacaacaccggataggcgggagactgatttttcccgaatccctaaagtttttgccattatacatcctggctatctgcaaaactcttgctcttcgtggaggttatgccgatgtttctcttgatgaacgatgtgctgctggttttagcatgatgatattgcctgtaaaaaggctgctcaattttatctatccttctttgtacagagtcgatgaagtattaacaatggaaccaaacaagattgatggttggttgaaacgcttgccattaacgtttcagtgtttagatacgggaggtttgtacctccttgatgatggcttcactttcttagtgtggttaggaaggatgctcccacctgaacttgtgaacaacattcttggagtgagcttggcaaacttccctgacctatctaagattctattgagagagtgtgacaatgagttatcaagaaatttcatgaaaatactaagatacctgcgggagaaggatccttcttatcaccagctatcccttgtggtgcgacagggtgaacagccaagagaaggctatctgcttctatctaaccttgttgaggaccagatggctggaacaagtagttacgttgattggatacagcaaattcaccgtcaaacacaaagctaatgacgagaaaccaacaggaagctatgcttgaaatttttgcctactgtaagctgctgcagggcgtagattcagttgctgccagttccaagtcaatctcgcaaccccatggcagatcttaggccctgttccaatctcgcgagataaactttagcagcttttttttagctacttttagccatttgtaatctaaacaggagagctaatggtggtaattaaagctaaactttagcacttcaattcatatagctaaagtttagcaggaagctaaagtttatctcgtgagattgaaacggggccttattcacaacccagctgtccagtatgccaccatgtaagcagtatttggctggcaaacaaagcttcttactgttgatatttgcccttgtgattattctatttttgcagagtgggaatacagctgttgtattggaat

SEQ ID NO: 15706 - DNA, 1099 bp, Zea mays
  Clone ID: LIB3060-054-H6_FLI
cacgaccacaagaagacgcggcgggagcgaggccgacccggcgccggcgactccgcggcggacgatgacctggtcgacgtgctgctgcggctggtcgaggaggacgaggacaggccggagacgacggaggccagcaggctcacgcgcgacggcgtgaaagcgttcgtccaggacatcgtcgccggcggcacggagagctcggcggtcacgatcgagtgggccatgtcggagctcctccgccggccggacgccttgcgggctgccaccgccgagctcgaccgcgtgattgggcacggccgctgggtcacagagcgcgacctcccggacctcccctacatcgacgccgtcgtgaaggagacgatgcggctgcacccggtcggcccgctcctcgtcccgcaccacgcccgcgagcacacggtggtggccggctacgacgtccccgccggtgcgcgcgtgctggtgaacgtgtgggccatcgctcgcgaccccgcgtcatggcctgacgcgcctgacgcgttccggccggagcggttcttgaacggcagctccggcgccagcgtcgacgtgcgcggcgcgcactttgagctgctgccgttcggggccgggcggcggatgtgccccgcgcacggcctcgcgatgaagctggtgaccgctggcgtggcgaacctggtgcacgggttcgcgtggcggctgccggacggtatggcgccggaggatgtgagcatggaggagctatttgggctttccacgcgccggaaggtcccgctcgtcgccgtcgcggagcccaggctgccggcgcacctctacactaatgtcacgccgccacagcaggtcgcgggctccacgattgcgaacttgtccaccaggccggagtacaagctcgtgttctgaatcattcaccgccactaaaaataaagcaggaaaaactacacttcctgcgtgctagacgtccgggcggaacacaacagtgcttgctcacgttcttctattggttgtactaaaaatatggactagcctgaactttctgaacctaattcacctgtctgcttggtttcaccatgttcaccaaacacaatcgatgcaacttatcaattgaaac

SEQ ID NO: 15707 - DNA, 902 bp, Zea mays
  Clone ID: LIB3060-057-D10_FLI
cgagaagagcggcggcgcgggcggacaaggagcaggcggaggaggagctgtgccaagccacaatgggtatctcacgcgactcgatgcacaagcgccgtgccaccggtggaaagcagaaggcctggaggaagaagcgaaagtatgagcttggtcgccagccggccaacaccaagttgtcaagcaataagacagtgaggagggtccgtgttcgtggaggtaacgtgaagtggagggctcttcgccttgatactggtaactactcatggggaagtgaagctgttacccgcaagacccgtatcctcgacgtggtctacaatgcatcaaacaatgagcttgtgaggacacaaacccttgtgaagagtgccattgtgcaagttgatgctgccccattcaagcagtggtacctcactcactatggagttgacattggtaggaagaagaaaacccctgctgcaaagaaggataatgctgagggacaagaggttgaggcagcagctgaggaaacgaaaaagagcaaccatgtcacgaggaagcttgagaagcgcaaggagggacgtacccttgacccacacattgaggagcaatttggcagtggacggttgctggcatgcatttcttcccgccctggacagtgtggccgagctgatgggtacatccttgagggtaaagagcttgagttctacatgaagaagctacagaggaagaagggcaagagcgctgtagcttagagcattctcatggattgtcttgcaccgaaatgtgtgtcctgatgagtacacttttttttggttagtcgtctcaagttcagagcgttatgccatgttttcagacctgattagtacactgttttctaaaagcgattgagctctagtccaatgtattgataatatctgctgttgtcc

SEQ ID NO: 15708 - DNA, 1705 bp, Zea mays
  Clone ID: LIB3060-057-D5_FLI
ctgccttctttttttcccccgcgaagcagggcgaggcaggcagcgtgtataaactgagcgaacgtgagcggtcttcgccttgtcctccgactcttccattccattctattcccgcttccacacgtcggtcggcgcccttcgcgatcgtgtcgtttcttcccgcagcctgcctgcgtgtggggtgatggctaggcacttcaagtacgtcatcctcggcggcggtgtcgcggcggggtacgcggcgagggagttcgccaagcagggcgtcaaccccggcgagctcgccatcatctccaaggaaccagtggccccttatgagcgccctgcactcagcaagggatacctcttccctcagaacgctgcaagactgccaggcttccacacgtgtgtgggcagcggtggagagagactacttcctgaatggtactctgagaaaggcattgaactgatcctgagtactgagattgtgaaggccgaccttgcttcaaagactctgaccagtgcagctgcggaaaccttcacatatgagaccttgctcattgctacgggctcctcggtcataaagctcactgattttggtgttcaaggagcagaatccaacaacatattgtatctaagggacattgcggatgccgacaagttggttgcagctatgcaggcaaagaagggtggaaaggctgtgattgttggaggtggttacatagggcttgagcttagcgctgccttgaaaatcaacaacttcgatgtgaccatggtgtaccctgaaccgtggtgcatgccccgtctcttcactgctggtattgctcatttctatgagggctactatgctaacaaaggaatcaaggttgtaaagggcacggttgctgttggtttcgacgctgatgccaacggagatgtcactacagtgaagttgaagaatggaagtgttctcgaagctgatattgttattgttggcgtcggcggcaggccattgacgcgtctcttcataggccaagctgctgacgagaaaggtggactcaagaccgatgcattcttcgaaacaagtgtagccggggtatacgcgatcggcgacgtggccaccttccctctgaagctctacaacgagcagaggagagttgagcacgtggaccacgcccggaagtccgccgagcaggccgtgagggcaatcaaggccaaggagtccggcgaatcggtggccgaatacgactacctgccctacttctactcccggtcgttcgacttggcgtggcagttctacggcgacaacgtcggcgacgacgtgctgttcggcgacaacgacccggcctcggccaagcccaagttcggcagctactgggtgaaggacggcaaggtcgtcggcgtgtttctcgagggcgggtcggccgaggagaaccaggccatcgccagggtcgccagggcgcagccgccggtggccgacgtccaggcgctgaagcaggaggggatcgatttcgcttccaaaatctgagctcttggaaaggtgtaaaaaaaagaaacattggtaccagttttagctgatttctttggcaattctactttgagccttttcagaccacttgggtgctttgttacacagtagttcagattagttgttagcccctccctaataatttggccttcgatgtgatgttgaaagaaccaccgtgggatgacgatcctattaataatgcatgtgatttgtagcgtc

SEQ ID NO: 15709 - DNA, 1515 bp, Zea mays
  Clone ID: LIB3060-057-E8_FLI
ctgctccggacagagccctcgctccacaccgccggcgacctttttcctcctccgctcgaggagtgggccaacggagggagaccatatgggcgcggaggcagcgcatgggcatccgcagcagcagcctccctcgtccctccgacccggcagggaggccgcggcgccgcccgcggtggtggggctgcagctctcggcgctgatcgaccacgtcgcgcgcgtcgactggtccctcctcgaccgcgtccctggcgaccgcggcggctcgcagcaggtatccattgatgagctgaatcatattcttgatgaagtgaatgcccacatccttccttcccgcaatgatctcactccggtaactacaatagccggtggaagtgttgccaacacaatccgtgggctctcagctggttttgggatatcaactggaataattggagcttgtggagatgacaaccagggacttctgtttgtcaacaatatgagctttagtggtgtagatctcacaagattaagggcgaaaaaagggcacaccgctcagtgtgtgtgcttggtcgatgcaagcggcaatcgcaccatgcggccatgcctatctagtgcagtcaagatacaggccaatgaatttagaaaggaggatttcaaaggctccaagtggctcattgtgagatatgcacaacagaacatggaacagattgtcgaagctattaggattgcgaaacaggaaggcctttcagtatcattagatttggccagtttcgagatggttcgtgactctaggtctaaacttgttaaccttttggagactggtaacattgacctttgcttcgccaacgaagatgaagctagggaggttatagggggaagcctggaatcagatccagaggaggcgcttgcattcttgggcaagtactgcaaatgggccgtggtgacacttgcttcaaagggatgcatggcaaagcatggcaaacaggtcgttcgagtcccggccatcggggagagcaacgcggtggacacaactggagcgggcgacctgttcgcgagcgggttcctgtacgggctggtgaaggggctgccgctggaggagtgctgcaaggtcggggcgtgcagcggcgggtcggtgacgcgggcgctcggcggggaggtgcggccggagaactggcagtggatgtacaagcagatgcacgccaggggcttgctgctcccggagctcaagaactgaatgaaactattgctgctgtagctttagctagctaaatgcctgcatgctgcaccagctgttgtatctcccagctctcgaagactcgtagcatcacccagggccggtcgagtggccagtatccagccttccgttgttaattgctggcgttacctttcccctgctagtctgttaatgttactagaatattggtgtccatgaccatgcttgattgctggcatggtgaaggacgggcagatacattagttgatttgtagagccactcctaagactgaatcaatcagatggagtatattgattactgc

SEQ ID NO: 15710 - DNA, 1117 bp, Zea mays
  Clone ID: LIB3060-057-F12_FLI
gcaagctcggccagacctccctcttcaataagaacaagttgaagaaagatgtccacgtacctggtgtcctgctgcctccggccaccgtcagcgggggcggagatgcccaaggcggcttccgccgcctcctcctcttcattggccccgccgcccgacaccaagagagtcggccgaagagactttgtgctcaggagcagtgagattgccacgctcgccgccatcttccacttcagtggcagcaaaccaagctaccttggcgttcagaagagtcctccgtcccttgctctctgccctgcaaccaataactgtgtttccacatcagaggaaataagcgactcaaatcactatgctcccccatggaactacaatcccaaggatgggcggagcggtaaacccataaccaaagaggaggccatgaaagaactaattgaagtcgtcacgaagacaaagccggacaacttcactcctcgcatagtagagaaaaaagatgattatatccgagttgaatatgagagtcctatatttgggtttgtagatgatgtggagttctggttccctcctggcaacaagaccatggttcagtatcggtcggcgtctcgatcaggatttatcgatttcaatgccaacaagaagagagtaaaggagctgagattggctttggaaaagaagggctgggcttcagaaagcaacttctgaattgaagtgagaagggtggaagaggtgcaggtgcatgctactcagacgagccagcacaactgggaactgggattgggtactgcccacgcaaaggcaaaaaagtctctttgtgatggtccctcgttctcattcaggtcagcgattacctagtttgtgtactaggcagcgtaagctagctgctggtgggtggtggtggccatcatgaggattcaggatgcatgatgatcttccatgggtggtgccgggggcgcactaagggaaaaaaaaaaggatattacatggacagcaaccaccctggctagctaataccaagaaatcattcatatactcctagtctcctaccaagaaaaaagatatatttattatgcatcttcttgccatccgtgcatcctactacatgcatcggatctgtccttgcgat

SEQ ID NO: 15711 - DNA, 1778 bp, Zea mays
  Clone ID: LIB3060-057-G8_FLI
cttttgctcggaacgcacacacagcccggtccccgatctccgatcccctcgtcgatccaagatgcagatcttcgtcaagaccctcactggaaagactatcaccctcgaggtggagtcttctgacaccattgacaacgtcaaggccaagatccaggacaaggagggcattcccccggaccagcagcggctcatcttcgctggcaagcagctcgaggacgggcgcacacttgccgactacaacatccagaaggagagcaccctccaccttgttctccgcctcaggggaggcatgcagatcttcgtcaagaccctcactggaaagactatcaccctcgaggtggagtcttctgacaccatcgacaacgtcaaggccaagatccaggacaaggagggcatccctccggaccagcagcggctcatttttgctggcaagcagctcgaggacgggcgcacgctggccgactacaacattcagaaggagagcaccctccacttggtgttgcgtctcaggggcggcatgcagatatttgtgaagactctgactggcaagactatcacccttgaggtcgagtcttctgataccatcgacaatgtcaaggccaagatccaggacaaggagggcatccctccggaccagcagcggctcatttttgccggcaagcagctcgaggacgggcgcacgctggccgactacaacattcagaaggagagcaccctccacttggtgctgcgtctcaggggtggcatgcagatcttcgtgaagacacttactggcaagacgatcacccttgaggtggagtcctcggacaccatcgacaatgtcaaggctaagatccaggacaaggaaggcattccaccagaccagcagcggctcatctttgctggcaagcagctggaggatggccgtacccttgcggattacaacatccagaaggagagcaccctccacttggtgctgcgtctcaggggcggcatgcagatcttcgtgaagacacttactggcaagacaatcacccttgaggtggagtcctcggacaccattgacaacgtcaaggccaagatccaggacaaggagggcatcccaccggaccaacagcgcctgatcttcgccggcaagcagctggaggatggtcgcactcttgcggattacaacatccagaaggagagcaccctccacctggtgctccgcctcaggggtggcatgcagatctttgtgaagacattgactggcaagaccatcaccttggaggtggagtcgtctgacacaatcgataatgtcaaagccaagatccaggacaaggagggcattccaccggaccagcagcgcctgatctttgctggcaagcagctggaggatggccgtaccctcgccgactacaacatccagaaggagagcaccctccacctggtgctccgcttgcgaggtggtatgcagatctttgtgaagaccttgactggcaagaccataaccctggaggttgagagctccgacaccatcgacaacgtgaaggcgaagatccaggacaaagagggcatccccccagaccagcagcgtctgatcttcgctggcaagcagctggaggatggccgcaccctagcagactacaacatccagaaggagagcactctccacctggtgctccgcctccgcggtggtcagtaagccatgggtcatttaagctgctgctgtacctgggtatctgcgtcgtctggtgccctctggtgtacctctatatggatgtcgtcgtctaataaacatctgtggtttgtgtgtcatg

SEQ ID NO: 15712 - DNA, 935 bp, Zea mays
  Clone ID: LIB3060-057-H9_FLI
ctgcgctgcgcggaagaagggaaggggaaaagcagttaagcttgagcgcgcgcgacagggtcaagtcgagggccggggaatcgccggagaatggaggtgggcagggctccgcgacgacgggtgtccccagcagcggcggcggcggctgtgccttcgctgcttctgttcgccgttctattcgcgggccgggcggcggcgttcggccacctgcaagccgccggcgccggcgcgacggcgctgtacaagcacgcgtcgttcttcgaccgcgacggcgacggcgtcgtctccttctcggagacgtacggcgcgtttcgggcactcgggtttggattcggcctgtccagcgtcagcgctgcgctcatcaacggcgctcttggtagcaagtgcagacctcaaaatgcaacgtcatcgaagttggatatctacatagaggacatccagaacgggaaacacggaagcgattcaggggcatacgacgccgaaggaaggtttgttcctgagaagttcgaagagatattcgccaagcacgccaagactgtccccgacgccctgacgtcggacgagatcgaccagctgctgcaggcgaacagagagcccggggactacagcggatgggctggcgcagaagcggagtggaagaccctctacagcctcggcaaggacaaggacggcctcctccgcaaggacgtcgcgagaagcgtctacgacgggacactgttccacatgctcgcgcccaactggaaatctcccgacgaggaggaggagctaagcgcgatccgggagagctgaaccgagaggtacaagcaaagtccgattgagagataaggactctgggaccctctgaacatgctgtcaagcaacatgtactactagctgtgtgaacgggtggtgtgaacactcttttcttatcagattataaaaaagaaggtgtgaac

SEQ ID NO: 15713 - DNA, 933 bp, Zea mays
  Clone ID: LIB3060-058-A3_FLI
gccaaatcaacgccagcaacagcaaagcaactacagagagtaggagatgcttactctccacaccattcagtcatgcccctcgctgcgcagatcctctctgttccggcgtgctctgctaggcaggaagagatctttcatttctgccagcagttctgaggatgccgaatccggcactcccccgccgcttggtggcgacaaacaccagcaggaggttcttgcacagatcgccatgcttcagacgcagaaggtgcgcatcacagacttcttggacgagcgctctgcttacctgaccaagttcgccaaggacgccgactcggagttcgacctgattgggcagaacgccatgaaagaacttgatgccgttggtgaccagatactggagaggctcgacagcaagatgcaagccttcgaggagacggctgaggtacaacggcaagagatagaaatgaacgataaggtgttagaggacttcgaagactggattgagaaggagaaaaacgaaggaatgttcttcaaaagccttggcaaggtcaaacctcggaacaagatggaaataaaggtgaaagccaaggtggaagcacagaaggtcaaagagattgcagaggagagtgcaggatcaaaaactcgtatgaacatttacctggggctgatggggatactcgggattacaattgcgaatgccatctttgcaacaccagaggtggagtggaggaaggttgctgctctgggtctgattttcattggtctggttgctcaggtcatctacgagcaggatatctcaccgccggaagctgagaagacagagaaaatagaagaataaaaaaggagttgcagacatatcggtagggtgtgatctcccacgggcaatgtaaactgtatatggtagcatgaatagatacaaggtttaatactttaattaatcgttcataaccc

SEQ ID NO: 15714 - DNA, 1311 bp, Zea mays
  Clone ID: LIB3060-058-E11_FLI
ggccacagcccgcagcgcagggggtagcgaggagtgcgagaggaggcgagtgggtccaaacaccagagggaggggagggcaggcgaatgagcgaggaggcggcgcgggcgggagtggaggagtccatcgggcagcggcggcggcgggatgggcgcggggaggcggcggcggcggggcgggtgtgggagttcgagcgggatctggtggccggcgcgctgatggggggcgccgtgcacaccgtggtggcgccgatcgagcgcgtcaagctgctgctgcagacccaggacggcaacgccgcgctgctgggcagggcgcgcaagttccggggcttcgccgactgcgtcgcgcgcaccgttcgggacgagggggtgctctcgctctggcgcggcaacggcaccgccgtcatccgttactacccctccgtcgccctcaacttctcgctcaaggatctgtacaggagcatactgaaagatgctggaacctcatcagacaataagttcacttctattgctcttagcaacttctttgctggtgctgctgccggatgtacaaccctggtcctcatctatccgctcgacattgctcacactcgtcttgcagctgatatcgggcgtacagacacccgccagttcagaggcatccgccacttcatccagaccatctacaagaaaaacggcatcagaggcatatacaggggattaccagcatcgctccacgggatggtcgttcaccggggcctgtactttggcggcttcgacactgccaaggatgtcctggtgcctttggagtcccccctgtggcagcgctgggttgcagcccaggcagtgacatccatggcagggctcatctcgtacccactggacaccgtgcgccggaggatgatgatgcagtcagggatggaggtgcagatgtacagcagcacgctcgactgctggaggaagatatacaggctggaggggatccggtcattctaccgtggtgcgttgtctaacatgtttaggagcactggtgcagctgccatactcgttttgtatgacgaggtcaagaagttcatggacaggggtaggttgtaacagctatagaggggtttcttcacagaattttggattcgatatgggaagtgggattaggccaaaaggtgcaaggagcagcagctcgagcattttgtaactggatgctggtttcctcctgcttactaacctgctcgatgtaaccgagcctgaaggttctgactcgcgaacaatgcagcttgttcatttcacctcatctttacctcttcgaggttacatttatgggttgtttgttgcctgc

SEQ ID NO: 15715 - DNA, 1575 bp, Zea mays
  Clone ID: LIB3060-058-G11_FLI
tcagtacatatactcaggtagcgcaacctggcctggcccggcccggcccagagaggagcgcgcccatatcgcttccctgagggctgaggccgagagcgaagcggagcgagcaccggacgagaggcatggccatggcgcgggcggagctccgcaccgtgaccgtgcgctcttccccgcttccgcgctgcgtcctctcccggctgctgccgttgctcctctcagtctcagccatcggcgctgcgtcggcggcgccactcaagttcgggatcaactacgggcagattgcgaacaacctcccgcagccgacgcaggtgtcgggcctcctgcagtcgctgaacgtgaaccgcgtcaagctctacgacgccgaccccatcgtgctgacggccttcgccggcacgggcgtcgagttcatcatcggcaacgatgacctctacaacctgaccgacgcacgcaaggcccgggcctgggtggcgcagcacgtccagccgttcctccccagcacgcgcatcacctgcatcaccgtgggcaacgaggtgctctccggcaaggacacgaccgccatgcagagcctcctcccggccatgcagaccgtgtaccaggccgtggtcgccctgggcctcggcggccaggtgaacgtctcgacggcgcactcggtcaacatcctggccagcagctacccgccgtcgtcgggcgccttccgggaggagctcgggcagtacatccagccgatcctcaacttccacgccgaggtcggctcgccgttcctcatcaacgcgtacccgttcttcgcctacaaggcgagccccgggagcgtgtcgctgccgtacgtcctgttcgagcccaaccccggcgtggtcgaccccaacaccaacctcacctacgacaacatgctctacgcccagatcgacgccgtgtacgcggccatggaggccatggggcacagcgacctcaccgtcaggatctccgagaccgggtggccgtccagaggggacgaggacgaggtgggcgccaccgtggccaacgccgccgcgtacaacgggaacctcatgaagaggatcgccatgggccagggcacgccgctcaagccgcacgtgcccgtcgacgtcttcgtgttcgcgctcttcaacgaggacatgaagcccggggcaacgtcggagaggaactacggcttgttttaccccaacggcacgccggtgtacagcctcggcttcaacggagcgtccttcagcccatcgccgacgtactcctcttcttccaagctggtgattacatttcagatggcagttgttgtcctactcgccagcttctccatcctacacactgccgtgccgtgccatgcgtgaagattattgctatttttttgactaacccatctgtggcttcattgtacattaggctagctaccagaacccatattagtctgacttgatgtaaagcatgcgacagtagtgctgtccagctcaattgataatgcgtattatatttgttttctaaaaaaatgaaattacaaatgtccatttctgtttggcgtcagagtagagttatttctctcgttatatggacgtctcttacttc

SEQ ID NO: 15716 - DNA, 866 bp, Zea mays
  Clone ID: LIB3060-058-H5_FLI
caaaccctaagcagggagttgatttatccgctgcagccatgagtaagttgcagtctgagtctgtcaaggatgccatctcccagattgttggggatgccaaggagaagaataggaagttcactgagactgtggaacttcagattggtctgaagaattatgatccacagaaggacaagcgtttcagtggctctgttaagttgccccatatccctcgtcccaagatgaaggtgtgcatgcttggtgatgcccagcatgttgaggaggccgagaagatgggacttgactacatggatgttgaggctctcaagaaaatgaacaagaacaagaagcttgttaagaggcttgccaagaagtaccatgctttcttggcatcagaggccatcatcaagcagattccccgtctccttggtcctggtctcaacaaggcaggcaagttcccgaccctggttactcaccaggaatccctcgagtccaaggtgaacgagactaaggcaaccgtcaagttccagctcaagaaggttctttgcatgggtgttgccgttggcaacttggcgatggaggagaagcagatccagcagaacatccagatgagcgtcaacttccttgtttcccttctgaagaagaactggcagaatgtgagatgcctctacgtcaagagcaccatggggaagccatacagggtgttctaagtatgctcttttgtgaagtctgctaggttctggcaccgaggttttattgaattaaacttttgttaagagtatgtttttggacgatcctatatttcgtcctggcgctactatgtttcagaatggtggtactactataagtatcctggcgctttaagtattgcttgaaaggatcaatat

SEQ ID NO: 15717 - DNA, 1091 bp, Zea mays
  Clone ID: LIB3060-059-A10_FLI
gcagcttctgcttgctctggggggaaggagagagagagagcgagagagatctagtagagaggctagctaggtggtcctcgaacgaagatgttggcggtgttcagcgggcaggtggtggaggtgccggcggagctggtggcggcgggcagccggacgccgtcgcccaagacgaaggcgtcgcagctggtggggcgcttcctggccgcctccgagccggccgtgtccgtgcagctcggcgaccacggccacctcgcctactcccacaccaaccaggcgctcctccgccccaggtcgttcgcggcgaaggacgaggtgttctgcctgttcgagggggtgctggacaacctgggtcgtctgagccagcagcacgggctgtcaagcaagggcgccaacgaggtgctcctcgtcatcgaggcctacaagacgctgcgcgaccgcgcgccctacccggccagcttcatgctcgcccagctcaccggctcctacgccttcgtcctcttcgacaagtccaccaactccctgctcgtcgcatccgaccccgagggcagggtgccgctcttctgggggatcaccgccgacggctgcgtcgccttctccgacgacatcgacatgctcaaaggctcatgcggcaagtcgctcgcgccgttcccgcaaggctgcttctactccaacgccctcggagggctcaagtgctacgagaaccccaagcacaaggtcaccgctgtccccgccgacgaagaagagatctgcggtgccactttcaaggtggtggaagggtctactgtcctgacggcgctgcactgatctatcatcatcaggcggaggcgatgcgatgatgatgcagaactttgtacatgcgttggtggatggtggtgtaacatagtggctgccaacaagtcatgctcatgcaaaccgatgaatctatctctgtatcatcgatctcggttgcttgctagtccagactccagacatggctatatatatatagctggtgctaataaataggagtataatcgtcatatcgatcggttgcgtgtggaatgccaatcatgtgtgtaatctgttggcaaataacaaacctctgttcctcc

SEQ ID NO: 15718 - DNA, 774 bp, Zea mays
  Clone ID: LIB3060-059-B2_FLI
caaccgagacatttggaaaacagagcagagtaggtggtggtgatcgccagaggtagcagaggaagagatcatgttttcaactagtaaaagtagcggggagatggatggggtggacgggaatgatgacttgcacttgcacggcatggaatcaaaacgcatgcctaaatcgatcgccatggaaaatccacgagcttcgttcggatcggagcacgagaaggcggctgacagagcagcaaacacgcagaatgaggagacggcgcaagcaaggaggcggcggcggcggatggttggatcaggcccaggcgagctgcatggttcggaagcagccttattacagggaagaagaactggagagacactactactcaccttcgactggatcggtcttcatccttgacgtttgctgagcttgcgcggacgatgcagccagaagaagaagaagcagcagcagcagcgttgggagcgcggcggcggagccatggatgcaccggcgcgaagatggtccgggggtcgatccaggcctcatcgtctccttgcgtttgcgtccctgtctgctcgagcagcggctcgactcggtgccttgcggcctctccctttgaatacgacgtgtctcagctcggtgcgcagcgcagacacgagtatccgtactcgctcgctcaaccaccgaacgttgcaattgcaagtggtaccaccacctctatttttctatctacaatgctgttcggtcaacgaggcatgcgccatattcgctgcgaattgttgtggttttaatct

SEQ ID NO: 15719 - DNA, 2656 bp, Zea mays
  Clone ID: LIB3060-059-F10_FLI
caaacacctccctccttcttcacttccctgccgttgttgcaggaagcaagcgagggcgcacaaaccgacaaggccgcccacgcgcgcgtcggccgccgccgttgccgaccagcaggcaggcagcatggtcgtgaacaacaaggtggacagcctgtcgtacgacgtcgaggcgccgccgccctctgccgccggcgccgccgcggggcaagcgccaccgccggcgtcgccagctccggcgccggcaccggcaacccacgcgcccgtgacgcgggaaggcggcgcggcgtcggtgctggagctgcacaaggtgtcgctgccggagcggcggacgacggcgaaggcgctgcggcagcgcctggccgaggtgttcttcccggacgacccgctgcaccagttcaagaaccagtcgtcggcgcggcgcctcgtgctggcgctgcactacttcttccccatcttccagtgggggtccgcctacagcccgcgcctcctgcgctccgacctcgtcgccggcctcaccattgccagcctcgccatcccgcagggaatcagctacgccaagctcgccaacctgccgccaatcgttggcctatattccagcttcgtgccgccgctcatctacgcgctgctggggagctcgcgggacctggcggtggggccggtgtccatcgcgtcgctggtgatggggtccatgctccgggacgccgtgtcgccggacgagcagccgctcctctacctgcagctggccttcaccgccaccttcttcgccggcgtcttccaggcgtccctgggattcctcaggctgggcttcatcgtggacttcctgtccaaggcgacgctgacgggcttcatgggcggcgccgccgtcatcgtgtcgctgcagcagctcaagggcctgctcggcatctcccacttcacctcccacatgggattcctcgacgtcatgcgctccgtcgtcaaccgccacgacgagtggaagtggcagacgatcgtcatgggctccgccttcctcgccatcctcctcctcacgcgccaaatcagcgccaggaacccaaagcttttctgggtatcagcaggtgctcccctggcgtcggtgatcatctccaccatcctctccttcatctggaaatcccccagcatcagtgttattggcatcctccccaggggagtgaaccctccttcggcgaacatgctcagcttcagcggctcctatgtggcgctgacgatcaaaaccgggatcatgacaggcatcctgtccttaacagaagggatcgcagtgggcaggaccttcgcgtccatcaacaactaccaggtggacgggaacaaggagatgatggcgatcgggctgatgaacatggcgggctcctgcgcctcctgctacgtgacgacggggtccttctcccggtcggcggtgaactacagcgcgggctgcaggacggcgctgtccaacgtcgtgatggcggcggcggtgctggtgacgctgctgttcctcatgccgctgttccactacaccccgaacgtgatcctggcggcgatcatcatcacggcggtggtggggctggtggacgtgcgcggcgccgccaggctgtggaaggtggacaagctggacttcctggcgtgcgtggcggcgttcctcggcgtgctgctggtgtccgtgcagacgggcctgggcgtcgccgtcggcatctcgctcttcaaggtcctgctgcaggtcacccgccccaacgtcgtggtggagggcctcgtcccggggacgcagagctaccgcagcgtggcgcagtaccgcgaggccgtccgcgtgccgggcttcctcgtcgtcggcgtcgagtccgccgtctacttcgccaactccatgtacctggtggagcgggtcatgcgctacctccgcgacgaggaggagcgcgcgctcaagtccaaccacccctccatccgatgcgtcgtcctcgacatgggcgccgtcgcggcgatcgacacgagcggtctagacgcgctgtccgagctcaagaaagtcctggacaaaagaaacatcgagctggtgcttgccaacccggtggggtcggtggcggagaggatgttcaactcggcggtgggcgagagcttcgggtcgggccgcctcttcttcagcgtagcggaggccgtcgcggcgggggcgtgcaaagcggcgcagccctgacgacgacgacaggctgatccctgaggtgccgcacgggagcatgcataggaataggatgggtcagagacagactaccggtgctgctagtggtagtagggcaggacgacgtacgaataacatggtgatggcctctcttcctccactccgatgcgatgcgagtgtgcgacgcaggggaggggagaagagtttttgaaggatgtgaccagttgctgttgtagttgttgtcaagtacgtagtaatgaaacgagaattgctgcgtggcaattcaggcctgttttttctttttgcatcaaggaaaaataagtgctggtacagatgagattattttaactagaaccaagttacttgccagtaaaataagaagcttccatataaacttgaaacaaaagaaaaaggagacacgattctcagttcaacctttatggattctggtttcttgtcgtcttcttttcttaatgcaaacttgtaacaagtatgttttgttag

SEQ ID NO: 15720 - DNA, 1610 bp, Zea mays
  Clone ID: LIB3060-059-F5_FLI
cataggtgtgtttttgctagtatcactgtgaaagcaccggttcgagaggtatggaatgttctcacagcatatgagaatttgcctgaattcgtaccaaacctggctatcagtaggattgttcttcgtgataataacaaggttcggataatgcaggagggttgcaaaggcctgctttatatggtccttcacgcccgtgttgttatggatcttcgcgaaaaacatgagcaagagatcagctttgaacaagtcgagggtgatttttacacatttaaagggaaatggcgcttagaacaacttggggatcagcacaccctgttgaagtacatggttgaaactaagatgcatagggacacctttctctctgaatctatccttgaagaggtcatatatgaagatcttccatcaaacttgtgtgcaatccgtgattatattgaaaaggctggagccaagagtagcaattccacaggtcattctaatgtgcccacagatccagatccagatgttgatcatgatgaaagcaggcaatctgagcaaacgtgtgtgtcttgctcatccagtaccatgaagcagagaccaaaagtcccaggattgcaaaaggacatcgaggtcctaaaatcagagcttgataatttcattgcagagtatggtcagtatggtttcatgcctaagagaaagcatctccggtctcatggaagagtggatattgagaaggctataacacgaatgggtgggttccggaagattgccagcataatgaacctttctctttcttacaaaaatcgaaaaccaagaggctattgggataatctggagaacttgcaagaagagatcagccggttccagaaaatttgggggttggatccttcttatatgcccagtagaaaatcttttgagagggcaggtcgttatgacattgctcgggcattggaaaaatggggtggggtgcaggaggtttcacgccttctttctcttgaactaagatatcctagaagacaagcagacccggacgatgagagacagtctgaatccccgtctgggatgatgaagaagcacggagtgaaacctgatgaaggcaatgtttccccaaatgcgcagaaatggctcctgaagctgaaggacttggatgtcaattgggtggaatactaggtttagctttggaaaaagatatggtatctcatcattaactcagctctttcctttcttcggaggtgttctggatgcattccgacaaagacgccgcagattgtgtacagaacagcgcggtgcacgggccaaccccattctgaaggcgagctaccagcaggcaacatgttttcttgccagtaatcacgactcttggctactactgcgtatctagaactgctgacaatgctactcagcttcttttgcggtcaaaccgatccatgggtttgacaaagtcaggccataaaatgcagaaaagggtgtcgatttcgtgcgcctgttcaaagctgttttgagtcagccacgcctttgaaaaatctgaggtggtcatcgctgggttaagccgtgttcacaggttggtcgcctactttgttattactggtgatgtaagttgacctggtccttttgagagagaaggttacccgtct

SEQ ID NO: 15721 - DNA, 933 bp, Zea mays
  Clone ID: LIB3060-059-H2_FLI
gcacaactgaagtatgccattgtcgacaacttccatggctctaacaaacttgtgctcatgcccaagcagcagagctcatcagctgcagcttctatgcttctgcttggccctctcactgcatgtcccttatcatgccaattctctctccttcagctacagcttcttcaaccctgatgacttcaggccggaggacgacgcgcaggtcgtcgatggcaggatcgagctgctcggcgacgagttcagagggcgtgccagggggcgggtgtggcacaagcagccggtgcagctatgggacggcaccaccggcgaggctgccagcttcaccgcgaacttcagcttcagcatcgagtcagtggctggcaagggcgcggcaagcgctgggcacggcatgacgttcttcctcgcgccgtacacgccaaacttgccgcaggagtcctacgacggctgcctcggtctgttcgatgagagccaggcgcttaactactccaagttcaacgcgtccggcgactcgaggttcgtcgccgtggagttcgacatccgcaaggacatctgggacccgagcagccagcacatcggcatcgacatcaacagcatggactcccgcggcgactacacggtcttgccagacggcagcctcgtcgacgccggcgtgatttccgcgacagtcgtctacgacaaccgcacgcgcagtcttcgcgtcaccctgatggtcggaagcgtcacttacacgtccgtagccaccgtggacttgagaagcttgctgccggagaaagtcgcagttggtttctcggcggcgacaggcgacgagtacaacgcaaaccacacggtgctctcgttctctttcgcctcgacgttggcaaccaagaacggcacctccatgcctgtgactgtgacctcgtccaccaagaaggccaccctgcaactcggcgctgg

SEQ ID NO: 15722 - DNA, 1279 bp, Zea mays
  Clone ID: LIB3060-061-B9_FLI
gaatgattcaatcatctagtgtttgattattagttggtggccatgaaagaaataaaatccatctgccttgaacaagacatgcccatgttaggtcgaggtcacctaattgctttaaaattgtctctttcatatcgctttactcaagattattttctctggaaagaatgattctgttgtcaccctgcaagctgcaactgttacacaccatacccctgacctagtttacttcgatccagactatatatttagcaacttttacagtacgatagtccttcagtgccccaccactgaatcatgctcccttgtttttctcaaagactatcctgccacttcctgtgaagcacttttaatggtatacaactttgatgtgtttctgtgaggccttttggaaagacgtgctttggtaatatagcggcgtgagctatcctccactaattaataattatcatttcaactccatgaatcatctgcctttgtactggtgactaattatcgtttcctggcctcagggtatcttcactggaagctgtggaacagcgctggaccatggtgtcacggccgtcggctacgggacagagaacggcaaggactactggatcgtgaagaactcatggggcagcagctggggcgagtccgggtacgtgaggatggagcgcaacatcaaggcgtccagcggcaagtgcggtatcgcggttgagccgtcatacccgttgaaggagggcgccaacccgccgaaccctggccccagcccgccgtccccgaccccggcgcccgccgtgtgcgacaactactactcgtgccctgacagcaccacctgctgctgcatctacgagtacggcaagtactgcttcgcctggggctgctgcccgctcgagggcgccacctgctgcgacgatcactacagctgctgcccccatgactaccccatctgcaacgtcaggcagggaacctgcctcatggtaaatgctcggcccatctcgtgatcttcttcagttagctacggagataactgccagtttctttcgtctgatctctaaccggcaaattcgctgcttgacgaacagggcaaggacagcccactgtcactgtcagtgaaggctacgaagcgaaccctggccaagccgcactgggctttctccggcaacacagctgacggaatgaagagcagcgcatgagaaaacgcagcgtggcattaggtcgtcagcaacctgggtggtcgattagagcccctgcgtgggaaatggtcacctggccccctgattgacgacggaagcatggc

SEQ ID NO: 15723 - DNA, 1254 bp, Zea mays
  Clone ID: LIB3060-061-C11_FLI
gcaaccagcaaagtgatcagtgtgatcgatcacacactgccatggccgtcatgggcaaggaggaggaggagcagcagcagcagcacaaggaggaggaggtggtccaaggagatgtgcgagtcgtcgtccagcaggagacggcggcggacgaggaggccgagtcggcgctggtgcgcaagatctccggcctggccgccgccatcgccaggctgccgtcgctgagcccgtcgccggaggtgaacgcgctcttcaccgacctcgtcacggcctgcatcccgcgcagcaccgtggacgtggagcgcctgggcccggagctgcagcgcatgcgcgcgggcctcatccgcctctgcgccgacgccgaggcgctgctggaggcgcactactccgacctgctggccgccttcgacaacccgctggaccacctgccgctcttcccctacttcaccaactacctcctgctgagccagctggagcacggcctgctggcgcgccacgtcccgggcccgcccccctcccgcgtcgccttcgtcggctccggcccgctcccgctcagctccctcgtgctcgcctcgcgccacctccccgccgccgccttcgacaactacgacatctgcggggacgccaacgaccgcgcgcgccgcctcgtgcgcgccgacgccgcgctcgccgcgcgcatggcgttccgcacctccgacgtcgcccacgtcacccgggaactggccgcctacgacgtcgtcttcctggcggcgctcgtgggcatggccgccgaggagaaggcgcgcgtcgtcgagcacctcgggaggcacatggcgcccggcgccgcgctggtggtgcggagcgcgcacggcgcgcgcggcttcctgtaccccgtggttgaccccgaggagatccgccgcggcggcttcgacgtgctcgccgtgcaccacccggagggggaggtgatcaactccgtcatcatcgcgcgcaagccactcccggtcgtcgacgagcacgccgtcgccggggtggggcacgcacacgcgcacggcgccgtgctcagccggccctgcctctgctgcgagatggaggcccgggctcaccagaagatggaggaggtggccatggagcagctgccgtcctaggcacaagatggattgccccggccggcagcccatgcaatcgcattgcatctatctcatcgatctacttacgtgtctacaccacatgcgtgataataatctgcagattgacctggctactagctggtatattgtc

SEQ ID NO: 15724 - DNA, 1281 bp, Zea mays
  Clone ID: LIB3060-061-C7_FLI
gtttgctgtcttgcttcttccttatgatgaatccaatccgtcgtggagacagctaagcaggctttactgaatctagttgctatttaaccaggtgccaagcaagtgcagataccttccctgcctcacaaacaacgccatcagggtcttcaaccagggcaggttctcttctttcattcagctatgggcaacctgtgctgctgtgttcaagttgaccagtcgactgtggccatcagggagcagtttggcaagtttgacagcgtgcttgagccaggatgccactgcatgccttggttcgccggcaagcgtgtagctgggcatctcacactcaggctgcagcaactggatgtgcgctgtgagacaaaaacaaaggacaatgtttttgtgaatgtggtggcatctattcagtaccgcgctctggctgacaaagcaagtgacgctttctacaaactgagcaacacaaggtcccagatccaagcctacgtctttgacgtgatcagagcaagcgttcccaagctccatttggacgatgctttcgagcagaaggacgagatcgcaagggcggtggaggacgagcttgagaaggccatgtcggcttatggctttgagatcgtgcagactctcatcgtggacatcgagccagacgagcatgtgaagcgcgcaatgaacgagatcaacgcagctgcgaggctcagggcggctgcaaacgagaaggcggaggcggagaagatcgtgcagatcaagcgcgcggagggggaggcggaagccaagtacctgtccgggctgggcattgcgcgccagcggcaggccatcgtggacgggctcagggacagcgtgctggggttctccgtcaacgtgccgggcaccaccgccaaggacgtcatggacatggtgctcatcacccagtacttcgacaccatgaaggagatcggcgcgtcgtccaaggcgtcctcggtgttcatcccgcatggccccggagcggtgcgcgacatcgccacgcagatccgcgacggcctcctgcagggatcctctgtcgccaaacactaagctgcctgcctgctgttgccgctgctgctgctgaagaacaccaccaccactattatatatataatataatgatgatcttggtaccagagtgatgcttgtctatattgttcatcactcatcgtcaccatctgctaggatggctatctttatgcttggggattggagaaaaccttatctaaccttttagggaaccggtaatatatatataatgcagcatgagtttgcagtatgttcatc

SEQ ID NO: 15725 - DNA, 783 bp, Zea mays
  Clone ID: LIB3060-061-E11_FLI
gtagcttcgacgtagaagaaactttggagcccttcaaatcccatggccgcgctcggttcttctgtcacctccagaggcttggcgctccatacctccgtgtgtgtggtttttcttcgtcgtcgccacgggaatccagtgatcccggccgcaccgtctcgtcaccagcgaagtcttgcgactgggttaacgacgagttcttcaggcatgaacaatgccttccctattatcaaaggaactacacgaattcctgcggttggtcctggccctgcaaatccggcaggaggaaacctgccaatacccagcagcatgcctccgtgggccaagtgggtggccggggccgtcatacttgcgatacctatctacaggaggttcagaactttagaagacaagatagagaagacgacggaggtggccatcgaggtggtcgacacggtggcggaggctgcggagaaggtcgccggcgaggtcgccggcgcgttccccggcaacgacggtctcagggaagcggcctcgaagattaagacggtcgcggatgagatcgaggaagacgccgagaaagccgaggccctaatcgagaaggttgacgagatcaagaaagaggttgattcaattgtggatcctataatcgacaaggttgtcaaggacaaagaaatatagagacaggtggtgaactgaagatgtaaacatttgttgggctggtctggttaggaatggatccggatatttattcagatgttaaattactttcgattgcaaacaaatatgatatataatttgttatgt

SEQ ID NO: 15726 - DNA, 1540 bp, Zea mays
  Clone ID: LIB3060-061-E6_FLI
gcaacccgaaccaaaagccactcggatccatctcccactctcccctcctcgtcatcggctcctccgcctccacctccgcccgccccctgatccggatcgacgacgccgaccccagatccctttcctctccgccgtctccccgcccgcccgcccgccgatcccacatccctcccaggccttcaagcagtgaaggagccttatgagctggttggctggggctttactccaattctggtgctactaagatgggccagggcctgctcagcaacaagtctgggacaagactaagcatagatgaaatagcaggcgcttaccatttcttgctcttgctctcccccgtggtttccttctgggactgcatcttccgcaagataagatactcattcagacctgagtgggtgtagcagcatcctgcactcacccacccatcttagcaacagttcctttccttttcttcctcgttattaaaataaaaaaaagttagacaaaccaatgaggccaaagaatgaagtttgaacattttgttttctttcttccctaattatacctagtagtgagtagaggagtcaggtctaccagaggtaatagtgaatagcagcaggcacggctgtcatggacagggctaccatgagcagcaatcaggcaggcaaagtgttgaagaaaggaaaaaagaagcaggccaaggacgagctggaccgccagaagcaggcggagaagaagcggcgccgacttgagaaagcgctggcaaactcggctgccataatctcggagctggaaaagaagaagcagcagaagaaggaagaacagcaaaggctggacgaggaaggtgctgccatagcagaagcagtcgctcttcatgtcctcataggcgaggactccgatgaaccctgccatttgatgctgaacaagcaccatataaggtgcaaccattgggccccctcggctgcttttgaattcaccgtggacgcacagcccgccgaggtgtacccgtctgaggatggactggtatgcggcagccatgcgtatgctcccagagcccccaaggggaggcgggctgattgggggattggacaggcactgccatgctggggagaagtgagtgacctccaaggcccgtactaccaaggaacgttccgtcagtctgttacctgccctggcttcatagccgctcaggctgtgtcatcgttgcagatcagggaagagtcgccagaggtcacctctccaagccatggggccgatgctgctgcgaccgtggttaaccggatgcttggtggcaccagcaggctcaacctttacagggggatataaacatttacacttgtcaaagaattgtattgtatatataaaaaagaagatgtgtttggctgcattgcctgcaatatatatataatatagtcttgtggtttccgaaagagaaatggacagaacatccatcctgttttgttgttgttttttctttgccaaaggttatttgtgtactgtcagttaacactgtgaacatatatgctttttaattaatatgttgagtgcttatggcttg

SEQ ID NO: 15727 - DNA, 861 bp, Zea mays
  Clone ID: LIB3060-061-H10_FLI
gcccatgcgcattcatcgctttgtacgctagtggtatggagttggtgcgtgcgtgcaccagtcaagccctggtcctctctcggtcgtcgtcgtcttcttcttcttcttattccccttcctccacagcacggcacgcgcacacgctgagtccaggatcatggcggcgggcctcaaggtccccgagatggcgctcaggctctgcgtcgtcccgctctccttggcctccctgtgggagatggccaccaacgcgcaggcagacgacacctacggggaggtcaagttctccgatctctccggattcagctatttggttggcgtcaacgccgtcacagccgcctacgctgtagcctccgtcttggcgtcgtccttcaagcggcccctcgccgcgcgctacgactgggtggttctcgtcatggatcaggcgtcggcatacctgctggtgacgtcggcctcggcggcggcggagctgctgcagctggcgcggcacggcgaccggggcgtgtcgtggggcgaggcgtgctcctacttcggccggttctgcgggaaggccacggtgtcgctggcgctgcacgccgccgcgctggcctgcttcgccgcgctctcactcgtctccgccttcagggtgttcagcagcaggtgccacccgccgcctgacgctgacggccagccgcccaagcacgcacgggacgaggagcaacgggtgtagcactactgacggcaaggcgtgtctccattccattgccaaacaaataacatcctgctcccctgtgtattactactgccgtctaccaaggccatcggtgatctttccacaggcccaacccacatctataatctattagtcgtcttcaaaccattagt

SEQ ID NO: 15728 - DNA, 1388 bp, Zea mays
  Clone ID: LIB3060-062-B5_FLI
ttttcccttcctcccctccgttgcgtccctccgtccgtccgtccgtcgtcaccagcctcctccctcgcgcccaccgccgggatccgtccctcctcgtctgcgcccgcctcggtctagatttctgagaaaatggcgagaagtgcgggaactaggaggcgtgtggctcgccagctcaagtccacacatcccattccttcataccgatggaagtcaaagcccatgaaaaagccgatgaaaaaatccaaccgaaagcaagtgttgccaaccttgcaaaagatggactgggaagatgccaattgctctgtgtgcatggaatacccacataatgctgtgctcatcctttgctcatcccatgataagggttgtcgtccttatatgtgtggaactagctaccgccactctaattgcttggatcagttcaagaaagcttacaccaagggggcattgcttgaggaagttcctgcaaatagtgttggctctaatctggattcggcgccattggctgcagaaaaaactgactccattgaccttgcatgtccattgtgtcgtggcaaggtgaaagggtggacggtggtggaaccagctcgaagctacctcaatggaaaacgaagaacatgcatgcaggatggttgctcatttgtggggacctacaaggagctccgcaagcatgtcaagttggaacaccctcttgcaaagccaagggaagttgatcctgtccttgagcaaaaatggagattgctcgagattgaaagagagcggcaagatgcgctcagcacgatcacggcaacaatgggcagagccgttgtttttggtgattatgtgctagacttggaggatggaatggactccgaggatgttgacagtgatgctgataatgatggccgtgggacagaaaacactcgtaggatgctactatttattatgcgccaagttgctcaacatcaccaaaaccaaaggctccagaatgcgactggtgcatctgacaatgctgaggacaattatgtggtgagcagtggtgccaatggaaccacaccatactcttaccccttggagggggaggacgagaatggtatggttgtggccggaggcagaagcactgatgtgctgagaccagagaggaggcgccgtcgtcgccgcaggaaccgtgggagattgtttttaggtgctaattgagaggacaggtggccaggtagggtttagccgccagaggagtacatacagaaatgcttccctggtgcctggcattcatcaattcctgtctcaatttacttgatcatgatcatgtaccaagtagttatcttaacatcagctcattgtcataaatttatggtatctcacattcttcgttgaaaaaggaaaacaccgcatccatctcttgcggtttgtgt

SEQ ID NO: 15729 - DNA, 1606 bp, Zea mays
  Clone ID: LIB3060-062-E11_FLI
aaggcgcgcagcaatcctgcctcgcttccctccaaattcccaaagctctcgcgcgcggtgccatggcggagcgcctcgccgcctccctcctccctgccgcctcgccgtccccgtccgcccgccgcgcaacggtcgcagccgcagccgccgcctctttcccctccccatgctccgcccgcgcggggctgcgcctacgctcccgcccgcccctcttctcgcagaaggcggccgggcgcgggtgtggcctgcgggtggtgcggtgcatggcagcgtcggacgcggcgcagctcaaggccgcgcgggaggacatcaaggaactccttaagagcacatactgccaccccatcatggtccgtctggggtggcatgattctggtacctatgacaaggatattaaggactggccacagcgaggtggagctaatggaagtttaaggttcgatgctgagctgagtcatggagccaatgccggcctgattaatgcattgaagcttatccagcctatcaaggacaaatacccaggtatcacttatgcagatttgttccagttagcaagtgctacggcgattgaggaagctggtggtccaaaacttccaatgaaatatggacgtgttgatgtcacagcagctgaacagtgtccgcccgaggggaggcttcctgatgctggcccacgtgatcctgctgaacaccttagggaggtattttatagaatgggccttgatgacaaggaaattgttgcactatctggagcacacacacttggaagagcaaggcctgaccggagtggctggggaaagctagaaacaaaatatactaaggatgggcctggtgagcctggagggcaatcatggacagttgagtggttgaagtttgataatagttacttcaaggacatgaagtttttgagccagcttccctggaaagagcagaaggaacaggatcttctagttttgcctacagatgctgcattatttgaggacccatcgttcaaggtatacgcagaaaagtatgcagatgaccaggaagcgttctttaaagactatggtgaagctcatgctaagctgagcgatcttggtgcaaagtttgatcctcctgagggattctcactcgacgatgacacaagctcttcaccttccgacgagaagacggaagaacctacactggtagcggtaggagcggcagtagcaacagcgacagcggacgacaacaacggcgcagctccgcagccggagcccttcgtcgctgccaaatactcgtatggaaagagggagttgtcggatgcgatgaagcaaaagatcagggcggagtacgaggggtttggaggcagcccggacaagcccatgcagtccaactacttcctcaacatcatgatcctgattgcggggttggcgttcttgacatctctgcttgggaactgagtgttatatcatcatatgattatgatccgatttctgaagtctacgagtgtccactattgcaaactctgtaaacgtatgaaacatatctacgactagcattagagctacgtacactgtgcaaacagttttttttttttcgcgaattttggagagagacgagcaaaagaaatgtataacgagtgttggag

SEQ ID NO: 15730 - DNA, 2142 bp, Zea mays
  Clone ID: LIB3060-062-E9_FLI
ctcacacacacattgtcgcctgccttcccttccttccccagttgagttccccccgcggccccgcccccggtccccttccaccgacccaccatgtcggcgatgaggtgaggttgaggccaggtctactctccgcgaccgtcgccgacgccatcgccaacgagcagtttgctccatcttcgccatctcgcacacgaatacaatacactagttttggtagagatggaggacggcggcaaggcgccggccggcctgggcaccctgcgcgcggtgctcgccatcctccagtggtggggcttcaacgtcaccgtcatcatcatgaacaagtggatcttccaggtttacccgcattatattctagcttccccatccatcttccgccgcggatctggatgtcagatgcttctcctgcccggctgctacttttctcctttggaatatctaactaaattcgtccatactgcttaccattatagatcacggactagagacttggattgggtgggaaacagggtcaaatagacttatagcgtgtttggtctgagaaacgaggtagttatcatcttttcactactcactttttttgtttgtttttggaatggaatgaattgatccatcatttcaatccttgtaggccaataattagtaataatacgagaaatgagttcattccactaaatttgtggaatgaacatatgatgcacccacaccacctcatctgtaatagattggctcttcgaaccaaacaccccattagattgttactacgtactttggtttggttggtggttagtcaagcagggttcagcagctgtctagtccaggagagttgagagttgctgctcttatgcattttttatgtatttctgggtgatagcagattgtgtatatgaacgtgtaaaatactgttagactactgtttagagagtataatttgagataggagatgagatgagtaggacttctgtagatagcctaacaataagaggttacctactcatctcccatcatcttatgggtggtgtcaagactcaagagccgtgcccttttgatataataagtaagttgctctctcttctctgcagaaactggatttcaagttccctctcaccgtgtcctgcgtccacttcatctgctcttccattggagcttacattgcaatccatgtcctcaaggcgaaacccctgattcaagttgaaccggaggaccgctggaaaaggatatttccaatgtccttcgtcttctgcataaacattgtgctgggaaatgtcagcttgcgctacatcccagtctccttcatgcagacaatcaaatctttcactcctgcaaccacagttattctgcagtggctagtctggagcaagcatttcgagtggcgcatatgggcttcgctggtccctatagttggcggaatactcctgacttcggtgacagagcttagcttcaacattttcggtttctgtgctgccatggttggctgcctggctacgtctacaaagaccatcttggcagagtccctactccatggatacaagtttgacagcattaacacggtgtactacatggcaccctttgccaccatgatactggctctaccagcgatggtgcttgaaggaggaggtgtaatgaactggttctacacacatgattccatcgttcctgcgctgactatcatcctaggttcgggggtgcttgcgttctgccttaacttctccatcttctacgtcatccattcaacaacagcagtgacgttcaacgttgcaggcaaccttaaagtcgcggtggcagtgttagtgtcgtggtcgatcttccggaatccaatctctgcaatgaatgcaatcgggtgtggaatcaccctggttggttgcactttctatggctacgtgaggcatctgatctcgcagcggcaggctgcagccccagggagtctaggaacagcgcaagcaaggaatcagacggagatgcttccccttgttgtggacgagaagcaagaaaaggtttagcaatggtgctaggccttctcttcacttgttgaagagagaattatatatgtactcgtgcgtgcgtgtgtggtgagggtagtaaactggaacttcgtacaagcatcgtttcctccttccatttgtgacactattcgccagcatc

SEQ ID NO: 15731 - DNA, 1200 bp, Zea mays
  Clone ID: LIB3060-062-H1_FLI
gacgacaacacatgccacagccacacgcgacacacctgtctcggctgtggcgagcgcgatggccgcaaacgtggcgctggtgctgctatcctcctgctcgccctccacttccgccgccgccgcctcgctcctccctcgccgccgcttcctgccctcccgccgaagaagagcaagctcccgagccaccaccatcatgtcggcgttgggcgatgacccgatcagggaatggattcttacagaagggaaggccacgcagataaaagggatcaggtccattggtggtggctgcattaactccgctcagcgctatgataccgacgcgggccccttctttgtgaagaccaacagccgcattggtccagaaatgtttgaaggggaggctcttggtttgaaggcaatgtatgacacaaagtcgatccgtgttccgttgccatacaaggttggttctttacctacaggtggttcttttatcatcatggagtttattgaatttggtcgttcaaggggagaccagtcagatttgggaaggaagcttgctgaaatgcataaggctgctaaatctgataaaggatatggtttcccggttgacaatactattggaagcactccacaaattaacacttggactgatgactggattgagttttactccaagcatagattgggttaccagttggagttggcatcgagacgatatggagattcggccatactcgaaaaaggtcagcggttgatcaagaatatccgcccactttttgatggagcggttattgagccatgcttgcttcatggtgatctgtggagcggaaacataagctctgatagcaatggggatcctgtaatattggatcctgcttgctactatggacacaacgaggcagagtttgggatgtcctggtgtgctggatttggtggggacttctacaacgcctattttcaggtgatgccgaaacagccagggtttgagaagaggagggacctctatctcctctaccactacctgaatcactacaatctctttggctctggctaccgttcatcagctatgtccataatcgaagactacctatatgtgctggcgatttagtctcttctgtctattctcagatggaaacgaaaagatcttcatttgtgtaaataaatatctcactgcccatccatttggacacggttcggtggctcaaagaagaataatgtaat

SEQ ID NO: 15732 - DNA, 1259 bp, Zea mays
  Clone ID: LIB3060-063-A5_FLI
tggccgccctccggacggccggctccggccgccgccgcggcgcgggttcccagcagaccggccttaacgggggcaggttcctgatgatgcagaggagggagctggtgaccaaggccgggatcccgctcgccgtctcctgctcgatggctacctcaccggcttcagccaacggcgctgctcaagggctggagattttgccgttcaaagctgacgggtacaacttctggacgtggcggggtcgccggatacactacgtcgagcaaggcgcggggcggcccgtcgtgctcatccacggcttcggcgcttccgccttccactggaggtacaacatccctgagctggccaagaagtacaaggtgtacgccatagacctgctggggttcggctggagcgagaaggcgctggtggactacgaggccaccatctggatggagcaggtctccgacttcctccgtgagatcgtcaaggagccagccgtccttgtaggcaacagcttgggaggcttcacgacgctgttcacggccaccgaggtgccggagctggtccggggcgtcgtgctcctcaactccgccggccagttcgccgaccccaacaagccggccgccgcgccggccgaggaggaggaggggggcagcgcgctgtccaggtacatcgtgcagccgctcaaggaggccttccagcgggtggtgctggggctcctcttctggcagtccaagcagcccgccagggtcgagaaagtcttgaaaagcgtgtacatagatcccagcaacgtcgacgactacctggtcggctccatcacggcgccggcggcggaccccaacgccggcgaggtgtactacaggctgatgtcgcggttcatgtcgaaccagagccggtacacgctggaccggctgctggggaagatgtcgtgcccgctgctgctgctgtggggggacctggacccgtgggtcggcccggccaaggccgcgcggatccaggagttctacgccgacaccgccgtcgtgcacctgcaggccggccattgcccgcacgacgaggcgccggagcaggccaaccgcgcgctgctcgagtggctcgcggccctcgacgcccgcgccaagtcggccgagcccagcctacagaccgtctgatggatcgagcgcaaggggcttagcgaatgctagtcaaagaatacaatttggtggcctatatctatagtttgatgtagtatgtcctgtagtaggaacagtaatttcttacggtgacttagtttactgttc

SEQ ID NO: 15733 - DNA, 1325 bp, Zea mays
  Clone ID: LIB3060-063-A9_FLI
gtaaactgactaactgctgcccactcgccggagaaccatggccacggcggcggcgtgtgtgcgggtggcgtctccgttcacgggcccacctatctggcatcccagacacgtcatctcaacgaggcggggacccaggagggccgggctggccgtcacggcggcggctgccgccggtggatcgccgcgcactgtgctcgtcaccggcgcgggcggccgaacaggccaaattgtgtacaagaagttgaaggagagggaaggacagtttgtgggacgtggcctagtcaggacgggagagagcaaaggcaaaattggaggcggtgacgacgtgtttgtcggcgacatcagagaccccgagagcattgctcctgcgatcgagggcattgacgcgctcatcatcctcaccagcgcggtcccaaagatgaaaccggggtttgatcctagcaaaggggggcgccctgagttttactttgaagaagggagttatcctgagcaggtggattggattggccaaaagaatcaaattgatgctgctaagagcatcggtgcaaagcacatagttttggtgggatccatgggaggaacagacatcaatcacccgctaaacaagttaggaaatgcaaatatactggtgtggaagcgcaaggcagaacagtacctagcagactccggtcttccatatacaattataagagctggcggtttacaagataaagatggtggcttgcgagagttgattgttgggaaggatgatgagatcctgaaaacagaaacaagaactatagccagggccgatgttgcagaagtttgcatacaggcattgctattcgaagagtcaaagtttaaggcatttgatctggcatcaaaaccagaaggtgaagggacgccaactacagactttagggcactttttgcacaagttaatagtcgcttctaaagacataagattgttcttgccaagaagttgagggcattctttcgtaaagcgatatgaaatgtgtgtttagtaagaacatcggcgctgcatcgactcggtacatttggaaggagatgaacgctctccgttttcaaccatgaagaagcttcagcagcaacacaggttgttcgtccatctgactgctcttggctgcagcagcacttagggcctatttggaaggaaagtgtttttttatatttttccagttaataccatggaatactagaatattttatgttacgaagtgtttggttgcaatcctaaaaactatgttttcaaaagcatggtattttagataacatggtatgtttggaatatttaaaactccgtttcaatccaaagtttttatgac

SEQ ID NO: 15734 - DNA, 978 bp, Zea mays
  Clone ID: LIB3060-063-C12_FLI
caccgaattccctgcgattcctctcccctcgcctcctcgtctccccctaggggatcgtcggagaggaatcgcaaagagggccgtctcatccgagttaaggaagccatggagcacaaggaggctgggtgccaggcccccgagggacccatcctctgcatcaataactgtggcttcttcggcagcgcggcgaccatgaacatgtgctccaagtgccacaaggagatgataacgaagcaggatcaggccaagctggctgcctcctctatcgacagcatcgtgaacggcagcgacgccgtcatggagccggttgttgctggcagcaacacggtagtagctgttgcccaagttgagttgcaaacaatgaacgtgcagcagcccgctgatgttgccggacccagcgagggggtggcggcgatctccaaaggggggaaggtagggccgaaccggtgcagcgcctgcaggaagagggttggacttacgggattcaactgccggtgtgggaacttgtactgcgcactccaccgctactccgacaagcacgactgcaagttcgactaccggactgctgccagggacgccattgccaaggctaatccggtggtgaaggcagacaagctcgacaagatctagggggggttccctacggttgggtatcaggaagattgtaaaccgcggtaactcgtcatgcggaactgctgccttgccccccgcgcctttctcttccatgtttgctgctacaatcttgttgttgggcattgcagtgcacggtgcacacttgtgtagcccgcctcgagaattcctgcctctgcatctggtcagttctaaaatgatttgcatgttggctatgttgtgtaagctctatttatggtggtctcgctgagacgggtatttggcttcgcagttatctagctatgtgatgtactgttgtcttgtccctgggtattatatggtacactgcagccagtaatagtaatctgc

SEQ ID NO: 15735 - DNA, 1185 bp, Zea mays
  Clone ID: LIB3060-063-D6_FLI
cgcccagaactcccgaaaccagcccaacaccaaagctcattccacgaggcgacaaccttccttccataagaacagagcggccacgctgaggagtgaggaggaaggtaggaggagaaccgtgagcagagagacatggcgcgccaccaccagcagcgggcgctgctcctgttcccactcgtcttcctcctcctcctccttgccccgcccctcgccggcgcgtggggaaaggagggccacatcatggtctgcaagatcgccgagaagtacctgtcggagaaggcggcggcggcggtgaaggcgttgctgccggagtcggcgggcggggagctgtcggcggtgtgcccgtgggcggaccaggtgcgctggcactaccactgggccagcccgctccactacgccaacaccccccaagtctgcaacttcaagttttctcgggactgccacaattctcgtggccagcaagggatgtgcgtcgtcggggctatcaacaactacacggaccagctctacagctacggccagaagacttcgtataacctgacggagagcctgatgttcctggcacacttcgtcggcgacgtccaccagccgctgcacgtaggcttcgaagatgacgagggcggtaacaccatcaccgtccactggtaccggaggaaagcaaacctccatcacgtgtgggatgtcagcattattgatacggcaatcaaggacttctacaacaagagcatggataccatggtagaggctctcaagatgaatcttaccgatggatggtctgacgacatcgtccactgggaaaattgcaagaacaaacacgcgacctgcgcgaacgactacgcaattgagagcatccattattcctgcaactacgcctacaaagatgtggagcaagacatcactctaggagatgattattttttcagtaggtacccgattgtggagaagaggttagcgcaggctggaatcagattggcgttggtacttaatcggatatttggtggaggtgaagcggatgatataccactaaaagtacagtaacagctgtaataaaaggaagcatagctattacaaggatttgtccattacgtcgtttatacatcaataaattggcatgaatttgtaactccattgctacacatcaataaattggcataaatttgtaacaactgaaaggatcaagatgcc

SEQ ID NO: 15736 - DNA, 1301 bp, Zea mays
  Clone ID: LIB3060-063-D7_FLI
gcgaacccgatggcgccgcggtacggggacgaggaggtccggtggctgcaggcgtcgccgcaggcctcgccggagatggactacagctccggcggctcgggcacgccgtcgccgcagctgtgggcgcaccaccaccagctccaccggcagtacccggcgtcggcgggcagctcgccgtcgcgggcgcaggccatcgcggggtaccgccgcgagatgctcgacctcgtccgcggcctcccggagtccgcctacgagctctcgctccgcgacatcgtcgagcacccgtcgcccccgtcccctccccacgcccctaccaaccctctgccgccgcctaccaccgccggaccacgcgcgagtcgcgccgtccccgtcccggcgcaggagaagggcgagtccgccggcgccaggaaggacgccgtcgcggcggcggacgccgaggacggcggcggtagcaggaagcagggaggctccaagggcaagaagcaggggaggaagcagaggacgatgcggaagcagcggagccggagcctggaccgcagcgtcagcctggacaccggcctgctcatcaagctcttcctcccgctctccctcggcggcaagaagaaggtctcgcccaagcccgacgccgccaaggacagcaagaagaagaagaggaaggagaagaaggaggcggcggtgcaggaggaggagtggtggaccaagagcgagttcagcgaggccgggaacagcagccggaccagcagcagcaacagcaacagcagcgccgccagcctcaggaatgccaatggcgccgccaatccgagagcgccggacaggagctggagcaggaagcggaccgggtgctacgctttcttcagggcgaacaagggcaagaagaacgaagccaaccaggactagagctagtgatgacgacacggcctctccatgaaacacggaaagaagaagtgtttctccggtgaaacgttggtggtggtcgtagccatcagcagcggcgtcacgcatgcagctagcacaaggaagctcgagcaagcagcagatctccatactgccgtaccgtaccctaaaattgatgctgttcagtgcctggtttctgcacacgagtagtggcggctccggcatcgtcgtcgtcgtcgtccttttcctttctgttctggcatgtgatcttcatggtataaacagagaggacatgccatgtgtagcgtacaatagttttgactggttcgcacagctcgtacagaaatactgtattgatatggacggcacgccggaggcagtgacaccaatggattaatacttgcaat

SEQ ID NO: 15737 - DNA, 1489 bp, Zea mays
  Clone ID: LIB3060-063-D9_FLI
gcaaaggcctatctttccctttacaggattgttgctcgttgagaaaacttgggagttttggcgtatgcttttagtcctccatgatcttatctgtttcatttggaccatccttttgtcttgaacagactttgggaccaagaattgggtatttgcccctcttgatacctgttataagggctcatttcagcaatgcactcccacctggtgttgacactgtttggtttgaatataaagggctgcctttgaaatggtatgtaccaattggtgttctttttgatcttctatgtgcagatccagaaagaccatggaatctaatagtccattttaggggatatccctcagaaatcttgtcaccatgcgagggtgaagatagtgtgaagtggagctacatgaattccctgaaagaggccaccttcatcattactgggaacagtaagagtgtgatgaatatgtcgcatgctgatcaagtcgctctgtgggaatctgtaatgaaaggtaacttagatgggtataaaaatatctccaccaggcttaagcttggaccatttgaagatgatgtgttagtacggacagcctccgtggagcggcaacgtcaacaaaattctgatgaacctgaatctcctggatctagcaaaccgtgtatgctcttttgctctgggacttttatattgtcatccatgttaaaagttcatgtgcttacaagagttcaatacggtaatccgtatttattaagttttcgtagggtcagtgtactttctaagtgatataacattaagtgatgccatgttacgctatacccgcaggccgcagaccttgctggctctgatcaattaatctatggttaggcagggtccctgttcgattatacgtacgcaatgttcaagaagaccttgagtacatagaacatgcagttcctgtcagtgactgggaaaacgtgtcctacataaatcggccatttgagactcgcaaggctgaaggtagaagctacatcaccctggaacatgcgttgcaaacattgcttccggagttcttcagctcaaagcccccaggcagcgctgacggctcccaacacgcaggcgcaatggacgcagccgcagacagttcagatgccaccaactcttcaagtcgttctcaggaggcagagcaagccctggcaagtccagcagaggcgggttctgccaagagagcgaaagtgaagctggtgagggtgcaaggtgttgagctcgacatggacatcccgttcctgtgggtcgccgaccacctcaagaaccccgaatactacgtccacatctgtgtatacgtcggcactagaaaacaatagagataagagtacatggggaaattgttagatactgcgttaggagtgtgtcccagaaatcattttctttgttctttggttattacatgtgctatcctgtgtgcagatacagacgctgaaatttgtaacccttttggatgcacagtcatggaaggatggaattggatggtg

SEQ ID NO: 15738 - DNA, 749 bp, Zea mays
  Clone ID: LIB3060-064-D4_FLI
caaaggacaagacaagagacacaacgaaaggaaaggaaccaagagaaagatcgagaagagaggagccttcgcttttggacttgcaccgtcgtgatctgtcccgcgaccacatgaggatccacccagcatcccccaccgccggcggcaagaaggacctccggcgcctgccgcacgtgtacagcaaggtgctggagctgccgctcccggcggacaccgacgtccaggtgttcgaaggcccagacgccttccacttcgtcgcggcgccggccgccggtgcgcgtgccgccgccaccgtgcgggtgcgcaccgtcaggatccaccccggggtcaccaaggtcgtggtgcaggccggagccgccgaacgggccgctgacgacgacgccgccagcgacagcatggagctcgacaggtggcggtcccggctgcccgagccgacctgtccggccatggcggtggccgggtacgtcgacggccagctcgtcgtcacggtgcccaagggccccggtgccgaggaaggcgccgacgcagggcaaggcgaggttacctggaggtgcggcggcggaggcaagatcactggaagactcgtggttgtacagtaggagcgtctaatctatgtactactactccatagtaatgtcttgccatctttctttctttttttggtaaattaagatgggctagctgttcatcatgttgccttccccttccctgcttcgcatcagagacagtcagacaggcgatgtttcatg

SEQ ID NO: 15739 - DNA, 1273 bp, Zea mays
  Clone ID: LIB3060-064-E7_FLI
gaattaaactgctcagggctcactggctcctctcagcgctaagcccagctgtaaagctaaggttccgacttccaagcagtgtggtcgccggaagagcgtagcgagcggcgttcagctcaccagcgttgcattggaaggaagggcgagagacggagcgtgagatcgatcgagcttcaaggagggcaagatgatttcggcggcggacttgtaccacgtgatgacggccgtggtgccgctgtacgtggcgatgatcctggcgtacgggtcggtgcggtggtggcgcatcttctctccggaccagtgctccgggatcaaccgcttcgtggcgctcttcgcggtgccgctgctgtccttccacttcatctccaccaacaacccctacaccatgaacctgcgcttcatcgccgccgacacgctgcagaagctcatggtgctggccatgctcaccgcgtggggccacctcagccgccgggggcggggcagcctcgacctggactggaccatcacgctcttctccctctccacgctgcccaacacgctcgtcatgggcatcccgctgctcaggggcatgtacggcgacttctcgggaagcctcatggtgcagatcgtcgtgctccagtgcatcatctggtacacgctcatgctcttcatgttcgagtaccgcgccgcgcggctgctcatcgccgagcagttcccgggcaacgccgccggggccatcgcctccatcgccgtcgacccggacgtggtctccctcgtcgaccacggccgcggggacgccatcgagacggaggccgaggtcagggaggacggcaggatacacgtcaccgtgcgccgctccagcgcgtcgcgctccgacgtcgtctactcgcgccgctccgtgggcggcttctccggcgccaccccgcgccccagcaacctcaccaacgccgagatctactccctgcagtcgtcgcgcaacccgacgccgcggggatccagcttcaaccacaccgacttctactccatggtcggccgcagctccaacttcggcgcggccgacgcgttcggcgccgtccgcacgccgcgcccgtccaactacgaggacgacgcgtccaggcccaagtacccgctgcccggggtggcaggccactacccggcgccctggagcgccaggaaggcggcgacgaacgggcatgccaagggcgaggacctccacatgttcgtctggagctccagcgcgtcacccgtatcggacgtcttcggcggcggcgcgccagactacaacgaccacgcc

SEQ ID NO: 15740 - DNA, 984 bp, Zea mays
  Clone ID: LIB3060-064-G10_FLI
gacgatcgtactttgtgaggctggtatcttgcacagactcggagcaagataggcctagctggttacaagccaagaacaagtagagcggtagagggaaatatctggagagggaaacaatggcgggcgaggagggtgaggcttaaggtcctcggcctgcaggtgagcccgttcgtgctccgcgtgtgcttggcgctgaacatgaaaggagtgagttacgagtacgtcgaggaggacgtatccaacaagagtgagctcctgctcaagtccaacccggtgcacaagaaggtgcccgtgctcatccacaacggtaagcccatctgcgagtcacccgtcatcatgcagtacgtcgacgagctgttcgccggccggccgatcctcccaaccgacccctacgagcgcgccactgctcgcttctgggctgcctacgccgacgacaagctgttcccagcgtggtacggcatggtgaaggcccaggcggaggaggagagggcggagaaggcgaaggagacgctcgccgccatcgagcacatggaagtggccttcgccaagtgctccggcggcaacgccttcttcggtggcgactccatcggctacgtcgacatcgtgctcggctccttcttgttctggttcgaggcggtgcgcagggttttcgacctggagatcattaacgctagcaagactccgctgttggctgcgtgggcggagcggtttgtagggactgtagaagcgaaggaggtgctgccgttgcccacggcggacatggcggtgcagtacatcaataagcttcatgcccccctgccgccgccatgagttcacaatgagtcgtgtaagtgtaaccaagcagggaaaaaggtaaatggtgcggtgctatggtccaaatttcaaccgaataatgttcaaagcttacatcgataggcttgggttgttgtcatcaaataatgtggttcagtcgtctcctctgcaataaatataaatatgattatt

SEQ ID NO: 15741 - DNA, 1038 bp, Zea mays
  Clone ID: LIB3060-065-B5_FLI
ctggctggagcgctttcctgaatacaaaagccgtccgttctacatctccggggagagctatgccggacactacgtacccgaacttgctgccaccatcttaacccagaattcctacaacagcaagacggccataaacctccggggcatcttggttggaaatccacttctggattcgtatatgaacttgaagggtgcagttgcctactactggagccatgggttgatgtcggacgaggtctttgacaacataaccaggcactgcaagtatgacagttcagatggtgtggcatgcagtggcgctttggaggcggtagatcctggacagattgatccttacaacgtatatgctccgatctgtgttgatgcggccaacggagcatactaccccactggctacctacctggatatgatccatgcagcgattactacacctattcctacctcaatgacccagcagtgcagaatgctttccacgctaggatgacaagttggtcagcgtgcgcgaacttgaactggacggacgcaccgatttccatggtgccaacagtcgcagggctgattgagaagaagctgcctgtttggatttttagtggcgattttgattccgtgtgcccacttcctgctacgaggttttccatccatgatcttaacctgcacgtcaccactccatggcgcccgtggacagtaaacatggaggtcggaggatatgttcaacaataccagggaggattcacgtttgcctctgtcagaggagctggtcatatggttccgtcttcccaggctgatagagcattagtattattggactcctttctgaaaggggtgctcccaccatacgtacaggagcagtaataattcctaaatatgtagagtgtcttgtcaatggcaaactcaataaaaactatccgtttttgtattacttgaattgatgttggttttgcattagctggtttgtggttataattaaaaggtccatctttccccttagggaccgtttgtatccgctcgttttagagaaattgaaatctatacttaac

SEQ ID NO: 15742 - DNA, 650 bp, Zea mays
  Clone ID: LIB3060-065-G6_FLI
cttctgatctagctgccacttgcgttcctgcataccaagaagttggtggtgctagtgcctcgcaaagtgccattgaggcccagaaagctactgctgcggcatctcagctcactcgcagtggttcatcaagggcaatggaaaatgcacaggacggcggggagaggaagtaacgagatagagttcgtttttttttatcgtctatgctacatcttatggatgcatatgatcctgcctgacgattctcaggtctcagctctccgtggctccgtgtgcaaatctctgccacgggcgtgttttaacgcctgattggatggttgcccgctggcgcgcccggccagcctcgtacggccacttcggacgcatctgcatcttcggaggtacccgcagatgtagatgaatggccgtaaaatggtttggtctgcgtctctttacatataggcaaccaaatgaaactcagataaagttaactcatgtggagatggtgcgggtaaccaatcgaacggttaacaaattcaggtcgtatgtatatcctggtttacagttagtgtttcctaagtgcatttgtagattatagagctgtcaagattgaacgatacatctgtaaggtgttacaaatgctaaatgctaatcatgattttgtggctgatgct

SEQ ID NO: 15743 - DNA, 852 bp, Zea mays
  Clone ID: LIB3060-066-B6_FLI
aataaaaaatcatgtgtccatataagaaccaattaggattcaatgtctcataaccatctcacaactaaacggccaagtcaatgttccacaaataattacggatccagcccatatattcctcctcttgccgttcctcctgctactgtcctcaccatatgtgcaagctcaacagagaatcaccttgggctcctccttaacaacccaagggcctaacagcttttggctctccccttctggtgactttgcctttggcttccggtccatcgagggcaacacctcctcctacttgctcgctgtctggttcaacaagatcagcgacaagacagtggcatggtatgccaagaccgctgatccagatccagcgctggtacaagtttcatccggttcatgcctcgagctcacgtccagtggagcgctctcgctccaggaccctactggcaaagaggtatggaatccagaagttgtgagtgcaacctatgcttccatgctcgatactggaaacttcgtactggctgctgcagatggctcttccaagtgggggaccttcgataacccagcagacactattctgctcactcaggtgctcacccctgaaaccaagctccacagccggaccattgccacagactactccaatggacggttccaccttaacctgcaaaataatggtgttttcttctatgctactgctgtgcaatccgatcctcaacatgaatataattggtccatgcctgggaacgccacaaatttggtattcaatgcgactggcatgatatacatcaccttggataatggaacacaagtaaaaatcacatctgggaagacaagctccatagcggactactaccatcg

SEQ ID NO: 15744 - DNA, 1640 bp, Zea mays
  Clone ID: LIB3060-066-E11_FLI
ggcgacgggggaaagcaacggagacgagggcaacggaccagggctgagagcctaagaccaccacacctccactgcctcacggacgagaacgcaggaaggatggcggacggcaccgacgtgtcgccggagtcggaggcgacggcggcagccgggaagagcggggagatctggggaacgctggaggagctgctcctggcgtgcgccgtgacgcggcacggcacggcgagctgggactcggtggccatggaggtgcagacacggatccccgtggcggcgcggccaggcctcacgccgcacagctgccgcctccgcttccgccacctccaccgccgcttctccaccgtcggcagcggcggggtcgaggaggccgaggaggatcccgacgcctccgctgccgagggatgggtggacgagctccggcggctgcgcgtcgccgagctccgtcgcgacgtcgagcgatgcgatctctctatcgggacgctgcagtcaaaagtgaaacggctgaaagcggagcgggagcagagagcctccggcgaggctgtgagcgaccacgatcgcctctcaagcgaggagcccgggtgctcatgcagggagtcgaactccacagatctgaagccgcccaaacatcccagccagctaggcgacgggtctaaggaggagaaggttgcgaaacaggaagcgtccgttgagtcggcggtcgattccaaagacagcagcgaagtgcggagctcggcgagcttgtgccgccgccgccgtggaagcgggaacgctgaagaggaggaggcggaggcggaggcgtccaagtcctctccgctcactttcctgctcgacgcggtcttggccaagctcggttgcgtgctggaccggttacgcgaaaacgacagcgaggaatctgccatgtaccgggacacgatcaggcgccatgtggacttggagactctgcggcgtcggctgaacgcgtcggccggctcgcgcgccgacgatgacagccactcctctgcgcacgagctctatcgcgacctgctgctgctctgcacgaacatcgtggtcttcttcccgggtggcacccccgagaactccgcggctgtcgaggcccgcgcgctcgtcaccgggcacgcatcggcggtgctccacaagccgaagcaggagaacgtggctgtggctgcgccggcaccggcaagcgccgacatcgttggttcgctgatcgagaaggggaagccgctgattgtgtgccgcaagcggagctccatcgcgaaggccgcagcgtctgcgagaaaggaggagaacacgatgaagggtgagacggcggaagagacggaggacgagaagaaatccgtggctgcggcgaccaaggacaagacgtggggggtgaggacgaagaagagccgcggtggcaagaactccgcgggtccaggccgaaacctagcggacggtgctgacgggccgaggaagggcgccggtgctggcactgacgggctcgccaagaagcggaacgccgtagacttcctaaagcgcctgaaccagtcgccccccaggaagcgggggtcggggtcccacctgggtacgacgcgaaagcggccggcggcgatggaggagcagacgactaaacgcaagagaggaaccggacggaaggagggcac

SEQ ID NO: 15745 - DNA, 1898 bp, Zea mays
  Clone ID: LIB3060-066-G10_FLI
ggcagctcagcagcttttgtagcgagcttcttggagccttgaaatgagtagtagtggtagcctagccaccaccagtagcaagtaggcactataagcactaggaagtagctaaagcagtcataaccatgggttcgctgccgccggtggacgggcagagacgccccccacacgttgtgatgatcccgtacccggcgcagggccacatcacgccgatgctgcagtttgccaagctcctccatactcgcggcttccacgtcaccttcgtcaacaacgagttcaatcatcgacgccacctgcgtgcgcgagggcccaacgcgctcgacggcacggatgggtttcgcttcaccgccatcgacgacggtctcccgctctttgaagcggacgccacccaggacatccccgcgctctgccactccaccttgaccacctgcctgccccggtttaaggatctcatcgccaggattaacgccgaggctgaggccgagggacaacccaccgtgacatgcgtcgtcggcgacagcaccatgaccttcgcgctccgcgccgcgcgagagctcggcctccgctgcgctacactctggaccgccagcgcctgcggcttcatcggctacttccactaccgccacctcgtcgagcgtggtatggtccccctcaagaacgaggagcagctcacggacgggtacctagacaccatcgtcgactggatcccgggcgcgcccaaggacctgcggctccgggacttcccgagcttcgtgcgcaccacggatccgaacgacgtcatgctcaacttcttcatccacgagacggagggcatgtcgcaggcgtcggcggtggtcatcaacaccttcgacgagctcgacgcgacgctgctcgctgccatggcgaagctcctgccgcccatctacaccgtgggcccgctccagctgacggtgcggaacaacgtgcaggcgaacagtcctgtcgctgctattgggtccaacctgtggaaggagcaggaggcgccgctccggtggctcaacggccgtgcgccgcgctccgttgtgtatgtcaacttcgggagcatcacggtgatgtccaacgagcagctggtcgagttcgcgtgggggctggccaacaccggctactacttcctatggaacgtacgcccggacctcgtcaagagtggcgactccgccgggctgccgccagagttctcagctgcgacagagggacgaagcatgctgtctacgtggtgcccgcaggcagctgtgctggagcatgatgccgtgggggtgttcctgacgcactccgggtggaactccacgctggagagtatttgcggcggcgttcccatgctgtgctggcccttcttcgccgagcagcagaccaactgccgatacaagtgcaccgagtggggcatcggaaaagagatcggtgacgatgtacagcggggcgaggtagagtcgctcatacgggaggccatggagggggagaaagggcaagagatgctccggcgcgtgactgaactcagggacagcgccgtggccgctgcagggcctgacggacggtctatgcgcaacgtagacaggctcatcgaagaggtgctcctagcctagattgagcactggtgaacatcatagcagtcatgtgtcttcgcgtctggcactccaatcgattcaaatcctttgtgttttgatgtcaagcgtttactttcggtacccataaaagtattttctcgtacaaggtggtgattacacgcaaagcacattgttataagttcagtttgtaagatctatgggtaaaaccaagcgttttgtataattaaggaccgtttgagagggctacgactcctttaaaaacagctctagctccggctcctttaaagtaatagctcctccgcaggagcaaatgttatttac

SEQ ID NO: 15746 - DNA, 1479 bp, Zea mays
  Clone ID: LIB3060-066-G12_FLI
gcctaccagtgtcgtcccagccgccgtcccgtccgccgtcaaacgtcatccgaatccgcgccgcgaccagcgaagaaggtaggaagcatccggaacggagacgcgcctcctgcctcgccttcctcccatggcgccgcccctcgccgccgtctcatcgtcgtcgcccctattctctccttcatcgtcccgccccatccgccgctgccacgcacctcctccttctatctccttccagacgcggggacgctcgcccacggcggcggcggcagctgagtcttctgtcagcacgcttctcgaggtgcgcggactcaccgcatccgtgaaggagactgggcagcagatcctcgccggcgtcgacctcaccatccgcgagggcgagattcatgcgattatggggaagaacggctccggcaagagcaccctcacaaaagttctcgttggccatcctcattatgaggtaactggtggtaccattctcttcaagggtgaggacctggttgacatggagccagaggacagatctctagcaggccttttcatgagtttccaagcacctattgagattcctggagtcagcaatttcgattttctgctcatggctgtgaatgctcgcagagaaaggagtggtctaccagcattggggccccttgagttttactcagttgtatcgcccaaagttgatgccttgaagatggacccaaagttccttgatcgcaatgtgaatgaaggttttagcggtggtgaaaggaagcgtaatgagatattgcagctttcagtcattggagcagatttagcccttcttgacgagatagattcagggttagatgttgatgcacttgaagatgttgctaatgcagtgaatgggctgttgacaccccaaaactctgttctgatgattacacattaccaacgtcttttggatctcattaagcccagttacgttcacatcatggaaaatggcaagataatcaagacgggtgacagttctatcgccacacaaattaatgaaggcggcttcaaatctatcgcccttgtatagcgtgaaagcagtcaaataacagaaatggctcgctgggcttgttcaccagccactaagcctacttgccaggacagaatgcctactgcttggggtttgcactgttgcctactgcattcagaggtgtaccacatacgaatttagtaaaaaaaaaatgagttagtgctctgttcgactaggcatgttgtcttgcctcgtcgagggtggggagctggatacaccacctcctctatgtaagaatgtttggatgaagatatttatacatgtagtcatacatagggatagcatgccgtgcgtgcatacaaggtccaaattttgtatgtttgaattatgacttattctcccaggcttctggctatcaaggctggtgctgcgtgcaacttttgtaacatttttagcacttcaccgatgttcagacctataaagcaattcagttgttctct

SEQ ID NO: 15747 - DNA, 1279 bp, Zea mays
  Clone ID: LIB3060-066-G5_FLI
tttaccacctggtggtcagtcagtcacccaccccacaccgccgccgggaacttgttcatcgagccgagaggatagatagatagatagatagatagggtaaccgatcgaatccgccaaccaaacaatggcgtccgacggcagtggcgtggtgacggtgtacggcaacaacggcgcggcgctgctggagccgccgaagcagcccaagtcgtcgactttctccgtgaaggtgggcctggcgcagatgctccgcggcggtgtgatcatggacgtggtgaccccggagcaggcccgcctcgccgaggaggccggcgcctgcgccgtgatggcgctggagcgtgtccccgccgacatccgcgcgcagggtggcgtggcgcgcatgtcggacccgggcctgatccgcgacatcaagcgcgccgtgaccatccccgtcatggccaaggcccgcatcgggcacttcgtggaggcgcagatcctggaggccgtgggcgtggactacgtggacgagagcgaggtgctgaccccggccgacgacgcccaccacatcaacaagcacaacttccgcgtgcccttcgtgtgcggctgccgcgacctcggcgaggcgctgcgcagggtccgcgagggcgccgccatgatccgcaccaagggggaggccggcacgggcaacgtcgtggaggcggtgcgccacgtgcgctccgtcgcgggcgccgtccgcgcgctccgcggcatggacgacgacgaggtgttcgcctacgccaagcgcatcgccgcgccctacgacctggtcatgcagaccaagcagctggggcggctccccgtcgtgcagttcgcggcggggggcgtggccacgcccgccgacgccgcgctcatgatgcagctcggctgcgacggcgtcttcgtcggctccggcatcttcaagagcggcgaccccgcgcgccgcgcccgcgccatcgtccaggcggtcacccactacagcgaccccaccatcctgaccgacgtcagcgcggggctcggggaggccatggtcggcatcaacctcaacgacccaaaggtggagcgatacgccgccagatccgagtgaacacttccctttcctactccacttatatttatcagtatcatctccgctccgccggctctgccaacaaatttttttgcactgcatgcagtagcttaagtaataatggaatgagtgaatgaaatggtgagaaacgaagctagaagctctgtaattttgtgccgttcttataaagtttgcataggctcccctggattatgaatc

SEQ ID NO: 15748 - DNA, 1582 bp, Zea mays
  Clone ID: LIB3060-066-H9_FLI
cacttgcaggttttaccagtagcaggacaggagcacccgttgccgccccccgcgtatcgcacggtcttcccacccaacccaaggaataggatcccaagctctcgatcggcgtccaccatgggtgcctcttggatcacgacatgctccccgtggtccgcgttcgcgacgctggccgccctcacgaccagcgctctggtgctcggctacgtgtccagctccttgctcggccaacaggccgcgtacgagtacgacgacgcgtacagcccggacgccgagccgtccgggccggcggcgccgcctaggcggggggccggatacccgccggtgttcgcgtactacatcacgggcgggcgcggggactgcctccggatgacgcggctgctcaaggccgcgtaccaccccaggaaccggtacctgctgcacctggacgccggggccggcgcctacgagcgcgcgaggctggccaggtacgtccggtcggagcaggtcttcctcgagtacgccaacgtgcacgtcgtcggcaagggggacgcgctcgacggccgcggcccgtccgccgtcgccgcggtgctacgcggcgcggccgtcctgctgagggtcggcgcggagtgggactggctcgtcacgctgagcgccgcggactacccgctcgtgacgcaggacgacctgctctacgccttctcctccgtgccgagggacctcagcttcatcgatcacaggcccgattctgaaacccatcacgtggttgttctcgaccagaatcttctgcagagcacgaacgccgagatctccatcgcgtcggggcaccgggagaagcccgacgcgttcgacctcttccgaggttctccctggccgatactgagccgggcgttcacggagcactgcgtggccgcgccggacaacctgccccggacgctgctcatgtacttcagcaactcgctcgaggccaaggagttctacttccagacggtcatggccaactccccacgcttcaggaacagcactgtcaaccacagcctccgggtcaacgtgccgccgccgccgccgccgcagagcgcgggccagcaggcgcggtacgacgcactggtcggcggcggcgcggccttcgccgggcggttcggagacgacgaggcgctgctgcagaggatagacgaggaggtgctgcggcgcccgctggacggcatcacgccgggcgagtggtgcgcggtgggtggcggcgaggacggcgcgggcgagtgctcggtcgggggcgacatcgatgctgtcaggcagggcgcggcggggaggaagctggcaagcttgatggccggcctcgtgggtactgcgccgtgcggtggatgcaacagctagctaggttaggcgcgccggcagccgatggaggagaatcgaaatctcatacatttgcttgcttattgtggacaagccggctggcagttagattaattctttgtgtttccacatcaatgcccttgtgctattttgtacctaacgaatgaacgattcaacggctgcctacaaaaacaagaagccgtctcgcaccgcgatcaccagcaatacaaatcttgcaccacgattttggctg

SEQ ID NO: 15749 - DNA, 863 bp, Zea mays
  Clone ID: LIB3060-067-D10_FLI
ctccccggtccccgcgtcgcctgcttctgcttcttgcaccccccaccccaccacaaccgaaaccccactaataatccgccatggcgctcgcctccggcacgtgccgccccctcctgggtggccccgccagcaccgcgcggctccacctcgctgtctcctcgtcctccaccgcctgctcgatccgcttcccccgcggcgccggcggtggcagggcggccgtctccctccgcgcccccgcgcctccagcggcggcggcggcaacatctggtagcattgctccagcgatttcattgaccgaaaaggccttgaaacatctgaacaaaatgagggctgaacggaacgaagatttgtgcttgagaattggagtgaaacagggtggatgctcaggcatgtcttacaccatggagtttgaaaatcgagcagatgccagccctgatgattctgttgtagagtatgatggttttgccatagtctgtgaccccaaaagccttctcttcatgtttggaatggagctggactacagcaacgcactcattggtggaggcttctcttttcagaatccaaacgcaacaaaaacctgtgggtgcggcaaatctttcgcgactgggaaggaatccgaggctgcagcaaaagcttgcaacaactagagtagtgaaatattgatagcaaatcgtgatgtaacttgttatatagcttgctcctgatcaaatcacgtggctccaccacttatacttgtttcgtttcaaaatagttggctttgtttgtttttttcaggataactttgatcagatatatacaagaaaacattaatacttatggtatataattaatattaattgatagagctttgaatctattttatt

SEQ ID NO: 15750 - DNA, 739 bp, Zea mays
  Clone ID: LIB3060-067-G5_FLI
cgccctcgctcctccgccgccgccgccgccgcatcaagcccccgccccgccgtcgcctgaggtagacaccaatccgccgccatggggcgtatgcacagccgcgggaagggtatctcatcgtcggcgcttccctacaagaggacgcctcctacctggctcaagaccgctgcctccgacgtggaggagatgatcacaaaggcagcgaagaagggacagatgccgtcgcagatcggcgtcctgctccgtgaccagcacggtatcccccttgtcaagagcgtcaccggcagcaagatcctccgcatcctcaaggcccatgggctggcaccagaaatccccgaggacctgtacttcctcatcaagaaggcggtggcgataaggaagcaccttgagaggaacaggaaggacaaagactctaaattcaggctcattcttgtggagagcaggatccaccgccttgcccgctactacaagcgcacaaagaagcttccacccacctggaagtatgagtcaaccacagcgagcactctggtggcctaagtgtggtatcctccgacagcttgttctagatatgaatttgtgtaatgcttcttatgtctcgatccggttaaatggacaacggacctcatctttttttatgtttaccttgagaatcccgtaaaccattttggggttttgaattgtctgttaaacgtaacatgcatatgttttgaagcctagggtgagcttttacttcaccatc

SEQ ID NO: 15751 - DNA, 1665 bp, Zea mays
  Clone ID: LIB3060-068-E10_FLI
gcgcgtacgcgtacacagccccgatccgaatcgtcctcctcgcgagcctcgccgatcccccactcccctcccctcgcttcaagatgcagatctttgtgaagaccctcaccggcaagactatcaccctcgaggtggagtcttctgacaccattgacaatgtcaaggctaagatccaggacaaggagggcatccctcctgaccagcagcgccttatcttcgccggcaagcagcttgaggacggccgcacacttgctgactacaacatccagaaggagtcaacccttcatttggtgctgcgccttaggggaggcatgcagatctttgtcaagaccttgactggcaagacaatcacccttgaggtggagtcctcagacaccattgacaatgtcaaggctaagatccaggacaaggagggcatccctcctgaccagcagcggcttatcttcgccggcaagcagcttgaggacggacgcacacttgctgactacaacatccagaaggagtcaaccctccacttggtgctgcgccttaggggaggcatgcagatctttgtcaagaccttgactggcaagacaatcacccttgaggtggagtcctcagacaccattgacaatgtcaaggcaaagatccaggacaaggaaggcatcccaccggaccagcaacgtctcatctttgccggcaagcagttggaggatgggaggacccttgctgactacaacatccagaaggagagcaccctccacttggtgctgcgtcttaggggtggcatgcagatctttgtgaaaacccttactggcaagaccatcactcttgaggtggagtcttcagataccattgacaatgtcaaggccaagatccaggacaaggagggcatcccgccggaccagcagcgtcttatctttgccggcaagcagctggaggatggacgcacccttgcggattacaacattcagaaggagagcaccctccacctggtgctgcgcctcaggggaggaatgcagatcttcgtgaagacattgacaggcaagaccatcaccttggaggttgagagctccgacaccattgataatgtgaaggccaaaatccaggacaaggagggtatccccccggaccagcagcggctgatcttcgccggcaagcagctggaggatggtcgcaccttggctgactacaacatccagaaggagagcaccctccatctggtgctccgcctgaggggtggtatgcagatctttgtgaagaccttgactggcaagaccataaccctggaggttgagagctctgacaccatcgacaacgtgaaggctaagatccaggacaaggaggggattcccccagaccagcagcgtctgatcttcgccggcaagcagctggaggatggtcgcacccttgcagactacaatatccagaaggagagcaccctccacctggtgctccgtcttcgcggtggttattaagccatcagtcgttgaagctgctgctgtatctgggttatccagtgtctctgccattgcccatggatggtactgtctttcaaagtatttgtatggtttgtgtcgtgagtcgtgactgagctggtttcatggaccagttgtgttctcgttacccaaaactatcgtgcggcagcatatggcttaatcatgaataaatgtggtgtttgaattt

SEQ ID NO: 15752 - DNA, 971 bp, Zea mays
  Clone ID: LIB3060-069-A8_FLI
gcgagtgagtgaacaccagccgtattgtcccgactcctgacccctaccgatcctcgcctgctgcagccatggcgacctccgcggcgctctccaccgccgccaatcccacccagctctaccggtcccgcgcttcgctgggcaagccggtgaaggggcttggcctgagcatgggccgcgagcgcgcccagcggagcattgtgtgccaggcggcgagcagcatctccgccgaccgcgtccccgacatggagaagcggaagctgatgaacctcctcctcctcggcgccatctcgttgcccaccgtcggcatggtcgtcccctacggcgccttcttcgtccctgccggctccgggaacgccggcggcgggacctacgcgaaggacaagctgggcaacgacatcacggtggaggcgtggctcaacacgcacggtcccaacgaccgcacgctcgcgcaggggctcaagggtgaccccacgtacctggtggtggagcaggacaagacgctggccacctacgggatcaacgccgtgtgcactcacctcggctgcgtcgtgccgtggaacggcgctgagaacaagttcatctgcccctgccacggatcccagtacaacaaccagggcaaggtggtccgtggaccggcgcctctgtcgctggccctggttcacgccgacgtcgacgacggcaaggtcctcttcgtcccgtgggtggagaccgacttcaggaccggcgaggacccatggtggaaggcatgaggatgatccggaaccagcggtgctcagtgctcacacatgagacctatgtatgcctccgttccttgtgatgaggaaataggcttgcgttcgttctccgtgggcgttgttcctacaaattcacttgctctttgtctctctctatatatacacactgtataaaacaagaacacctgtttatcatctcttcttatataaccttttgaacactgtgaaatctgcgag

SEQ ID NO: 15753 - DNA, 958 bp, Zea mays
  Clone ID: LIB3060-069-B8_FLI
gtcgcccacgtgtgcgccgacgacagggtgcgctcgaaattcgcttcggtgctccatctgagcggagacgacgacttcctcctgaacaccgtccaccatgagaaggccatgctgctgggggtatcgtcactcgtagttgtcgagcttgtctcggacgtaggcgacgaggaatgggacgcgttctactcgttcgtggccagagcggctggtgcaggaagcaaggtgatcgtcatagccaagcatgcaagatcagtagcaaggtttggtgggtcagcaagaccaccaatctttctcggcgctctgtcgtacgaggagttctggtacctgttcaagaacctggcgttccaagccgcggacccgggcgagcatccaaggctagtgcacatagcagaggggtttgctaaggaactgcaccagggtggatcgcttgtcgcagcgaacgcgttggctgatgtgctgagaagaaacctgaacgctcaggtctggctgtcgatactgaacaggtgcagaagagtggtcgagaagaacctctgcgcctacgggcagcaaccgaagctgctcctggagcaaggccgtgaggtggacataacggagttcgtcgttccgagccctgctggtattggtcaccttcgcatgataccttgtactagtagaggtagtagcaaggcttactctcgagttgtcaatgatctaccaaaggtggcgtttggagagctactgttagatccttcggttaggcccaaaggagaatttagtctgctgacgtggaaatcaaggttacccccttatacttcattcaccaacttcgttccaaattgcaccgcagacatgcctcaaggacatagcttgtcaggcaggaagcgccaagcagtgcctttctgataacacaatgtatttacatgtcgggtgtactgttttcagacatctagctacagtgattattgaacagtttacagtt

SEQ ID NO: 15754 - DNA, 1382 bp, Zea mays
  Clone ID: LIB3060-070-B12_FLI
caccttcccctctttgcaatccgtatcatcatcttggcctcgtcaatccaccaccaccgtcgtcgctgagctcctcctccggcttcgcttcgctgtcttgcctcctcctcggtcgaagaagaagaagaagaaaacatgtgtccgggatccgtggagtcgtcgtcggcggcggcggcgggcaagagcgtgtgcgtgatggacgccgcggggccgctgggccacgcgctcgtggaccgcctcctccggcgcgggtacaccgtccacgccgccacgtacgcccgcgacggggaggagggcgcggctgccgccgcgctgctcggccacctgtcgtgcgccgccgacgcgtgcaggcaccggctgaagctgttccgcgccgacccgttcgactaccacgccatcgccgatgccgtgcggggctgcgccggcgtcttctgcatgttcaacacgcccgacgaccaggcccaatgcgatgagtcgacggtggagacggaggtgcgcgcggcgcacaacgtgctggaggcgtgcgcgcagacggacgccatggagcgggtcgtcttcacctcctccgtcaccgccgtcgtctggagcggcgccggcgccggcgcccacagggaggaggtcgccgacgagaggagctggagcgacctcgccttctgcaggaagttcaagctgtggcacgccctggccaagacgctgtcggagaagacggcgtgggcgctggccatggacaggggcgtcgacatggtggccatcaacgccggcctgctgctggccgcccccgggctcgggctcaccgccgcgcacccctacctaaagggcgcccccgacatgtacgacggcggcgtcctcgccaccgtcgacgtcggcttcctggccgacgcgcacgtcgccgcctacgagtcccccaccgcctacggccgctacctctgcttcagcaacgccgtctgccgtcccgaggacgccgtcaagctcgcccagatgctctcgccggccgcgccacgctcgccgccgccaagcgacgaactgaaggtgataccacagaggatccagggcaagaagctgaacaagctcatgctggagttcgccagcggggtatacggggagctggactaggaaggaactgccaggccacagatgatgcgatgcgactagggctgttgtattcttttgtacgtagtactatttgtagttttcgcccccctcacaaaaaaaaaaggagggaaatctgtttggttggccaaaatgtgccatacgctcgctgtacatggccaaacacgccacgtgtgtagcccctgccagcagcaggggtgggtggggagagcatttcagtgatcggttgccaaagaaataccatatcgtatctaggttcgtgagttacatcc

SEQ ID NO: 15755 - DNA, 1199 bp, Zea mays
  Clone ID: LIB3060-071-A2_FLI
gatacgcacccaccagaggaaaagggcaaaagccaaaaggcatcaccgccgcgacgacgatggcagcctcgctccaagccgcggccaccctgatgcagccggccaagatcggcggccgggcgccctttgcctcgctgccgtcccgcccgtcgtcgcaactcgcctgcagggcgttcggcgtcgacgccggcgccgccaggatcacgtgctccctgcaggacgtcgccagcaggtgcgtcgacgccgcgaagctcgccggcttcgcgctcgccacctcggcgctcctcgtctcgggcgcgagcgcggagggcacgcccaagaggctgacctacgacgagatccagagcaaaacgtacatggaggtgaagggcacgggcacggcgaaccagtgcccgaccatcgacggcggcgtggagtcgttcccgttcaaggccggcaagtaccagatgaagaagctgtgcctggagccgacgtccttcaccgtcaaggcggagggcatcgccaagaacgccccgcccgagttccagaagaccaagctcatgacccgcctcacgtacacgctggacgagatcgagggcccgctcgaggtcggctccgacggcacgctcaagttcgaggagaaggacggcatcgactacgccgccgtcaccgtgcagctcccggggggcgagcgcgtgccgttcctcttcaccgtcaagcagctcgtcgccaccggcaagcccgagagcttcggcgggcccttcctcgtgcccagctaccgcggctcctccttcctcgaccccaagggccgcggcggctccaccggctacgacaacgccgtcgcgctccccgccgggggcagaggtgacgaggaggagctccagaaggagaacatcaagaacgccgcctcctccaccggcaacatcacgttgagcgtcaccaagagcaacccggagaccggcgaggtcatcggcgtcttcgagagcgtgcagccgtccgacaccgacctcggggccaaggcgcccaaggatgtcaagatccagggggtctggtacgctcagctcgagtgattcgagtgtctaactgctaggtgtccgaccgccgtcatggatcttgggaaggtgtatgtataccatggaaaactttggagagcagaggaggaatcgtgtatgtaatgtacttgttaatgcaaattcgggctgtcgcttttttactccgct

SEQ ID NO: 15756 - DNA, 2023 bp, Zea mays
  Clone ID: LIB3060-071-B7_FLI
cttaaaatggcgaacatgcgagcccctagaaacgatgacaaccaagagagtgcctcctgtcctcctcccatcgattttcctctggaatcgtaacctcagaaagccaaatctcattctccggcgctcaggcccacccaagcgtcgactctcccgatccaatcggtacctcctagttcctcgccggcggtagcggcgtcgggcgaacatcggtgacttggcgagggcgcttggccggcgacaatcatccactaggatggaaggtgaggcagagactgtggttggttcttgttctaaaccatgtgggcctctggaggactactacattccagattacattctgaagccaggtgcccaacaagtacttgttgatcatgcggcaccctgccccgttgtagtgttcatcaactcaagatctggaggccaacttggaagtagtttaatcaaaacatatcgtgagcttctcaatgaagcacaggtttttgatctctcaaaagaggctccagataaggtattgcatcgtttatatgccaaccttgaaaggctgaagatggaaggagacattcttgcagttcaaatttggaggacactgaggctaattgttgcaggcggtgatggtacagctagctggctgcttggggtagtcagtgaccttaagctttcccacccacctccagtggcaactgtgcctctgggaaccggaaataacctccccttttcatttggatggggaaagaagaatccttctactgaccaagaggctgtaaaatcattcctcgggctagtaaagcatgcaaaagaaattaagattgatagttggcacatcattttgagaatgcgagttccagaggaaggtccatgtgatcctattgctccactagatttgcctcattcattgcatgcgttccatcgtgtctcaagtagtgattctctcaatatggaaggttaccacacattccgtggaggattttggaattactttagtatggggatggatgcagaagtgtcttatgcatttcattctgaaaggaagaagaatccagagaagttcaagaatcagctgacaaatcagggtacatacgctaagcttggacttaaacaaggatggttttgtgcttctcttagtcagccatcatcaaggaaccttgctcaaattgcaaaagtaaagatcatgaaaagagctggtagcctctgggaggaacttcgcattcatcacagcattcggtccatcgtgtgtctgaatttgcctagtttttctggaggtttgaatccttggggcacacctggcacgaggagagcagaagatagggagttcactgcaccttttgtcgacgatggacttcttgaggttgttggcttccgtgacgcctggcacgggctggtcctgctggcccctaatggacacggcactcgcattgcccaggcccataggatccgctttgaattccacaaaggcgcagcagaccacacgttcatgagggttgacggagagccatggaagcagccccttcccaaggacgatgacacggttgtggtggaaatctctcaccttgggcaggtcaccatgctagcaaatgagccgtgcaggtccaagagcgtcaacgaccagtcgtcactgtcgccggcgcacgacagtcatggtgatgacaaggatatcgttgaggaggatgaagacgagtgggaggacggcaggaggaagtttggggcggcagatacatttaagattcctgacgagattgacattgctcatttcagttgagctttgactagtgcatcgtcgtgtgcgttctgatcatacgattatggtttggtttataaccatctcctttcttttgatttcatatatttgcgatatgattgttgcagccatgtgtaagtgaatcctaggtaaccaagtgctgcgttgctatatatgatcaatgtatgtatagattcagtggaacggtaaaaacacgcgaactctacggttttccccttttgttgttaccagttcaattgaacaatatagcgggtgtttggtttgggt

SEQ ID NO: 15757 - DNA, 1705 bp, Zea mays
  Clone ID: LIB3060-071-C7_FLI
ccgacccgaaccctcgagttcgcacgggctccggccagattcgcgcggtctaagcttcgaatcggcgcatggaggcagcagtagccgccgcactcaagtcgcccaccgccgcacgtccctcgtggcggcccgcggccccgggcgccacctcgctcccctttgaccggaggcgcagctttgccttcggctccatcaagggtctcgggcggcagcagctcacctctaggactaggaggcgaagcagtgtggtcagggcctcctggtccccctcggagtctctgccaccgtcctcgtcgatggcgccgctcaggatggaatcgcccgcggggcagctactctcccagattcttcacacgcacccgcacctgctgcctgccgccgccgagcagcagctcgagctgctccagaccgaccgcgaggcagagaagaataaggataaggagagcgatgctggcgacaagctggctccgacaggtgtcgacctcgtgctgtacaggcggattgctcaagtaaaggagaaggaacggaggaggactttggaggagatactctatgctctggttgttgagaagtttgttgaagccggcgtttccttggttccggcactctcacgctccatcgactcttctggaagagttgatcagtgggcagaaactgtggaaggaaggctccagcgtttgcactcgcctgaggcctatgaaatgatcgagaaccatctcgccctcattctggggcagcgtcagagtgatgccactattgcagccataagtaagctccgtgttggccaggtctatgccgcatctgtgatgtatggctatttcctgaagagagttgatcagaggtttcagctcgagaagacaatgaagagcctcccttggggatcagaagaggaagacggcgctttgtatcaagttatgacgaccgactcgatgccttcagctcagtcttctagctctcacccagagatgggctcctggaccgccgcgcctgacttcaacgcaggaggtcctagcgaatctatcaagccttgtcgccttaggtcgtatgtcatgtcattcgatccagatacgcttcagaggtatgcaacggtcaggtcaaaggaggcctttggtatcatcgagaaacacacagaagcgctatttgggaaagcagagattgtagtcacacctggaggcacggttggttcatccaaggatgagcacattaggataagctttgccgggctgagaaggctggtcctggaggctgttactttcggatcattcctctgggacgttgagagctttgtggattccagctaccattttgtgaccagctaagattgtcatcctaagtaaagaaaggttcgtggtttacgtgtctggtctgaatgtctatgggcttcggaaagacttgtacaatgatgctaggctgttaccacaccccttactgatgcgatggtatcaatgatttgcgcagttttatggcatcgcattatttgtaaagaccaactgccattatcctgatattgagccgttatgttctattaacatctgtgctgcccggggggcgtagcgatgtattttatggctatcccctctgcaaattgtaagaggaattctaggctcatagccaattctttagcgaagctattattctcgttttacagattgccgttatgatgatttgagtctttctttttgagagcacagccatttcgtgctac

SEQ ID NO: 15758 - DNA, 1874 bp, Zea mays
  Clone ID: LIB3060-071-E10_FLI
gatattttcacgcgcaggctgcttatccttcgtgtgcggtcttcttctccccagctccctctgctcgctccatctctgtccgtcgctcctagccccagctctggtgccgcgtctccctgctcgctcgcgctctgccgagcggctctgcctgcgcgcgcgtccctcaggcctgcgcgcgagctcaacatctccctgtgttcgctcggcgctcaactcccctgcgcgcgcagccttcctctcggcacgtcggtgaagctctagctcttgctcggccgctgttctcccctgcgtgccgacttctctgctcccgtcgtgaacctcctgctccctctgtccgttcatggcacgtccatatccttcagcttgctggtcgcgagtccctgcccatggccgaggtccctttcctacgcgcgtgctcgccgtctctgctcctttgtcgtggtcgtcgcgcgcctgcgcgcagctcgcgccctgctagtccctgctgcgggttgtcgagctctctgcgcatgcgcagcttgctctttcgttgtttgtcgtgcgcacgaaaattctctgctcgcaacggcgtgtcaagtttccgcgtcgagctcctctcgtgcgtgcccgtcgtcgtctccgagttgattcttagctgtcgtagtatttttagttatcccggctgcgtctatggccgtcaaatcatcagagtcgttcaactcgccgatcacctcttggtcgatcatcgattttctatttgccatgatacaacaccgttgttaaatccagtctctaacccgccatggcgttcgtcgtcctctagtcccagttcgaccccacctcaccagctcgcacccgactttagctcaaagtcgtcgtcgttccgtgcatcagcaagaaatcccaagaatcgggtgaagacgaagctagcagcgccatattccccaagcgctcgacaaattgcctggaccggaaaatcgctaccgatctcgcggattcgtgtgagctgtggaaacgaggaccaaaactgagtcgaccacaagatgctggaaagtgtgagcttctccgcaagataatattgatggattaacccaaagatagatggacgaagcaagtatcggaacaaaggctgatcgtcaagtggtcgccacctaacaaacactaacctagtgtttattccaggcaagccccggtgcatgcaaccccttccttgtgttttcaaataatttttgcacactttaagtctagtgaaatgtgcattaggtttataggagttgcttgaaaccctttgatgcattgccttccttgatatccatacctttatagatacttctggtgaagtatcaaaatatgatttacaaaaatgcttagccctgcttagatcttgtggttagaggttgtcttttgcaatactgcctagctcaggggttatcctgaggaaagatggcttttacctgcaagaatattttcattgagagcgtggtgggatcttactgcaaagttccctgtgatgctcttttcatcctaaggaacacaaacaatcctaagggtggaaatacttaaatcgggacttgggctaggaacaggtgatgttctacccaggttgattaaggattggatgcgtatgtaggcttgatgatcgaggaccctttaactggtcacatgcctcgtcatgggtaagccttgcctcgggcagactaaggccagaataagataacacggaatgggcgtggagcggtggcgagagtagcgtgtaccctccgtggcaagaggctggacggtggtgtatctgtgctctcggttcgcgtgaacctgttctggtcttaagaaccccggtggcgggttgacatatgcaaggattaagtgctacatatgtcgtgtgattggagatcctc

SEQ ID NO: 15759 - DNA, 1957 bp, Zea mays
  Clone ID: LIB3060-071-E12_FLI
cacctcgcggacggcggacataccccgtctcggttctcaaacaccgccgccgccgttctcccaacatctccccgtccaggtcgttgggtcagcccctatccttcaccttcacgacttcacctgcttctccactgcgcgccccgcccccggccccgtcgtgcgccctgctcagatccatcgcacggggcttgccgcaccactgcgccaagcaaaaggtgggcggccagcggcgcgtgcgcagatcatgcactggtaggactaatttgcaagatcttggaccgggatggttcgcctgttagttgtcttatgaagattggtaaggggagaaagaagatgaggaataaacagcgaaaatcatctgccctcggttctgatgcaggatgtggatcttctttatcttgtattgtatggagcttggtgggttttggtcttgtctgcttcattttccttaaacatcaagcagacagtggtcagacccatgtttatttcagtcctcttcatgcgaccagagaattagaggacatcgaggaggatcatttccgcttgccacctcctcacaaggtgaatcctcgtgcagtgaaaaggaggggacctcgtaaacaaccaaaggttatagatgattatctggaggagtcttcagcagtacatgcactgttctttccagatcaaatgactgctgtggatccaacaaaaggaggaaatgatagcatgtatttctatcctggtagagtgtggctagacactgatggaaacaccattcaagcccatggtggggggattatgtatgatcacaagactgccagattctattggtatggagaaaacaaggatggaccaacataccaagctcgccccaaaggaacacagagggttgacatcattggggtaagctgctactcatcaaaagacctgtggtcgtggactcatgaaggaattgtgcttcgtggtgagccttctaatgtcatccatgacctttataaatcaaaggtgcttgagagacctaaggtgatatataatgatcgcactgaaaaatatatcatgtggatgcacatcgatgatgctaactacaccaaagcatctgtcggtgtggccgtgagtagctctccgactggaccttttacttacctttacagctttcgtccacatggttgtgagagtagagacatgacagtcttcaaagatgacgatggaatggcttacctcttctattcttctcgtgacaatactgagctccatgttagcccattgacagaggactaccttcagatcacagcagcaatgaagagaatactaataaggcggcatcgtgaggctccagccgtcttcaagcaccaggggacctactacatgatcacctctggttgctcaggctgggctcccaacagggcattggcacatgctgcagagtctatcatgggcccatgggagacactgggaaacccttgcgttggaggcaacaggttttaccgccttacaacattcttatctcaaagcacatttgtgcttcccctccctggtttgtctggtgcatttatcttcatggcggataggtggagtccgtcaaacttgagagactcccggtatgtgtggcttcctctattcgtcggagggctcgcagacgaacctttagattacagttttggtttccctctgtggtcaagggtatcgatttattggcacaagaaatggcgcctcccagaagattggaagattgcaaacacagcaaatacataagatagctagctatacttgaaccgatagatcgttcataaacttgcttgaggattctaatcgcttgctcctcaagcttttgtacaaaacagtcatcctaaacatgcttcagtgatatatctttttttttggcgtgtgcatgtgtctgtaacttctcttggaaaaagaagtgtgtttcagataactgtattgataattggtatgaccatactctgtcgtttatgcc

SEQ ID NO: 15760 - DNA, 636 bp, Zea mays
  Clone ID: LIB3060-072-E11_FLI
catcactgtagtgtagacgtgtagtactgtagttcagcggcagcaaagctcgctccaatttcgagctcgccaatggccgctgggccagtgaccgcgacctcctccatggcggtcccctccgcgcgccgtaaccgggcgctcctaccgacagtctccgtggctcgcgagccggcgcgcgcgtgggcagcggctggcgcggagggaagggcgcggagagggaaggaggctgaggtggaggacgagaaggaagcggagaggcggcggaaggaggaggtgaaccggaagatcgcgtcccggaaagcgctgtccgtcatcctccggcgcgaggccaccaaagcggttctcgacaagcgtaagcccggcaagggcacgcgccgcctcctccccggcaccgtcctcgaggccctgcacgaccgcatcgcggccctcagatgggactccgccctcaaggtgttcgagctaatgcgggaccaggtgtggtacaagcctcacataggcatatacatcaagctcataaccatgctcggcaagtgcaagcagccggagaaggcgcaccagctcttccaggcgatgattgacgagggttgcgcgcccaacctccagtcctacaccgctctagtctccacgtatagcagg

SEQ ID NO: 15761 - DNA, 3063 bp, Zea mays
  Clone ID: LIB3060-072-G6_FLI
ctaaaaaagcttcgttttttcgagcttgctcctgccccgaaataaaattcggggccccaaaaattcgcaattctgggggctggccccccgaattagcgcgcctcccggagatccggcgccggcccaggcagtgaagatttctaatctggatgtacttaactgcaggctaaggcaatgaagatttctaatctggatgcacacttaatcttgtccagttcttgatcttgggctttgctgcttcctctcaagttagtttgttggccaatcgagtccagaggcgcagatgagtgaggagtacaatatggatgtggccctaaaagccaaaaatgttgctgagaccaagttccatgcccgagacatcaggggtgctcggaagtatgcactcaaggcccagaatctctgcccaacacttgaaggcatattgcagatggtctcaacgcttgaagttcatcttgcagctgagtccaagattgatggagagagtgactggtataggatattgtgtctaggtgcctttgcagatgaagaggaggtgaggaagcaatataggaagctagctctgctgctgcacccagacaagaacaagtctgttggtgctgaggaggccttcaaactgatctctgaggcgtggagtgtgttgtcagatactagcaggaaggtagtttatgatgagaagcgaagaaatcattctgttgtcaatgtaaccaatggcatttatacctatgataagaaggcaaacaagagggctcgaaagaatgctgctgctgcagctgctgccgctgctgctgccgctgcagctgaggctactactcgtcctgttgggattgatacattttggacatcttgcaaccgctgccggatgcagtatgagtacttaaggatttatcttaatcataacctgttgtgcccaaattgccataatgcattcttggcagtggagactgggttcccttgcaatggaagcagctcatcattctcatggtcaaccaagcagcagccgcagcagaaccacaattcaaccaagcattcatatggctcaacaagcaggacttctagcatccctggtacagggaatggggggtaccagcaagataatacttatgattcttacaacaatcaaggcttccagtggaatcagtactccaagacaacaactgcagctgttactaatgcttatagtacacaggccttggagaaacagagaaggaagcatgacgagagctacagctacaactattctgaaagcggcaacacatatgttcatgagaaagctgcttcaaggcgcggtcgcttctcaaagcggagaaggcataactatgatgcttataccactgtggattatggtggcgataacaaagaaacagttgctgcaactgcaagcacagaaccaactgctgtttttactgatgtgggacgggtcaatggtacttcagtggaaaggtttaaatctgcagtgagtggaagaagagcaaatattctgggtgagattacccagattgatacacgaaatttacttcttgagaaagccaaggcaactgtctgtgaaaaattgcatgaattaaacatcacaccatcttcacgagctgcagatagaagaggatctgaaggaaagctgtatccttgtgacaacaacataaaggtcaacggtgtcctctctgacaaacctggcaagggagtcaagctatgcaactcaagaagcatggaaatccaagtgcctgctaccgatgacaaaaatccagagcaacgccgtgtgcctgtgtccatcgatgtcccagaccctgacttccatgatttcgataaagaccgaacggagaaggcttttgatactgatcaagtatgggctacctatgactgcgaggacggcatgccccgcctatatgtaatggttcagaaagttctttcaacgaggcccttccggatccgcatgagctttctcaactcgaagtcaaatatcgaactggcgcctataaactgggtcgcctctggtttccaaaagacatgtggtgacttcagggttgggagatatcaggtgagcgaaacggtgaacatattttcacatagagtgaggtggactaaaggtccccgtggcatcatcaggatcgttccccagaaaggggacacgtgggccttgtaccgtaactggtcccccgactggaacgagctgacgcctgatgacgtgatatacaagtacgagatagtggaagtcgctgatgatttcactgaggagcgagggctgactgtcatcccgttgctgaaggttgccggattcaaagccgtcttccacagacacgtggatcccgaggaggtgaggaggataccaaaggaagagctgttccggttctcgcaccgggttccttctcgtctcctgacgggcgaagagggcagcaatgccccgaaaggctgccatgagctggaccctgctgccactccagtggaccttctcaaggttatcacggagcacaaggaagacgcggtggcgcagagtcctaaataggagtgagcgactccgataacagcgaagataaggtagctggatgtctgagtgaccagatccccacttggttaatgacagcgtgccagcacatgatggtgtctaaagctctactacgccatcttattttcggctgatggcttggacaacacttccagggcaagcagcctgtgtgtgtgtgtgacggacttctgaccttgttaattcttaggcattcctaacatttgattctatcactacacaagccaaccgccacgtagattaaatggccattgggaggaggccggccgcgcacggcaccgagatgagatgaggaggttagtcacggaggtagggagggtgaagatgttacttgtttgtgttgctcactctgtaatgtaggaggcaggctcgagccgagggaaagagctgcttggctttgcttgcccatgtaccccgcatttctgtacctgtttttttacttatgatgatgatgatgtatttccttcttgttttatagtagtaagtaattcacggccagtaattgtagactctggtaaccgtttcggaaaatctagtgctttatctggtgg

SEQ ID NO: 15762 - DNA, 1688 bp, Zea mays
  Clone ID: LIB3060-073-A12_FLI
ccgcggtcgtcgccggccgcgggaggagatcgattccacgcggcggacttggtctacagtctactaatctattctctatctctagcagtggtaccatttggcggcgatcgccgtgctattgcttgggccttggactgagtaggtttggaggtagcgatacgagacactcgcccccgattcccctcccgttgccgaagcctgtgttgcagggatcgttcgcggaagcggtttttgatcggagagagagaaagagagagcgagggagggaggtggggatggacgcggcggcagcggcggcggcgcagatggagaggcactcgtcggcggcggcgcagatggagaggcactcgtcggcggcggccttcgtggagggcggcgttcaggacggctgcgatgacacctgcagcatctgcctcgagaccttctccgacagtgacccctccgcggtgaccagctgcaagcacgagttccacctccagtgcatcctcgagtggtgccagaggagctcccagtgccccatgtgttggcaggcaatcagcatgaaggaccctacgagccaagagctccttgaggccgtcgaggaagagcggaacgacgtgcaggaaaaccacgcgcgcacaaccaccgttttccgtcacccgctgctcggagatttcgaggtaccggtggatgcagacgacgccgagatcgaggagcggatcatgcagcacctggccgccgccgcagccattcgccggtcgcaccgccacgccagaagagaaggccgccgcagcagcagggcggcggcagctcatggccatggccacccacaaccacaaacacaagtcctgttctttccgtctgctggcgaggccactcctggtggttctggttccccgtctccgcatccgcggcaagaacatgctgcttcttctgtggtttctcctccgccattgcccgccgttgcctccgcagaaggaacggatgcagacagtactgcctcggttggtggcgctgtcgggccagatgacagtgtttccaggagccagtcttcgcctgtcaaccacgatgaagctggaccatctgctgacgcgcagtcattctcagacacgatcaaatctaggctgcagtcagtctctacaaagtacaaggactccataacgaagagcacgcgcgggtggaaggagaggtggttcgcgcagagcagcgccatgtcgaatcttggctcggagatgaggagggaggtcggtgctgggatcgccgccgtttcccgcatgatcgagaagcagctggagacacggccggatgggagtgggacagcgccgtcgcctgctaccgcttcgtctccagctcacgcccaccctggttcggatgcaagtagtcagggtcagggagctgctgttcccgctacacctgcagccgctctgaataacgctacgcctgcagctgctgctgctctgaatgacgcctcgtcgtcttcgacagcttgaacgcgcgccaggatcatgttcagtgagtttgcactaggtgtggttttcaagtgctttagatgcttgcaatgcaatgcgtcgcgtgtatagtcagtttgtcaattagcctcattggtagccagtgaaacagatagtggatgccaagctactgttcgatcagtgaatgtttcagaataaagttggatacttggatgcgcacaagaacacccgagagaccac

SEQ ID NO: 15763 - DNA, 1023 bp, Zea mays
  Clone ID: LIB3060-073-B10_FLI
agcttccaaatcttcggggcttgcattgcattgtccgcctgcctaagcacgcaacgcaaggaaggtatagtattctctacttcatcttccagtcctcctgctagctagctttgcctacaaagcaaccaaaaagcgagcgggcggcaccacacgtcggtcgagtgcctatcccttgaagcccttcgacaacaccgagaggaacggaacggaacggatcgcccccctttatacaagcacactcgccgcgcaacactcccgaaacgtgcatcgcgactagttagcagttactgccgcggacagagcacggcaggaaggagcgagcattcgtgcgggagagctggtggcacatggaccgccgggactcctccgaggcgccggggccggccgtgaacggcactggcggcgtcggaggcgcgggcgcggcggcgcccggggtcgtcgacgcgaccttcgacaccaacacggtgatcctgctggcggcgctgttcctggcgctgctgctcgccatcgcgctcaactcgctggccaggttcgcgctctggtgcggaggccgggccgcggccgggggcggcgaggtggcggcgtcgccgagcgtcgccgcgtcgtcctgcgcgggcgtccggggcgggatcaagaagcgcgcgctgcggagcatccccgtggaggtttacgtcggcggggatgcgaaagacgacgaggaggagggggccgggagcggggacgtgtgcgccatctgcctcggcgagttcgcggacggcgagaaggtgcgcgtgctgccgcggtgcggccacgcgttccacgtcccgtgcgtcgacgcctggctgctgtcccgcggctcgtgcccgacgtgccgccgccccgtcatggacgccaagcctgccagtgccagtgccacaggcggcaggggagtggcccagcagagcgcccgccgcccggacagcgacaccgtcgccgtggtcattgcgtgagggacgacggaggggagcatgggcgtggccatgggcccatggccatcgcaagcag

SEQ ID NO: 15764 - DNA, 710 bp, Zea mays
  Clone ID: LIB3060-073-C1_FLI
tctccctcgctccagatctcccttcgcagccggccagggaccccttcacagcgcgggagatggctgatcaggaggccccagttgcagttgaggcaccaaccccagttcttggagagccaatggacttgatgactgcgctgcagctggtgatgaagaagtcaagtgctcatgatggacttgtgaagggtcttcgcgaggctgccaaggccattgagaagcatgctgctcagctttgcgttcttgctgaggactgtgaccagccagattatgtcaagctggtgaaggcgctctgtgctgaacacaatgttcaccttgtcactgttcctgctgctaagactcttggcgagtgggctgggctttgcaagattgactccgagggcaaggcaaggaaggttgtaggctgctcctgtgtcgttgtcaaggactacggtgaagaatctgagggccttaacatagtgcaggagtatgtcaagtcgcactagatgtaacacgtttcagtaatactctacatttggatctgggcttaatattatgcttgcgtcttgggcttgctaggagattaggacaatttactacaagagcccatgaggatatgagcaatttggaattctaaatgttttgtttatggtgttgtcatctggttttaattcaaatcgataagagatgagattattcttgctttgccattagcccattacctttttatgttt

SEQ ID NO: 15765 - DNA, 974 bp, Zea mays
  Clone ID: LIB3060-073-C6_FLI
tattgccaaaaaaaaaactacggttccggctttcggtggctattcttgcatctgcaagctccaccagtcacagccacacggcggaaaaacgaaccgaggaacaatccgggttctgcaggaacccactccaactgtgcggcgcgtccaaaaatacaaaaggcaagcgagcgagctccaagttcggctgctccaatttcactcggcatggctcctcaggcgtgggtcgtggcggagaacggcgaggacctccaacaacccagggaattcctgccgctctctaagcttgaagatgttggcgtgttgtattggcatttggaccctaagaagtctgaaagcgaggaggaactagcaaaaatccgcagagacagaggctacagttacatggatcttattgagatatgtcccgacaaactggaaaactatgaggagaaggtgaagaacttcttctgtgagcacatgcacgctgacgaagagatccgctattgcttggagggcagcgggtactttgacgtccgcgacaaagatgacaagtggattcgaattcggataagagaaggagacatgatcatcctaccagctggaatttatcatcggttcaccctcgacagcgctaaatacacgaagctcatgaggcttttcattggggaaccagtctggaccgcgttaaaccgccctcaggaggaccacccggcgaggcaagagtatgtcaagaatgtgagtgcgggcactggatttgctcttgcagcacactgaatatgttttttccctttcccgtgtataagaatatatggtcacttggattcatgtaccacgtcatagtatcatcatatggtatgacgcaaccgtattttatcatcaggagtcatgaaaccttgctgcgtgttcagttaaatctgtgcacataaaactgcaaattatgggaacgcacggtgtaaatcaggagtcatgaaatcaggagtcatgatcttatggtg

SEQ ID NO: 15766 - DNA, 2049 bp, Zea mays
  Clone ID: LIB3060-073-D7_FLI
catacatctgtggcttccaatcaaggtggagcaagatatggggaaagctcttcaccacaagataacagttctgaggccatgaaaacggactctacatgcaagatgaagtcaaattcagatgctgctccaataaagcagggctccaatggcagtagcaataacgatgtgggatccagtacaaagaatgttgctgcaaggccttcgggtgacagggagagagtagcgtcaccattagccatcaaatctacccagcatgcctcagcatttcatactatacagaatcaaacgtcaccagctaatctgattggggaagacaaagctgatgaaggaatttccaatacagtgaaaatgagccacccaacagaggttccacaaggctgcgtccagcatcatcatcatgtgcattattacctccatgttatgacacagaaacagccatcaacagaccgtggatcatcagatgttcactgtggttcgtcaaatgtgtttgatcctcctgttgaaggacatgctgcaaactacagtgtgaatgggggtgtctcagttggtcataatgggtgcaatgggcagaatggaagtagcgctgtccccaatattgcaagaccaaacatagagagtattaatggtaccatgagccaaaatattgccggaggtggcattgtaagtgggagtgggagtggcaatgacatgtatcagaatcggttcctgcaacgagaagctgcattgaacaaattcagactgaagcggaaagatcggaactttggtaaaaaggtagcctgttttcagttacatgcctgttgtagctatgacttgaaatcagtaatagttatttgagggttgaagggccttccacttaatatataaaagtaagggtagggattcaaatggtttgcacaattataatcagaaaaaagatagaagtgattattaataatctctacctttggaggatataaaaatgcttatgctacttccagctatgccttttgtctttttttagaaaaacttccagttatgacttaattgttaatattgacaataccagtgtaggaatactgaaattagtcttgaaagtaagacattagttgctgctgtttgcgtgatggcccctagcttgaggatactttgccgctactcttgcggatgctttgccgctccatgtcatctctagcggacgctctgctgtcgtgctgctggatgtttgtctcgtctcctctcaggggatgctctgccactgcagtgtcttcgtctttattggcaacctggagttgatgtgcttttccttctgcaggttcagtcggttagattttaggtggagagtccttcttactgcattttctttctctggttctttgggtcggtttaggttgctaaccacttctgtgcttttgtaatatgggcgacggggtctctcagtagctttgtcataaaacaattctacttccccttaatatagtacatgtgactctgacatgttatcgaacaaaaaaaaacattgctcgctctaaattttatgagatctggcatgatttcaaactattcttcttttcaaaatcctgttttctgactgcagtttttacaagattttatggtcttgccgcttcatttttctgactgtttgcattggaccgataccttctgatggccttgtccgcctattttcaggttcgctaccaaagcaggaagaggcttgctgagcagcggccacgggtccgaggacagtttgtgcgacaatctgagcaagaagatcaaacagcgcaaggttcagaaagatgacacgtaatttctaatacaacgtatcatcttcttcggcagatctgagaattaggcggttcttcctattgcgcatcttcgtcgacagatctgagaattaagtggtccttcccattgctgatagtagcccactgattcccaacgttagagtacacaataaataagactctagttgtcaatttctgtggttgactgcagatgatcaccctagcgctatggagtcaacaatgtaatatttatatactatgttcgtgccttggcgccttggcggtttgc

SEQ ID NO: 15767 - DNA, 1389 bp, Zea mays
  Clone ID: LIB3060-073-G2_FLI
acaagcaaggaatcccccgatggctcatcgcgttctcctcctcctctctctcgcgtcggccgccgcggttgccgccgccgtcgacgcggaggacccgctgatccggcaggtggttcccggtggagatgacaacgatctggagctgaacgcggagtcccacttcctgagcttcgtgcagcggttcggcaagtcctacaaggacgccgacgagcacgcgtaccggctgtccgttttcaaggccaacctgcgccgcgcgcgccggcaccagctgctggacccgtcggcggagcacggcgtcactaagttctccgacctcacgccggcagagttccgccggacctacctcggcctccgcaagtcccggcgcgctctcctcagagaactcggggagtcggcgcacgaggcgcccgtgctccccaccgatggtctccccgacgatttcgactggagggaccacggcgccgtcggccccgtcaagaaccagggttcgtgcgggtcgtgctggtcgttcagcgcgtctggagcgctggagggtgcgcactacctcgcaactggcaagctggaggtgctttcggagcagcagttcgtcgactgtgaccacgagtgtgattcatcggagcctgattcatgtgattcgggttgcaatggtgggctaatgacgacggcattcagttatctccagaaggccggtggccttgagagtgagaaggattacccttacactgggagtgatggcaaatgcaagtttgacaagtccaagattgttgcttcagttcagaacttcagtgttgtgtctgtggacgaggctcaaatttctgctaacctcatcaaacatgggccattggcaatcggcatcaatgctgcctacatgcagacatacatcggaggcgtgtcatgcccatacatctgtggcaggcaccttgaccatggtgttctccttgttggatatggtgcttctggttcgcccccattcgcctgaaggacaagccttactggatcatcaagaactcgtggggcgagaactggggggagaacggatactacaagatatgcaggggttccaacgttcgcaacaagtgcggcgtcgattccatggtctctaccgtgtccgcagtccacgcctcgaaggagtagactctggtcagcggtgataatcgtgattccatatattgtagaactataatccctgctagtaatccatttgtgctgtttatgtatcgaaggcagcaaagatgtgtgaagcggcaatgggatgcttgctgtaaggtaatatgtttggcttgctaggcatgctacacgctatttggatgtagcaacgttatcaccagctgtatacgctttttaatcgacaacatttgaataatatgtacataacattatgttgtgctc

SEQ ID NO: 15768 - DNA, 963 bp, Zea mays
  Clone ID: LIB3060-073-G5_FLI
ttagtagttggtggtgactcgatcggcgagatgggcatggtcgcttccatgtgcacggagcccatcaagcggcaccgggtggagagagacctcgacggcaaggtggcggacgcgctccgggagcggacgaggtcccggcagaggaccttcaggtcggtgaacagcatcaccatgcgcctgcccaggttcaaggaagggctcagggacgtcaagaacatcttcgaccagtacgacgaggattcagatggcacgatcgacagcgaagagctgcagagcttcggaagcagagtccgggtgcacatgtccgaggaggagatgagcaacctgcaccggtactgcgacatcgacagcaggaagggcgtccagttccaggagttcgtcgtgctcctctgcctcgcgtacctgctcttcgggccagacgtcacacgacgcgtacgtacgtacggctcggtctcctcttctctcttccttagctagctagtctaccatagctgggaacatcggttcgtcaggtttcggagttcgagtccggcaagctcaattacgtcttcgacgagctcatcgacgcgtacatcttcttcgacaaggacggggacggcatgctgcggaggagagacgtcacccacaggatgaacgaggcgtcgcaccaggagaggacacccagccacataacagcacagctattcagtactcgatcctcttgtctgttgctgttcagccctgttgctgttctaagcaagctcatgtgtgtgtgtgtgtctgtgtctgtgtctgcagaggagatggatctgaacaggaacgggaaggtgaacctcaaggagttcctctactccatgatcagatgggctggtctcgggaccgaagacgatggcagcgatgaggcctcaccatgatgtaacttttttttttttcttttcttttggtctgcattttaacagttgaataagtaaaatgtatgttgac

SEQ ID NO: 15769 - DNA, 1193 bp, Zea mays
  Clone ID: LIB3060-073-H10_FLI
cacccaccagaggaaaagggcaaaagccaaaaggcatcaccgccgcgacgacgatggcagcctcgctccaagccgcggccaccctgatgcagccggccaagatcggcggccgggcgccctttgcctcgctgccgtcccgcccgtcgtcgcaactcgcctgcagggcgttcggcgtcgacgccggcgccgccaggatcacgtgctccctgcaggacgtcgccagcaggtgcgtcgacgccgcgaagctcgccggcttcgcgctcgccacctcggcgctcctcgtctcgggcgcgagcgcggagggcacgcccaagaggctgacctacgacgagatccagagcaaaacgtacatggaggtgaagggcacgggcacggcgaaccagtgcccgaccatcgacggcggcgtggagtcgttcccgttcaaggccggcaagtaccagatgaagaagctgtgcctggagccgacgtccttcaccgtcaaggcggagggcatcgccaagaacgccccgcccgagttccagaagaccaagctcatgacccgcctcacgtacacgctggacgagatcgagggcccgctcgaggtcggctccgacggcacgctcaagttcgaggagaaggacggcatcgactacgccgccgtcaccgtgcagctcccggggggcgagcgcgtgccgttcctcttcaccgtcaagcagctcgtcgccaccggcaagcccgagagcttcggcgggcccttcctcgtgcccagctaccgcggctcctccttcctcgaccccaagggccgcggcggctccaccggctacgacaacgccgtcgcgctccccgccgggggcagaggtgacgaggaggagctccagaaggagaacatcaagaacgccgcctcctccaccggcaacatcacgttgagcgtcaccaagagcaacccggagaccggcgaggtcatcggcgtcttcgagagcgtgcagccgtccgacaccgacctcggggccaaggcgcccaaggatgtcaagatccagggggtctggtacgctcagctcgagtgattcgagtgtctaactgctaggtgtccgaccgccgtcatggatcttgggaaggtgtatgtataccatggaaaactttggagagcagaggaggaatcgtgtatgtaatgtacttgttaatgcaaattcgggctgtcgcttttttactccgct

SEQ ID NO: 15770 - DNA, 3099 bp, Zea mays
  Clone ID: LIB3060-074-A5_FLI
ccattgcagccctaagcgcggttcccttccagctccgctgcggggagcctggtttcgctcgtgatgtcgccggccgccggagagcagctctctggagcccaccgagagggcagggccgtggaggcgcggagggtcttcataggcgccggctgcaaccgcgtggtgaacaacgtctcgtggggagcctgcggtctcgtcgccttcagcacccagaatgccgtcgccctcttctcccccctggtatgccggccttttcctgcagttttgattaccagatgagtatatctcacttgttcgtgtcacccaaatcgtccaaacacgtgttcgtgcgagcagagaggtgagatcgtgacaactctcccggggcacaaagcgccggttaactgcacgctatggcttcccacgaagaaggatgtgctccatgttcgaggtagggagacacactatctactctcaggaagtgctgacggtactatcatggcttggaagattggttctggcaaaggagagtggtttcatgcgttgcagctcccaggaatgcataagaaagggatcacctgtcttgctggaaggatggtgtctgatactattgcaatttttgcttctacttcttcggatggtattgttgttatttgggagatggcaattgagcccaccactggtggtaagattgcttccttgtggattgccaatattactgctaggagcctaatattttgtcatgatggtttaaactattcaaactctaattcttttttattatatgattttgacggttctgggtaatgtgcactacacttctacttaagttatttgctttctcttcgcaggcgattgcaaagtgacttgcttgcattctctgtccgttggtttgaaaccaatggtttcactttcattagctgtattgccaggacaaggaggctatctcattttggcgatgggcggtttagatcacaagatccacatctattgtggggataaggcaggcaagttcattaaggcctgtgaacttaaaggtcattctgattggatcagaagtttagatttttctttacccgtgatgatggacggtgaaaggcacaaccttttccttgttagctcatctcaggacagaaccattcggatatggaaaatgacttcagaagctgctgcttctggctcctccttacaattgaggaaagaaactattgagatgacctcctatattgaaggacctctatttgtggccggcagtacaagctatcaagtatcactggagtctcttcttgttgggcatgaggattgggtatattctgtagagtggcagccacctacattgttaactggggatgaagctcatcagccaatgagcatattatctgcatccatggacaagatgatgatgatatggaggccagagaaaactactggcctttggattgattcagtgactgttggtgaattaagtcactccgcacttggattttatggtggactttggcagcctgatggcagatccattctcgcacatggttacggtggatcctttcatatgtggcgagatgttggactggattctgaaaattggcagcctcagatagtcccgtccggtcatttcgcacctgtgtctgatttgacatgggcaagatctggccaatatttgctatcagttagccatgaccagacaacacgcatatttgctccttggagaaatcaagttaaccctggagacatgatctgttggcgtgaaattgcccgtccgcaaattcatggtcatgatctcaactgtgtgacattcattcagggtagtgggaaccatcgttttgttagtggtgctgatgaaaaggtctctagagtctttgaagctcccttatcatttttgaagaccctacaacaagcaactctgttgaaacctgacatctccgaggattttgacaatgttcaagtccttggagcaaatatgtctgctcttgggctttcacagaaacccatatatacacatggagtcaaggaatcctcaatcagtaattctaacgatggtccagattctatggagacaattcctgatgcagtgcctactgtattcactgagcctcctgtggaggaccaacttgcatggaatactctatggcctgaatcgcacaaactatatggtcatggaaacgagctcttctctatatgctgtgattatgaagggaagcttgttgcttcatcttgcaaggctcaatcagcagcagttgcagagatctggctctgggaggttggaacatggaaagctgttgcccgcttgcaatctcacagtctaacagtgacacaaatggagttctctcgtaataatgcgtttcttttaagtgtttcgcgggatcgccatttgtctatcttttcaatcaggaaaactgaaggaggagcagagcatcgtctggttgcgaagctcgaagcacacaaaagaattatatgggcatgctcatggaaccccttcggctatgaatttgcaactggatcaagggacaagagtgtcaagatatggtgtgttgaagatgcatcttctgtcaagctacttgcaacattgcctcagttccgtgacagcgtaactgcattagcatggatgggccgtgaccgtgcttctaatgctggtatcgtcgctgctggcatggacaacggattgatcgagctctggagcgtttcaggtggaagagcttcttcaggaacccagctcagcgtggcatgcgtgcttcgatttgaccctctcttgtgtcacgtgtcaactgttcaccgattacggtggcggtgctcaaccgatgagaaatcgacacttgagctcgcgtcttgtggagctgatcacactgtaagggtgtttgaggtctgcggcagcatataggtttatgtccaacctagtaaatcaaaactgttatgtgcgtggcaggtttttattgatatcggacaccgttgggttgtaaaactagtcctggtatgagaatcgagaaaagagtgttttcatgaagcatgtgctgtccatatgtaaccccagtttagtggtaatagattcagtgttgccctcatttgagaagctatgaaattatggttatagatggtgatgtatttgctaaatcacctatatcc

SEQ ID NO: 15771 - DNA, 2747 bp, Zea mays
  Clone ID: LIB3060-074-B5_FLI
gagagcagtttggagattttggcggattctgggaattatcagtcagatggactgcttgatgatattattgagaatgctttttacacagaggactgcatggacaaccatttttgggagagaaattgccatcacctatttaataacagtgaaatggatgatggatttgagctgaatgcagccacttcttcacacgaatttcttagatctattccggaaggcaatgttactcagatatcactagaacggaatgcctgtcctgatcaaatcgactcatattatatgcccgaatttcatcaatcattatcaactctatgtgatgaagagcataaatgtacgtttggtgacaattctcatagaaccctggaaagtgaagatgctggatggtataaaaatgttcccttaacaatagttgagaatcatgttttgaaacaggaaaacaagcaagtacttcaatacgaagtggcttctgtttgcagtttgcatcctgatgaatatagtaatctgaaaggaaagattcatattcatgatatagatgtaaagtggcggatgtatgctggagatgagtggttattacctcagaaagattctactagcttaacattcatagatggaaaagataggagctcttcactggaatttaccttgagagggctcagtatccaagttgacatgtatccagatggggatgtttctatatccaagctatccatagctgctgaggacttaactctgtgtgatcaaagtatccatgctccatggaaactggttcttggatgttacaactcaaaggattatccaagagagtcgtggtccagtgctttcaggttagaactggagtctgtgaggcctgagccacaggctcctttggaagactacaggatcccacaatgtactgctgcctctggaggtctctgttggacatgtccaaaccatctcaactggtgttggacaaacttctattcaattggtgctaccccaatcctatgatatattattatcgttttggacccaattccttcttatgtagccacaaattcaacacaacatacacattttcgcaaaaacttttctgttgaacagagctcttcatagcaacattatgaaataatctttcttacttttgtgctctcttgatattgcaattgcaattgattctcttctgttgcactatcttaatttttgcaggctccatctcgaaattttgcctctacagttgcatcttgatcaagagcaacttaacttcctaatcaatttcttcaagaatgattcatgtaacaatgaccctcattcacattgcgaaaatgagactgtcgacgtgaagaacacaagcaatggaagcaatacagttgtggatgaggcattacttcctttctttcagaaatttgatgtaaagccgcttgttctgcacattaattatataccccgtcagtttgatccaattgcactaggcaaaggaaattatgcagaacttctcaacattcttccatggaagggaattgatttgaagcttaagcatgtttctgcaatgggtgtttacggatggagcagcataggtgatacagtagctgcggaatggttggaagacatttctaaaaatcaggtgcacaaattgctaaaagggcttgctccaataagatcactagctgctgttggttcaggcaccagaaagttggtctctttgcccatcaaaagctacaagaaggatcggaaattgctcaagggagtgcaaagaggcacagttgcttttattagaagtgttagcattgaagcagtaggtcttggagtccatttggctgcaggagctcatgatatacttatgaagacagaacatgctcttacaactgttccaccacctttagcctcatgtgaagcgaaacgaacaaaacacaacattagagctaaccaacctgaaagtgcacaacaaggaatgaaacaggcatatgaaagtttgactgttggttttggaaggacagcctctgctctcattggcaaccctattaaagtttataaccgaggggcgggtgttggatcagttctagctactgcaatctgtggagcaccagctgctgcagtagctccagtctcggcatctgctcgcgctttacattatgcacttcttgggctaaggaacagccttgatcctgagcacaagaaagaatccatgtacaaataccagggaccctctcaagcatagacgtgattgagaagatgagttgggagttcagttcattcttttggcgcgccttacaccatctccttgaaacaactggtttaggaactcctttgccagtctcgtccaatgatgaggtgcaaacttgtacagtgtgtacagatcgtaggacagattatatgtggcaccaaagccttacactatgtaaattaacgcattagggtttaattaccactgatcttttccaccacgaaggcaagtggaagttttgtatcccctcttcgcttagtttagtaagatacctatggctcgcatgactgtcccaatgtacataatgtggttgcgagctgtgcggatgtaaatattctcgtttgctttggttgtgtgcgtgcacgcctcttggtccgctgacaacaggaatttgaagagtttccagtggagcatttggatacagcctaggggtatggtaggacgaagcggttccactctaaatttgttgtttgaattggttttatgtaggatagagtgactctgaaaaagaaaaattatgcttagatgctgaatcatttggcttcct

SEQ ID NO: 15772 - DNA, 1861 bp, Zea mays
  Clone ID: LIB3060-074-F12_FLI
cttccgtctggccaccgcaaagcaccccctctccccccgtcgccatggcgagcgataaccgcgcgtcgctcctccccttcgccgccgccgtccttgtggtgctcctcgctggcggcgccgcggcggacgacgcttccagcgacgacgacgctgggacttcacggacacccggctgctccaacaagttccagctggtcaaggtgaagaattgggtgaatgggactgaaggtacaacttttgttggcctaagtgcaaaatttggagctcccttgccaagagatattcatgaagcaaaaaagtcatttgctgtcctatcaaatccaattgactgttgctccaacttgacatcaaagttaacaagttcagttgctatagcaacacgtggggaatgtgctttcacggaaaaagcaaatattgctcaggccagtggttcgaccggtttactagttatcaatgataatgaagagctttacaagatggtttgtggtgagaatgacacctccattaatgtgacaatacctgttgtcatgataccacagtcagcaggaaagaagctgaagaacttcttgcatcatggagcaagtgtggaagtgcagctatattcaccaaatcgaccaactgtggacctttcagcatgcttcttatggataatggctgtaggcaccatagtctgtgcttcactctggactgaatttgttacatgtgaacaggttgatgaacgttataatcagctgaccagaaaggatggacctgacacgggaacaaactacagagaagataaagaggtcttcgagatcagcgcgaagggtgcttttatttttattatagtagcttcagttttcctcctccttctgttctacttcatgtcatcttggttcgtttgggtgctaattgtactattctgcattggtggtattgagggtatgcatgcttgcttggtcacgcttctagctaggatttttaaggactgtggacaaaagactgtacaactccctgttttgggggaggtcttgatcttatctgttggaattgtaccattttgtgcggtgtttgcaattctctgggctgtgtatcgccatgcttcatttgcttggataggccaagacgttctgggtatctgtttgatgataactgtgcttcagatggcacgtttaccaaatatcaaggttgcatcggcacttcttagtgctgcatttgtgtatgacatcttttgggtgttcatttcacctcttatattccatgaaagcgtcatgattgcagttgctcgtggtgataacactggggaatcaattcctatgctcctaaggataccccgcttctttgatccatggggtggttatgatatgataggctttggtgacattatcttccctggattgcttgttggattcagctatagatttgacagagcaaacagaaagggtgtcttgagtggatattttctctggctaattgtgggatatgcagttggccttttcattacgtatcttgcgctgttcttgatggacgggcatggtcaacctgcgttgttgtaccttgtgccatgtacattgggggttattgttattcttggttggttaagaggtgagctttatgaattatggaacttcggaaaaagtccagcagaaaattttgtcaatgaaccatgacaacaaaatccagggaagatgtattcttcagcgtagtagatagcttgaggatgtttattaggaggcaccgtgtattgcaagatgttatgtttagcattatttcaaagaaggatgctattgtgtttgaaaaaaaaatgataatacatgtaagatgcaagcatgtactcccacagtcgtaaaataacccaatataagtgccgctatatagttcc

SEQ ID NO: 15773 - DNA, 1375 bp, Zea mays
  Clone ID: LIB3060-074-G5_FLI
gtgcctcaaaatattgttttatgggaggttttgacgcaactagcaatgttttggctggaaatttgtttggcataccacttcgtggaacacattctcatgcttttgttagctcatatatgagccttgatgagataccaaacaaggccctcaggaacaaagatggctcaagagtttgcgaggattttgttagtttagtgcaagagtggcttcaaaagtttcaggcagcagattcattaggtggtgtatttggtgatacaaataaaagtgagctggctgcatttgcatcctacgcattggcttttccaagcaactttcttgctcttgtggacacatatgacgttatacgaagtggtattccgaatttctgtgcagtggctctagcacttcatgacttagggtacaaggcatctggtattagattagattctggtgatctggcctatttgtccattgaagcacgaaaagtgtttcgtgcagtagagaaggaattcaatctacctggttttgcaaagatggtcattactgctagcaacgatctgaacgaggaaacaattgatgccctcaacaaacagggtcatgaggttgatgcctttggaattggaacttaccttgtgacgtgttattcccaggctgctcttggttgtgtctttaagctagttgaaataaataatagacctcgtattaagctgtctgaggacgtggcaaaagtttccattccatgcaaaaagcgatgctttagactgtatgggaaagaaggctacccactggtagatatcatgattcgtgaaagtgaaccatcacctaaggcaggagaaagaatcctctgccgccatccattcattgaatcaaagagagcatatgttgtcccccagcatgttgaggagcttctacagtactattggccggggacatcagataaacctagagcagagctgccctccttggagaagatcagaagccgctgcatgcagcagcttgaaaagctgcgtccggatcacatccggcggctaaatccaacaccgtacaaggtgagcgtgagtgcgaagctgtacgacttcatccactgcctatggctgaacgaggcaccagttggtgaactgcagtagatgatggccacatgaaagaagttttgggtcatctttgacacagcagcaaaccatacaagaggatcagagcttttctgcgcaatatcagcagttgagcccatggcccatggcaggattttgctcttcagatttccatctctaatccccggtatagaggcaggttaatcaagtcgtctagtttatacatcctttgattggtgggatactatacacatcatcatcatgaaaagaacagaaatcatttggagtcaatgggaagattaatagcc

SEQ ID NO: 15774 - DNA, 1052 bp, Zea mays
  Clone ID: LIB3060-074-H3_FLI
gtcaacagaagttgacgtgagcattatttcaattatctcaaacctgtgcgtctgcccctttccagctttcctctcaaacggagagatgtactcggatcagatctccaccgggcgcaagcgctccatccatgaccgccttgacggcgacctccctgccggcacgggcgccggcggccgtgtccgtcacacggtgtccaagaggcaacgacagatagatgaaaaatggaagcatgatctgtatcgggaagatgatgaaccagcttcaagtacatctttttcattatatggcaggctattttcatattcagtttccatttaacacgtacctatgtgtactgtgtcttaagaatcaacagatccgaaggatttgcgattgaagcttcagaggcgaagttttcaacaagattttaccagcacaagaagttctggtgtgcgtgatctacgtgagaagctatctggtataatgaacccacagccatcaaatgctgacccaccaaagccaaagccaaagccagtatcggaggttgttaacatctcaaggcgtcaaattgctgatgaaatgcatgcacgccaaaataagaaaccaccaaagcagacttcatcgaagaagacatctcagccaaaggctgaaagtccactcgacagtttcctgagttcccttgggcttgagaagtactcaattaccttccaggcagaagaggttgacatggcagccctaaggcatatgacggacagtgatctaaaagctttgggcattccaatgggtcctcggaagaagattatccttgccttggaatcgagagcataagggaatgacaagggagtacagtgtaggaaggtgggggatatgctaggcatgctcgtgtgcaagttcgacaaaaactttgtatccacatatcttggaaagggtacaacaacaatgattttatgggtctcttgtaacgcataccctgtcctgttgagcatgttcagcgaagtttaggattgctagaaggcaggccacggcgtctattgctgtaacttgtttccgtgttaattaagtggtgcggtat

SEQ ID NO: 15775 - DNA, 1705 bp, Zea mays
  Clone ID: LIB3060-075-A8_FLI
cgagttcggcgtcacgtacctgtgcacggagtccgccacgggggcgcgctacgcgtgcaagtccatctccaagcgcaagctgcgcacgcccgtggacgtggaggacgtgcgccgggaggtggacatcatgcgccacatgcctccgcaccccaacatcgtcagcctccgcgccgcctacgaggacgaggacgccgtgcacctcgtcatggagctctgcgagggaggcgagctcttcgacaggatcgtcgcccggggccactacaccgagcgtgccgccgccgccgtcacgcgcaccatcgtcgaggtcgtccagatgtgccacaggcatggcgtcatgcaccgggatcttaaaccagagaactttttatatgcaaacaagaaggagagttcccctctgaaagcaatcgattttgggctgtcagtgttcttcaggcctggtgagcgatttactgaaatcgtaggcagtccatactacatggctccagaggttctaaagcgaaactatggccctgaagttgatgtttggagtgctggagtgatactttacatacttctctgtggtgtaccaccattttgggcagaaactgaacagggagtagcacaggcaattatacgatctgtggtagatttcaaaagagaaccatggcccagagtatctgagcctgctaaagatcttgtcaggcggatgctggacccaaatccattgacacggtttactgcagcacaagtacttgagcatccatggttacatgactctaaaaagatgccagacatttctcttggtgatactgtccgagcaagactgcaacaatttgctgcgatgaacaagttaaagaagaaagcattaagggtgattgccgagcatctgtcagtggaggaagtagctgacataaagcaaatgtttgaaaagatggacgtgagcaagaatggcaagctaacattcgaggaattcaaggcgggccttcgtaaactggggaaccaaatgcctgattcagatcttcagataatgatggatgccgctgacatcgataaaaacgggaccctagattacgaggaattcgtgaccgtgtctgttcatgtgagaaaaataggcaacgatgagcacatccaaaaggccttcacatacttcgaccggaacaagagcgggtacatagagatcgaagagcttagagaggcactggctgatgaactggagggaaccgatgaagacatcatcaatggcatcatccgagacgtggacacggataaggacgggaaaataagctacgacgagttcgcggcgatgatgaaggccggcactgactggaggaaggcatcccggcaatactcgaggcagcggttcagcaacctgagcctgaagcttcagaaggacgggtccctcggcgccgagacacggtaggcgggggccggccaccgcctaccgccacccgacggagaagtgatctgagtgttcgtcgagctgtagtcaggtgattcgattccacgcacgttccattttacacggtgaatcttcagtcgagcttgtagtttcttgggtttgtgattgtaaagatggtggttgtgcttgtgcccgtacgtactgtagatgcagcagcgtgtacctacacaatttacatttacagagaaaatgcatgctggagtagcacaagtagtcttgctttgtagtaacttgtaattagaatttgtttgtatgatatgcgatatt

SEQ ID NO: 15776 - DNA, 1261 bp, Zea mays
  Clone ID: LIB3060-075-B3_FLI
gagagagatctcgatccgcacacctcacgcctctcttcctctcgccccaaggacaacgaaaacatcaaacaagagaaccaaaggaaacagagcaagagcatcgctctcgaagcaaaacgcgcaccacgccgtcgccggccggccacttcgcacgtacgtaggacgcgcacgcaccggtgcatatatggggctcctgaaccagctgtgggacgacacggtggccgggccgcgcccggactccggcctcggcaagctccgcaagtacgcctccttctccccctcgtcgtcgtcgtcggcggcggtggcggcggcggcggcggcgggctccgcgccgcctccgggcgccgtgacgcggagcttgaccatgctgcggcggccggcggcgctgtccgtcgtcacgtcgccccgcagcgagtccagctccgcgccgtcgtccccgtcgcccgcaagcggcgctccggattcgcccttcggcgcaggtgaccggctggcgccaccatgtctctttttttcccccagctcttgctgtctctgtctgtgtgtgtgtgtgtgtggtgtttcggttttggccagccgaatgaatctttgggatagctagatgatactgtagatccgaaacaaaaaaaaaacgaagcacggctgatttttgttgtatctctctgcacggtcgccatcgtgacatgatgctagctgcagcgacgacgcccaggggagagggctggacgaagaagctgcgcgggaaagccaggatgggcggcggcggcggtgacgacgcccccggcacgccgaggagccccaccgtgtacgactgggtggtgatcagttcgctggacctctgaagcccaagccaagacgagaactgcacaaggaaacccaccaccaccatcaacacagctagcgaactgaaggagggagggggcagaggggccatggccatgtaatgtaacgaccaatctctttcagagcttctggtgacgtgtccagttactatatacatacatacgttaacggtgtactatgtgtcttgttgtaaatgtcacccctgcgaggtgttgccgattttgtaagctactacgtactactacgctcggcatgtcaccgtgtgcaagtgcaacacaagtttgtaaaaatgactagctagtagtagcaatgctgttgctgtacgagtaggcctccctctgctttgtacaggggtagtccaacaagtatatggtttgctggtgccatgtaaaaatgtatatagaatcctacgttcacgccc

SEQ ID NO: 15777 - DNA, 1161 bp, Zea mays
  Clone ID: LIB3060-075-B7_FLI
agccaaaaggcatcaccgccgcgacgacgatggcagcctcgctccaagccgcggccaccctgatgcagccggccaagatcggcggccgggcgccctttgcctcgctgccgtcccgcccgtcgtcgcaactcgcctgcagggcgttcggcgtcgacgccggcgccgccaggatcacgtgctccctgcaggacgtcgccagcaggtgcgtcgacgccgcgaagctcgccggcttcgcgctcgccacctcggcgctcctcgtctcgggcgcgagcgcggagggcacgcccaagaggctgacctacgacgagatccagagcaaaacgtacatggaggtgaagggcacgggcacggcgaaccagtgcccgaccatcgacggcggcgtggagtcgttcccgttcaaggccggcaagtaccagatgaagaagctgtgcctggagccgacgtccttcaccgtcaaggcggagggcatcgccaagaacgccccgcccgagttccagaagaccaagctcatgacccgcctcacgtacacgctggacgagatcgagggcccgctcgaggtcggctccgacggcacgctcaagttcgaggagaaggacggcatcgactacgccgccgtcaccgtgcagctcccggggggcgagcgcgtgccgttcctcttcaccgtcaagcagctcgtcgccaccggcaagcccgagagcttcggcgggcccttcctcgtgcccagctaccgtggctcctccttcctcgaccccaagggccgcggcggctccaccggctacgacaacgccgtcgcgctccccgccgggggcagaggtgacgaggaggagctccagaaggagaacatcaagaacgccgcctcctccaccggcaacatcacgttgagcgtcaccaagagcaacccggagaccggcgaggtcatcggcgtcttcgagagcgtgcagccgtccgacaccgacctcggggccaaggcgcccaaggatgtcaagatccagggggtctggtacgctcagctcgagtgattcgagtgtctaactgctaggtgtccgaccgccgtcatggatcttgggaaggtgtatgtataccatggaaaactttggagagcagaggaggaatcgtgtatgtaatgtacttgttaatgcaaattcgggctgtcgctttttt

SEQ ID NO: 15778 - DNA, 1188 bp, Zea mays
  Clone ID: LIB3060-075-C3_FLI
gtttagccaagctgtggccaacctctgcgaggaatggagatggagtcgactcctctcttgacaccatacaagatgggcgatttcaacctggcacacagggttgtgctggcgccgctgacgaggtgccgggcgttcgggaacgtgccgcagccggagcacatggctctctactaccgccagcgggcgacgcccggcggcttcctcatcgccgaggcctgcgccgtgtcggagagcgcgcgcgggtacccggacgttccggggctgtggacccaccaacaggtcgaggcctggaagccgatcgtcgacgccgtccacgccagcggtgccgtcttcttcgcccagctctggcacaccggccgggcctccccctcagaattccaaccaaatgggcaggcaccgatctctagcacggacaagcaaatcccagcacaggtgaaccattccggtgacgtcaacacgttcgcggtgcctcggagactagagacagaggagataccacacgtcgtcaatgacttccgggttgccgccagaaacgccatcaaagcaggctttgatggagtggagatccacgcggcaaacgggtacctgttcgatcagttcatgaaggacagcaccaatgaccgagacgactcctacgggggcagcttggagaaccggtgccgtttcacagccgaggtgatggcagccgtcgcggacgaggtcggtgccaaccgcctcggtgtgcgcctctctccgttcgcggattatatggactgccacgactccaacccagaggcgctcgcgcttcatgtcatcgacgagacgctgaacccgctcggcgtgctttactgccacatggtagagccaaggatgcgggtgaacccagacgacggtattatgactctcgagcacatgctgctaccgttcaggagggcgtttcgcgggacgttcattgctaatggaggctacgaccgtgaggaaggcaatgacgccattgcccgtggccgtggctatgcagatctcatcgcatacggccggatattccttgccaacccggaccttccgatgcgttttgccaagaatgccccgctgaacaagtatgataggagcaccttctatacctctgatccggtggttgggtacacagattatccatttctcgatcaactctaggatgattggcttataaacaatttccccacctggagt

SEQ ID NO: 15779 - DNA, 1599 bp, Zea mays
  Clone ID: LIB3060-075-F6_FLI
cgctaaccgccgcggacaaggccacgacgtcactgaaaaagggaaggggttgaaatatccaatcgagacccaccaccgaacgagtccaaatccgctcgtctcccctcgaagtcactccctccagccctcgccggctccgcgtcctccggctctcccacccgagccgagaccacccatccaagcgcgcgcagctccggaagcgacagggccggacgagcgcctcccaaatttagcagccgcggagcgcgtgggcgtgggtccgtaaggagggtcgatggggtacctgccgtccctgagcagcaaggcggcgcacttcgtgtccgacctcaccaccgtcatcctcagccccgtctccgagcgcgagacgtcccacctccccgaggttgacgaagtgctagaaaatttggacgatgataaagattccgagcacaattccgatagccttgatggccctgacacatcttcctttagagcattcttgatctcatttttgtcatcatcgagctctaataacgattcaatggagataattcctgagcagaatggggacatgggttaccctactttaacacccatggggaagggaagcaagggaagaacgggtctgttaagtagggggaagcattccatcggaaaaatcattaacaaggcggcaaggattagtggtttcaaacaaacaactgcagagcctaaaattgacagggaggcagtaactcatactgaaccagatgcacctgtactggagcaccaggaaccaaaggaagttgcttccttcggtagtttgccaactatgtcggaaccatctgttcttttgtcagaactgatgcaaaggattctttatgcctctctcccggttcttgcccagggaaggaactgggtcttgctatacagttgtgcagtacatggaggcatggcatatctttatctactttatatagaaggagcatgctttgccctggtttctcactcttggttgttggggataaaaaaggcacagtttttggtggtttagttgaggccccattgcagccatctagttcaaagaagtatcaggggaccaataattcctttgttttcactaatttacacaatcgccctgtcatctatcgaccgacaggtgcaaataactactttacgatgtgctctaccgactatttggctctggggggaggaggtcatttcgcactttatcttgacgcagaccttttgattggttcaagttctaattcagagacttttaacaacgggtgtttatcgcattcttcagacttctcagtgaaagatgttgagctttggggcttcgtctacccttccaaatacgaggagatgctgacactctgccggactgagaaaccaggaatctgtcgatggtgagtggtgaccaatcccatagccagttgaacagacaaatggacatgtcgcgtctgtacagtttttagtaggctttgagagttgcgagcatttttgtgcgccggtagtactggagacttgctttttctcaagcgacttcgctcagatttgtaaatagtgtacttttgttactgtcacatggcgaaacatgtacgctactagttgttccagtgatgggcactttgaggt

SEQ ID NO: 15780 - DNA, 3842 bp, Zea mays
  Clone ID: LIB3060-076-B12_FLI
gaagagggagagtaaagtagcgcgccgcagccgcagcggaggaaaggcaagggcggcgagggaacacgcggttgcttgcggaaacccgctcgactcggtctctccgcccgcgagttgggttgatcggagggtttgatgacgggggcgcgggagccggtggccatggagataccagcggaggaagggccagcggcggcgagggcgccgccgcggcggattaggaggaggctggtggagggggcgcgcggcggtggggcgccggcgagcgtggaggagatcgaggccaggcttagggaggccgagctccggaggcagcaattccgtgaatggttggcctgcaaagcaaggaagaagccacggagcccgtcgtggtcctctcaagaggaagaccatgggcagcgccttgaagcgaagcttctggctgctgagcagaaaaggctaagcctcttggcgaaggcacagaaccgactcgccaagttggatgaactcagacaagctgctaagaatgatgtggaaatgaggtttgagaaggaaagggaagaactcgagaccagagttgagtctcgtgtccgacaggcagaggagaaccgcatgcgccttctgcatgccgatatgcagaagcgggccgcactgaaggagaggacagcgaggtccctggtgcagaaggcaaaatcagagagcaaatacatggagcaggtgcgctctgcaatttctctgaagcgcgctgctgctgagaagaaacgactgaggttgctggaagctgaaaagacaaaggctcaagctaggcttttacgcatccaaaaagctgccatgactgtatgcagccggagagaatcagagaggagaaaactgaaagaacagctggacaacaaacttcaaagggcgaagaggcagagggctgagtatttgaaacaaagaggaagtcctcgtggttcaacccatgctgattacttaaagcatgcatatgccctttcaagaaaactagcaagatactggagaatatttgtgaagtccaggaagacaacatttgctttggctcaagcttatgatgccttggggattaatgagaagtctgtgaaaaatatgccttttgaaaaattggccatgtcaatggaatctcctgtagttcttcggagcacgaaggcattactcgaccgattggagaaacgccttgtcatttctcattcagtagcatcttcatcagtagaaaatgttgatcatctactgaaacgccttggttctcccccaaggaggagggctcctcctagcagagaaggaaaaactcgggcagtggtaaaaagaccagctaaaagttctgaggcaagcatcaaattgcccagatactcactgagggtggtgctctgtgcttacatgatactggctcatcccagtgctgttttaagtgggcaaggtgagcgggagaaacagcttatcgagtcggcagcaaactttatcaaggagttcgagctgttgattaaggtaatccttgatggaccagggcagtcatctggtgttactggccagaggaagttcagggcacagttggctaatttggacaaggcgtggtgttcgtatctttacagctttgtggtgtggaaggtaaaagatgcaagattattggaggaagatcttgtcagggctgcatgcaagcttgagttgtcaatgatgcaaacatgcaagctaactgcagacaggcactcgcaaaacaatcttacacatgacatgaaggcaattcagaaacaggttattgatgatcaaaagcttttacgtgataaggttcaacacctgagtggcgatgctggccttgagcggatgaactctgctctttccgatacgagatcaaagttctttgaagcaaaggagaatgggagtccattgacagcacctgttgcaaatgtgtctacccctttgagcatcaattcgtctgggaaagcaccactttctgaggttcctgaaagttccaggacaaatgttgttgggacaagctctgtagtccgttctttgttcagtgcttcttcatcatcagtcagttcatcaccagaaaagcagccgacagagaatgaaaaaatggtcaatgaaatgcttcatgaggatgccagtgctcttgctggcaggtctgatagtgctagtactgctgaggaggagttccagaacaaagtgagagaaaccatggagaaagctttctgggatatggtcaccaactccatgagaggagaaagacctgattatagtcaattgatcaacctagtaaaggaagtgagggattcgttgcatgacctggctcccaaagaatggaaggagaaaattcttgagaacattgaccttgaaattctgtctcaggtacttgggtcaggttcccaggatgcacaatacttggggcagattttggagtattctctggatatggttcgcaagctctctgctgctgcaaaggaggatgagatgaagaaaaaccatgataaattattgagtgaattgtctacgaattctgaagttaacggcgatggcatcaactcatttgtcattgctgttatcaagggccttcgtttcatcctggaagaaataaaggaactgaaagcagaagtgagtaaagcacgtatccagatgatgcaacagatcataaaagagtcggctggggttgagtacctgcagaaggcttttgctgatcgctatggacctcctgagacggcaccagcttctcttcccctaactctgcaatggattttgacatcgaagaacattgcggaagaagaatggagtgaacattcagactgtctttcagtaatgccagcagcagggcaggctcctgctcttgttccggtactccggtctggtcatggagctccagtagggcaaccatctccttctgcaggagacacctctggtcaaccagagtgcaagggtgagaagcttgacaagctaataaggattggcctgttgcaactcattggtagtgtggagggcttgcaattgcagtcaactcctgaaagttttcagattaatctgctgaggctgagggccgtgcagagccaattccaacaggtgatcgtgatcgccacaagcatgctcgtcctgcgccaaattctgatgagcgagaactcgagggccactcctctggaactggaaaatgccatctcagaactcgtcaaggctctcgcggacattctggacagctcacccgattccggcacggaagagattgtgcaggcgatggtcaatgcatcagcctcagttggctcaccatcagaggagaaggttcaggccaggatgcagatgatcacccgggtgttcctcaagagcctccagcctggtgacgtggtcttcaagaaggtatcccgtgcggtctactgcgccttccgtggcatcatcttaggtggcagtggtcccaagggccagaagctggcggatgcggcattgcgccgcatcggcgccatcaaggttgtcgacagggtgttgaaggctgctgaggtgctgatcaaggtggcaacggtatcagagaaggtccacggtccctggtacaaagctctgatagtctgatgtgagcgtgaatgtgaatggtttggcttttgtgaatacagacagtgaaagtgtaaattccttgttccactgggtgggatgggagatatggtgttgtacagcaatttatagttgttggtcagtaggcagttcaggatgtgaagaattctggtgagctgggcgaatatggatgctctttcaccaggatttagtcaggctcgatggatggatgctaaaacgcgtctggaaatgtaaattgtggcaccttgtttgattttcgaactgaaataatgtaaataattgattgcaagttatttgtgctccgc

SEQ ID NO: 15781 - DNA, 1789 bp, Zea mays
  Clone ID: LIB3060-076-E11_FLI
gataatcaacttcagtctcgtcccgtaggaggaatttgaaaacccaaacgtacacctctgatacttcagctggagctgcaatggcaacgcccgatttgtccccggtctcgccggtgcggcgggacgacaagcagtgcgcgccatcctcctcgtcgtgcacaattctgagagtgcaggacgcgtccgcggccgaggcgtacgagcagtacctgcggctgccggaactgtcgagcctgtgggaggccgggtgcttcccggagtgggcgggcgagggcctggtgaagccggcgctgcaggcgctcgaggtcaccttccgcctggcgtccctcgcgctctccgacccgcgcgggtacgccagccgccgcgagctcgcgcgccggctggagtcgctcgcggcgcgggaggtggggctggtgtccgcgctctgcgagggcgaccggagcgcgccgctcgccgagctgggcgcctccggtggcgtgctcccgcgcgagcgcagcgcgtccgaggtgtggcagctgcccgggagcgccgccgcggtcgtgtgccaggtcagcgaggccagcctgctcccgcgcctcgccgcgtgggacaagtccgagacgctcgcggccaagatcatgtacgccatcgagagccagatgcagggctgcgccttcacgctcggcctcggagagcccaacctcgccggcaagcccgtgctcgagtacgaccgcgtcgtgcgcccgcacgcgctgcacgcgctcaagcccaagccagcgccggagcccaagtctgggtaccgcaacagagagaacgagacgctgttcaccatgtaccagatactcgaatcgtggctgcgcgccgcgtcgcaactcctcgcccgcctcaacgaacggatcgaagccaagaactgggaagcggcggctgccgactgctggatcctggagcgcgtgtggaagctgctcgccgacgtcgaggacctccacctgctgatggacccggacgacttcctgcggctcaagggccagctcgctgtacgagcggctccatggtctgacgcgtccttctgtttccggtccagggcgctcctgcacgtcgctaacaccactagggacctcaagaagcgtgtgccctgggtgctcggtgtcgaggtggaccccaacggcggcccgcgggtgcaggaggcagccatgatgctgtaccacagccgtaggcgcggcgagggcgaggaggcgggcaaggtggagctgctccaggccttccaagcagtggaggtggccgtaagaggattcttcttcgcgtaccggcagctcgtggcggcggtgatgggcacggcggaggcgtcgggcaaccgggcgctgttcgtgccggcggaggggatggatccattggcccaaatgttcctcgagccgccatactaccccagcctggacgccgccaagacgttcctagcggattactgggttcagcagatggcgggggcctctgatccgtcaatacaaagctgaaacggcgaaatggcgcggctgtatggcgaccgaatcgcgcagttttgcagcctaaagatactatgtatgcatgcatcgtaatttcgttgtggccttgtggtgatagagtgattcatttctatagcgatcctgtactagtgtagtacatgtagcactagattctcttattatcgttgtgcactgcgttgtgttgtgttctacatagattgattcagttagatgacatttgtcactctaggcaagtgtttcaattgggcaccgtgtatatagaacttttataaacactggtagatggattcatc

SEQ ID NO: 15782 - DNA, 2143 bp, Zea mays
  Clone ID: LIB3060-076-G6_FLI
gcatgggattgacccacacacccgccctccgccccgcaagccaaatacgccgtggcacgcgtcgccatgccgccccagttccccaccgcccgcctcctcctccctagtcacaggctgctcccgctcctctcccctctcccctccgcgtccctgtcccctgctcctcgcaccctccgcctcccgccgccgcagcttcttcaccgagtcgcccgccgccgcccgctgctgcgcggcatggcctccgccgccgcccccgggtcacacgccgccgcggaagcgccccccgtcgacgtggggggagggggcgctggcgccccgcggcggctcgtcctggaggagctaccctgggaccattccttcgtccgcgagctgcctggcgacccgcgatcggacactatcccgcgggaggtcctgcacgcctgttactccagggtgtctccctctgccaaagtggacaaccccaagctggttgcgtggtctgattccgtggccgatctactcgatctggatcacaaagagtttgaaagacctgatttccctcagtttttctcaggagcaactccactagtggggagtttgccctacgcacagtgctatggaggacatcagtttggtgtatgggctggtcagttgggggatggaagagcgatagctcttggagaggttgtcaactctcgaggtgagagatgggagttgcagctcaaaggttgtggaaagactccatacagcagatttgctgatggtcttgctgtcctacgcagcagcatccgtgaattcttatgcagcgaagccatgcacggcctaggcattcctacaactcgtgctctttgtctagttgaaactggaaaatcagttgtccgagatatgttctatgatggcaatgcaaaggaagaacctggtgcaatagtttgtcgtgtagcaccgtcttttttacgttttggttcgtatcagatacacgcttcaaggggcaaagaggacattgagattgttcgtcgtttggcagactacacgatacatcatcactttccacatcttgaaaatatgaaaaagagtgaaggtttgtcattcgagacagctataggagattccccaacaatagatctcacatcaaacaaatatgcagcttgggcagttgaggtggcggagaggactgcttacttgatagctagatggcaaggtgttggcttcacccatggtgtacttaacactgacaacatgagtgtgctgggcctaactattgattatggaccatttggatttctcgatgcatttgatcctagctatactccaaatactactgatcttcctgggaagaggtactgttttgcaaatcaacctgatgttggcttgtggaatattgctcagttcactggaccactgtcctctgctgaacttatcagccaagatgaggcaaattatgtgatggagaggtatgggacaaagttcatggatgagtaccaatctatcatgaccaaaaaactgggcttaactaagtataataagcagctaattagtaagctgcttagcaacatggcagttgacaaggttgactataccaacttcttccgtcttctttcgaatgtcaatgcggatcctggtattccggagaatgagctgcttgtcccactgaaggctgctctcctagatattgggaaagaaaggaaggaagcatggattagttgggtacagacttatattgaagagctggtggagagcggcgttcctgatgaagaaaggaaagccgcgatgaactctgttaatccaaagtatattctccgcaactatctctgccagtctgctatcgacgtagctgagcaaggcgattacgaggaggttcggcgggtgcttagggtaatgcagaatccgtatgacgagcagccgggaatggagaagtatgcacggttgccaccagcctgggcatacagacctggagtgtgcatgctgtcctgctcctcgtgaaccccatgatgcaagacgtggacactacaaaaatgcttgggtgcttatagtcttcctcctgtataggggtccatctttgtgctgtaatgtgtcaagcatcgcatgctatttttttcccggtgatgcaagtgtgtaagaaccatgtcgttgcaggaatagtgaagcagtgggacctgttattgtg

SEQ ID NO: 15783 - DNA, 1289 bp, Zea mays
  Clone ID: LIB3060-077-C2_FLI
ctggtaggttggtagctgttactgaaaaactaagagaaggcaggacggggaaaggagatggagctcaacagcatcccctatattgcgtcgtggtcttcctcctcgagctgcttctactacagctacagtcgctgcgcctgcagaggtacaagagatgggaagctggtaacaaaagcttctgcagctggtcgtaagcgtgctgctgattcagtatgttcacaactctctgagcagggaactgaagattccatttcaggtcctagatcttcctggcgtataaggaggagagaccttgcttctgccattttactcccttttctgattcctcgtgttaacatctctatcgcggctgagatatacgacgcatcaattattcgaagtggtgtgaggagtgttttaaccaagggcaaggctgctggtgtgcttcggttggttttccatgatgcagggacttttgaaattggggacggatcaggtggcatgaatggctctataatttatgaagttgacaggcctgaaaacattggcctaaatagatccataaagatactaagaaaagcaaaagaaggaatcgacaacgttcagaaagtgtcgtgggcggatctgattgccgtggctggcgctgaggcagttgcgctctgtggcgggcctgagattccagtaaggctaggaagagtagattctagcagtgctgaccctagtggtaaacttcctgaagaaacattggacgcagcttccttgaagacattattcagcaagaagggcttttcggcgcaggagctggttgttttgtcgggagcgcacacgattggagggaaagggttcgggagtccagttgttttcgacaacacctatttcaaggtgctgctcgataataggccgccgcagacatcttcgaaagctggcaatggcatggcggcgatggttgggctgcgcacggactgggcgctcactgaagacgacgagtgcttgagatggatcaggatctacgcagaggaccaagctaggttcttcgacgacttcagggacacgtacatcaagctcgtagacagcggagcctcgtggagaacagcttgactagaactgcctgtttctctacagtgttaggccttgttcggttataagggaataaatcccaccatggatttaatccggatctggattggatgaatccatatgtcacacccaatcctatggtgggattaaatacaccatttaatccatgtatctcttaaaactagctattcttttgattcatggattctaatataaacttgtgcaacatcttc

SEQ ID NO: 15784 - DNA, 1434 bp, Zea mays
  Clone ID: LIB3060-077-D5_FLI
aagtgatcagtgtgatcgatcacacactgccatggccgtcatgggcaaggaggaggaggagcagcagcagcagcacaaggaggaggaggtggtccaaggagatgtgcgagtcgtcgtccagcaggagacggcggcggacgaggaggccgagtcggcgctggtgcgcaagatctccggcctggccgccgccatcgccaggctgccgtcgctgagcccgtcgccggaggtgaacgcgctcttcaccgacctcgtcacggcctgcatcccgcgcagcaccgtggacgtggagcgcctgggcccggagctgcagcgcatgcgcgcgggcctcatccgcctctgcgccgacgccgaggcgctgctggaggcgcactactccgacctgctggccgccttcgacaacccgctggaccacctgccgctcttcccctacttcaccaactacctcctgctgagccagctggagcacggcctgctggcgcgccacgtcccgggcccgcccccctcccgcgtcgccttcgtcggctccggcccgctcccgctcagctccctcgtgctcgcctcgcgccacctccccgccgccgccttcgacaactacgacatctgcggggacgccaacgaccgcgcgcgccgcctcgtgcgcgccgacgccgcgctcgccgcgcgcatggcgttccgcacctccgacgtcgcccacgtcacccgggaactggccgcctacgacgtcgtcttcctggcggcgctcgtgggcatggccgccgaggagaaggcgcgcgtcgtcgagcacctcgggaggcacatggcgcccggcgccgcgctggtggtgcggagcgcgcacggcgcgcgcggcttcctgtaccccgtggttgaccccgaggagatccgccgcggcggcttcgacgtgctcgccgtgcaccacccggagggggaggtgatcaactccgtcatcatcgcgcgcaagccactcccggtcgtcgacgagcacgccgtcgccggggtggggcacgcacacgcgcacggcgccgtgctcagccggccctgcctctgctgcgagatggaggcccgggctcaccagaagatggaggaggtggccatggagcagctgccgtcctaggcacaagatggattgccccggccggcagcccatgcaatcgcattgcatctatctcatcgatctacttacgtgtctacaccacatgcgtgataataatctgcagattgacctggctactagctggtatattgtcaccgtgattatattaagtttttgtttaacaaaagggtagaagtcgaagtccaagccggcgaaagaaaaaacactggagaaaaaaaaagagtgcacgaaggagacggaggcagagcgaacaggctggcctaatttcatttgtatgctaatgttacgtgtgtcaatgatgatggagtggttaaattattagt

SEQ ID NO: 15785 - DNA, 2081 bp, Zea mays
  Clone ID: LIB3060-077-D6_FLI
gacaaggccccgttctcgattaacccaagccaaaggtccgttttctctctgagaccgtttacatcagttttttttcttttcttcaaaatatatgtgtgaacgaacaatagtttgcagtacacgaccgaaacacaatatttcatcgattccttccttgtcttctcacctctgacgattctgtttctgaaatctgcttcctgcaaaatggttccatggtcacggaattcgccatggtcagagtcagagggagagagagagagagagtcgtattggtcgtcacctgtcgaaggttttcggtgtctcctgagccacagctgctgctgctgctggaaccatggagatggaggccgtggagtcgcacggcggcgccggtcgccggacgcccaagagggatcgcggcatctcctgggcctgcgtcttcatcctggcgagtaactgcttccagttcatcgcctacttcgccgtgtcgacgaacctggtgaactacctcaaggaccgcctgcaccagggcagcaaagccgccgcgaacggcgtcaccaactggatgggcacgagcgccatcacgcccctcgtcgccgccttcctcgccgacgccttcctcggcagatactggaccatcgcgctcttcctggtcatctccgtcctggcctacgtggtgctcacggtgagcgcggcggcggcgctggagagcgcggccttctacgcggggctgtacctgctggcgctgggcggcgcgctgcagccggtgctgtcgtcgttcggcgccgaccagttcgacgaggaggagcgcgggcgccagagctccttcttcaactggttctacctctccatcaacgtcggctcgctgctcggcggcaccgtgctggtgtgggtgcagtccagcgtcagctgggggctcgggtacggcatcccggcgctcttcagcgcgctggccgtcgcggcgttcctggccggcaccgccacgtaccgccgccaccagccgccggccggcagcccgctcaccagggtcgcgcaggtcgtcgtcgccgcgtgcaggaagtgcggcgtccaggtgccggaagacgcgtccacgctgcacgagtgcgaggacatcggcggcatgtccgcgatacaggggagccgccggctcgcgcacaccgatcagttcaggttcctggacaaggcagcgtcggtggagccatcggacgacaagtcgcgtccggcgagtgcgtggcgtctgtgcacggtgacgcaggtggaggagctcaagtgcgtgctccggctgctgccggtgtgggcgagcgggatcgtgttcgcggcggcgtacacgcagatgaccaccaccttcgtcctgcagggcgacacgctggacccgtacgtgggcggcttccgcgtgcccgccgccgtgctctccgtcttcgacacgctcagcgtcatgctgtgggtgccgctctacgaccgcctggtggtcccgctggcgcggcgcgccacgggccacgaccgcgggttcacgcagctggcgcgcatgggtgtgggcctcgtcgtgctcacggccgccatgctcgccgcggggacgctggaggtggcgcggcgccgcgtcatcgcgcgttacggcatgtacgacaccaacacgggcgccagcggggacggggcgtacctgccgctgtccatcttctggcaggtgccgcagtacgtggtggtgggcgcgtcggaggtgttcacgttcatcggccagatggagttcttctacgaccaggcgcccgacgcgatgcggagcctctgctcggggctctccatgacgtccttcgcgctcgggaactacgtcagctccgcgctcgtcaccgtggtggcgcgcgccaccgcgcggggcgggcgggacggctggatccccgacgacatcaaccgggcgcacctcgacaacttcttctggctcctggccatgctctgcgccggaaacttcagcgtctacctgctcatcgcgcggtggtacacatacaagaagactgtggactagtatagtgtatgtatctataaagaccatccctgaacgatctcgtgaaatgtactgccgatctcaatcaattcaaagacacttcacttgg

SEQ ID NO: 15786 - DNA, 995 bp, Zea mays
  Clone ID: LIB3060-077-H6_FLI
caaaatcagcatccggatctccacattccccaccaaaaatcatcctccggacgaaatcagcggcggcggagatgggagcggagtgccggtacgaggtggcgcaggcggcgtacatcaagctggcgctgcacgcactgaagcacccggcgaccgccgtcaacggcctcctcgtcggtcgcctcgtcgagccttcgtcctcaccggccgtcgtctcggtcattgacgccgtgccgctttctcaccacccgcaccatctgccgctgctccccacgctcgagctcgcgctcaccctcgtcgaggaccacttcgcaacccagggcgaaggcctcgccgtcgtcgggtactatcacgccaacccgcgctgcgacgacaccgagctcccgccagtcgccaagcgcgtcggagaccacatcttccgatacttcccccgctccgcggtgttgttggtcgataacaagaagcttgaggaggccgtcaaggggaagttttctgatgcggtgattcagttacacaccagggattcatcaaaaagttggcgtcaggctggatcagatggaagcagtcagctgattctaaaagaaccttctaccaatgttgtcctagctgatcatgttacaacaaagaaatgggagaaaattgttgatttcgatgaccaccttgatgatattagcaaggattggtcgaacccaggcctccttgactgaattttcatgattgatctcgctatactgttttggaacttcgctagaaatgaggtggtgaagctcgtcctgctgtgctatggatttctctcagtcgcaacgagttgtaagcactaagcacggatttcattttaatgtaaatgagtgattttgtaacaattacagttcaaaatgctaaaattatgcagagaccatgagattgtttcaaggtcatgacaattattacgagttgtcacaaacaatttttgttcgtacatgactcttattttaaagaatgaaagttcacataaattt

SEQ ID NO: 15787 - DNA, 1460 bp, Zea mays
  Clone ID: LIB3060-078-C12_FLI
ggagccaccgcgatgtcgcccaagccggcgaagccgacacccgccaccgagttcgagtactgcgagctgtgccgccatcaccacgaccatggccggcgccatcgctacatcgtcaagcacaggagaaatctcgacgccgcgctcacctgcttccgctccaagctctccgacctccgccgcgccttcctccccggctccccctcttcccagccgccgcggacccgtctctggtgccccttctgctccattgacctcgtcgacctcgacagccgctccgctggtaacaatgccatttaccatatggcaagcagtgagcacctgaagggtgtgaaggatttcctgtggaagcacgggggacggatggatcaggtggtctcgcttaggatttcagaggatgtgcttgccaagtgggagaaaggccctgaatgcttgagcacaggaacgaagaaggggactgaagagctgattggaccatctctgaagcagataaaagcaatggggcatatggctctattagtacagcgtgtcatggagcttccagttctggaagtgcttcacattctgctccatatggaactgtcggcctgcccatcacaccttggggatcggccgaaacacataagctgcagggtgcactgtctacaaactggtttcacagcagtggtactgaaacaaaaggccatcagtctactgtctttgtgaatggcgcaagccaatcactttcttgttctgatcatatgttacctttgcgggttcaacaaagtcacactggaggaaatttgagcaatggctcaaaagcaaatgtgcatacgggtgctcctcctccctggttaaaagctaacgaacacgatccaaagaatttgtcactcaaaagctgtggtctttcttcccggaaagggaaattgaggaaactcaatccaaacagggttggtgctgcatgggcagaaagaagaagagctgagatggaaatggagaagcaaggtgaaattgttccagcaacatctgattctagttggctgcctaattttggtagtgtctggcaatctggcacaaggaaggaatcaaggaaagaatttgagaaaagccacaagattcatgacacgaagagcgaccatgacttatccttggagataaaaccatatatcagcaaacggatgcgtgtaggtgctgagaaagcttctgacaaagctgaagagcttggcagccacctaccgcagtaaacagatgtacaacccggtggatgtcgtcgcgtgggcgtctctgcggaaaaagccgccagggcgcgcggcttgattagcgattggtttggtttccatgtcaggtcgcgcctgggaagcccgccgcgagtacggaatgccaagccagtagtagtttttgttctcggcacgaagccatttgatgttcgttttgtgcgacggtttgcggcttgatcgcgattggcctcgtagcctttttgaccg

SEQ ID NO: 15788 - DNA, 1899 bp, Zea mays
  Clone ID: LIB3060-078-C9_FLI
gcaacctccaaccgggcgggcgcgggccactggaccagcgacacatccgggagaagaaagctcggaggatccgaacgacgctgacggcgaggccgtaaccgcagagcagcggttcttgggatctcctgctcctggtcctggatgctggcacttgaattccagcatgaggtcaaagaagatatttggtttatcaatttcccttgtactcatcaacctagcttctatattggaacgagctgatgagaatctcctcccagctgtttacaaggaagtgttcttgctcttcactatgaccgccctgcagtgcttgcgatagggactgcgttctgggctttgtcaacgggggctgttggtgtcagccagtattttgggcaggttgcattctggagagctattaatggtgttgggcttgccattgtaataccagctcttcaatccttcattgctgatagttacaaagatggcacacgtggagcgggatttggtttgctatcacttattggttcagtaggtgggataggaggtagtgttttggcaaccatcgtggctggaggggattattatggttttccaggatggcggcttgcatttatatctgttgcatttgtgagcttcttaattggacttcttgtatacctttacactgttgatcctaggaaattatctccaagccattttggcggtggtgaggacaatgagaggttacatttggtcagcaatggtatccttcctccacattccatctggaaggattcgtggatagcggcgaaatccgtaatgaaagttcggacctttcaaatcattgtgttgcaaggcattgttggctctttaccatgggctgctgtagttttcttcaccatgtggtttgaactcattggtttcgacaacagcagctcagcggcgctgaatagctttttcgctattgggtgcgccagtggatcatttctgggtggtgtgatagcagatgtcttatctagatactatccagattctgctcgcgtcatgtgcgctcagttcagcgccttcatgggcatccctttttcatggattctcctcacagtcattccccagtctgttgattactggtctgcctatgccgtcacactctttttaatgggaattaccataagctggtgcgctacttgtgcaaacaaccccatgttcgcagaggtagtccctcccaggcaccgcacaatgatctacgcctttgaccgcgcatttgagggttcatttggctcgcttgctgcacctgctgttggattagtgaccgaaaagatctatggctacaatgcaaaggccgtcgatctatcacatggatcagtggatggagcttatgcactctctagaggtctattgactatgatgattgtcccttttgctctgtgcctcatgttttacaccccactgtatacagtgttcaagcgtgaccgagaaaatgctagattggccagcatcaaggagcaggaacttacttgaaaagctttctaacaaggagtactgatgtagtttggattacatagtctacaacaccgccaacctggaggttttgattgaagtactttggttgatgtctaggatactcaggttttatgtttcttcagtcggatatcatttatgagtacacattttgtacacaagcgatagattgtttgttctcgtcgtatgtaactggttcagtatacattcggaccttaacctggagagtggagacagggtgttgcagctttccattgaactttcagcatatagatacagttctttctcgttttgttactatttacggtctgtaatcttgttttgaactgccttaaccatcacgccattccaatgatgatgtcatttgcagaactcttgtaccagtttcagtttatatcattataagatcaacgcttttctgac

SEQ ID NO: 15789 - DNA, 1406 bp, Zea mays
  Clone ID: LIB3060-078-H6_FLI
ggagaagaagacgagtgtcaagtgaacctgaaacttgcggtgtcactggctggtagcctgagtgtgagtgagtgatcgagctagctgagctccgatcctcgctagctaggataccgccataccacaagtcttcttcacaagtttaggagtgacagcaacaagagatcgatggcctctgccaccgtgctcaagtcctccttccttcccaagaagtccgaatggggcgccaccaggcaggccgccgcgccatcctcttcgaggagacgctgtaccagtccgccgtcgacggccgcaagatcgtggacatcctggcggagcagggcatcgtgccggggatcaaggtggacaagggccttgtcccgctcgccggctccaacaacgagtcgtggtgccagggcctggacggcctggcgtcccgcgaggccgcctactaccagcagggcgcgcggttcgccaagtggcgcaccgtcgtcagcatccctaacggcccctccgagctcgccgtcaaggaggccgcgtgggggctcgcacgctacgccgccatctcacaggacaacgggcttgtgccgatcgtggagccggagatcctgctggacggcgagcacggcatcgagcgcacgttcgaggtggcgcagaaggtgtgggccgaaaccttctacgccatggcggagaacaacgtcatgttcgagggcatcctgctgaagccgtccatggtgacgcccggcgcggaggccaaggacagggccaccccggagcaggtggccgcgtacaccctcaagctcctccaccgccggatccccccctccgtgcccgggatcatgttcctctccggcgggcagtcggaggtggaggcgacgcagaacctcaacgccatgaaccaggggcccaacccgtggcacgtgtccttctcctacgcgcgggcgctgcagaacacctgcctcaagacctggggcggccagccggacaaggtcaaggcggcgcaggacgcgctgctgctgcgcgccaaggccaactccctggcgcagctcggcaagtacacctccgacggcgaggccgccgaggccaaggagggaatgttcgtcaagaactacagctactaattaatcgcccggccatcacccgggataccgccgcccctccgagagatacgtgtgtactgatcatggttaagcacgtactccgatccattcccatcccatgaagccatgataatgatgatatgatccatggaccatgcatggtgctctggtcgatgccgtacgtgtgtccctgatacaatactattttagtactgatgctagtcatcatatatatcgatcgagctcgccactgcgaagtctgagataatgcatgtatgcttgacggcgagatctgaggaaaaataatttctatatatgcatgtttcg

SEQ ID NO: 15790 - DNA, 749 bp, Zea mays
  Clone ID: LIB3060-079-A3_FLI
gctgcgagcgggaggcaggcggctcctcgccccggggctccgtcggctcggcctgggcacaggcgcctccggcgaggcgggccctgccgcggcggcggcgggggtgagggcgtaccacgagcgggtggtggaccactacaacaacccgcggaacgtaggttccttcgacaaggacgaccccaacgtcggcactgggttggtcggcgcgccggcctgcggcgacgtcatgaagctgcagatccgcgtcgacgagaactccggcaagatcgtcgacgcctgcttcaagacttttggctgcggctccgccatagcgtcctcgtccgtggctactgaatgggtgaagggaaaaccaatggatgaagttttgacaatcaagaacacggagatcgcgaagcacttgtcccttccaccagtaaagctccattgcagcatgcttgccgaggatgcgattaaagctgctgtaaaagactacgaagccaagaagtcgaagatggggcagaagggtgaagacagcccttcagagaaggctgctgaagcatgaaaggttctgccgtgaagtatattgtgctgatacgtttctcagtccatgactatccgccgcatattgtcaaagataaatgattctgtttgtgaggcgagggattgtgtgtaatgttcacgaagtgtggtagtgcggcatgtggctcaactgttttaaggatggtgacgactgatttcaaataaatttgctgccatcgtagaattaaaag

SEQ ID NO: 15791 - DNA, 1268 bp, Zea mays
  Clone ID: LIB3060-079-D7_FLI
cccccaccagcaggcgggcccttcctccacgaccatcaccctcatctgtccgtacgcgactcgccgcaggaagagggccgcgggcgacgacctctcgtcggcggtggacatggatgtcgacgccgacgcgcagcgcgccacggacaagctgaaagcagtgtcagaggcacttgggcatgagatccgggtttttttcaagtgagaactttgcttcacaaaccagcaagttgcctagtgcagatcatgaggaagatgacgacttttatgagcttcagcctgctgattactacaacttgatttcaaacaggatgggagagcactttaaaatgctgaagactcgcaagatgcgggaagcagaacttgctgctcagcgagcaaagagaacaaaaacagtaatgagggtgcgtttcccggatggctacatccttgaggctgactttattccatcagagaggatacatagtctagtggacctgctcttgaaagtacttgctagaccagatctgccattctatctttatacagtacctccaaagaagcgaatactggacacatcacaggacttctatacagctggttttgtccctggggctaatgttcatttttcttatgatctccctgaagtttcgttgttaaatgcagatgatctaaaagcaggaccctttctccgcgaagaaattctaagtttggatggattgtcacttctgctgaaacctgctagtcaacctgatgattctagaatgaactcttcttctcttcaatctgatgcatctcaatctgttcctgtaccaacaacaacaaataagaagcctggcagaccaaagtggctgaaaaggtgataccactccaggtgtcaagtgtgtgccatcaacacagaatcactctgttaggcttctaaacactattaatggccgaacaagctcaaatctgaacaggctacactgctgtagtacaagaattggatcctctgcttacagaagctgcaggggcattagaaatagaatcccaccttttttttctaggtgggagccaagtagcatgtaaatttgaatgtgtcgcgactcatcaagtcatcagaacagtgctccgctgtggctaagcactttgtcatcttacatttcgtgtgaaccccataggaagctagaaacggcggagataatagtccagtgctgttaacgcttcacggtgcaatgccatgcctgtcttcactattcagtcttgacaacaatatatttcagaaaactgaaagtgcccgaggtagctggaat

SEQ ID NO: 15792 - DNA, 2412 bp, Zea mays
  Clone ID: LIB3060-079-F5_FLI
ctcccccaatttccctcccattttctactccctcccctttccttccttcaccggcatcggcataggcgtctctccctgatctacctggagtctctctcctcgtactccagcgccgcctgcccctccgaccaccgctgcggcagcgcaccgacttcccgcctgaaccccagatctcacccgcgccatacacgccgccagccccagcccagatctacggcgcgcccgccatggacgccggcgccggggccacggccatccgagtgccctaccgccacctccgcgacgccgagatggagctcgtcagcctcaacggcggcgctcccggaggggacacgggcccgcccccgccaccgcccaaggaccagccgcggagccgcgccgacaggaccaagctcgtgctcgcctgcatggtcgccgcgggcgtccagttcggatgggcgctgcagctctccctccttacgccatacatccagaccctaggaatagaccatgccatggcatcatttatttggctgtgtgggcctataactggttttgtggttcaaccttgtgttggtgtttggagtgataagtgccgttcaaagtatgggaggagaagaccatttattttggctggatgcataatgatatgtgctgctgtaactctaatcgggttttctgcagacctcggttacatcttaggggacaccactgagcactgcagaacatataaaggttcaaggtttcgagctgctattgttttcattctaggattctggatgttggacctggcaaacaatacagtgcaaggtcctgctcgtgctcttctagctgatctttcaggtcctgatcagtgcaattctgcaaatgcaatattctgctcatggatggctgttgggaatattcttggtttttcagctggagcgagtggggaatggcacaagtggtttccatttctaacgacaagagcatgctgtgaagcttgcggtaatttgaaagcagctttcttagttgcagtagtatttcttttgttatgtatgtctgttaccctgtacttcgctgaagagagcccactagatccaaaagatacacaaggactatcagattctgctcctctgctgaacggttctagagatgctgcccatgcatcaaatgaaccaaataatgaaagatttcctaatggccatgtgggtttaaacaatgtgtcggctaacaacaacactgaggaatttacaaatgtgaattccaacacagagaatggaggagtcttcaatgatgggccaggagcagttttggttaacattttgaccagaatgaggcatctacctcctgggatgcattcagtgcttctagttatggccctaacatggttgtcatggtttccctttttcctttttgacactgactggatgggacgcgaagtttaccatggggatccaaatggagatttgagtgagaggaaagcttatgacaatggtgtccgagaaggtgcatttggtttgctattgaattcagttgtccttggcgttggttcattcctcgttgatccactatgccggatgattggtgcaagattagtttgggccattagcaacttcacggtgtttatttgcatgatggctacaacgatactaagttggatctcttctgatctgtactcaagcaaacttcatcacatcatcggggcaaataaaacagtcaagatcacggcattggttgttttctctcttctcggattgccactctccatcacttacagcgttccgttttctgtgactgctgagctgactgccggtacaggaggtggacaaggttcgtgttgcgcatatactgtattaattagcagccttgcgaaccacagtgactggtactgtttatgctccatctccaggtttggccacaggagtcctaaatcttgctatcgtggttccccagatagtagtgtcgcttggagcaggtccatgggacgctctgtatggaggagggaataccccggcgttcgtcttggcttcggtcttctccctggcagcaggtgtgctcgcagttctcaagctgccaaagctgtccaactcgtaccaatctgccgggttccatggatttggctgatgctcatgcccaaaacccccccgtctgccatgtaaaacatcacacacttggccccattttgccattcgtttacagagaaatgattcttttttcctcgtacccctacagaataatgacagtgaaagtaggagtttaggtgagagagagagagagaggctaggtaggttgatgtgaaggtgtaaaagctgtatcctccttttttttgtttttgttttcgtttttgacagtgtatgtaagagctgtccacaagaaaatttacaagtggtgtaacctgccctcgtttgtacattgtactactactacatgacaatcatgtcctttgtcttt

SEQ ID NO: 15793 - DNA, 1925 bp, Zea mays
  Clone ID: LIB3060-079-G11_FLI
ctctctctctctctatctctcttctcccctcgatcaacagcaacagcggcggtcagaagcttccgtcgcgacagctcccgacctcctgccggtcttcccctctcctagtcggcgcgaatcccgaggcggaggaggaagaggggagcggagtgggggtgggccccatcagccatgagtctcacggggtccgccctggaggcggcgctacaggcggtggggcgcggcctcgacgcagctggagaccaccggctgctctactgcaagggaggtggaaggctcgtcgcgctcgaggaggaccgtgcgcgggacctcccgctccccgacggcggcgtcctcccgagcgtgccccccgatgtcgaggtcgagcagtgccgcagagaccccgagcgcatccgccccttcccctctggcccaagctctgccgcagcggatgggccctttgtctgcagcttcgataagatggctgagtatttcaacaggaagtcatgcttgtccgagacagtaccgctgggttccttcaactctctgttcagcttcaccggttcatggaagaatgatgctgcggctacgaaggcccttgcgattgatggctattctctgcctctgtttcgagtgaaaattaggagttctgaactgacgctgcttgagagcgttaagcacgcgatcccaaatgtttgggatccatcagcattggctaggtcagtagctttattgagaattacggtacccatattattatttctgttacggttggtggtaaggacgaagtatacattaagcagcattcatcgtcccaattgtcagggttagagttcaaaaattatgtgagggaaattgggagggaaagattctcagatgtggaaaacaagtcaaatgcaactcctatcaattacagcgagaaggatattacagtaatattcagaaggaggggtggttgtgatcttgttcaaagttttagtgattggaaaggaactgttgcctcagcaccagatgtcataggcatgacctttctttcaattgtctctcttgttgacgatgtaccaggaaagaagcaccttgctcgtgcagttgagctatacttgacctacaaacctccaattgaagaattacagtatttcttagattttcaagtcccactagtttgggctccagctccaccaggtattgctagtcaccataggaaggaacctgtctgcccatcgcttcagtttagcttaatgggcccaaagctcttcattagcacagaacagatctctgttgggcgccgaccagttgttggcctcaaactgctcttggaaggagctaaacagaatcgtttggctattcacttgcagcaccttgtctcattaccaaaaatattcctacctcattgggactctcatattaccattggacctccaaaatggcaaggccctgaagaacaagacagccgatggttcgagccaatcaagtggaagaactttgctcatgttagcacagcacccatagagtacactgaaacaaatattacggacctatctggtgtttatattgttacaggtgcacagttgggagtgtgggattttggtgcaaagagtgttctccacctcaaacttttgttctccagggttcctgggtgcacaattagaagatcagtgtgggaccacagcccatcaagttcttcaattcataaagcagatgaatcttcatcgtcctcgagtgataatgctaaacttctgaagattattgacatgacagaaacattgaagggcccacaagatgcacctggccactggctgatcacaggtgctaagttgggtgtcgagaaaggcaggattgtagtgcgtgcgaagtactccttattgaattattaaccaaatgtttaaagcattcattcactcactctgatattgagcactgtgttttaaggtagcatttgttctttt

SEQ ID NO: 15794 - DNA, 2026 bp, Zea mays
  Clone ID: LIB3060-079-H11_FLI
ttcctctcgactctcctctctctctctctctctctctctctctctctctgcgctgctctcggtttaggtcgaggagttgctagctagctagggggtttggatccctgctggtgctggctgctccgctgctgcgtgctagtcctactccagccccccagccccagcgaagcaggcaagcatagatagaggctggggtgggcagggaggtgcgcggacggagatccatcagatcagaatcagatcacatcatcggccctcggatgcgatgcagcaccggcgcaagcccgcttccgccgcggcgccgccggccgccaagcagccggccgcgcgcaggcccacggcgcggctgtcgctcgcgggcctcgtcgtctccatcttcctcgtcgccaccttcctgtacaacgaggacgtggtgaaggcggcctccggctcctccagctcagcaacaacagccgacgccgctgaggtaggcgtctccgggcgggcgaggtcacccgacctaagggtgctgcaggaggcggcgcaccagggggtggaagctgaggagcgggaggttggagatcgtacggaagcggagcagaagcagaagcccctgaccctccccatccccatccccgtggtggcgctggcggaggaggaactcgtggagaatactaagggaaggcagaagcagcagcagcaggaggaggagcaaacccagaagccaccgccaccgccgccgcctcctccccaggttgccgggtgcgacctgtaccggggtcggtggacgttcgacgcggccggcgagcaggcgccgctgtaccgcgagtcggagtgcgagttcctgacggagcaggtgacgtgcatgcgcaacggccgccgcgacgactcgtaccagaagtggcggtggcagcccgatggatgcgacctgcccaggtacgatgctcggttgctgcttgagcggctgcgcaacaagcggctcatgttcgtgggtgactcgctgaaccgcaaccagtgggagtccatggtgtgcctggtgcagtctgtggtgccctggggccacaagacgctgcacaagttcgtcaacaacggatcgctcaacgtgttcacggcgcatgattacaacgccaccgtggagttctactgggcgcccttcctggtggagtccaactcggatgacccgcaggcgcacagcgtcatgaaccgtgtcatcgcctggcgcgccatcgccaagcacgccaagaactggaagggcgtggactacctcgtcttcaactcatacatctggtggctcaacacattcgagatgaaagtcattcgccgtcatcagcatcagcttgaaaaggaggaggagggggtgaggtggagcaagtacgcccttgtggaccggccggtggcgtaccgggaggtgctcaagacgtgggccaggtgggtggaccgccacatcgaccccaaccgaacaagagtcttcttcatgggcatgtcgcccaaccacgtcacgccgtgggcgtggggtaacgacggcggcatcaagtgcgccatggagacgcagcccatcagcaacaaccggacggggcgactggacatcggcacggattggcgcctgcacggcgtggcgcgcggggtgctggcgcgctacctccgccgcgtgccggtgcacttcgtcgacatcacggggctgtcggagctgcgcaaggacgcgcacacctccgtgcacacgctgcggcaggggaagctgctcacaccggagcagcaggccgaccccaagacctacgccgactgcatccactggtgcctcccgggactccccgacacctggaaccacttcctctacgcgcacatcctctcgctctcctcgtccgcccaggatcactaaccatttttgcccagcctcacaatgtcaagcgcttcctttcaactcctctccctagaccacccacccaccctggatacctattactactgctgctgctgtagatcttcgtttcattttgacaaatgcatgcaggtcttctcttgtaatttctataaaaaacatccctgattt

SEQ ID NO: 15795 - DNA, 1444 bp, Zea mays
  Clone ID: LIB3060-079-H3_FLI
ttacagccagtactgctgtcacctcacttagcaaagctaatacgtatgtcatagcagcttgccaccatggcgagcatcaccgtgacaaggaaatcccaatccttcgtcgtgccatcgtccacgccaactccgacgaccgagacgctcgagttgtcgcccatcgaccgcgttccaggcctgcgccacacggtgcgatccctgcacgtgttccgccgcaaggacgccgccgcctccgccgcccactacgatgctgctgccgccggcaggccggccgaggtgatccgcgcggcgctgtcccgcgcgctggtggactaccgcccgttcgccggccgtttcgtcggctcactgtacgccggggaggcgagcgttgagtgcaccgacgacggtgcgtggttcgtggacgctgtcacagattgcagcctcgaggacgtgaacggcctcgactacccgcttatggtctccgaggaagagctgctgccggctccagaggaaggtgttgacccaaccagtattccgattatgatgcaggtcacggaatttgcttgtggaggatttgtggtggggctagtcgcagtgcacacccttgctgacgggctcggtgcagctcaattcatcaatgcaatttctgagtttgcccgtggagtagttaaacctacaatagcacctatatgggcacgggagttaataccaaacccacctaaaatgcctcctgggccaccaccatccttcgagtgcttcgggttcaaacattttgttatggatgtggcagttaacaatattgcacatgtcaagagtgaatactttcaaaccaatggacactattgctctacatttgatgttgccattgccaaggtttggcaagctaggacaagggcaatcaagtacgaaccaaatttcaaggtgcatgtttgcttctttgccaacactcgccacctcctcacacatgtgctacccaaggttggtggcttctatggaaattgcttctatccagtgactgtcacagcaactgctgaggtagttgctagttcaagattgcttgatgtgattaggatgataagggatgggaaggctaggcttcctttagagttttccagatggtccacgggcaatgtgaaagtagacccatatcaactaacattcaagcacaatgttctatttgtgtccgattggacacggcttggattctttgaagttgactatgggtggggtgtaccaaaccatatcctccctttcacttatgcagactacatggctgtagcagttcttggagctccaccgtctatgaagaaggggactcgaataatgacacaatgtgtcgaggaggagcatctcgtggacttcaaggccgagatgaaagccttcttttaggtcctcggattttacttgaaagttcaaacattatgcatttatgtgttcaattcaaataaaaatggtgttgacttgt

SEQ ID NO: 15796 - DNA, 2352 bp, Zea mays
  Clone ID: LIB3060-080-B4_FLI
tattattcggctcctgctcatcagctgcagcagtcgtgctccggaccggagaagtcgaaatggaggagaggctgttcgccacggagaagcacggtggccgggcgctctacaggctccacgccgtcacggtgttcctggggatatgcctgctgctctgctacagggcgacgcacgtcccggctgccggctccggcggcagggcggcgtggctggggatgctcgcggcggagctctggttcggcttctactgggtcatcacgcagtccgtgcgctggtgccccatccgccgccgcaccttccacgacaggctcgccgccaggttcggagagcggctcccctgcgtggacatcttcgtgtgcacagcggacccgcggtcggagccgccgagccttgtcgtggccacggtcctgtcggtgatggcgtacaactacccgcccgcgaagctcaacgtctacctctccgacgacggcggctccatcctcaccttctacgctctgtgggaggcctccgccttcgccaagcactggctcccgttctgcaggaggtacggcgtcgagccacggtcgccggccgcttacttcgcccagtctgatgagaagcctcgtcatgatccgccgcacgccttgcaggagtggacgtccgtcaaaaacctatacgatgaaatgacggagcggattgactccgctgctcggacgggcaatgttcctgaagaaactagagcgaaacacaaagggttttctgagtgggatacgggtattacctcaaaagaccaccacccgatcgttcagattctgatagatgggaaagacaaggctgtagctgacaacgaaggcaatgtgctgccgacgctggtgtacgtggcacgagagaagaggcctcagtaccaccacaacttcaaagccggggcgatgaacgctctgatccgagtatcgtccgtgataagcaacagccctatcatcctgaacgtggactgcgacatgtattccaacaacagcgacacgatcagagacgcgctgtgcttcttcctcgacgaagaaacgggccacaggatcgcgttcgtgcagtaccctcagaactacaacaacctcaccaagaacaacatatacggcaactccctcaatgtcatcaaccaggtggagctgagcggcctggacgcttggggcggcccgctgtacatcggcacgggatgcttccataggagggagaccctgtgcggcaggaggttcaccgaggactacaaggaagactgggacagaggaaccaaggagcagcagcagcaccgccaccgcgtcgacggcgagaccgaagcgaaggccaagtcgctagcgacctgcgcctacgagcacgacgacgacacgcggtggggagacgaggtggggctcaagtacggctgctcggtggaggacgtcatcacggggctggcgatacactgcagagggtgggagtcggtgtacagcaaccccgcgagagcggcgttcgtcggcgtcgcgccgaccacgctcgcccagaccatactgcagcacaagcggtggagcgagggcaacttcggcatcttcgtttccaggtactgccccttcgtctttggacgacggggcaaaaccaggttgccgcaccagatgggctactccatctacgggctatgggcgcccaactcgctgcctacgctgtactacgctgtcgtcccttcgctgtgcctgctcaagggcacccctctgttccctgagctcacgagtccgtggatcgcgcctttcgtctacgtcgcggtcgccaagaacgtctacagcgcgtgggaggcgctgtggtgcggagacacgctgagagggtggtggaacgggcagaggatgtggctggtccggagaacgacctcgtacctctacggcttcgtcgacaccgtcagggactcgctggggctgtccaagatgggcttcgtggtgtcgtccaaggtgagcgacgaggacgaggccaagaggtacgagcaggagatgatggagttcgggacggcgtcgccggagtacgtgatcgtcgcggccgtcgcgctgctcaacctcgtgtgcctggcagggatggcggcggcactggatgtgttcttcgtccaggtcgctctctgcggggtgctggtgctcctcaacgtcccggtctatgaagccatgttcgtcaggaaggacagggggaggatgccgttcccgatcacgctagcctccgttggctttgtgacgctggccctcattgtgccattcttttgactttgaggtgctaataatacgtgtacgggcacacgcacgttcgcatgtatgacgattatgggcaacaggcgtgtaataccactaatacctattaaacactccagtctcc

SEQ ID NO: 15797 - DNA, 2336 bp, Zea mays
  Clone ID: LIB3060-080-B7_FLI
ctcgtcccggatcaaccacctcctcggtccgcaaccacaaccacacccaccctcccgctcgccgcagccagaaccagctccaacccaaccagaaccagctcgcccctcatcgactcgaggcaacgaagcggccggatgggagcagcagcctgaccctgacgcgatgagcccgcccgccatgctgctgcccgtctgctccgccgcgcccagctgctcccccctctgcccggtgacggcctcgcacgtcgtcgcgcgggtggcgcggagggtggacgtcggcgccgcgctcaggtcctacgccgacccgctcgtcgcgcaggtgcccgaccgcccgccgctcgccgactcctccatactctccccctacatcgccgcgccggacgacatcgcgcgagccttcggcgcccccgcctccgagctccccccgctccccagcgccgaccccagccctgggctatgttgcacgggcaccgaccagccgctggcggcagtcgcggacctggccgccactgccgtggtcaactcggctcccaccgacgccgcggagcgggccctgtcggacgcgccgttccccagcacgttcccgtctgacgcgtccgaggtcgaggactccgtggccaggctcatcgataaggtcggcaagcaggtcttccaggcggaggatgcgctcaccgaggcctacgacaagctgaggctgtccgcgtacgacgcgctcggtgcgtggaggaagacggtgcgcgacgcgataggtgggctcaaggcgtcggtcgacgccggtaagcagcaggccgccggaggggtcacggatgcttcgggcgcgttgcacgagaaggtggccggagctgggactgtggctgttgatgttctcaggaaggcgattgttgcagcagaggattcactgggcagtgctgccacattcgttgtgtattcttatgggtcggcgaaggagtctctaccaccaaatgttagagatctgttgagctcgtctgaggagaaagctagtctagtcttgagaccaatcggaaatgctctgcaacaggtctatgtagttgttgaaggtgttgagaagaatgttggtttggatccaagtgatcctattgttcaattggcagttgtgcttggaggttcagtgacaatagggacaacgtactggctcttcacatacagtggctattctggagacttgtcacctgaatcagcgtttgacttattgaaaaacgatgacaaagccgtacttattgatgttcggcctgaggatttgagggaaaaagatggtgttcctgatctacgcctcagggctaggtctaaatatgcaagtgtagcttcgcctgagatcaaagatccagtaaagagtatgctcaaagatgaaagagagtttgatgatgctttactggcagttgtcatccgaaacttgaaattggtgaagggcgattcaaaagtcatagttatggattctaatggagctcgatcaaaagccattgctaggttactgaagaagctcggtgtgcagcgaccttaccttgttaaaggtggtttccaagcatggtcaaagaaccttcgtgtcaaagaactgaaacctgagactgcattaacgtcaataaatgaggatgttgaggaaatcctagaacaaataaagcccactccaactcttgtgtttggatctcttctgggcctctcggcactttcctatgctttacttgaatgggagatgactttgcaatacatcgctgttttaagcgttgggctgactatctacttgcgattctctacatatgaggactccgaggatttggagaaagacctaaagctgttgctgtctccagtaagagtaggcgcagacgccttgtcatgggcagctaagaagatagagccaaacaaggtgggcctgccaacgtctccttccacgacggcggtgaaagaccgggttcttcaggccgcggcgaagcacgagtcgcagccatcggatgccgacgagtcgtcggtccaaacagccgaggcatgacacgcgccgaaagcttgggagccagtcgagcggtcccgccgaatcctcaataagagcactcggtgggcgctccctggtaatttgtgaagtccatgtcgtttatgatgtaaagcactgtaaagcggttgtaaattaattgcgtgagcagcatctgtaagttgacatcaacttggttggttgtgtgtgtgtagattatagagaaagaggtgtcaatgtaacgttaattcctgagcctgtctgcgatcttgcccgtctggtactgctactctgcttgcttgcttgtttggcacgcgatcaaggtgaattaagtaaaaatggtccgtggtccaagtcc

SEQ ID NO: 15798 - DNA, 2482 bp, Zea mays
  Clone ID: LIB3060-080-D5_FLI
gagagatctccccccacccaccccgacccttcctcctcccctcggcctctccggcgggcgggcaattcggccatggatcccccacgcggaggaacagtgattgatcctactaaatgtcgattgatgagtgtggacgaaaaacgagaacttgttcgtgatttatcaaagagcccagaaagcgctcctgacaggctccagtcatggacacggcgggaaattgtagagattctttgttctgatcttggaagggagaggaaatatactggtttatccaagcagagaatgctagattatctcttcagggtggtgtctcgaaaatcatctggtccagtggaacatgtacatgagaaagagaaagggaaagataaagagtcaattcttgagcccaatacaactaaccatcagtcccctgccaaacgaccgagaaagagtgacaatccatcacgattaccgattatcaccaacaactcagcagcatctgatgtaactgggccaactaataatctacgcttctgccaaaatttagcttgcagggctattctcagggacaatttttgcagacgctgttcatgctgcatttgttttagttacgatgataacaaggacccaagcctctggttgtcgtgtagttcagaccaacacttacaaaaggatacctgtggtttctcatgccatcttgaatgtgctctaaaggatgaaagaacgggtattctgcagagtggacaaggcaagaaacttgatggtggctattattgcattcgctgttggaaacagaatgatttgcttgggtgctggaagaaacagctggtgatagcaaaagatgctcgacgattggatgtattgtgtcatcggatttatctcagtcataggatccttgtctccacagagaagtacttggtattgcatgatattgttgatatggcattgaagaaactggaggctgaggtcggtcctttatctggagctccaaatatgggtcgtggaattgtcagtcgacttactgttggtgccgaagttcagaaactttgtgctcaagcagtagatgctgtggaatcattgttctcggctgtatctcctgctagttcaaaaattcagcggccatgtatgatgccaccaaactttgtaaagtttgaagctataacccaaacatccgtcatggtatttttggatttggttgattgtcctatgcttgcccaagaggcaacttcttttaatatctggcaccgagtggctgttactgaattgtacccatcaaatccgactggcataatacttgcgccattgaaaaaattacttgtcacttggcttgcaccggctacaagctatatctttaaggttgtcgcgttcaagaactcaattgagttgggttcatgggaaattagaatgaagacaagctgtcaaaaggatgatccaaggggttcaatgccaggtggtaccggactaggacaaaatagtgagagcccaaaggcaaacagtgatggccagtctgatccttcctcagagggtgtggactcaaacaataatactgcagtttatgctgatctaaacaagtctcctgaaagtgattttgagtactgtgaaaatcctgagatccttgattcaaataaagcgtctcatcaccccagtgaacgtattaatgacttgcaaaatatacagatggctgcagatggggtaacagaagtcactgagctggaagaagcacctgggctctcagcctcagccttggatgaggaacccaatgcttgtgttcaaacagtgcttctcagggattcaaacccactagaacacaatcagagaactgtggttcctagatcacatgatacatctaatatactggctggacatgagttggtgattgttggacctcgatattctggttctgtgcctcccactgcaccaagaagtgtggaaaacagcaaagacaatggtggaagggcctccaaacccaaaccttgtgacatagttgttcaaaatggctcttcaaagcctgaaagggaaccaggcaattcgtcaaacaaaagagcaacggataaaatggacgactttggccacaaggatagtttctctgaagtgtcctatgaatactgtgtaagggtggtcaggtggctggagtgtgagggctatattgagacaaacttcaggatgaagtttcttacatggtttagcttacgtgccaccctgcaagagagaaagatagttagcgtatatgtggatactcttatcgaggaccctgtcagtctctctggccagctcgtcgacagcttctcggagaggatatatagcaaaaagcggccttccatgccttctggtttctgcatggatctgtggcattaaggaactgcagggtcttaccgttcgctttgtagggagcatattcggcccattcttttgttgcagatcgttgcattgattcttcattggaaatttagctgaagtatttgacttgcacatcttcattgaaactttccttggtgatgacagt

SEQ ID NO: 15799 - DNA, 1330 bp, Zea mays
  Clone ID: LIB3060-080-F2_FLI
tcttggatctcctggagctggaacaagcaccatatttaagcaggctaagttgttatacggcaatagatttactgatgaggaacttgagaatatcaaactaatgatccaaagcaacatgtttaagtacctggggattctgcttgagggccgggagcgctttgaggaagaggctttggctgtaccaaatcacccaagctcagtgggcgatgatcctcagcaagatgaaagtaaatcttcaagttccaattcttgcatctactcgataaatgcaaaactgaagaagttttccgattggctcctggacatcatagcgacaggagacctagatacattcttccctgcagctacccgtgaatatgctccagttgttgatgagttgtggaaagatcctgccattcaagcaacatacaaaagaaaggatgaattgcattttctccctgatgctgctgagtacttcttgagcagggctgttgaagtatcaagtaacgaatacgaaccgtcagagaaagacgtgatatacgctgagggagtaacacaagggaacggattggccttcattgacttcaccttggatgaccggagccctatgtcagaatcctttggcgacaaccacgatgcgtaccctcaacaaccagtaaacaagtaccagctgattagagtgagcgccaagggcatgaacgagggctgcaagtgggtggagatgtttgaggatgttagcatggtgatcttctctgtagcgctcagcgactacgaccagctcggagccccagcgagcggcagtagcaggacactcgtgaataagatgatccaaagcagggacctgtttgaggctacaatcaggcagccgtgcttccgtgacacgccgttcctgcttttgctgaacaagtacgacgcgttcgaggagaagatcgggcggtccccgctgtcgtcgtgcgagtggttcggcgacttctgcccgctgcggacgcaccacaacagccagtcgctggcgcagcaggcgttctactacgtggccatcaagttcaaggacctgtacgcggcgagcacggggcggaagctgttcgtgtggcagacgcgcgcccgcgaccggcccaccgttgacgaggccttccgctacgtccgggaggtcctccggtgggaggacgagcgtggcgtcgccgggtactgccccgacgagtccttctacagcaccacggagctcagctcgtcccgcctcatcgccgctgcacagtgactgtcgcagcgttgttttgtgtataatgatcgtatgcttgcttgtttcccgaacaaatcaaatgctatcaaatatagtgatctgagtgatgagcag

SEQ ID NO: 15800 - DNA, 1811 bp, Zea mays
  Clone ID: LIB3060-081-B8_FLI
agaaggttctccaagtcaatcgcaatcacgaagagtcatcacgccatacgacacggaggacaccgagccggaggcgaagccggtgcgcagcgcgagagtagcggcgagtcggcgaccatcaagcaactgcatggccgcgttacccgccagcgcccccgcccccgcccccgccccctccgaggcggcggagctcgtgccgacgctctcctcgctggagccggtctacggcgcgggcgcgcagctcgacgaggcgcgcctccgcttcgcccgcctcggggaccgcttccacgccgtctacggcgcccgccccgcgctcttcgcccgctccccagggagggtcaatctgatcggggagcacatcgactacgagggctactcggtgttgccgatggccatccgccaggacatgatcgtcgccatccgaagggccaacggcgcccaggtgagggtcgccaacgtcgacgacaagtaccccctctgcgtctaccccgccgacccagacaaggaaattgacgtaaaaaatcacaaatgggggcactatttcatgtgtggatacaagggagtttatgaatactgtagatcaaaagggatagatctgggcaaacctgttgcgcttgacgtcgttgttgatggcacagttcctcaaggctctggactgtcaagctcagcagcctttgtctgttcagcaacaattgctatcatgggaatccttgacaaaaactttccaaagaaagaagttgctcaattcacttgtctgtctgagcgccacattggaacgcaatctggcggcatggatcaggctatatctatcatggcgaaacctggattcgctgagttgatagattttaatccaatccatgcaactgacgtccaactaccttcaggtggtacatttgtgatcgcccattgtttggccgagtccaagaaagcagagacagctgcaacaaattataataaccgcgttgtggagtgtcgcttagcagcgattgttcttgccatcaaacttgggatggataggaaaaaagctatctcctccgttacaaccctctccgatgttgaggggctatgtgtttcttttgctgggagagaaggttcatctgatcctgcagtagctgtgaagaaacttctgcatgaggacccatatacagctggagaaatagagaaaattacaggagaaggcctgacatctgtcttccagggctctcagacgtcattggatgttataaaagcggcaaagcactacaagctatttcagcgtgcgacccatgtctactctgaagcaaggagggtttatgctttcagggatactgtctcttcaaaactcagtgaggaaggcaagcttaagaaacttggtgatcttatgaacgagagccattacagctgcagcgtgctatacgaatgcagttgccctgagctggaggagcttgtgaaggtctgcagagacaacggagcactgggagcacgtctgacaggagctgggtggggtggctgcgcggttgctctggtcaaggagcccatcgtccctcagttcattctgaaactaaaggaaatgtactacaaatcaaggattgacaggggagtaatcaagcagggcgatgtgggcctgtacgtgttcgcatccaagccgtcgagcggcgcggccatactgaggttgtaggcaggcaggaaggcagaggcagccgctattcttttcacgagtgtggtggccctgtaaaacatggaataaagttgccatgaacaccgaacccttgtagtagtgttgaattatctcagacgacacacgcattaaattgatatctatctataggagt

SEQ ID NO: 15801 - DNA, 1691 bp, Zea mays
  Clone ID: LIB3060-081-E5_FLI
gcactccgcaattccgcatcacgcagaggcagagcgaccaacccagaaccccaccccaccgcccgcaaccgcaagctcagattccctccccaccccaccccaccccaccgtcccgctcactccagcccagcccgcgtccccacagcccagcgacagcgggcaccggcggcatccagccatgtgcggcggcgccatcctgtcggacatcatcccgccgccgccaccgcggcgggtcacggctggccacctctggcccgagagcaagaagccgaggagggctgcatccggcaggaggggagcccccgtggagcagcatgagcaggaggaggatttcgaggccgacttcgaggagttcgaggtggagtccggcgagtcggagctcgagtccgaggacgagcccaagcccttcgccgcccccaggagcgcgctcgccagaggtggactaaacactggtgcagctggtgtcgatggccctgctgcaaattcagttaaaaggaagaggaagaaccagttcaggggtatccgccggcgcccgtggggcaaatgggctgctgagatcagagatcctcgcaagggcgtgcgcgtctggctcggtactttcaactcccccgaagaagctgccagagcttacgacgccgaggcacgcaggatccgcggcaagaaggctaaagtcaacttcccggatgaggttcctacggcggtttctcagaagcgccgtgctgctgggcctgcctctctgaaagcgcctaagatggacgttgaggaggagaagccgatcatcaagctcgcagtgaacaatatgaccaactcaaacgcatatcactaccctgccgtcgtcggccacaacatcatacccgagccattcatgcagactcagaacatgccattcgctcctctggtgaattatgctgccctagtgaacctgtcttcagaccaaggcagcaactcgttcggttgctcggacttcagcctcgagaacgactccaggacccctgacataacttcggtgcctgcgcccgttgccaccttggccgccgttggcgagtctgtgttcgtccagaacaccgccggccatgctgtggcgtctcctgcgacggggaacactggtgttgatctcgccgagttggagccgtatatgaatttcctgatggacggtggttcagacgactcgatcagcactctcttgagctgtgatggatcccaggacgtggtcagcaacatggacctttggagcttcgaggacatgcccatgtctgctggtttctactgaggctgaggcccagcgactggtgcttgtgtacatagggggggacaaagggtaagagcctgcagtaacagagattggctctttctggtacttgcaatttctatcccttcaactctttcttccgcccccgtgtttcaggaataatgttctggagatgaagaaacgcttgcgtgggcgtgcctgcaggcacgcgtgtagtagctgcggtattagtatatatgcttagatgttcagtcacttcctttaagtacaatttggcgctggacatgtaccttattttactatgtatccgtgacaacagctatgtgtctgctccttttattttcttgtctttgcttcaaaaaaatggctctgaacattgcgagtttgtactttgtagacaatatatatatatatatatgtgtgtatgtgcttggtttgcttc

SEQ ID NO: 15802 - DNA, 861 bp, Zea mays
  Clone ID: LIB3060-081-H7_FLI
gcagccccagagctccagcaataatggccgagaagggcgtgaaggtgttggggatgtgggcgagccccatggtgatcagggtggagtgggcgctgaggctgaagggcgtcgagtacgagtacgtcgacgaggacctcgccaacaagagcgccgacctgctccgccacaacccggtgaccaagaaggtgcccgtgctcgtccacgacggcaagccggtcgcggagtccaccatcatcgtggagtacatcgacgaggtctggaagggcggctaccccatcatgccgggcgacccctacgagcgcgcccaggcgaggttctgggccaggttcgcggaagacaagtgcaacgctgctctgtacccgatcttcaccgcgaccggcgaggcgcagcgcaaggcggtgcacgaggcccagcagtgcctcaagaccctggagacggccttggaggggaagaagttcttcggcggcgacgccgtgggctacctcgacatcgtcgtcgggtggttcgcgcactggctccccgtcatcgaggaggtgaccggcgccagcgtcgtcacccacgaggagctgccgctgatgaaggcctggttcggtcggttcctcgcccttgacgtggtgaaggcggccctgcccgacagggacaggctcctcgccgccaacaaggcccgccgtgagcagctcctctccgcgtagatggctagtaattctggagcagctagtttcaccgccgacgctcatatattgctgaataaggactggttgcacttttgcacgttgtgcagtgcagccgaggtttggatgacctctgcccctctgttccatttcagaatggtagtcccataataatgcatatacatcatgc

SEQ ID NO: 15803 - DNA, 788 bp, Zea mays
  Clone ID: LIB3060-081-H8_FLI
catcaattcatcagctagaagttcgaaatgggggtcaagtttttagtccttctcggtgttgtcctggcctctcttgtcttccaggacgtggcatttgctagagagctcactgaggccaataatgaggatgagggaaagaacatgaaacaaggaggaatgactgaattaaaggatgagaaatggggaggtggatatggaaaaccgggctatggtggtggatatggtggaggatacaggcccaaatatggcaggggctacaggtccggatatggatacggtggcgggtatggtggaggatacggtggcggttatggtgggggatatggtggcggtggtggctatggagaaggtggaggctttggaggtgggcatggtggtggtcgctatcctggtggtggagggcaccatggtggtggagggcaccatggtggatggaattaagaagcattgctacataaagtttctctatgtccgataacaataaatggcgacgataaatttgaatgctacatgtagttccgtgatggaaatcttatgtattttgtataaaacatggtacatggactgttacgtatgttgcatgaaatactgtactagaataagatctttgtatgccatgtatggtattagtgtgcatgtgtctggcttttgaaaggtgtacctcctcatttatggacttatatgtatgtatagataaaaataatatttttatcaaggcttgagtcaaagggcgatgtatggatgaactcatggttcttccatcgttgtgtttttatttcattttcact

SEQ ID NO: 15804 - DNA, 868 bp, Zea mays
  Clone ID: LIB3060-082-B1_FLI
gctcgtaatcctaaccgccctggtttctctacacgctacgggaccggtaacttctagaacccaccaccttccatccttccttcctttcctctctctctctctctcctcgcgcccacggtgcccgccagccagatccgcgcgttcaccggcgccatggccgccgagcatgccaccgccgcggtgggtgagccgcctcccgccacgtcgcagccggcggagggcgtgacggcggcggcgggccagaggtccgtgcccacgccgttcctcagcaagacgtaccagctggtggacgacccggcggtggacgacatcatctcgtggaacgacgacgggtctgccttcatcgtgtggcgcccggcggagttcgcgcgcgatctgttgcccaagtacttcaagcacaacaacttctccagcttcgtgcgccagctcaacacctacgggttcaggaagatcgtgccggacaggtgggagttcgcgaacgactgcttccgccgaggggagaagcggctgctctgcgacatacaccgccggaaggtgtcgccggccacgggggcggtcacggtggccgccgccgccgctgcggccatcccgatggcgctgcccgtgggctctccggtgtactccggcgaggagcaggtgctgtcaagctcgtccccggagcccccgtcgctgcagcagcacccgccggcgccgtccgggtcgggctccggcggggtggtctcgggcgacgtgggcgaggagaacgagcggttgcggcgggagaacgcgcggctggcgcgcgagctcggacagatgaagaagctctgcaacaacatcctcctcctcatgtccaagtacgccgccactcagcagccggacgccgccaagg

SEQ ID NO: 15805 - DNA, 1391 bp, Zea mays
  Clone ID: LIB3060-082-C6_FLI
ctagtccctcccgggctcccggcagcggcggcgcaccttatggcgacttgagctctctgggcgacgtcctcgggacgggcagactgtaattgaaatgaaaaggataggtagatctagctaattcgacaacagagcaaggtgcgctcctatggaagtggaagaagcaggaggcgaagtggagaacgccggcaaggacgaggcggaggcggagtaccattcgcgcgatttcgaatgggaggacctcaaggaagaggtggaatctggacctgtcttctcctaccacctctccccctttctcgaccccgccgccagtaccacctcgccgccgcagccctcgtcggaggcctggagaagcttccaccgtcgccatgcgtccggaaaattctttaaggaaaggagatatttgcttaaggaatttcctgaactttgtagcagcaaagatcatgccaaggttttagaagtggggtgtgggaatggaagcactgctgtttccattctacggtctagtgaaaggatcactgtctttgcttgtgactgtagtaaagacactcttgagaaggcatatgaaattatatccaatacaaaagggattaatatcaaggataggttccacccctttttaatggatgtttctaaagaaactttcccagattggttattttgcaaagcctgtcaaacttcgctgggaaaagctgctgcatctttacttgatccaagtcaccatggaattagagaagagcacccagtcttccttggagagaaccaatgttgtgctggtggcatggattttattaccatgatattcacactgtcagccatacccttcgacataatgccaactaccatagaacaatgtgtttctgttctgaaaccaggcggccttcttctttttagggattacggtctttatgacatgacaatgcttcggtttttacctcatcaaagagtagggtttcgggaatatatgcgatcagatggtaccttttcatacttcttctcattggatactgtgagagaactctttcgtgctgctgggctagtagagttggagctggaatattgctgtgtcaagtccgtgaaccgaaagaatgggaagacgatgcggcgggtatgggtccatggcaaattcaaaaaaccacctaggtgacatcagttagggcttgttcgtgttcagctcaatccatatgaattggatagaattgtgtggatttaaatccatagcaagtcaaaatctctactaattttttccaatctcatcccaatccatatggtgtagaaataaccaaagggcttagctgttagttttgctcggccactttgttgttgcaacaaagcgttgtaacagttttgtagccacaaacttaaatggcattgaaattatgccctccccc

SEQ ID NO: 15806 - DNA, 983 bp, Zea mays
  Clone ID: LIB3060-082-D12_FLI
gtttccgactccggtgactccaccaccagcaacccgtgcagcgagcgcactccgaccatcgccatgtcgaggcgcggcgactgggtctacgagaacaacggcgggacctgcgtggccatcgccggcgctgattactgtgtcgtcgctgcggacacccgcctctctgtaggatacagtatcctcacgcgtgatcactccaagatctgcgaccttattgacactactgtgtggaggttgctaagctttctttgattattatgtactttatgagaaagatggttatcagctactccctccatttcaaattggctgacaaatgtgtactggcatcttctggctttcaaggtgatattaaggctctgcagaagaacctagctgccagagaattgctgtaccaacaccagcataataaaaggatgagctgccccgccatggcacagctcctctccaataccctgtactacaagcgattcttcccatattacgccttcaatgtgctcggtgggcttgacagcgaggggaaaggatgcgttttcacctatgatgcagtaggttcctatgagagaaccggttacagtgctcagggaacgggatctactttgatcatgccagtcctggacaatcaactaaaatcaccaagtcctctattactccctgtcagggatgctgtcacaccattgtcggagtcagaggccatcgatctagttaaggacgtgttcgcatctgcaactgagagagacatctacactggagacaagttggaaattgtagtcattaacaaggccggtactatgcgcgagtatatcgacctgagaaaggattaagccaacacttcagttgtgctgcagctgtcatttgctttgaactttttttcctagtctggtgatttatgtctaaagctgttgcttcataggaacacttgtgtttacttgcatatgtaatgtacggtatgtaccaggattcagtgagttttttttctgttg

SEQ ID NO: 15807 - DNA, 715 bp, Zea mays
  Clone ID: LIB3060-109-B12_FLI
ctggcttctcctccccctcttaccaagtcctcctcgggttagggttccttagggttttgtggaggggcgatggcggcggctgatgtggagtaccgttgcttcgtcggcgggcttgcctgggccaccagcaacgagtcgctggagaatgccttcgcctcctacggcgagatcctcgactccaaggtcatcaccgaccgggagacggggaggtctcgcggcttcggcttcgttaccttctcctccgagaactccatgctcgacgctatcgagaacatgaacggcaaggagctcgacggccgtaacatcaccgttaaccaggcccagtcccgtggcggtggcggtggcggcggtggctacggcggcggtcgcggcggcggcggctatggtggcgggcgccgtgacggcggttatggcggcggtggcggctacggcggtcggcgcgagggtggtggcggcggctacggaggcggtggcggctacggcggtcggcgcgagggtggtggtggcggctacggcggcggcggcggcggctggagggactgatgtgtgggcccatcctggcttcggccgagttatcttatctatctatagtatcgtgttaccgttcgcttctgtcaccgtgttagtgtccgttctacctttggattaggtgttggtacccctgttgttccctttgtttgctcccgctatgaaacgagacgagagaagaatgagc

SEQ ID NO: 15808 - DNA, 1743 bp, Zea mays
  Clone ID: LIB3061-007-F11_FLI
caacgactgggttaccgacgcagccgccctcagccaggtgcgcgcgtcttctttgggcccttcgctggtgacgagcgcccactaggttggctgtgtgctgatgctatttgtgtttaagtacttccacctggtgttaatcttttgggagtggaatctctgagacctctgaggtgtgcctttctggcatcaagtttaactgcaacgatcagagggtttctggtgcctgctcattctgaatggcagaccttacggacatcggttgctgcagttgctttagctttttaaggaagcccagtgtacctgtacgtcaacatcaggatgctgatggcatgttatctgaagatttactgaagcgtcaatcagctgaagatcctgatggaagtttctacactggggatgatcctgatgtaagcttttataacggggatgatcttgatagaagcttctacaatggagatgatcctgatagaagcttttacgatagagatgatactgattatattgagggaagcgatgatggaccaccaaggaagagttctgaagatattgtacagttaagaactcaaaatggctttgcatgtagagaaatctcagttaaagagactaaaaaagtatttcgctcagaggatgaaaatggtaataagatggtcaatcaatatgtccacttgggaaagattggttctggaagctacggaaaagtggttctgtacagaaacattaaagatgggaagttgtatgccatcaaggttctgaataagccttacatgatgaaagtacgtgttgtacgcacagaaactgccatgacagatgttcttcgggaggtgtccataatgaaaatgctgaatcaccctaacattgtcaatcttgttgaagtgattgatgacccaaacatagataaattctacatggttcttgactatgttgaaggaaaaatggtttgcgataatggtttagaagaaggtactgcaagaaattatttgcgagacataatatctggtcttatgtatcttcactctcataatgttattcatggtgatatcaaaccagacaatctcttggttaccagtgccggcaatgtgaagattggggatttcagtgttagccaggtttttgaggatgatgatgatatgctttggagatctcctggcactcctgttttcactgccccggagtgctgtcaaggttcagcctaccatggtcgggcctctgatacatgggcagttggtgtaactttatattgtatggtttctgggcattatccatttcttggggatacattgcaggaaacttatgataagattgccaatgatcctgtgcaaatacctggagacatgaacccccaacttgctgatttgctcctaaggcttctctgcaaagatccaggggatcgcatcacgctgcaggctgcggctgagcatccttgggttgctggtgatgaggggccagtccctgaattcatctgtagatgtgggtttggccgcaggaagaggaatgatgtccgcgaagaagtacaataacaaagcatcctcggatagtccacaggtctagtgtagataattgataaaggttggcaaaacgtagccctgacgatgagtttgttttttgtttgtttgtttgtttgtttgtttgttgtttcgtgttcctaatttccaacgagtgttgggcgctcgactgaacatgtttcttttagtaagagaatctcgagtgtaaccctaatgacagtaaaacccaccgtctgccccc

SEQ ID NO: 15809 - DNA, 1095 bp, Zea mays
  Clone ID: LIB3061-035-E8_FLI
ggtgacgatagcgctggacccgtctctgtacccagagaatccactcatcatctgggagaatgcacgggcagctgcccagcaggaagggtttgaggtaaagaggaaaggggataaggagtttgttgcaaacattcggctggagatgaactacagccctgagaagttcaagttatcacagccgcttatggaggtgcttggggtggaggtggacactcgtgcacgggtgattgctgccctctggcagtatattaaagcaaagaagcttcagaacccaaatgatccttccttcttcatgtgtgaccctcaattgaagaaggtgtttggggaggacaagctcaagtttgcaatgttgtcacagaagatatctcagcatctgtctgccccaccacccatcaatttggagcacaagattaagctgtcagggaatggagcacatagcagtgcttgctatgatgtgctcgtggatgttcctttcccgctgcagaaagagatgatggcgttccttgccaacacagagaagcacaaggacattgaggcttgcgacgaggtgatatctgcttcgatcaagaagatccatgagcaccgcaggaggagggcattcttcctgggtttcagccagtccccagtggagttcatcaatgcattgatagcttcccagagcaaggatttaaagctggtcgccggcgaggcgaatagaaacattgagaaggaaagacgtgccgacttctataaccaaccatgggtcgaagacgccgttataagatacttgaaccgcaaaccagctaatgagggcccaggtggtggtgctggtggttcttgaggcatggatttctcctagtgcggttttggtgtagaaacaaattatctgttctgtattgatagtaaaaatcagatgtatttgcaaagagaattgttcagtgttgtgaaaggatgttcaggctagtggaggttgttatgttcctgtctgattattgtggaagtataatgccaagtgctgaactgcaccataatgttgcttggcgtggccctgaaaatagtaagcctaaatgacattataaggaaactggaatgcaggagtatgagagtagcttttcc

SEQ ID NO: 15810 - DNA, 2187 bp, Zea mays
  Clone ID: LIB3061-035-H2_FLI
caaaacgacctcctccgcccgcccgcccgcccgcctgcccgtcggcgttgtttcgtctccaccgccgctctcctctccagtctcccaccaccgctcgtctccccgtaccgcccgcaacccccctcccctgcgagatccggggcgcgatgtggcgcagctgcgtctcgcgaggcctctccagggccaaggcctccgcctccaggctcctctccacggcgtcgtcgtcctacacggtggtcgaccacacctacgacgcggtggtggtgggggccggcggcgcggggctccgggcggcgatcggcctctccgagcacggcttcaacaccgcgtgcatcaccaagctcttccccacgcgctcgcacaccgtcgcggctcagggaggcataaatgctgcacttggaaacatgagtgaagatgactggaggtggcatatgtatgacactgttaagggaagcgattggctgggtgaccaggattctattcagtatatgtgcagagaggcaccaaaagctgttatagagcttgagaactatggactaccattttcaagaactgaagagggaaagatataccaacgtgcctttggagggcagagcttagattttggcaaaggtggacaagcctaccgttgtgcctgcgctgctgacagaacaggacatgctatgctgcacacactatatggtcaagcaatgaagcacaacactcaattttttgtggaatactttgctttggaccttctcatggacaatgaaggaaaatgtcagggaatcattgccttaaacatggaggatggaactcttcaccgtttccgtgcttctaatacaattctagccacaggaggttatggcagggcatatttctcagcaacctcagcacacacttgtactggagatggcaatgctatggttgcacgtgctggtttacctctccaggatcttgagtttgtacaattccatcctacaggcatttatggtgctggatgcctgattactgaaggttcccgtggtgaaggtggtatccttagaaatagtgaaggtgaacggttcatggaacgatatgctcctactgcaaaagatcttgcttctcgtgatgttgtttcaagatcaatgacaatggaaattagagaaggacgtggtgtagggccattgaaggatcacatttatttgcatctgaaccatctgccacctgaggttctcaaggaaaggcttcctggtatttctgaaactgctgctatttttgctggtgttgatgtcaccaaggagcccattccagttttgcctactgtgcactacaatatgggcggtattccaacaaactaccatggggaggtagtggatatcaagggtgataatccagatgctgttgttcctggtctaatggctgctggtgaagcagcctgtgcatctgttcatggtgcgaataggctaggcgcaaattcgcttcttgacatagttgtttttggcagagcttgtgcaaacagggtagcagatatttctaaaccaggtgagaagcagaaacctctggaaaaagatgctggagaaaagaccatagcctggttggacaagctgaggaatgcgaatgggtcattgccaacttccaagatccgtctcaacatgcagcgtgttatgcaaaataatgctgctgtattccgtacacaagaaacacttgaagaaggttgtgagctgattagcaaaacatgggaaagtttccatgatgtgaagctcagtgaccagagtctcatttggaactctgacctgatagagacccttgagctggaaaatcttttgataaatgcatgcataaccatgtattcggcagaggctcggaaggaaagcagaggagctcatgctcgtgaggatttcacgacaagagatgacgagaagtggatgaagcactcactggggtactgggaaaacgagaaggttcgattggcatacaggccagtgcacatgaacacattagacgatgaagtagagtccttcccgccgaaagcccgtgtctattgatcgattcgagcctcacaccctcgggaattccgtgtaaggtgttaataaagcagatgggcgttcctggctgagaacatgatctgaactcgtgacccccctttttctgtggttctgtattttgtctgatttgctagaaataaaaggaacacatgctaatgcctgacagacgtttgtgtacatg

SEQ ID NO: 15811 - DNA, 1078 bp, Zea mays
  Clone ID: LIB3061-062-C8_FLI
cagatacagaaatattctgtgagggtgagcctattaagagggaggatgaggaaagactcgatgaagttggctacgatgatgttggtggagttagaaagcagatggcccaaatcagagaactggttgaacttcccctgcgtcacccccagcttttcaagtctattggtgtgaagccaccaaagggaatattgctgtatgggcctcctggctctggcaagacccttattgctagagctgtagctaatgagacaggtgctttcttctttttgatcaatggaccagaaatcatgtcaaagctagcaggagaaagtgaaagcaatctcagaaaggcatttgaagaagctgagaaaaatgcaccttcaatcatttttattatcggtgcaactaacagaccggacatcattgacccagccttgctgaggcctgggcgtcttgatcagcttatctatattcctctgcccgatgagcagtccaggcttcagatcttcaaagcctgtctcaggaagtctcctgtggccaaggatgttgacttgaatgctctcgccaaatacacccagggtttcagcggtgcagatatcacagagatctgccagcgcgcatgcaagtatgccatcagggagaacatcgagaaggatatcgagagggagaggcgcaggaaagacaaccccgaggctatggaggaagacgaggtagacgacatcgctgagatcaaggctgctcacttcgaggagtccatgaagtacgcccgtcgcagcgtgagtgacgccgacatccgcaagtaccaggccttcgcccagacactccagcagtcccgcgggtttggcagcgagttccggttccccgaccaaccgacggcagctgctgctgcggccgatcccttcgcatccgctggagcagcagctgacgatgatgacttatacagttaaattagcagtcctgtgttgtgacgcatattgagtactttgcttcgttatatatgcttattatagtagactacgtgcaagacgcggagtcgctgtacctatatataatacttaagtaatattttggtacgatcctctgaatcgtgccatgagcc

SEQ ID NO: 15812 - DNA, 853 bp, Zea mays
  Clone ID: LIB3061-066-F3_FLI
taattgtttaccatggaccagattttgttaggaagatctgatgttgcaggttggggtgcattcattaaggtcagataaccgaacaaaatacctctgagtgcgatacttcctttcttgttctggctaattttccttgcaatatgtagaatcctgtaaataaaaatgattatcttggagaatatactggttgaattgatctctcacaaggaagcagacaaacgcggcaaaatttatgaccgggcaaactcatcttttctgttcgatttaaatgaccagtatgtgttggatgcttatcgcaagggggacaaattgaagttcgcaaatcactcatctaaccccaactgctatgcaaaggtgatgctggtggctggcgaccatcgggttggtatatatgcgaaggagcatattgaggctagcgaggaactcttttatgattatcgttatggacctgaccaggctccagcttgggctaggagacccgaaggatcaaagaaggacgaggcatccgtctctcaccgtcgagcacacaaagtggctcgatagctgaagagtcgctccggatgatacaatatgcagtaaacttaatacttaatacatgattcagtcctagttcattggtagataaacatgctatatactatccattagtaaataaactctcattcatcgagttggagaataaatgcgtataaacatatgtggacctcaggtcgggaaggtggcaaccttgttagtttgagcaccaacaggttctcaaacttgagtggctattgctagagtatcaaataatggctgcgactatagccttgtttgtatattttcttggtgagatgaaataatttgtcaaacactc

SEQ ID NO: 15813 - DNA, 968 bp, Zea mays
  Clone ID: LIB3061-067-A5_FLI
ggagagacaaggtaccatgaatcgtggtgccttgtgttcgatggcattgtgttccactggctgtgcgtgaattgagtacttgatgaagaaatctgtcttttggtggcgcagaggataaaatatggggtggtaaggatgagggacctggcaatggatgtcttgacctgggacaggttctacctcagtggtcggctgcagaaaccggtccatgttcttgttgacaactgggatataaggaaggtcaactcaattaacctagaaatggcaacttcagcttctctactccttttaccagcggagttcacggagtacgacctatatgctcaaatctgcagtctatcatatatgggtgatttgagaatgctgtttgcggaagacaaagataaggtgaagaagattgttgagggtagttttcagtcgttccaattgatgtacagccccctcttgcaagagtatattgctgaaggcctattgaagacatcatcccatggacaatataaaactttccggcaggattgcggtccatctacaacaaatgaactgttctctgttcttccgtggacgatccaaagccaaatgcaaggaaggcacacattgcacggaaaagaagtaccaccacgcaccgtagtttcttccaaggagatggcagcaaactgtgtccggagggccctgaggcaccgagtaatggtttcaagcgtgcggcaagcagtgtgtggtctgctcgcctctggcggtgcagttgctgctcaatacctcgggaagaagatggcgaaggcttggcgatctagagtggcttaagccaatgctgccccccaccccacacacccacacccaatggtgtacgctaggcttttgccagttctgggtttcatgcagtgtatggcaatcagtatcgtatgtttttcaccgctgaaagcctgataccggctgaaattttgtaggaccagaaacgtcaatgcttcagaatc

SEQ ID NO: 15814 - DNA, 736 bp, Zea mays
  Clone ID: LIB3061-115-C2_FLI
gcttctcctccccctcttatcaagtcctcctcgggttagggttccttagggttttgtggaggggcgatggcggcggctgatgtggagtaccgttgcttcgtcggcggacttgcctgggccaccagcaacgagtcgctggagaatgccttcgcctcctacggcgagatcctcgactccaaggtcatcaccgaccgggagacggggaggtcccgcggcttcggcttcgttaccttctcctccgagaactccatgctcgacgctatcgagaacatgaacggcaaggagctcgacggccgtaacatcaccgttaaccaggcccagtcccgtggcggcggcggcggcggcggcggcggtggctacggcggcggtcgcggcggcggcggctatggtggcgggcgccgtgacggcggttatggcggcggtggcggctacggcggtcggcgcgagggtggtggcggcggctacggaggcggtggcggctacggcggtcggcgcgagggtggtggtggcggctacggcggcggcggcggcggctggagggactgatgtgtggccccatcctggcttcggccgagttatcttatctatctatagtatcgtgttaccgttcgcttctgtcaccgtgttagtgtccgttctacctttggattaggtgttggtaccccttttgttcgctttggttgctcccgctatgaaacgagacgagagaagaatgagcaaggtttttgttcgcatc

SEQ ID NO: 15815 - DNA, 1100 bp, Zea mays
  Clone ID: LIB3061-120-B2_FLI
gattttcagatcagatcgggaagtgagatggatagccggataggggtagtcgcaacaaaaagaaaccaaactcggctcaagagagatcgcatcttgcctgcccacccagcttccctttcgttcctcctcgccccagcgacgcggcctcccgtagaccgagcaaggcaacccaccactgagaggcacgcagaggagcaggaagccggagaccaagatgtcgtcggtgttcagcggcgatgagacggcccccttcttcggtttcctcggcgccgccgccgccctcgtcttctcatgcatgggcgcagcgtacgggaccgcgaagagcggcgtcggcgtggcgtcgatgggtgtgatgcggccggagctcgtcatgaagtccatcgtgcccgtggtcatggctggtgtgctcggtatctacgggctcatcatcgccgtcatcatcagcactgggatcaaccccaaggccaagccctactacctttttgatggctacgctcacctttcgtccgggcttgcctgtggccttgctgggcttgcagctggcatggccatcggcattgttggtgatgctggagtcagggcgaatgcacaacagccgaagctttttgtgggcatgatcctcatcctcattttcgcagaagcgcttgctctgtacggtctcattgttggaattatcctttcatcccgtgctggtcaatcccgggcagattaagtgcactaccattctgcaattaccgtactgtttattatgctattctaagagaattgaaaccctatgcccttgtctagtttattcttgttaccatgtattaatgaaacaatttgtagctgaaggaaggtgacacttccagccatgttggttttggcggtgttaagcagaggttatttattgggttaaggttggagggatgcgggttaagattggatggatgctcctgggctaagtggatttaatttttatccttggtgaataatgaacacggaggtgtagccaaataataacgtgatatatatatttctttgcccctttactggatgcctggattttcattgtcatctatacttcggcatgtccacagcgatagctgatgttttgtttc

SEQ ID NO: 15816 - DNA, 1599 bp, Zea mays
  Clone ID: LIB3062-001-B10_FLI
gcgcgcgcgcacgccattcccctcccgtagcgtgcggcgtgccgtcaatccaaaccaccaaaagcaatgccgccgccgtccgcaaacggcgccaccgccgccgccgccgccgcgagggacgacatgtccccggcggaggccaggctggcgatgatggagctggcgaacatggtgtcggtgccgatggcgctggcggccgtgatccggctgggcgtgccggccgcggtgtgggcgggcggcgccaacgcgcccatgtcagcggccgacctcctcccgccgggccacccggacccgtccgtcctggagcggctgctccgcctgctggcgtcccgcggcgttttctccgagtccaccgagtccacgcccaccacgcggcggcggctattcgcgctcaccgcggtgggccgcaccctggtgccggggcccgcctcgggcgcgtcctacgccgactacgtgctgcagcaccaccaggacgcgctggtggcggcgtggccccgcctgcacgaggccgtgcttgaccccgcggggcccgagccgttcgcgcgcgccaacgccggggtcaccgcctacgcctactacggcaaggaccaggacgccaaccgggtcatgctccgcgccatggcgggggtatccgagcccttcatgggtgccctcctcgacggctacggcgccgccggcgggtttcgcggcgtcgccacgctcgtagacgtcgggggaagctccggcgcctgcctcgagatgatcatgcgcagggtccccacaatcaccgagggcatcaacttcgacctccccgacgtcgtcgccgcagcgccgcccatcgccgcaggtccgacaactgcctagaggcacacactagagcagacagaagggatctctgtatactctctgtgatcttggaatcagatcgtttgttggtttcccaaaatttttttaataatagggcacgaactgcctgccttgtgctaagaccaacacaacacaacacgccacaatcagtcttcgtcgtgtgttgtttcattacaggagtgaggcatgttggcggagatatgttcaagtccatcccctccggtgatgccattttcatgaagtgggttctgacgacgtggaccgacgacgagtgcacggccatcctgaggaactgccacgccgctctgccggacggcggcaagctcgtggcctgcgagccggtggtgccggaggagacggacagcagcaccaggacgagggcgctgctggagaacgacatcttcgtcatgaccacctaccggacgcaagggagggagcgctccgaggaggagttccgccacctgggcgtcgacgccgccggcttcaccgccttccgagccatctacctcgaccccttctatgccgtcctcgagtataccaagtgatctccactccatccgcccaaatctccttgcgagttgaatagcagaataacgaacagataaataaagctattccattcacgttggaatccgaatctctgcctactgtactcaacgttagcttctgtaaccaggatctctctttcaagcatttccaagcttttgatgacaaaatcataattttgagctcattattcaagcattatattct

SEQ ID NO: 15817 - DNA, 784 bp, Zea mays
  Clone ID: LIB3062-002-A1_FLI
acttaaacagagcaagccgccgcggcggcgaccggccgaccgacgccgaggctgcgcgccctgcgccgggatcgagaggggaaagggaaggggaccagccggctcgcttggaggctggagctcgccccggcgggcccatggggggacgcctggtgtccatgctccggtggccgccggacctgggcctgcccagcctggccgcgctgctccccgcgccgcccgcgcacctccgggtccaggtccaggagtggtggcagtggcagcggtcgcggcccgagcagctgggcgcggcggcgcggcggtggcccgagctcgtgcgggacgtcccggtcctggtggacgccgcgctgtggggcgtcgtcacggccgtcgagtccgtcgcgctcgtctccatgatgtgctgcttcttcctctgctgcggctgcacgctctgacgatggactccgcagtgccgcagccaagcaaagtaagtaccgctgccgcctgccaagcaaagcaagtactgctgccgcctgccagtatgggtgatgattcctccgtccgtccccatggcgtccgatctcttcgggtttttttttttactgcgtgttggttgtggtggatcagctgtggctaggtggagttactgtcatggcaatggtaactaggatgtgatctgtgattgtatttgggcgccagttctccgccattttgagatctgacttgaagcagggtgctgtagcgatagtgcgggaaggggattgctaataaattggaagtaggtgcgtggtgggaacgcgaaaat

SEQ ID NO: 15818 - DNA, 1260 bp, Zea mays
  Clone ID: LIB3062-002-A8_FLI
cgccgactgaaggtgaatcttcagacagccagattggttggtgtctagtgtgtgcgaagatggcgtagaaaagactgagagacagttggctcacacagacaattgacaactgactatagtatctgcctgcctggctgatgctgatagagatggggactcttgtcctgctgtctgttcttgtataaatctccgttgtcaaatatttatcgtccgattatttatttttaaactaaacaacgacaaataaaaaagaacgaggttgcaaaagatagatacaaaccaaaggatgtcgtcgctgtgcgctgatctgatcactgccactctgccaggtactacctcaaggacgcggtgctggacggcggcatcccgttcaacaaggcgtacgggatgacggcgttcgagtaccacggcacggacgcgcgcttcaaccgcgtgttcaacgagggcatgaagaaccactcggtgatcatcaccaagaagctgctggacttctacacgggcttcgagggcgtgtcgacgctggtggacgtgggcggcggcgtgggcgccacgctgcacgccatcacgtcccgccacccgcacatctccggggtcaacttcgacctgccgcacgtcatctccgaggcgccgccgttccccggcgtgcgccacgtgggcggggacatgttcgcgtccgtgcccgccggcgacgccatcctcatgaagtggatcctccacgactggagcgacgcgcactgcgccacgctgctcaagaactgctacgacgcgctgccggaaaatggcaaggtcatcgtcgtcgagtgcgtgctgccggtcaacacggaggccacccccaaggcgcagggcgtcttccacgtcgacatgatcatgctcgcgcacaaccccggcggcaaggagcggtacgagcgcgagttccgcgagctcgcaaagggcgccggcttctccgggttcaaggccacctacatctacgccaacgcctgggccatcgagttcatcaagtgaaccaccgtcgccgcgatgagatggcatggctgccacatgctttgcttgcttggtcctcgtatcgtacgtcgccgtcgtcgtcttcttctggttattgcgctgctacctcgctgctctcgcgtatgcatgtacttttgcttaattttctttcttcatatcatgcactctggctggcctagactgcccccgatccatggtggccggtacgtcttgtcgagctcttgcatgtcgtggattctaaattcttcttctgcgtcg

SEQ ID NO: 15819 - DNA, 993 bp, Zea mays
  Clone ID: LIB3062-002-C11_FLI
ggttggccagccggcgactgcgtgtctctgtgctccgtggtccctttccttctgcgagaattgcagagcaattggggtacacagcacaggcacatgaatacaacacaacagtttgctctctgattcgatcgatccaactagcctccaagcatggtgttcggccggagcaaatcaacttcgtcgacgacgccatccgcgccctcaaaggcggcggctgcgtgctccgagctgcgcaccgcgtaccacgactgcttcaaccggtggtacgcggagaaattcgctaaggggcagtggcagagggacgactgcgccgaccactggcacaagtaccgcgcctgcctcgaggaacatctggaagacaagcatctgaggcaaatcctactggatgcagaaacttctgcattttatgccatgcctgaggccaaccctccctcgggacaaggaactacaaaatgacaatccacctgattggttacccgcaccatctcatcttgggtcaccgtatgcgtcgactttatttgagattatgtttggttgcttatatgtgggagtcacaacctgcatgagtggatgcaaaataagtcattttaatgttattaacctgcatccacccatacgtttaaaattatcgtgtttaaaattatcgtatctggctgaccaggacggcggcagcctgcgcatagacgcgcagccatccaatcaggctgatatctccttcaccatatgtcatatcggacttcattcaatcaggatatatagaaccttggtagatgaactagaaactccttggatcttgacaattgttaggcccctggatcatgtaacacttaacaagcaaaatttgcgtgtgtcagaatggtgtgtgccctgctatctggaaaccttgcaacagttgagaatagaatcagctgtagagctgtacatgttgaagaacgttgtgtttcaactgtggcttagcttttagcagagtttgttgagtaatatgtttcggac

SEQ ID NO: 15820 - DNA, 1417 bp, Zea mays
  Clone ID: LIB3062-002-C7_FLI
tcctgcgccacacgccgcggccgtctccgggcaggaaggaagggggcgggaagatgatgatgacgcgggcaccgatggggccgatggagggcgcggcggtggacgagatggtgcgccgcctcgtggagggcggccgaggcgggcgccaggtgcagctgtccgaggcggagatccggcagctctgcgtagagggcaagcgggtgctcctctcccagcccaatctcctccgaatccacgccccagtcaagatctgcggtgatatccatggccagtttgtcgaccttctgagattattcgatttgggtggttatcctccagcttcaacttacgtattcctcggagactatgtcgatagaggcaaacagagcctggagactatatgcttgctgctggcgtacaaaatccggtaccccgaaaatattttcctgttgaggggtaaccacgaggatgcaaagatcaacagagtctatggtttttatgacgaatgtaagaggaggttcaatgttcggctgtggaagatattctctgattgcttcaactgcctgcccatcgcagcgctcatcgatgacaagatactgtgcatgcatggtggcctctcgcccgaattgactagtttggaccagataaaagatattgagcgacctgctgagattcctgattatggtctcctgtgtgatctgctttggtctgatcctagccccgatggagaagggtggggggagagtgacaggggtgtctcgtgtacgtttggtgcagataaacttgtagagtttttggagaagaatgatctcgatcttatatgccgagctcatcaggtggttgaagatggctatgagttctttgcacaacgaagattagtgacaatcttttcagctccaaattattgtggagagtttgataatgttggcgctcttttaagcatagatgagagcctaatgtgttcatttcagatcctgaagccaactgatatgggtccaccgcatgcaagaaaacaaattccaaataagccaacaagagggtgaagccttggaccagcatccaatacttccagttccagtatcatgatgatcgtcagtcagctcaaagggggtgatctgttgtttggatagttggatccaccagggcctgacattagacatccatcagccaattaatccctttagccaccctttactcgtgtcttgggaggcggcttggctgtaaaggatattctgtacagcatttagttggattcaacacatcatctgttttactgttcttcctgccggcaagggacctcattggcagcatgacatacaatagatgttagtagtctcaatttgttttccttagcttctgccttgcgtttttttttttttttggtgcgggacttgatgtatggtgattttatatctttgtaatatgtagatgttgcagg

SEQ ID NO: 15821 - DNA, 1172 bp, Zea mays
  Clone ID: LIB3060-082-D5_FLI
ctgaattgtgggtctccggcgatggcggctctagctccatccaagattctgggcaccaagctcaacttcgccggctcctcccgctacgccacggcagcgcccaccgcgggggctcagaagatcgtctccctcttcagcaagaagcctgcccagaagcccaagccctctgcggtgtcgtcctcttctccggacatcagcgacgagctcgccaagtggtacggtcctgacaggaggatctacctgccggatgggctcttggaccgctcggaggtaccggagtacctcaccggagaggtccctggagactatggctacgacccttttggcctgggcaagaagccagaggacttcgccaagtaccaggcctacgagctgatccatgccagatgggccatgctcggtgccgctggcgctgtcatcccagaggcgtgcaacaagttcggcgctaactgcggccccgaggccgtctggttcaagaccggcgccctgctcctggacggcaacaccctcagctatttcggcaacagcatccccatcaacctggtggtcgccgtgatcgcggaggtcgtcctcgtcggcggcgccgagtactaccggatcatcaacggactggacctcgaggacaagctgcaccccggtggccccttcgaccccctgggcttggccagcgaccccgaccaggccgccatcctcaaggtgaaggagatcaagaacggccggctcgccatgttctccatgttcgccttcttcatccaggcctacgtcaccggcgaaggccccgtcgagaacctcgccaagcacctcagcgaccccttcggcaacaacctgctcaccgtcatctccggcgccgccgagaggacgcccagcctgtgaggacgcgccacaagccggcagcgatgccaagtcatgcgctgctgccgtccttgattttaccggggaaagagctgtgtgtgagggtctgaagtgaagaacgtgccatgcccatgcgtgtacattatcgagagggggaagaaaccttctcattctgatctctgatatgactgctgcttcagattgcgcctgagatatgctaagttttttaaagctaattagttcgtgcacattaagggtgtgtttgagttggattatttgtgaatgctagcttattttaacttatttatgattctaaagtg

SEQ ID NO: 15822 - DNA, 185 bp, Zea mays
  Clone ID: LIB3060-082-E1_FLI
gctcgtcctggcgcttcttgaccgcgccgatcgcgcccgtccaccaccaactcatcgcggctggggctcgatttggcggcgtgggcgggaggaaggagggaagctgggatcgggattcgggagggaggaggcgaggagcagagcaggggaggggaggggaggggaagcggtggagacccttgtcc

SEQ ID NO: 15823 - DNA, 738 bp, Zea mays
  Clone ID: LIB3060-082-F2_FLI
gcctgcaaaaaggagtttgtcatggcgtctaagcgcatcctcaaggagctgaaggacctgcagaaggacccccccacatcatgcagtgcaggtcctgctggtgaggacatgtttcattggcaagcaacaattatgggaccacctgacagtccctatgctggtggtgtttttttagtgaacattcatttcccgccagattaccccttcaaacctccaaaggtttctttcaagacaaaggtcttccatcctaatatcaacagcaatggaagtatatgccttgacattctcaaagagcagtggagccctgctttgacaatttctaaggtcctgctctccatctgctccctgctgaccgaccccaacccggacgaccctcttgtcccggagattgcccacatgtacaagacggaccggccgaagtacgagtcgacggcccgcagctggacgcagaagtacgcgatgggctgacgaacgctttcctgctcgtccacccgactggcgtctcaagaaagtcgttcctgggcgccattgttcccttggatttgttgttggtcgtcgtgtgtatccctgatccatctaggatcatcgtattgtattgtagtgtatgtatatcgtcggcctaccatcgttgccattcaccatagtgaggtggttggacatgcttcgcctatatgcacctgtgcttgccgtccttcgggtcggtgctctttggttaatgttcatcgaagacgttgattt

SEQ ID NO: 15824 - DNA, 1845 bp, Zea mays
  Clone ID: LIB3060-082-G1_FLI
gcggttgatagctcggatcttctgctggcggagttcgtcttggaggagaagagagagagagagcgcgcgcgccgggatcggagccaggaagcatccagcagcgatggcgggcggcggggtggcggcgctgggcgtgaagacggagcgcgcggcgcagtacaaggggcgcatgacgctcgccgtcgccacgacctgcctcgtggccgccgtcgggggcgccatcttcggctacgacatcggcatctccggaggcgtgacatccatggacccattcctggagaaattcttcccggtagtgttccaccggaagaactccggcgggaagaacaactactgtaagtacgacaaccagggactagcggcgttcacatcgtcactctacctcgccggcctcgttgcctccctcgtcgcgtcccccgtgacgaggaactacggccgcaaagctagcattgtctgcggcggcgtgagcttcctcatcggcgcggccctcaacgtggccgccgtgaatctggctatgctcatcctcgggcgcatcatgctcggcgtcggcatcggttttggcaaccaggctgtgccgctgtacctgtcggagatggcgccggcgcacctccgcggcggcctgaacatgatgttccagctcgcgacgacgctgggcatcttcacggcgaacctgatcaactatggcacgcagaacatcaagccgtgggggtggcggctgtcgctgggcctcgcggcggtgccggcgctgctgatgacgttgggcgggctctttcttccggagactcccaacagcctcattgagcgcgggcgcgtggaggagggtcggcgcgtgctggagcgcatccggggcacggccgacgtggacgccgagttcacggacatggtggaggcgagcgagctggccaacaccgtcgagcacccgttccggaacatcctgcagccgcgcaaccggccgcagctggtgatggccgtgtgcatgccggcgttccagatcctgacgggcatcaactccatcctcttctacgcgccggtcctgttccagagcatgggtttcggcgggaacgcgtccctctactcctccgtgctcaccggcgccgtgctcttctcctcgacgctcatctccatcggcatcgtcgaccgcctcggccgccggaagctcctcatcagcggcgggatccagatgatcgtctgccaggtgatcgtggcggtgatcctgggcgtgaagttcggggcggagaagcaactggcgcggagctactcggtcgcggtggtggtggtgatctgcctgttcgttctggcgttcgggtggtcgtggggcccgctgggatggacggtgccgagcgagatcttcccgctggagacgcggtcggcggggcagagcatcacggtggccgtgaacctgctcttcaccttcgccatcgcgcaggcgttcctgtcgctgctgtgcgccttcaagttcggcatcttcctctttttcgcggggtggatcaccgtcatgaccgtgttcgtctacgtcttcctgccggagaccaagggcgtgcccatcgaagagatggtgctgctatggcggaagcactggttctggaagaaggtcatgccggacatgccgctcgaggatggctggggcgcggctgagggtcatgcggcacctgccagcaacaatcacaagggatgactggagtgaagcatgcatggttgcctggttggtttcgtggacactttatataataactgaagaaaacaagacacacactaacatgtaggcggctgcttattcttattgtattttgtataaagcaggctgtgtgatatgcagggataaaaacgaacgagatcgttccaaat

SEQ ID NO: 15825 - DNA, 505 bp, Zea mays
  Clone ID: LIB3060-083-A2_FLI
ctgtgctaccgccgccgccgccgcaagacttcgtcgggcactttgccggcgacgatttcccaccagcccaacaggatcagaggaggtgatggcgaggagtgacagctgcctggcgcgcgtgggtgccggaattgctatcggtggcgcggtcggcggagccgtcggtgcttgctatggaacttttgaggcgttcagatacaagatccctggattgctaaagatcagatacattgggcaaaccaccgttggcagcgctgcgatttttgggcttttcttgggggctgggagcttgattcactgtggaaaatcctactagtttgtttcccttttttttctgaagtctgaacacacctttgtcgatgggcttcagtgaaaactattcaatgcctgtttcatgtaacagctaatagctcagggttggaaaagaacaatcaagttatgtcctagttttggtgtggatggaaatagaatcaacgttcatctgcacgagaatcgtcaatttctc

SEQ ID NO: 15826 - DNA, 1238 bp, Zea mays
  Clone ID: LIB3060-083-B8_FLI
gagacatggcgccccaccagcagcagcgggcgctgctcctgttcccactcgtcttcctcctcctcctccttgccccgcccctcgccggcgcgtggggaaaggagggccacatcatggtctgcaagatcgccgagaagtacctgtcggagaaggcggcggcggcggtgcaggcgctgctgccggagtcggcgggcggggagctgtcgacggtgtgcccgtgggcggaccaggtgcgctggcactaccactgggccagcccgctccactacgccaacaccccccaagtctgcaacttcaagtattctcgggactgccacaattctcgtggccagcaagggatgtgcgtcgtcggggctatcaacaactacacggaccagctctacagctacggccagaagacttcgtataacctgacggagagcctgatgttcctggcacacttcgtcggcgacgtccaccagccgctgcacgtaggcttcgaagatgacgagggcggtaacaccatcaccgtccactggtaccggaggaaagcaaacctccatcacgtctgtgcctgctgcacctcttcgatgccaaatttcagatgtgtatactcaccaggtagccagtcttgagtctctgagagtcagaatcctgtgtttttgctaggtgtgggatgtcagcattattgatacggcaatcaaggacttctacaacaagagcatggataccatggtagaggctctcaagatgaatcttacagatggatggtctgacgacatcgtccactgggaaaattgcaagaacaaacacgcgacctgcgcgaacgactatgcgattgagagcatccattattcctgcaactacgcctacaaagatgtggagcaagacatcactctaggagatgattattttttcagtaggtacccgattgtggagaagaggttagcgcaggctggaatcagattggcgttggtacttaatcggatatttggtggaggtgaagcggatgatataccactacaagtacagtaacagctctaataaaaggaagcatagctattacaaggatttgtccattacgtcgtctatacatcaataaattggcatgaatttgtaactccattgctatacatcaataaattggcatgaatttgtaacaattgaaaggatcaagatgccacccttgaattgcacttttccaaatttcttgaacaaaataaaatttataatcaagttcaactttctctcttctgact

SEQ ID NO: 15827 - DNA, 1532 bp, Zea mays
  Clone ID: LIB3060-083-F5_FLI
cctcttcctaccattagcagcagcagtagccacagccagtaccagcagacagcagggaggaacacgatgagcggcgccggtccggatctgcagctgccaccggggttccggttccacccgacggacgaggagctggtgatgcactacctctgccgccgctgcgccggcctgcccatcgccgtccccatcatcgccgagatcgacctctacaagttcgacccatggcagctcccaaggatggcgctgtacggcgagaaggagtggtacttcttctccccgcgggaccgcaagtacccgaacgggtctaggcccaaccgcgccgctggggccggctactggaaggccaccggcgctgacaagcctgtgggcacgcccaagccgctggccatcaagaaggcgctcgtcttctacgccggcaaggcgcccaagggcgagaagaccaattggatcatgcacgagtaccgcctcgccgacgtcgaccgctcggcgcgcaagaagaacagcctcaggttggatgactgggtcctgtgccgcatctacaacaagaagggcggcgggctggagaaggcggcggcgccggcggccggcggcgaccacaagcctgtgttcgccacggcggcggtgagctccccgccggagcagaagccgttcgtggcggcggcgggcgggctgcccccggcgttcccggagctggcggcgtactacgaccggccgtcggactcgatgccgcggctgcacgcggactactccagctgctcggagcaggtgctgtccccggagcagctggcgtgcgaccgggaggtgcagagccagcccaagatcagcgagtgggagcggaccttcgcctccgaccccgtgaaccccgcgggctccatgctcgaccccgtcgtcggccacgccggcggcgacccgctgctgcaggacatcctcatgtactggggcaagccgttctagacgacaccgcccatcatgtcctgaggggaggtgggggtggcgaagcatcctcggctgcggttggttggttgattgatctgtcttgggcagcgcaatgcaatgcaaccgcacggtgtgggcttgagtcaggcgagccgccattgttgacttgcaaggaggatataatatgaaactatagctggattacatggagaggcggcaatgagaccgtctggccccgccgcggaagtgagacggagacggagacggatggcgcagtgcatcgggtgtggtggatcgtgcgcggcatgtgtgtgtgtggctgtacatatacatactgtacatgattggttcagtgcagggtttctgttccttcattgattagttattatactaataagtactagtaattttgtaagggcttgtagttgcagtctccgtactggtggtaggtagtgcaggccatattcgtcatcgccaagcttcgagtgtacttactcctacaatatatattttacagtatatattgtagctgtgttggctcttcggaagaaaaaaaatggaaggggaaaatagggattatgttattttgattattc

SEQ ID NO: 15828 - DNA, 1592 bp, Zea mays
  Clone ID: LIB3060-083-H4_FLI
ccgggcaaacaacactcacatcttacaccagccgcactcccgtgtcctcctctccgagacgagacggacgggacggcaggcaccaccgcaccggcgccaccccacccgccggctcagagcgggggcccggccacccgaatcacacagatcggaacgccggaggaggagcaacgcgggcgcggagaggcccgccagcgaaggcgcagtgcaagctctgggttcccggatccgataccaccggcctctcggcgagtgtgtaatccagcgagcgagcgctcggttttagccgtgagagcgggagatgagtgctctgaagaaatccgacaagaaagccgccctcgacttcgcggcatggagcttcaatgtcaccacgtcggtcggactcatcatggtcaacaaggcgttgatggctacgtatggattcagttttgccacgacattaactgggcttcattttgtgaccactaccttgatgactattgtatttcgatggttaggcctgagccagccatcccacttacccctagcagatctagttaaatttgtgatattttcgaacttgtcaattgttgggatgaatgtgagcttgatgtggaactctgtgggcttttatcagatagcaaagctgtgcatgatacctgcatcatgtcttctggaggttgtctttgatcatgtacattattcccgggacacaaagctgagcataatggttgtgcttataggagttgcagtctgcacagttactgatgtcagtgtgaatgcaagaggtctaatcgcggctgttatagctgtttggagcacagctttgcaacaatattatgtccactttctccaacgcaagtactctctgaactcattcaacctgctgggccacactgctccagcccaagctgggtcactcctgctagtgggaccatttgcagattacttgttgacaggcaaaagggtggatcacttcagtttctcatcgcttgctctgtttttcctggcactctcatgcttcatcgccattggtgttaatctgagccaattcatctgtattgggcgcttctctgctgtatccttccaagtcctaggccacatgaagaccgtacttgttctgtcccttgggttcctattctttggcaaggagggcctgaatcttcaggtagtccttgggatggttctggccgttcttggaatgatatggtacgggaacgcatctgccaaaccaggcggcaaagagcggcgcagcgtcctaccgctgaggtctgcaagtctcaagggaagttcagaagaaaagggtggtgccgagaaatagtcttgctctctctgactgccaacttgaatggggagttttccgttccaaggttgaatttctggtgaggtgacgtgaagtaccacatattgggaactcttgcctaatgtttgacgcagaggacaaactcgttccatctagaaactcaggatcgttatagttacaggtatactgtaaaggttcatttttttttggcgctctgaatcatttgcagtgaggggaaagacagacatggttgttacgagtcttcaagacagtttttttatcgaatatataatgcagttgtttgaggaac

SEQ ID NO: 15829 - DNA, 2897 bp, Zea mays
  Clone ID: LIB3060-084-D1_FLI
tctcccccgtctcccccctccctctcccttgcttccctctccagtccccagcgcgcgcgacacgacacgggccaatcacccagccgccgccgccggcgatcgccggaactcggcgccggtgcttccgagcacgctccgctcggaaccatggtgaggagcgggagcatacggcggtccgcggtgcccgcgcctatgccggcgccggcgtttaccgtgtctcccgccgactacaggctgctggaggaagtgggatacggcgccaacgccgtcgtataccgcgcggagttcattcccaccggccggacggtcgctgtgaagtgtctggatctcgatcgggtcaacagtaacctcgatgatgtaagaaaggagactcaaactatgagcttgatagatcaccctaatgtcatcaggtcttactgctcatttgttgtgggtcataatctttgggtggtaatgccattcatgtcagagggttcatgcttgcacctaatgaaggttgcatatcccgatggttttgaggagccaattattgcctctattctaaaggaaacactcaaagctctagactacctccataggcaaggacatattcatcgtgatgtgaaggcaggtaatatccttattgataatcctggtgtagtcaagctcggggactttggtgtctctgcttgcatgtttgatagaggcgatagacaaagggctaggaatacatttgttggaacaccatgctggatggcaccagaagttctccagcctggaactggatataatttcaaagctgatatatggtcgtttggaataactgcactagagctggcacatggacatgctcccttttcgaagtaccctcccatgaaggttcttctcatgacgctccaaaatgctcctccaggtcttgactatgaccgtgataaaagattttcaaagtccttcaaggaaatggttgcgatgtgcttggtgaaagatcaaacgaagaggccaacagctgaaaaattacttaagcattcttttttcaagaatgcaaaacctccggagctaactgttaagaacattttaactgatttgccccctctttgggaccgtgtaaaggcactccagctaaaggatgcagcacaactagctttgaagagaatgccttcttcagaacaagaagcactttctatgagtgagtaccaacgaggtgtcagtgcatggaacttcgatattgaggatctaaaggctcaggcatcactgatatgtgatgatgatccacctgaaataaaagaagacgatgacactggtagaataactgacattgataaggatacatcttctgacgattattttggaaagacagcaccatcgaatggaaataactgcagtgatcgttcttctgtgccagcaaatcctggtcaaaatggtcccgaaataaatgaaatattgtcttccaacaatgggaatgcctacagtgaaaggaagcctgatggacgtaaaaacccagaatcagaaaatgattcattgccctcgacgtcgaagcatgatgctgatgggaaagattatagatgtgatttcaggcaaaaacagaggacatactcaggtccagttctgcaatctggtccgaataatagttcgatgactgaaaggggccacattattgaaagggatgcaggagttcaatctgtatctgataaacaaaagaatggtacaagaagagccaataatcttagtggtcctttgtcacttccaactcgtgcttctgcaaatagtctttcaagagccaataatcttagtggccctctgtcacttccaactcgtgcttctgcaaatagtctttctgctcctattcgatcttctgcaggttatgtaggctctttgggtgataaacctaagcgcactatggtggaaattaaaggccgcttctcagtgacatctgagaatgtggatcttgcaaaggttcaagaaattccagggagcagtgcctcacgtaaattgcaagaggggccttcactgagaaaatcagccagtgttggtgattggtcagcgaatgataagacaacgtctactaatcatcaaaggaaggaactctgcaatagctctgtatctacatcaattctgattccgcatcttcaaaaccttgtgaagcaaactgcattccagcaagatctgattacgaacctactaagtagcttgcaacaaaatgagagagtcgatgcagctcagtcaagagtccagagcacgacgagtgatacagtggttgaagctgctactgctgagagagaacactcgttacttgttaaaatttttgagttacaatctaggatgatttctttgactgacgaattaattgcggcaaagctgaaacatgttcagctgcaagaagagctaaatgtactctactgccaagaagaaatcctggatatgagagaggacgagagcgaagaagcatgatgcggtggagcctgcccccctttttttactactactactgagggggactaaaagccacatgctctaagcccgtgcaattgaggcttggctaactggctgcatacaatacaaggactcgaaggatcattggccaactccgggtgcaatcgaagaacctgcaatgagtttgatggagcggggtttatgatcgttggcctcggatttgaactgttatgtatattcagtcgacccgttcgatttctgactcgggtttggtttgttcagtgagcttttaaggcgtcttgcgatgcgcatctacttgatcattaagatggctatgacgccagcctctaatatatactactagtggtagtaataggtatagcgtccgtatagtaccattgtacttgtacctcagaagtcagcaagactgcgacaataattgcatcgcgtctgtagacagcggaatgcatgagtagctactgtagtac

SEQ ID NO: 15830 - DNA, 1294 bp, Zea mays
  Clone ID: LIB3060-084-D5_FLI
ctctcctcccaccacacccggtcgtcgttgtcgcggcgtgagcgagcgagaggggaaaacccaaaaccctagcacccccgccccgtcgccgacggccgccggagtagagagatggcggtggacgaggtgaactcggtctacgtcggcggccttccctacgaggccaacgaggagatgcttcgcgacgccttcgggtactacggcaccatcgtctccgtcaaggtgattaatgatcatgctgtcaaaggcaagtgttatggttttgttactttcactcaccccagagctgctgagcaagcaattgcgggcatggacggcaagaaattaggcaaccgtattgttcgagtaaatgaagtgcgtacaagaggcccccgcgattttggccgagatggtttcagacgagatccaagaaggtatggtagagatccatactgggacagaagggacagggaacggagctatgatcgtgaaagagatccctaccatgacagggatagtgatagatcccgtgagcatgatagagaaagagattatgaacatggtggatttaatagagaaattgactatcccatggaccgagatcgtgaaggagatgagagacgtcctagagaacatgatcgtacagcagaaatgcataatgtggattcagataatgacaaagataaggaacatgtatcaagaaaaaggttcagccgcccaaaaggtcgtgatagcagagatttatcaagttccagtgatggtcttcaaaatgatggaaaacatcagttggataaaactattcagatgcgcgaggaccttgaaaatgaggttaaccagattaaggataaaatatctgggaaagaacagcacattgcagatttgcagaagaaagctcagaaactagaggatgaactggttgccgcacggaaagtatcttcagaacgacagttggcggttacagacctgtacaaacatttcctccaacttcaggactacaatgatagggtcaaaacagctgaacagaggctgcagtctctcgttgatgctgccttggtcgagctcgacatggccgaagatgctactaccagagatggctcgatgtacgagaacggcgtgctttgaacacccaactgccatgggtttgtgtggttgctgatttgttagatttgtagtttgcgtctgccatgtaatagaactgcattgtaactagaaacaggaaaaatgttgtgtaagggtcggagaatctgctgtcgtggtccctgagcccggatttctctttcgaagttggattcattaaccggcctgattattcctg

SEQ ID NO: 15831 - DNA, 929 bp, Zea mays
  Clone ID: LIB3060-084-F2_FLI
gaaaagaagaataccgtatcacttaaggtttgccagtagccgcgataacattgaaccgaccgactatcacgaggtccaaaaaataaccaccacaaaagtaccaaccaaccacaaataaagtttaagcggacacgcgacaacaacctgctgggcaagttcgagctctccggcatcccccctgcaccccgtggtgtgccacagatcaccgtgtgctttgacatcgacgccaacggcatcctgaacgtgtctgccgaggacaagacaacggggcagaagaacaagatcacaatcaccaacgacaagggccgtctctccaaggaggagatcgagaagatggttcaggacgctgagaagtacaagtctgaggatgaggagcacaagaagaaggtggaggccaagaactcgctggagaactactcctacaacatgcgcaacacgatcaaggacgagaagattgcgtccaagctgccggccgatgacaagaagaagatcgaggacgccatcgacgcggccatcagctggctggacgccaaccagctcgccgaggcggacgagttcgaggacaagatgaaggagctggagagcctctgcaaccccatcatcgccaagatgtaccagggcgcgggtgaagacatgggcggcgctggcggcatggacgaggacgcccctgccggcagcggcggccctggccccaagatcgaggaggtggactaagcggtttgttgtcagtcttgagtgtgctgcagttgctggctggcccagttgctgccgagagttatcgtcagttggtgcggtgtgtccgcttaaactttatttgtggttggttggtacttttgtggtggttatttttttggacctcgtgatagtcggtcggttcaatgttatcgcggctactggcaaaccttaagtgatacggtattcttcttttc

SEQ ID NO: 15832 - DNA, 1793 bp, Zea mays
  Clone ID: LIB3060-084-H1_FLI
cagtcctccgttttctcctcgtcgctcgccccggttgtctcctcctcgacctcccccgtcgcgacaccgcccgatctctctagcgcacggcgggccggagaagaggaggaggggggggacgatctcattcatcggaccggcgtgcctgtgtcgtctgctgttttcgtttttttctttactctttttttttcctcctttgcttgttcaattcaatcagtatattaagatttctgatttgggggcggctcgccatgggattcggaatggggaataataacaacggggcgagctcctcgtcgtcgcggctggaccccgcggcgccgctgctgccgcgccacggcagcagcgggggccgcgagggtggtggcctgtcgtcgcagcccaagacgttcgccaacgtcttcatcgcggtggtcggcgccggcgtgctggggctgccgtacaccttctcgcgcaccgggtgggcggtggggtcgctgctgctcttctccgtcgccgcgctcaccttctactgcatgatgctgctcgttgcgtgccgccgccgcctcgccgacgagcaccctaagatcgcctcgttcggggacctgggggacaccgtgttcggcgcgcacgggcggttcgccgtggacgtgatgctggtgctcagccaattcagcttctgcgtcggctacctcatcttcatctccaacaccatggcgcacctctatccgattgccgcgtcgtcctcctccgcgctcctctcccccaaggcgctcgtcatctgggcgatgctgcctttccagctggggctcaactccatcaagacgctgacgctgctcgcgccgctcagcatcttcgccgacgtcgtcgacctcggcgccatgggcgtggtcctcggccaggacgtcgccgcctggctcgccaagcccgtgcccgtggtcgccttcggcggcgcaggcgcgcttctctacgggctcggcgtctccgtgtacgcgttcgagggcatcggcatggtgctgccgctggaggcagaggcggcgaacaagagcaagttcggcgtcacgctcgggctgtccatggcgttcatcgccgtcatgtacgggctgttcggcgtcatgggctacgtcgcgttcggcgacgccacgcgggacatcatcaccaccaacctcggagccgggtggctgtcggccgccgtgcagctggggctctgcatcaacctcttcttcaccatgccggtgatgatgaaccccgtgtacgaggtcgccgagcgcctgctccacggcaagcggtactgctggtggcttaggtggctgctggtcgtcgtcgtcggactcgccgccatgtacgtgcccaacttcacggacttcctggcgctcgtcgggagcagtgtctgcgtcctcctcgggttcgtgctgccggcctcgttccacctcaaggtattcggcgccgagatggaatggcccggagtgctgtccgatgtcctgctggtcgtgatcggcctcgcgctcgccgtgttcgggacgtacacgtcgctgctgcaaatcttccaatcgtcaagcgcttgatcgacgcgcgttccgctgcgcgtcgatcatcgcattctccagggcaactacgatacatgtgttgagtgttgttcgtgagtggcttgtattggacgggggaaatctgtacgcttttcgtaccacagatttcagttactcccggtagcagtgtatgtgtatgcgtcctagatgttcctcctgctgtgcacgatgggggatacgatgaaaggacaagattttcacttcgtggaaaaagcttattttgctgtt

SEQ ID NO: 15833 - DNA, 1060 bp, Zea mays
  Clone ID: LIB3060-084-H7_FLI
ctcctaccactaccacagcaccagcgacggaccgggcaggcagagaaaaagcagaccagacgagacctctcgcgttccgtcctcctccctgcccctgctgccgttccccttcttcctcagttctcccgcccgctgctgccctccgtccgcgtccagatcccgccaccaaccgatccggcgccctccagcatggcgggggcgggggcgaaggcggcgggagccctggctctggcgctcgtgctcgcgctcgcgggggccaactcggagggcgacgcgctctcggcgctgcgccggagcctcagggaccccggcggcgttctgcagagctgggaccccacgctcgtcaacccctgcacctggttccacgtcacctgcgaccgcgacaaccgcgtcacccgcctagatcttggtaatttgaacttatctggtcatctggtgcctgagcttgggaaactggagcatcttcagtatctggaactttataagaataacattcaaggaacaatcccttctgagcttggcaatttgaagaatctaataagcttcgacttgtacaagaacaacatttcggggacaatacctcctgcccttggaaagttgaagtcccttgtattcttgcgtctcaatggcaatcatttgactgggcccatcccaagggaactcgctggaatatctagtctcaaagttgttgatgtttcaagtaatgatttgtgcgggacgattcccacgtctggaccatttgagcatattcctctgagcaactttgagaagaacccgcgcttggaaggtccagagctacaaggcctggccatatacgacaccaactgctagagggcaccacgaagaaaagaactgctagaaagtaacgagcgaacaaggttaccagaaattgggcgatatagatttactaggtctggatctgtaatcctccctgcatagctcttattcgtaactcgctgtcggcacgaaagttggtgtgtgttttagcagaatgctttctgtccgtgaaagtaaacttgaaactgcttattacgactgaaatgatattgtcgttcccccc

SEQ ID NO: 15834 - DNA, 1624 bp, Zea mays
  Clone ID: LIB3060-085-C5_FLI
ctcgtgcttctgcttgcatcacggcgctgtaacctgcctgggcgatccatccatggcgtcgttagccaccagcacggccgccgccgccgccgggccacgcccacgcccagaccggccgcacgtcgtgcttgtgcccagccccggcgtaggccacctcatgccgatggccgagctggcgcgacgcctcgtgtcgcaccacgccctcgcggccacgcttgtcaccttcaacctctccggggaccctgacgcgaagtccgctgccgttctgtcctccctccgtgcagcaaacgtttccaccgccacgctccctgcagtcctcctcgacgacctccccgacgatgccagcatcgagaccgtgctattcgaggtgatcggccgctccatcccacaccttcgcgcttttctccgcgacgttggcagcaccgccggcgccccgctagccgcgctggtgcctgacttcttcgccaccgcggcgctgcccctcgcctccgagctcggcgtcccggcgtacatcttcttcccctccaacctcagcgcgctctccgtcatgcgaagcgccgtggagctccacgacggcgccggcgccggcgagtatcgcgacctcccagaccctctcccgcttcccgggggcgtgtcgctacgccgcgaggacttgccgagtgggttccgagacagcaaggaatcgacctacgcgcaactcatcgacgcgggccgtcagtaccgaaccgctgccggcatcttggcgaacgctttctacgagatggatccggcgaccgtggaggagtttaagaaggcggctgagcaaggtaggttcccgccggcttatccggtgggcccgttcgtccggtcaagctccgatgaaggctccgtatcgtcgccgtgtatagagtggctggatctgcagccgacgggatccgtggtgtacgtttccttcgggagcgcaggcacgctgtccgtggagcagacggccgagctcgccgccgggctggagaacagcgggcacaggtttctctggatcgtgcgcatgtcaagcctgaacggcgagcactccgacgacatgggccgggattactgtgacggtggcgacgagaacgatcccttggcatggcttccggaggggttcttggagaggacccgcgggcgtggcctcgccgtgtcgtcgtgggcgccgcaggtacgcgtgctgtcccacccggcgacggccgcctttgtgtcccactgcggctggaactcgacgctggagagcatctcgtccggcgtgccgatggtggcgtggccgctgttcgcggagcagcgggtaaacgccgtggacctgtcggagaaagtgggtgtggcgctgcggctgcgcgtccgcccggacgacgggctggtcgggcgcgaggagatcgcggcggtggtaagggagctgatggagggggaggacgggcgcgccgtgcggcgccggacgggggacctgcagcaggcggctgacctggcgtgggctcccgatggctcgtcgcgccgggcgttggaggaggtcgtcagcagatggaaagcgggggctattcgcagagcggcggtataacctggtggatttggttgcttttctcttggattttgttaagaaaataataacacttctgct

SEQ ID NO: 15835 - DNA, 1105 bp, Zea mays
  Clone ID: LIB3060-085-D1_FLI
cgccccgcgcgccggccggccggtcgattcccccactccactcgccgcccgcggctgggctgcgctgcgcatcgacgacggacgacgacacaatcacccccaccccccgtccaatcagcagcggacgagggacgaccacggccccccgtctgccgcacgcgcgcccgctctgccagctgctgctactactgctaaacctcgcccaccagtcgcgtgaggaaatagcaacctgctgagctcgctcgttcgctcgctcgcctgccttcttccctgggcaagctagctagctaggatcgaggaggagctctgcccggccatgcagcgtggggatccgctggtggtgggccgcatcatcggcgacgtggtggaccccttcgtgcgccgggttccgctccgcgtcgcctacgccgcgcgcgaggtctccaacggctgcgagctcaggccctccgccatcgccgaccagccgcgcgtcgaggtcggcggacccgacatgcgcaccttctacaccctcgtgatggtagatcctgatgcgccgagccccagcgatcccaacctcagggagtacctgcactggctggtcactgatattccggcgacgactggagtatcttttgggaccgaggtcgtgtgctacgagagcccacggccggtgctggggatccaccgggtcgtgtttctgctcttccagcagctcggccggcagacggtgtacgccccggggtggcggcagaacttcagcacccgcgacttcgccgagctctacaacctcggcttgccggtcgccgccgtctacttcaactgccagagggagtccggaaccggtgggagaagaatgtgatctcgacccggccgggtggaaattaataagatgacgggtaatcgggtatatgtatatatttatatatatatgtatatgtacgtgtatttgatctggtggcctttggttatatttgggtggggtgtatttgatatattatctgtggcagattggcgcattctctggcgcatatttgatagctacatgtatctatttatacagatataaagcgagcaataatatgcatatgagagggttcagccacatcagtcattactctctcctttt

SEQ ID NO: 15836 - DNA, 1485 bp, Zea mays
  Clone ID: LIB3060-085-D10_FLI
ctccgcagaactgcagaagcagcgcggcgcggccgttaactcggctccctcaccttgctgccccctccgcaggtgcaggcgctcgcttccgaattggaggtgccatttgccaggggcgtactccattgattcgggctgagttgtgcaaattgtgatagaactttcccgagattcaagcccatacaatgcagggcatctctatatgcggttcagttacctcaccccatggagcaaactgcagaagggcttgtgttgcaaggaacgatgtgaggctgccttgtgaagttaatgcagtaagccaggggttgcactctctgcattggtgtgcgcacaaaccgcaaatgaagaacaatggaagaagaatgaatgccgcagtgaaaactaatgctagatggttgtttggaggagatgggcgtagcaatgatgcaaggctggagcgcagtgagtctgctaatgaagatattttgatcttctacttccagatggatctacagacccggatacagtatgcattgaatatagaacagtttgatgtggcaaagcaattgagggaaaaactaaccgagattgaaacagaaattattaggcagcgtgaagctagaaggggttcaccaaagactgaagcccaagacaaagctctaaatcttatacgtgtgcgtgcagacttgcagaaagctattgacagtgaaaactatgctttggcagctggtctccgtgatgacattgccaaacttgaggttgagtctcttgcagtatctgctaaagctcttgcttatcaaaatgtgaaatatgcatttcgattagggcagaaagtacgtcacaatatacatggatatagaggcgtgatatgtggcatggacccggtgtgctgtgaatccaagtcatggatggagacagcaaacgtggataagctgtctaagggtccaaatcaacctttttatcaggtcctggttgatgtatatgttgatccagaactgctggttgcatatgtcgcagaagaaaatctttctgcagctgaagaatcagaaaagggaaggtttgatcacccctacattgagtttctcttttacggtgaggacacagctggggatttcattcctatcaagcagctccgtgagaagtatgaccagccacgctatgaagcttctggagatgaaagtgacaacgatggcaacacaaatagctgaaggtcaagtgccttcgtgttgctagagttgttttggaaccattttgattcacctccaccaactcagatgtgaagtgctgaactatctggtacagatgcagatgtaagacaaggcaaccattggcgaactgggcatcctcagtaacctgcagttattctctgcatatgccgtccaaccttgcagatcgaaaattactcttttagagttttaccgtcaccaatcgattaagccatgcttgagagaagctacgtgtgccttgcttttacattataataccatcgataaatataaacgaagg

SEQ ID NO: 15837 - DNA, 1472 bp, Zea mays
  Clone ID: LIB3060-085-H12_FLI
cgaccaatccctccagactccagtatccagactctctctcgggcctctcggctctcctctccccgatttccttccccacccgctgtcagtctcactccccccgcgcgcgctctctctttcctcgccttcgccgccggcgacgagcttgagctcgagctggttcctcgtatagaagacgacggccgcggtatggagcccatgaacgtagacaacggcggctgcggaggccttgacgcgcagatcgaacagctgatgcagtgccgcccgctcgccgagcaagaggttaaggcactgtgcgagaaggccaaggagatattgatggaggaaagcaacgttcagcctgtcaagagtccagtgacaatatgtggtgatatacatggacaattccatgatcttgtagagcttttccgaattggcgggaagtgtccagacaccaattacttatttatgggagattatgtagatcgtggctactattctgttgagactgtcacgatgctagtagcactaaaagtgaggtatccacatcgaattacaatccttcgtggaaaccacgagagtcggcagatcacacaggtgtatggattctacgacgaatgcctacgaaagtatggcaatgcaaatgtatggaagacatttacggatctttttgattattttcctctgacagctctggtggaatctgagattttctgccttcacggtggtctatctccatcaattgaaaatcttgatagtgtgctcagcttagatcgagtccaagaggttccccatgagggacctatgtgcgatctcttatggtcagatccagacgaccgatgtggttggggcatctcccctcgcggtgctggctacactttcgggcaggacatatcagagcagtttaatcacacaaacaatctcaaactcgtagctcgggctcatcaattagttatggagggatataactgggctcatgagcaaaaggttgtcaccatattcagtgctccaaattactgctatcgatgcggcaatatggcatccattttggaagttgacgactgcaacagccacacattcatccagtttgaaccagcccctaggagaggtgagccagatgtgacgcgaagaacaccggattatttcctttgagctgtcgatgttaccgtttcccagcctgtgtcgtgataatcgatgccaacgtctgctggatcaagggccagacagaaataacaggggaatgccgaagcactatgcccagagtttcacccttttcaggcgacagagaagggcggccatccacctacaactctggccgccctctgttttatgcactttttacagagtcgtggaactggccaaaaagaccggagtaccatttgcacctgtgtagcgtaagcttgtactacaaataggcgtgtgctaatctgtatcaccattcatcaattgcaacgaactgttgaactccttccatcagtaaagtaaattttggt

SEQ ID NO: 15838 - DNA, 868 bp, Zea mays
  Clone ID: LIB3060-086-G8_FLI
gcccaccgaattccctgcgattcctctcccctcgcctcctcgtctccccctaggggatcgtcggagaggaatcgcaaagagggccgtctcatccgagttaaggaagccatggagcacaaggaggctgggtgccaggcccccgagggacccatcctctgcatcaataactgtggcttcttcggcagcgcggcgaccatgaacatgtgctccaagtgccacaaggagatgataacgaagcaggatcaggccaagctggctgcctcctctatcgacagcatcgtgaacggcagcgacgccgtcatggagccggttgttgctggcagcaacacggtagtagctgttgcccaagttgagttgcaaacaatgaacgtgcagcagcccgctgatgttgccggacccagcgagggggtggcggcgatctccaaaggggggaaggtagggccgaaccggtgcagcgcctgcaggaagagggttggacttacgggattcaactgccggtgtgggaacttgtactgcgcactccaccgctactccgacaagcacgactgcaagttcgactaccggactgctgccagggacgccattgccaaggctaatccggtggtgaaggcagacaagctcgacaagatctagggggggttccctacggttgggtatcaggaagattgtaaaccgcggtaactcgtcatgcggaactgctgccttgccccccgcgcctttctcttccatgtttgctgctacaatcttgttgttgggcattgcagtgcacggtgcacacttgtgtagcccgcctcgagaattcctgcctctgcatctggtcagttctaaaatgatttgcatgttggctatgttgtgtaagctctaaaac

SEQ ID NO: 15839 - DNA, 1630 bp, Zea mays
  Clone ID: LIB3060-087-A4_FLI
gcaccgactctgatccaatttcacacgcatactagcgccgccggtagcagcaccggcagccgcgttcccctccgccatggatcccgcgaacagcagcgcgggcgccgagctcgacgacgcgtccgagtggcgcacccgggcgctgggcggcacggagtacagctggctccgcgccgtgccgggcggcacgggcaccacgctgctcgcgctccgcctatcccacggcgacgcggccgaggcggcgctgcgctccctgcgggacgcgcaccccgtcctccgcgcccgcctccggacctcttctccctccggcccgacgctggcgttccccgatccggcaccgccgttcctgctggcgccgatcccggccccgggctccgcgcccgacttccacgcgctcctcgagcacgagctcaaccgcaacccgtgggccgacgaccccgcgtcctccgacgacgccccggtcctcttcgcgacgctctacgagctcccagccgccacgggcggcgcggcgctgttcgtccggatccacacggtcgcgtgcgaccgctcggcggcgagtgcgctggccagggagctcgtcgcgctgctggccggcgccggcggcgaggagcccgacccggaggatgcggcggcggaagcggggctggaggcgaggatccctcagagggacatctggaagccgttctgggcgcgcgggttggatatggtgggctactccatcaacggcctgcggacgtccacgctgccgttcgtggagaccggcacggagaggtccacgcagatgctgcggctcgggctcggcctcgacgagacgacgaggctgctcgacgcgtgcaaggagaatggggtgaggttgtgctccgccgtggccgccgcgacgatgctcgccgcgcggcagtcgaagccgatggagagcggccagcaggagacgtactctgtcgtgacccttatcaattgccgcaagtttcttgagccagtcttggaggaccgcaacgttgggttcttctactctgccatcaccaacacgcacacgatccacggcggggaagggctgtgggagctggccaagaggtgccaggactcgtacaccagcgccaagagcaacaagaaacacctcaccgacatcagcgacctcaacttcctcatgtgccgggccatcgagaacccccagctgacgaccgccggcgcgctccggacggcgctcgtctccgtgttcgaggaccccgtggtcgccgacgtggccgaggcgcagagcaaggccggcgtggaggactgcgtctgctgcgccaccgtgcacggcatcggcccgtcgatcggcgtgttcgactcgatcaaggacggcaagctggactgggcgtgcgtctacccttctcctctgcactccaggaagcaggtccaggagatattcgacaaggtgaagcagattttgcgccatgcggctgcggctgaggagaattttgaagactgcacctaagtacctaacgatgtcgtcgggagctttatggggcatctcggtagagctattgctccatttgtgtctttgtgaggcattcttttctcgtgagggttgtaatgtaagtatagtgaaccttgtgttagcctttttattctttcaattctcggcgcaatg

SEQ ID NO: 15840 - DNA, 1289 bp, Zea mays
  Clone ID: LIB3060-087-D11_FLI
gcaaaaaaacatcgggtgtacatgtgttcacccgtgccgtttactgggtcggcagtcggccggcacctggcccaagggttgagcatggagatcacgaacgagatgcttaagagactgccgagactacaatggcagaatttgttctatggactttcacagcaaggctaccaactatctcgtgacagctagcgatgatgaatcaatccgtttatacgatacccaagatgcagtgtgtttgaatactattaatagcaaaaaatatggggttggacttgtgtgcttcactgataacccatctattgtcttatattcatcgaacaatggctgggatgaatctctgcgtctgctctcaatgaatgataaccggtttattagatattataaaggtcaccttgatagggttgtctgcatcgcactttgctctggaaaagaaaactttctctcatgttcgcttgatcgtaccattctcttatgggaccatcgggctgaaaaaccgcagggcttactgcgcgcgcaaaggaggcctacagtttcgtacgacgcccagggcatggtatttgctgtcgcctatggtggccgcataaagatgtttgatattcggaaattcggaatggggccttttgcgaccttctctgtcggcactgatgattcggaagcccatgtcgtacagttcagcggtgatggcaggcggattctgttaaccactaaagctgggcgtgttcatgtgctagattcttttgaaggcaacagcattgcatcgtttcgcgcgaagccaatattaaccaattcgacactggaggcatcgttctgtcccgagggaaaccatatcgtatctggctccggtgatggtagtgtctatgcttggaacgttgagagcggaaaggttgcatgctgggaaagcacagatgtgaaaccgccgcgggtaaggtggtctccaggatccttgatgttcgtgacaggaacgtcggagctgtcctgctgggtgccggatttgtccaagctggagtccttcaccatcagccacaccaacaccaggtccagctcgtccctgtaggcttggaccgatttgcatgccgtgtggccggttgacgcgaaggaggaacaagaaagcatagcggagcatcttgtaccaattgagtttgtgatctgttcctgatggcccggtaagctactattgcaacgattgtggtcttgcggcaacgctgcgcgttgtttctgtagtgaacatgaactgtgcagttaattggttactttttcaaagaaagatataaagaaaatacagctctctt

SEQ ID NO: 15841 - DNA, 1101 bp, Zea mays
  Clone ID: LIB3060-087-D12_FLI
ccagcaagcgaagcccagcaagaaaaccacatgccccacctcgccgccactccccccacttcctccgccgccgccgtccccgccgcgggccgcatcgcgttccggcgcccgtggaacacgccacagccggaagcgctgcgcctgcgcctccgcctgcgcgcgcggggcgtccggcgtgaggacggcggcggcgtgcgcacggaggagcaggagcagacagcaccgcggacgttctacgacctgctcgggatctcagcggatgggagccccgatgatgttcgggcgtcctacaggcggctggcgctaaagtaccacccagacgtgtcccctccgggcgccgcggccgagaacacgcgccgcttcatcgaggtgcaggaggcctacgagacgctctccgacccaagccgccgcgccagctacgaccgtgcactcgcccgcggcgtctgccgcctcgccttctccgggcgccgttcccaatcccaccacgcctactaccattaccaggaacaggaagagggatctgggtggagaaggtcctgggaggaccagatcgccgagctgaagaggaggagcgtggcgaaggattcagaagagaacctgtcgtggggcgctcgcatgcggagaagggccgaggcgtcagcagcggagtagctgcgacaagcgagccttccaaatgcagctgtactcgtacgtagcatgtggagcgaagcgaaacggaatatatttttctggtgggtacaatttggtctgcaaggtttttaaggcgtggatctaaagatgtccagatggaaaccttcagagacagacctgttacgagaattggacgtgtagcagtagtagctgtagcggtggcatctggccaggattgaggaggaacagcagcacctggatggagtgtggtggctgctggctgcagaccaacacccttggccctggctacataatagttgagttcctgcctggccacctgggcctggctggctgtatgtaaacgactcaactatgttactccttgagactcctgttacatctgtggcaggtccagtgtaaatgtaaatactacaagcatcaataacgaaggagcaagccagttgttcttcc

SEQ ID NO: 15842 - DNA, 1070 bp, Zea mays
  Clone ID: LIB3060-087-D2_FLI
actggatgctagctgttttaacttgtggtcttttgccatgtgcgttaataaaaacgaaagggcctaaagaccacaagttaaaactggatgctagctgtttttcacccccaagatgaacaaagacatgatgcaggtaaactagctaaaagttgcagttatatcaggtcctgtttagcgatctatatatgttcttgcaaaagtttccgggtttaagggatcaactggctctgaaagataaaaaagttcatgtgactgaaatagcaaaagctgagagaaccaattaaggcatgatgctgtttcaaaatgctggtcatactatagatccgtacgtattctgcagcgtgcatgtgcatgcatagataaaaaaatcaggtcaagaacattgtgtgctgctgattgtttccagagaaactggcacgctatactgccctttcaaacagaaaatgctaggaatggagcatgcatggacactgaaacacagctacatgcatatgacaaaggtcgtgtctaacctcttgattggttgccggcagccgccgaggagcgtaaaatagatttgcttgcacccgcacattccgggcgcagccgtgcagccaaccaatcagaaatgcaggcgcagtcaacactcgtgaggagcctaggcgttgagagctgggcaaccaatcacacggtaattgtatgcacccatgcacaggtcgaggaggctcctgtgtctaattgtgtgcagcaagtcaaagagtctcgattgagcctagcatgagcaataggggccactcaggctagccaaggagactgcctacgaaccaacacaaaggtccacaattctgatcctttgtaaacaaaggacataggcaagtcatccttggctatcagaggcaggcccttattgacatgtaaggcttctgctctgcttgtcacctctagctagcttggtagcttctgtgactggtctgttgtgctccttccatggaacatctatttatacatgtatctcgtagagagaaccgtatcattttttccttttttttgttgttgttccaggacatcttattctctaattggatagcagc

SEQ ID NO: 15843 - DNA, 1394 bp, Zea mays
  Clone ID: LIB3060-087-H9_FLI
ctgtttcgctcgtgccgttgcgctgcgccaagcctccccacctctctcgtctcttctccacccgccgccctcgtgggagtgaaaccctagctagggttctgcccgccgccgccttcgatcaagacgcctgcagccttagcgcgagcccgccatggacacaggacgcaagcgcatcgcgccggggggcgccaacggcgcgggcggcccgaagcgcgcgagagaatcggagacaactcaaatgggtgtaggaagcaaaaccaagccgtgcaccaaatttttcagcactgcgggttgtccctttggttcaaattgccattttctccataacttcccgggtggctacctggcggtttcaaagatgaccaacttgggtgggccacctgttccggctcccccaggaaggatgcctatgggacctggtggtcctgatgggccaccttcacctgctctgaagactcgcttgtgtaacaagtacaacactgcagaaggatgtaaatgggggagcaaatgccactttgctcatggagagagggagcttggaaagcccctgcagatggacaactcgatgggagctcctccaatgggtccagggccaaacggtcacttcatgccacctccaatgcctatcccagacatggttcctcactccacattcggtgcttcggccacagccaagatcagtgtcgatgcatcccttgctggcgccatcattgggaagagtggtatcaacacaaagcatatatcccgagtgactggggccaagttagccatccgggacaatgaggctgatcccaaccataaaaacatcgagctcgagggaacgtttgaccagatcaagcacgctagcgcaatggtcacagagttgattgtccgcatcagtggtaaggtgcctccacaagcaaagaacaacccaggcagggggcctggttctcatgctgggggtcctgcaagcaacttcaagaccaagttgtgcgagaacttcaacaaaggctcctgcacctttggagacaggtgccactttgcccatggcgaaagtgagttgcgcaaacctgctgctgcttgatagatgtgtttagtgtggcttgcggtgattactctgcctgtgtggctgaataacaccacagtcgcctatggtgagatgtactgggccacgtgctgcctgagagagatcatttccatcgcttgcgtagagacaatggccgttttttaggatttgtaggattgccgtattgttctgttcgatttatatctaaccctgccagaatcctatttttgtaccgtttcttagctactaattggtgccagatcattgtggttctgttgactcgagaatagttgctatcgatggtatgggtttgtgaattattgatagcatttttgaaatccagatagct

SEQ ID NO: 15844 - DNA, 1896 bp, Zea mays
  Clone ID: LIB3060-088-D8_FLI
ctcctctccaaggtccctgccacccacacaaggcttggactcttgggccggccgggggggaagaagacaagacaaacgcagccgccggcatgatggcgatctgcagcgcgcacaccaccaccatctccctgcgctccccatgcacgacgaccgtctcgaacgcggcagctggcttggtgcagaagcaagtcatcttcttgaccagcatcaacaggaggagcggcagcagaaggcgtggaggaggggtgagcaggaccttactccaggtctcgtgctccgccgacggcaacaagccagtggtgatcggcctggcggcggactccgggtgcggcaagagcaccttcatgcgccggctcaccagcgtcttcggcggcgccgcggagccgcccaggggcgggaacccggactccaacacgctcatcagcgacaccacgaccgtgatatgcctcgacgactaccactccctggacaggaccggcaggaaggagaagggcgtcaccgcgctcgacccgagggccaacaacttcgacctcatgtacgagcaggtgaaggcgatcaagcaaggccaggcggtccagaagcccatctacaaccacgtcaccggcctcctcgacccgccggagcttatcacgccgcccaagatctttgtcatcgaaggtctgcacccaatgttcgacgagcgtgtgagggacctcttagacttcagcatctacttggacatcagtgatgaggttaagtttgcatggaaaatccagcgggacatggcagagcgtgggcacagccttgaaagcatcaaggccagcatcgaagccaggaaaccagatttcgatgcatatattgatccgcagaagcagtacgctgacgccgtgatcgaagttctgccgacccagttgatccccaacgacgacgaagggaaggttctgcgagtcaagctgatcatgaaagaaggggtggacaacttcaacccggtctacctcttcgacgaagggtccaccatctcctgggtgccctgtggaagaaagctcacgtgctcttaccccggcatcaaattcgcctacggcccagacatttacttcggaaacgaggtatctgttttggagatggatgggcagttcgacagactagacgagctcatctacgtggagagccatctgagcaacctctcgaccaagttctacggggaggtgacacagcagatgctgaagcacgcggacttccctggaagcaacaacgggacaggtctcttccagaccatcgtcgggctgaagattagagacctctacgagcagattgttgccgagagggctggcgcgccagtggaagcagccaaagtttgatggcccgcgtgcattcagatgtcctaaaacgggacaggcctcttcaaactcgacgcacgtctgttggggatatatgcatgggcagcatggcgaggaactaggagcctaggaggatgtggaagaaacgtcatttgcagagctcaggaaaacgtgcagcacttgtttagatgtgtgccttcttccatgcttcattgcagaaagaaatcaagtgcctctactactatcaggtactcctattcaagtgtaggagacgaatccataccacttccattgttggttattgtttctctgacccggagccaagaacagtcaacaaggacccgaggttgaacatctctttttatggactactggagagtaacaacatgtccgtttggttttaattagtactggattggactgcttctacagtattttgtctttatggattatagctgtagtagtcggttttaattcgtactggattggactgcttccacagtattttatctttatgcattgtagctgcagtagtccgaacaactggttttaatccgaggagagcattaatgttcttgcc

SEQ ID NO: 15845 - DNA, 1769 bp, Zea mays
  Clone ID: LIB3060-088-F9_FLI
gaccccctccgtttgccaacgactcccggctccactgtcgctcccgctcccttccctcccacgcaagacaatggtggccgatcgcctccgcctcgcgctgctgctctccgcgtgcctctgctccgcgtgggcgcgcccacgcctcgagccgaccatccgcctgccgtccgagcgcgcggcggccgacgacgccgtcgggacccggtgggccgtgctcatcgccggctccaacggctactacaactaccgccaccaggcggacatctgccatgcataccagatcatgaagaagggcggacttaaggacgagaacatcgttgtcttcatgtacgatgacatcgcgcatagcccggaaaatccgaggcctggtgtcatcataaatcatccccagggtggcgacgtctatgctggggtgccaaaggattacactgggcgagaggtcaacgtcgacaatttcttcgctgttctgcttggcaacaaaactgctctcaggggtgggagcggcaaggttgtggacagtggccccaatgaccatatatttgttttctacagtgaccatgggggtcctggcgtccttggaatgcctacgtatccatatctctatggtgatgacctcgtagatgtcctgaagaagaagcatgctgccgggacctacaaaagcctggtcttttaccttgaagcatgcgaatctgggagcatctttgagggcctcctgccgaatgacataaatgtgtatgcgaccaccgcgtcaaatgcagaggagagtagctgggggacgtactgccctggcgagttcccgagccctccaccggagtatgacacttgcttgggagacctgtatagtgttgcttggatggaagacagtgatttccacaatctgcgaactgaatctctcaagcagcaatacaacttggtcaaggataggacagcggttcaggatacattcagctatggctcccatgtgatgcaatatggttcattggagttgaatgttaagcatctgttttcgtacattggcacaaaccctgctaacgatgacaacacgttcatagaagacaactcgttgccatcattctcaaaggctgttaatcagcgcgacgctgaccttgtctacttctggcagaagtaccggaaattggcagacagctcacatgagaaaaatgaagctcggagggagttgcttgaagtgatggcccacaggtctcatgttgacagcagtgttgagctcattggaagccttctctttggctctgaggacggtccaagggttctgaaagccgtccgtgcagctggtgagcctctcgtcgatgattggagctgtctcaagtccacggttcgtacttttgaggcgcaatgtgggtcgttggcgcagtatgggatgaagcacatgcggtccttcgcaaacatctgcaacgctggcatccttcctgaagcagtgtcgaaggtcgctgctcaggcttgcaccagcattccttccaacccctggagttctatccacaagggttttagcgcctaagaatcgtaaggtgaggcgaaatatttcagccgctccaccgcaacgaactggtttacattaccagtcctcaggggggtcctagttcttgaaccactattatagctgttccaccgttccagattacatagctatgcccaatttccggtgtacatattatagtcggaaagttatttggcaattgtattggtcgttgctgtatatattccctatagtttgttagcagatgtgtagtttgtgattccataaaaatgaa

SEQ ID NO: 15846 - DNA, 1114 bp, Zea mays
  Clone ID: LIB3060-088-H6_FLI
gcgcgagcggtatggaggatgagagagtgagcggggaggtcagggagcaggaagacgacgacgacaacgtgcctcaactcagcgctgcggcgatggaggcgctccgggagtttctggcggaacagcatcgtccggaggagcagaatgaagctggaggaggggaagacggggtagagctggtcccggaggactggcggttgagccagttctggtatgatgagcgtaccgcgcgggagctcgtggaggaggtcgtccgccttgtctccccttctggatcaggctccgccgccggtgccgtggcctgcatcgcatgcccgacgctctacgcctacctgaagaagacggaccccggagtgcccgcgcagctgctggagtacgacgagcggttcgggcagtacggcggcgacttcaccttctacgactacaaccgaccggaggagctgccggcggcgatgaagcacgcctaccgagtcatcgttgccgaccctccctatctggtactgtttctaccctaccagagattgcctattaaaaagtgtttgatcagttcttaacatttgagatgagaggaaatatcgaggagaaatggctattattcgttggttgatgatgcagagtaaggagtgcttggaaaaggttgccaaaacagtatctttcctcgcacggcctgaaggttcattcctgctgctgctcacaggggaagttcagatggaccgggcgttggagctgctgaatgttcgtccctgcggtttcaggcctcgccactcgaacaaactgggcaacgagttccggctgttcacgaattatgatcctgctgacagacttggtggttgggagcaaagtgatggtgcccccatttaactataaactaatacaatttttgttctagagttgttccatctttatgaacatgctgcatctttgatccacagctcactgatccctccaatttaaattgtagtgacaattacttgaggaatctgtgtgctatgatgtatggtcaatcaaacatttacattgttagtgtacctcatttttccgtgatcatgtttcggaggactataggtgttgtttggttcacatatttgtaatggataataaataacgttaaatc

SEQ ID NO: 15847 - DNA, 1316 bp, Zea mays
  Clone ID: LIB3060-089-B10_FLI
gatcaaatcagaaaggggaagggaagaacggcccagcaatgccgctctgcagcttctacgcctccacctccgttcccgtcgtcaagccccagcagtccgtcgcctcgtccaagccccccaccacggcggtggcctccgtggcgacaactgtgccgatgcgcagtgcagcgacggtgacgccagccgtggccacaacaacgagcctagcgctgtctctgcacctgccggagctgccgtcgcaggtgaaggacaagatcctgagcctggagctgatgggcgtggactatgggcgcgcgctggagcagaacccggcgctccgcgacgcggcgccggagtccatccacgcggtggtgtcgttcctccagtcccgcgggctccagttcaaggacctgggccgcgtcttcggcatgtgcccgtccgtgctgaccgccagcgtccgcgccgacctccgccccgtgttcgccttcctctccgcggacctgggcgtgccggagtcggcgcaccggcgcgtggtgatcaagtgcccgcgcgtgctggcctgcagcgtccgcgaccagctccgccccgcgctcatctacctccgccgcctgggcttccgggacagccgcgcgctggcgctgcaggacccgatcctcctcgtctccagcgtggagcgcaccctggcgccgaagctggagtacctggccgggctcggcatgtcccgcgacgacgcggtcgccatggtgctgcgctgcccggcgctcttcaccttcagcatcgagcggaactaccggcccaagttcgagtacctggtggacgccatgggcggcggcgtcgaggacgtcaaggccttcccgcagtacttcgccttcagcctcgagaagcggatcgcgccgcgccaccgcgccgcggaggacgccggcgtcgcgctgccgcttccggacatgctcaaggccaccgacgaggagttcagggagatgctcgacaaggagcgggagctgcacgagcaggcagcgacgacggactgatcgatcggggggctagtacagcggtttgcacctgatccgactatccgaagcatccaaccgccgtcttcgtggcgatcgagtgtcctggccatgacggtagccagcacatgtagtcatttgatttgagtaattagtagcctgtacatatatgcattgacattatttgctatagtcacgattcgtagctcatgagagaatatgtctgttctttctccattattccaagtgaataagcaccgagctggaagtcgtgtctttatgtacacacgtgtaccaagtttacaggaatgaatgtaccaagttcattag

SEQ ID NO: 15848 - DNA, 1540 bp, Zea mays
  Clone ID: LIB3060-089-C9_FLI
cggaagggaggctctcaccagtcaccactcacctgacgacgagcgagcgagaggaacggggcgagggaagttaaacgcgcggcgatgccggagctgccggaggtggaggcggcgcgtcgggcgctgcaggcgcactgcgtggggaggcgcatcgcgcgctgcgccgtggcggacgacgccaaggtggtcgttgccgccgccggccgcgcggccttcgagcgggccatggtcggccggaccatcgtcgccgcgcgccggaggggcaagaacctctggctccagctcgacgcgccgcccttcccgtccttccagttcgggatggctggcgcgatatatatcaaaggcattcctgtgacgaattataagagatccgctgttaattccgaagaggagtggccctccaaacactctaaattctttgctgagcttgatgatggtttggagttctctttcactgataaacggcgctttgcaagagttcgtttgtttgaagatgcccagatgctctgtttgaaccaatgtccgtcgatagtttcttggactccctgggtagaaagaagatagggataaaagctcttctacttgatcaggtgaccagcatccaacctacaagctttgcctgtgcaaaaatgttttccctgcactgtacatacttgacttgttgcagttttttttttatataaaatgagcagagcttcatatcaggcattggcaattggattgcagacgaggtgctttaccagtcaaggatccatccattacagattgcttcgaatctacctagggagagttgtgaagcactgcaccagagtatcgaagaggttgtcaaatatgctgtcgaagttgatgctgacatggaccgctttccgaaggaatggttatttcatcaccgttggggcaagaagcctggcaaagtcgatggaaagaaaatcgagttcataacagctggtggcaggaccactgcctacgtgccgcaactgcaaaaactggttggaacccagtccagcaaaacgatatccgtggccgagaacggtgatgccaaggattcagggaccgagggagaagatgcagatgcagatgttttgaatccaagaaagcgagccgcggcctccaggggacagcgaaacaaagataccgccggctcgagaaaagcaagaggaaatggcgccgatgctgaggcggctgaaccaacaacaggtgtcgtcggaagcaacggtgagcaagcttttggccaacccaacagtgacgctgtcgataaatcagatcgggctacaagacgatcgtcgaggaaagtgaaagcccgcaagtaaatctgaacaaggtagagccagggatctgtccatggagttccattatatgtgtacgtactggccagcgtatttgcgcctctgagtaatgtatcttaggaacagaagattatattcatgctgtgctgcatattcctgggggattcgctccggaccaacgtttgctctgttccctcggtgctatggatagtagcatatctaggttgtgcataaatgcactgaggtttatgtac

SEQ ID NO: 15849 - DNA, 1749 bp, Zea mays
  Clone ID: LIB3060-089-D4_FLI
ccctcccctagcgttatcgtcgcaccataaataaccatcctctcctcgcctttccccacatctcatcttcgtctgtgttcttgcgcgtacgcgtacacagccccgatccgaatcgtcctcctcgcgagcctcgccgatcccccactcccctcccctcgcttcaagatgcagatctttgtgaagaccctcaccggcaagactatcaccctcgaggtggagtcttctgacaccattgacaatgtcaaggctaagatccaggacaaggagggcatccctcctgaccagcagcgccttatcttcgccggcaagcagcttgaggacggccgcacacttgctgactacaacatccagaaggagtcaacccttcatttggtgctgcgccttaggggaggcatgcagatctttgtcaagaccttgactggcaagacaatcacccttgaggtggagtcctcagacaccattgacaatgtcaaggctaagatccaggacaaggagggcatccctcctgaccagcagcggcttatcttcgccggcaagcagcttgaggacggacgcacacttgctgactacaacatccagaaggagtcaaccctccacttggtgctgcgccttaggggaggcatgcagatctttgtcaagaccttgactggcaagacaatcacccttgaggtggagtcctcagacaccattgacaatgtcaaggcaaagatccaggacaaggaaggcatcccaccggaccagcaacgtctcatctttgccggcaagcagttggaggatgggaggacccttgctgactacaacatccagaaggagagcaccctccacttggtgctgcgtcttaggggtggcatgcagatctttgtgaaaacccttactggcaagaccatcactcttgaggtggagtcttcagataccattgacaatgtcaaggccaagatccaggacaaggagggcatcccgccggaccagcagcgtcttatctttgccggcaagcagctggaggatggacgcacccttgcggattacaacattcagaaggagagcaccctccacctggtgctgcgcctcaggggaggaatgcagatcttcgtgaagacattgacaggcaagaccatcaccttggaggttgagagctccgacaccattgataatgtgaaggccaaaatccaggacaaggagggtatccccccggaccagcagcggctgatcttcgccggcaagcagctggaggatggtcgcaccttggctgactacaacatccagaaggagagcaccctccatctggtgctccgcctgaggggtggtatgcagatctttgtgaagaccttgactggcaagaccataaccctggaggttgagagctctgacaccatcgacaacgtgaaggctaagatccaggacaaggaggggattcccccagaccagcagcgtctgatcttcgccggcaagcagctggaggatggtcgcacccttgcagactacaatatccagaaggagagcaccctccacctggtgctccgtcttcgcggtggttattaagccatcagtcgttgaagctgctgctgtatctgggttatccagtgtctctgccattgcccatggatggtactgtctttcaaagtatttgtatggtttgtgtcgtgagtcgtgactgagctggtttcatggaccagttgtgttctcgttacccaaaactatcgtgcggcagcatatggcttaatcatgaataaatgtggtgtttgaattttt

SEQ ID NO: 15850 - DNA, 1199 bp, Zea mays
  Clone ID: LIB3060-090-B3_FLI
gctcgaccgacgaccgaagctaagctaccaagctactagtagtcttcttggtcacgttgttgattgcagcggtcgagcacacacaagctagctagctagccgctagagctagggtcgtcggatagatcgacatggccggcagggacagggagccgctggtggttggtagggtggtcggcgacgtgctggaccccttcgtccggaccaccaacctcagggtcagctacggggccaggaccgtgtccaacggctgcgagctcaagccgtccatggtggtgcaccagccaagggtcgaggtcgggggacctgacatgaggaccttctacaccctcgtgatggtggacccagatgctccgagcccaagcgacccgaaccttagggagtacctacactggctggtgacggatattccgggaactactggggcagcatttgggcaagaggtgatctgctacgagagcccacggccgaccatggggatccaccgcttcgtgctggtgctgttccagcagctggggcggcagacggtgtacgccccgggctggcgccagaacttcaacaccagggacttcgccgagctctacaacctgggcccgcccgtcgccgccgtctacttcaactgccagcgtgaggccggctctgggggcaggaggatgtactcgtgatcggatgcatggttacataccatgcacacactactcactccatcgtctccatgcatgtagacggacgatggtgcctgcatcgatcgtcaactactcaacaattacgaactagaaatacacgcgtatatatacatatataaatatgcatatataccggtactgtacatgtcgccgtacacgcgcaggtggctgctagctgcttgctataccggccggtactgagcaggcagcatgcgctatatacttgcttggcgacgacgtgcagtgtgtgtatacaataatgagcggccggctagcagggcgacgagccgtggctttataaagcaatacatatatactgcagggatgtgtgtgtgcagtgcatgccaaggtacggtaatcgtattattgtgcacatacacatatgtatacgtacatatgcgtaaatatgaatctgtacgtatacatatgcatgctggttaattaaggcgctatcttgtacgtacgtgcttggtgtaataataatataagtcctcagtggagaatatatataat

SEQ ID NO: 15851 - DNA, 1770 bp, Zea mays
  Clone ID: LIB3060-090-H2_FLI
ccacacactctatttcctagaccattcatgcggtgcccgcccgaagtccttggcaggcagctagcttagcacgcacgtcgtccatggcgcccacggaggaatcggttgctgatacgccagcgccaccgccgccgccacctcacttcgttatcgtccccctcgtggcgcagggccacaccatccccatggtcgacctcgccctcctcctggcggagcgcggcgcgcgcgcgagcctggtgacgacaccgctgaacggcgcacggctgcgtggcgtcgccgagcaggccgcgcgcgccaagctgctcctcgagatcgtggagctcccgttcccgacggacgttgacgacctgcccccgggcatcgagaacatggaccaggtcacggacaacggccacttcgtccccttgttcgacgctctgcagaagctcgccggcccgctggaagcgtacctgcgagcgcaggcgccgcgcccgagctgcatcgtctccgactggtgcaacccgtgggcggccggcgcggccagaagcctcgggatccgtcgcctcttcttccacgggccgccgtgcttctactcgctctgcgacctcaacgccaccgaccacgggttacgcgagctggccgcgggcgcggcggcggctgacgtcgacgacggggggcaggagaggttcgtggtgccgggcatgccagtgcacgtagaggtgaccaaggccacggcgccgggcttcttcaactcgccggggtgggaggcgctccggggcgagtgcgtggaggccatgcgcgcggccgacggcgcggtggtgaacacgttcgtgggcctcgagggccagttcgtgtcgtgctacgaggcggcgctcggcaaacccgtgtggacgctggggccgctctgcctccgcagccgggacgccgacgccatgtcgtcgcggggggcggacggcggccagcagcacagcgcggtagccgcctggctcgactccaaggagaccggctccgtcgtgttcgtcagcttcggcagcctcgcgcggaagctcccgaagcagctgttcgaggtggggcatggcctggaggactccggcaggccgttcctgtgggtggtgaagcaggccgaggcgtccccgccggaggtgcgggagtggctgggggccctggaggcgcgcgcggcggggcggggtctcgtggtgcgtgggtgggcgccgcagctcgccatcctgtcccaccgcgccgtggggggcttcgtcacccactgcggatggaactcgctgctggagtccgtcgcgcacggcgtcccggtggtcacgtggccccacttcgccgaccagttcctgaacgagcggctggcggtggacgtgctcggcgtgggcgtgcccatcggcgtgacggcgcccgtgatggtgttcgacgacgagagcgtggcggtggcgcgtggggacgtcgcgcgggcggtgtcggcgctgatgggccaaggggaagaggccggcgagaggaggcggagggccagggagtacggagagaaagctcacggggccatggagaaaggaggctcctcgtatgagaacctgacgcagctcatcgagagcttcgggcaagtggaggcaagaaaaggttagggcaggcttaggctagaacagtgcatgcatggagctagccatggactaccatcgcaatggcagtacagtactggtgcagaatctttatctttacagtgagtgagtgagtgcgtgagtgtgtgtgtgttataatctctcatgccagttacgtaagtcttttctttct

SEQ ID NO: 15852 - DNA, 1664 bp, Zea mays
  Clone ID: LIB3060-091-B1_FLI
cacttggatccggtgctcaacggaacagctagctatagcctgtagctagcagctagcttcagtcacaggccggacggtcggctcacacacagctagccgccgccgctgctagcttagccaccagtagtccgatctgatctacaggcagggggccagcaggggcagctagctagctagccgcgcgccggcgccatgatgaacctgaacctgaagcagccgctcgtgctgcccgcgcaccacagcaatgtcgtcggctcgcgcctgtcgtcgtcgtcgccctcggcagccgccgccagcaggaggaccggcggcggcgtgtcctcccggtccggctcccggcggcacgtgcggctgccgaggatcagctgcagcgccaccgaggaggtcagcggcgccgtgtcgtccgtcaccgtggagaggatgctcacggtgacggcgtcggtggaggcgtcgccggccatcgggcagatgtacttccagcgcgccgtcgacgacatcggcgacctcctcggcaagacgctgctgctcgagctcgtcagctccgagctcgacgcaaagtcgggcgtggagaagacgcgggtgacggcgtacgcgcacaagacgctgcgggagggccactacgaggcggagttcaaggtgccggcgtcgttcgggccggtgggcgcggtgctggtggagaacgagcaccacaaggaggtcttcatcaaggagatcaagctcgtcaccggcggcgacagcagcaccgccgtcaccttcgactgcaactcctgggtgcactccaagttcgacaacccggagaagcgcatcttcttcaccctcaagtcatacctgccgtccgacacgcccaaggggctggaggacctgaggaagaaggacctgcaggcgctgcgcggcgacgggcacggcgagcgcaaggtgttcgagcgcgtctacgactacgacgtgtacaacgacctgggcgacccggacaagaacccggcccaccagcggcccgtgctgggcggcaacaagcagtacccatacccgcgccgctgccgcaccggccgccccaggaccaagaaggaccccgagacggagatgcgcgagggccacaactacgtgccccgcgacgagcagttctcggaggtgaagcagctcacgttcggggccaccacgctgcgctccggcctgcacgcgctgctgccggcgctccgcccgctgctcatcaacaagaaggatctgcgcttcccgcacttccccgccatcgacgaactctacagcgacggcatcccgctgccgccgcagaccgggttcgacgccatccgcaccgtcgtcccgcgcatggtcaagctggtggaggacaccaccgaccacgtcctccgcttcgaggtgccggagatgatagagagggaccggttctcgtggttcaaggacgaggagttcgcgaggcagacgatcgcggggctcaacccgctgtgcatccagctgctgactgagttccccatcaagagcaagctggacccggaggtgtacgggccagcggagtccgccatcaccaaggagatcctggagaagcagatgaacggcgcgctgaccgtggagcaggcgctggcggcgaagcggctgttcatcctggactaccacgacgtgttcctgccctacgtgcacaaggtgcgggagctgca

SEQ ID NO: 15853 - DNA, 1111 bp, Zea mays
  Clone ID: LIB3060-092-E6_FLI
ctttccttatcccctcccgcttcgtctcccttcctggcttcctttcttcgccatggcaaccatgtccctccgctgcctcgccatggccatggccgacaccgcgctcccgcccgcccacaagctcctccccacagtttccctcccgctcctctcctcgtccacccgcgccgcgccgctcctcctcttcgccaggcgccgcctgccgctcgcgcccctcgttacctcctccgacgccgttgaggccaagtcggcagacgaggaggaggagaaggccggagagcccgtcgaaatggaagctggggagtttgaggaggtgctagcctcaggcggcgagggtgaggggcagtacgccgcggtggagccgccagaggaggccaaggtctacgttgggaaccttccctacgacgtcgacagcgagggactcgcgcagatcttcgaccaggccggcgtcgtcgaggtcgccgaggttatctacaacagagaaactggccagagccgtgggtttggttttgttaccatgagcactgttgaggaagctgacaaagccattgagatgttcagccgctatgatattagcgggaggcttctgaatgtaaacagggcatcttctaggggcactcgcatggaaagacctcagagacaatttgcaccagctttcagagcttatgttggcaacttgccatggcaagttgatgactctaggctggtgcagttgttcagcgagcatggagaagttgttgatgctaaggttgtctacgacagagaaactgggcgctcacgaggattcggttttgtatcaatggtgtcaaaggaggaactcaatgatgctatttcggccctagatggacaggaattggacggccgccctcttcgagtgaatgttgcagcagagcggccacagaggggcttttgatgcggttgtatgagagagatgactgtttgtttgtaatgagcatggagacacagagacacaatggaggagcaatggtacaaattagcggaagcggatgctgtcacaagttgctagatctttctcccttagcttcctgacatttggttcttgccacagctttttgatgcttctcttggcagctggacttaatggtttgct

SEQ ID NO: 15854 - DNA, 1720 bp, Zea mays
  Clone ID: LIB3060-092-E8_FLI
taaataaccatcctctcctcgcctttccccacatctcatcttcgtctgtgttcttgcgcgtacgcgtacacagccccgatccgaatcgtcctcctcgcgagcctcgccgatcccccactcccctcccctcgcttcaagatgcagatctttgtgaagaccctcaccggcaagactatcaccctcgaggtggagtcttctgacaccattgacaatgtcaaggctaagatccaggacaaggagggcatccctcctgaccagcagcgccttatcttcgccggcaagcagcttgaggacggccgcacacttgctgactacaacatccagaaggagtcaacccttcatttggtgctgcgccttaggggaggcatgcagatctttgtcaagaccttgactggcaagacaatcacccttgaggtggagtcctcagacaccattgacaatgtcaaggctaagatccaggacaaggagggcatccctcctgaccagcagcggcttatcttcgccggcaagcagcttgaggacggacgcacacttgctgactacaacatccagaaggagtcaaccctccacttggtgctgcgccttaggggaggcatgcagatctttgtcaagaccttgactggcaagacaatcacccttgaggtggagtcctcagacaccattgacaatgtcaaggcaaagatccaggacaaggaaggcatcccaccggaccagcaacgtctcatctttgccggcaagcagttggaggatgggaggacccttgctgactacaacatccagaaggagagcaccctccacttggtgctgcgtcttaggggtggcatgcagatctttgtgaaaacccttactggcaagaccatcactcttgaggtggagtcttcagataccattgacaatgtcaaggccaagatccaggacaaggagggcatcccgccggaccagcagcgtcttatctttgccggcaagcagctggaggatggacgcacccttgcggattacaacattcagaaggagagcaccctccacctggtgctgcgcctcaggggaggaatgcagatcttcgtgaagacattgacaggcaagaccatcaccttggaggttgagagctccgacaccattgataatgtgaaggccaaaatccaggacaaggagggtatccccccggaccagcagcggctgatcttcgccggcaagcagctggaggatggtcgcaccttggctgactacaacatccagaaggagagcaccctccatctggtgctccgcctgaggggtggtatgcagatctttgtgaagaccttgactggcaagaccataaccctggaggttgagagctctgacaccatcgacaacgtgaaggctaagatccaggacaaggaggggattcccccagaccagcagcgtctgatcttcgccggcaagcagctggaggatggtcgcacccttgcagactacaatatccagaaggagagcaccctccacctggtgctccgtcttcgcggtggttattaagccatcagtcgttgaagctgctgctgtatctgggttatccagtgtctctgccattgcccatggatggtactgtctttcaaagtatttgtatggtttgtgtcgtgagtcgtgactgagctggtttcatggaccagttgtgttctcgttacccaaaactatcgtgcggcagcatatggcttaatcatgaataaatgtggtgtttgaattt

SEQ ID NO: 15855 - DNA, 1270 bp, Zea mays
  Clone ID: LIB3060-093-C4_FLI
ggaaccgcgcacgacaccaagctgccgcgccggactgctgcacgcaagcgcagcgcaggaccgaccgacctccgtaggcacgcacggcgccggcggcatggcggagcacctcctgtcgacggccgtgcacgacacgctgccggggagctacgtgcggccggagccggagcgcccgcgcctcgcggaggtcgtgaccggcgcgcgcatccccgtggtggacctgggcagccccgaccgcggcgcggtcgtggccgccgtcggcgacgcctgccgctcgcacggcttcttccaggtcgtcaaccacgggatacacgccgccctggtcgcggcggtgatggccgcggggcgcgtcttcttccggctgccccccgaggagaaggccaagctctactccgacgaccccgccaggaagatccggctgtccaccagcttcaacgtgcgcaaggagacggtgcacaactggcgcgactacctccgcctgcactgccatcccctcgacgagttcctgcccgattggccgtccaacccgcccgatttcaaggagaccatgggcacctactgcaaggaggtccgggagctcgggttcaggctgtacgccgcgatctcggagagcctgggcctagaggcgagctacatgaaggaggcgctgggcgagcaggagcagcacatggcggtcaacttctacccgccgtgcccggagccggagctcacctacggactcccggcgcacaccgaccccaacgcgctcaccatcctgctcatggacccggacgtcgccggcctgcaggtgctccacgccggccagtgggtcgccgtcaacccgcagcccggcgcgctcatcatcaacatcggcgaccagctgcaggcgctgagcaacgggcagtaccggagcgtgtggcaccgcgcggtggtgaactcggaccgggagcgcatgtccgtggcgtcgttcctgtgcccgtgcaaccacgtcgtgctcggccccgcgcggaagctcgtcaccgaggacaccccggccgtgtacaggaactacacgtacgacgagtactacgccaagttctggagcaggaacctggaccaggagcactgcctcgagctcttcagaacctagcgaaccggatacggatggatggatacattacatacgcgccctctgtttttctccatgacgttagaagaacacgttctgcaatgtttgtccattcaaggtggtatcaatcaaggctgtggtcgttgcaattctcccgctccatatacatgattaaatgttttg

SEQ ID NO: 15856 - DNA, 1332 bp, Zea mays
  Clone ID: LIB3060-093-C9_FLI
atgaagtacttttgggacacgttactggatgctgatcttgagagcgatgcgctgggctggcagtacatcactggctctcttcctgatggccgggagcttgaccgcatcgacaacccccagtttgaaggctacaagttcgacccgcatggggagtacgtccggcggtggattcctgagctcgcaaggctgccgacggagtggatacaccatccatgggacgcgcctgtctccgtgctgcaagctgcaggaatcgagctgggctccaactaccctctccccatagtggagctggacgcggccaagggcaggctgcaagcggccctgtcagagatgtggcagctggaggcggcgtcgagggccaccatgaacaacgggacggaggaaggcctcggcgactcctcggaggtcctgttccctcaagagctgcagatggaggtcgaccggcagccagccccagccgaggcagcagccaacgtgcacgtgcccgtgccgatgcctgcccggaggcgcggggaccagatggtgcccaccatgacgacctcttcgctgaacagagctggaacagaggtctccgccgatctagtagtagcgaacagcgaggaggaggacaccagggcgcaggttccgttccacgcgcatctccacccacgagccgaagccccgccagctgcgcgtagaaccaacaacggcgctcgccagcacgacgtcttccagcagcctcggaaccacaggcgagaagctctgcttgctccgtcagcgtcggaggcttcgagcagctggaccggcagagagggcgccgtggtcccggtctggtcgcctcctgcggcgtcgggccattcggacgccttcgctgccgacgaagctgacgtctctagtaggagctatttgggtaggcatccgcagtcccaccggctgatgaactggagccaactatcgcagtcatcgtgagttcagatgcacggacagcagcagaagattctgtgcggccaaacttaatcgagctgaagattctcgtatgtagattgtccactgaactgctcatccatagtctgatgggatggaaaccaggcggcttttcctggttgtggtggctataggctatagctgtgtaaatctcgtcttctagaacgtgtgtggtcgatatagtgcggttggctttacaacaacaacaaaaaaaagtcgctattattgatcagacgacaaaggttttccgtattttcttagccttttttggggggaggtatgtgatgtgtgtaaccgtaactgtacattcccttgtgctgaccatattgttagtttccatgcgtcttgtattgctgttttgggctgagt

SEQ ID NO: 15857 - DNA, 1340 bp, Zea mays
  Clone ID: LIB3060-093-D8_FLI
gagtcgcggagccaccgcgttccctagagagacgcggagagccagggcaaggcagctgtcgccgcagcgacgatgtggagctcgggctctgaccgcgacgaggccgtagacacggcgaacgcctcgtcagtcgacgcttcgtcgcccgcgcggcagccgtccacgccgcccccgccgcctcggcgccggcgccagcgcgcgcgacgccgcgctcaccgcctccgtgccaggaacacgggcgcaggagcggaggaggagggactcgtggaggcggacgcggacgcggacgacgtctggcgcgggctgcagcagcagcgggagcgggaggcgtggctgcggcgggcgtcgaggcccgtggtggtggtcgccggcgaggaggggtcccctccggacgcctccgccggctcgggggagagcggcggggtggggagggcgcggagcctgaccgacgacgacctggaggagctcaaggggtgcgtggatctggggttcggcttcagctaccgcgagatccccgagctgtgcggcacgctgccggccctcgacctctgctactccatgagccagcgcttcctggacgagcaccaccaccagcagctgggcaaggcggaggaggcgccgccgctcgctccggcctcgccggcgcagccggccgccaccaccaactggaagatctccagccctggcgacagcccggacgaggtgaaggcgaggctcaagtactgggcgcaggcggtggcgtgcaccgtcaggctctgcagctagctgatcaacggcgtggcagtggcggtggcggtggcggtggcgccaccatcaatcaatcttggcacaagagatgagagttgagacgagcacgcaagaagggaaatccattccgtctccgcccagccagcacagggcatctggtggtcggcatacaggcaggaaccgtggcaccaccgccggaccaaccagccagccagccgtcaaagttcaacgtaaacgaacacagacaggagcatcgtcccattcccatacatgcgctccatccagatcaagatggcctggactagcatcgtagcgtcaccatggccagcattcatccgtcaggagcacacaggagtcgtgaattcgaatttcgctccaagattttgcttgagatatgtggtagggacggaaggaggagggagaatcgcgtagttaattccatgccgtcctttatgttttttttttttttgtctctgttcaagctttgacatgatacaatctgccggctagctgccaccaccttgcctttgccttcaccggggaggcttaatggaccgaatcaacggagaatgcgtctaaagaacatgtccatc

SEQ ID NO: 15858 - DNA, 1839 bp, Zea mays
  Clone ID: LIB3060-093-G10_FLI
ctcccaactgccaccgatttgtttgttcggcttcggccccatctccagtcacccgttcccacttcattggtcgctgctccctccctccacggccgatcccgtgccggcgagagggaccatggcggggaaaggggaggaggtgtacgtggccgccatcgaccagggcaccacaagcacccggttcatcgtctacgaccgccacgccaaacccgtcgcatcgcaccagctcgagttcaagcaacactacccggaggctgggtgggttgagcatgatcctatggagattatagagactgttaaggtgtgtatgaaagaggcagttggcaaagccaaagctggtaaacacaacgtggttgctggtttgaaggccattgggatcacaaatcagagggaaaccactgttatgtggagtaaatccactggccgtccactgtataatgctattgtgtggatggatgctcgcacaagccctgtttgcaggagattggaaaatgagctgtcaggcggtaggacccacttcgtggagacatgcgggttgccaatcagtacctatttcagtgctctgaaattattatggttgatggaaaatgtggatgctgtcaaggatgcagtccggactggtgacgctttattcggcacgatcgacacctggttgatttggaaccttacaggaggtgttgctggtgggcagcatgtcacggattgctcaaatgcatctcgtacaatgcttatgaatctaaagacacttgactgggataagccaacacttgctgtgttaggagttcctgttgagattttgccaaagattatcagtaattcagagaaaatcggtgtggtcgccaaagagttcccgtttgcaggagttcccatctcggggtgtcttggagatcagcatgctgctatgcttgggcagctgtgccagaagggtgaagcgaaaagcacctatggaactggtgccttcatccttcttaacacaggggaagagcctacccaatcctcccatggccttcttagtaccattgcttacaagcttggtccagctgcacccactaactatgctcttgaagggtccattgcaattgcaggcgcagcagttcagtggctgagggacagccttggaatcattcagtcagcagctgagatcgaaaagttggctgaaacagtgccagattcaggtggagtgtactttgtgccagcatttaatgggttgtttgcaccatggtggagagatgatgcgaggggaatttgcatcggaatcacaaggttcacaaataaggggcacattgctcgagcagtgctcgagagtatgtgttttcaggtgaatgatgtcctcagctccatgcacaaggatgctggagaggcaggagaagtaaagagcgcagaaggagagttcttattgcgtgttgatggtggtgctactgttaataatcttctaatgcagatccaggctgatttattaggcagccctgttgtcagaccagctgacatagagaccacagccctcggagctgcatatgctgctgggttggctgcaggagtttggaccaaggagaaggtttttgcaggtttgcacaaggagaacacgacagtcttccgcccgaaactggatgaggcgcacaggaaaaagagggcggattcatggtacaaggcggtttcaagatcattcgatctggctgatctttctctgtaaatttatcctgccagcgctcctctatctggttttggaagctgcaaatgaataaattggtcttcgctgggactaatcttaactgcttgttatttattataacatcacgatgtttataaaagtgagtacatgaatatcctcagattttcagc

SEQ ID NO: 15859 - DNA, 1464 bp, Zea mays
  Clone ID: LIB3060-094-A8_FLI
cctgtttccttatctatacaaaccaaactcgcgctccagaccacagctcaccctcacctgcgacctgcgcgcattcacagccgccggcgccacacgtgcccgcgcgccgggcgccacctctctcccatccaccagccttcctctcccgggccaggcggcgcccctcaatggccgccaccttcaccgtcgccgcccgcctcccgctgcggggccccgcgcgcgctccgtcccggccggccgtcgctgctgtaacccggcttcgaagccggcaggagcggcgcggcctagcagcgacaggcgggaggggacctgcccgggttcgggccgagactttctccggtggtggaggcgtggggcggagggaccccatggcgccgccttacaatgtcctcatcaccggctctacgaaaggtataggatatgcattggcaaggaaatttctggaggctggtgataacgttataatctgctcgagatcagctcaaaaggtagaatctgtggtcggtgacttgaaggaggagtacggagagcaacatgtggaactgtctgtgatgttagaaatggaaaggatgtaaaggcacttgtggagtttgcacgtgacaaacttaagcatattgatatatggatcaacaatgctggatcaaatgcatatacatacaaaccactagtggagacctctgatgaggctctcatgtaagttttgtcctatttgagaaaccctggcaaatacacttctattcttttgtgctgttaatatcagtgattacttggacctcttctctgatttactagggaaatcatcaccactaacacccttggattgatgatatgttgtcgtgaggcgataaatatgatgaggaaccaacctcgaggtggtcacatattcaaccttgatggtgctggttctgatggaaggccaactccaagatttgctgcatatggtgcaacaaagagaagtgttgtgcatcttacgaagtcacttcaggctgaattgcagatgaatgaagtgaataatgtgatggtgcacaatctatcgcctggcatggtcacaacagatcttcttatgtctggtgcaactacaaaacaagcaaaatttttcatcaatatattagctgaacctcctgatgtggttgcagactaccttgttccaaacgtcagagaaatccctaccaagcaatccatgaagccaacctacattcgtttcctcacaggcttgaaggcctactcaagaattttttctagacttgcttttggtgctaggagaaacaagtatgttactgaagattagttatgctgccagcttccaactgaagagattaggaacaattcttttcattaagcgtcacttacttttctcataagatgggatgtattacagatgtcatctcatgagaacagtgatatactcttctgtacagtagtagcaatttttttagtaaatgcataggaaaactgtgcatcaat

SEQ ID NO: 15860 - DNA, 1247 bp, Zea mays
  Clone ID: LIB3060-094-C6_FLI
cacaactggacgacggtgcgttgcgttggtggccgccggcgacgatgtcgtcgtccgcgggcgacaagaggaagaagacggcgtgcgtgaccggagggaacgggtacatcggctccgcgctcatcaagatgctgctggaggacggatacgccgtcaagacgacggtcaggaaccccgacgacatggacaagaactcccacctcaagggcctgcagcagctcgggccgctgacggttctccgcgccgacatggacgaggagggcagcttcgacgacgccgtcgccggctgcgactacgccttcctcgtcgccgccccggtgaacctctcggcacaggatccagagaaagagcagatcgagccgtccgtccgaggcacgctgaacgcgatgcggtcgtgcgcgaaggccgggacggtgcggcgcgtgatcctgacctcgtcggtggccggagtctacatcaggccggacctgctgcaactgcgaggcgacgggcacgtgctggacgaggagtcctggtccgacgtcgagtacctcagagccaacaggccaccaacctgggggtactgcgtgtccaaggtgctcctcgagaaggaggcgtgcaggttcgcgggcgagcacggcatcagcctggtcaccgtctgccccgtcatcaccgtgggcgcggcgccggcgcccaaggtccgcacgagcatcatcgacagcctctccatgctgtccggcgacgagcgagggctcgccgtgctcaagggcatcgagaagacctccggcgcggtgcagctggtccacgtcgacgacctctgccgcgccgagctgttcctggcagaggcggcggcggccgacgggaggtacatctgctgcggcctcaacacgaccgtcctcgagctcgcgcgtttcctggcacacaagtacccgcagtacggcgtgaaaacaaacctcgacggcgatgaacagcagctactcgagaagccgagggtgagggtgtcgtcggagaagctcgttcgggaagggtttgagtacaggcacaacacgctggacgagatctacgacaatgtggtcgagtacggcaaggcgttagggattctgccctactgatatatagatgcccgtgcttaattaagtacgagggcagcatatatgttatcggacatatatacgagtcttggaaagtaattaaataatttatggacatatttttcattggaaaaaccagtgtgagagttctagactaaaggctagtttggaaacttc

SEQ ID NO: 15861 - DNA, 1547 bp, Zea mays
  Clone ID: LIB3060-094-G7_FLI
gtcgcctccccgacccaacgccgcgacccccttgcccgtccgcgagcgctgcagcacctcggttcccgccccaatggcaacagcgtgtccgccgctctcgctgccgtccacctccctcttccgcggcaggtccgcccgcgccgggcccagacgcaggcagctcacggccgtccgctgcagcgccgtcggagaggcggtagtggagcaggcctcgcccgggacggcggaagagccgctgctggtgagcgcaatcagagggaggaaggtcgagaggccacccgtctggctcatgaggcaggccgggaggtacatgaagagctaccaattgctctgcgagcggtatccttcgttccgtgaaagatcagaaaatgtcgacctagttgttgagatctctttgcaaccatggaaggttttcaagcctgatggagtcatcttgttctcggacatccttactccacttcctgggatgaacataccttttgacattgtgaagggaaaaggtccagtgatctatgatccattgagaacggcagctgctgtgaatgaagtcagagaatttgttcctgaggagtgggtcccttatgtggggcaggctctgaatattttgcgacaagaggttaagaatgaagctgctgtactaggttttgttggagctccgtttaccttggcatcttattgtgtggaaggaggttcatcaaagaactttacattgattaagaaaatggccttctcagaaccagcgattctacacaatttgctacagaagttcacaacatcaatggctaactatattaaataccaagcggacaatggggcgcaggctgtccaaattttcgattcatgggctactgaactcagcccggctgattttgaggagtttagcctgccttatctaaagcagatagtggatagtgttagggaaacacatcctaacttgcctctgatactctacgcaagtggatctgggggcttgctggagaggcttcctttgacaggtgttgatgttgtcagcttggactggacggtcgatatggcagagggcaggaaaagattgggatctaacacagcagtccaagggaacgtggaccctggtgttctttttggatccaaagagtttataagcaggcggatttacgacactgtgcagaaggctggcaatgttggacatgtattgaaccttggccatggcatcaaggttggaactccggaggaaaatgttgctcacttcttcgaggtcgcaaaagggatcagatactaaagaaccttgcatggttctttcctttctccaaatcggcagaagttgtagagtcggcggcggtcgaggatagatgcagaaagccatgtgcagtatagagtgcctgaaaacatttttgtgactgattctgtctgtcgtatttcaagttccgatttcagtgtaatattgtaagcagatttgagtcgaggcgtaatgaagtgcctacttgtttatagcactactatagttctgtacaaccagtagccttgtctatgagactacgaagcagaaatactgatcatgtgttgacatg

SEQ ID NO: 15862 - DNA, 1433 bp, Zea mays
  Clone ID: LIB3060-094-H10_FLI
aagtgagtgtgatcgatcacacactgcacacactgccatggccgtcatgggcaaggaggacgagcaggagcagcagcagcacaaggaggaggaggtggtccaaggagatgtgcgagtcgtcgtccagcaggagacgtcggcggacgaggaggccgagtcggcactggtgcgcaagatctccggcctggccgccgccatcgccaggctgccgtcgctgagcccgtcgccggaggtgaacgcgctcttcaccgacctcgtcacggcctgcatcccgcgcagcaccgtggacgtggagcgcctgggcccggagctgcagcgcatgcgcgcgggcctcatccgcctctgcgccgacgccgaggcgctgctggaggcgcactactccgacctgctggccgccttcgacaacccgctggaccacctgccgctcttcccctacttcaccaactacctcctgctgagccagctcgagcacggcctgctggcgcgccacgtcccgggcccgcccccctcccgcgtcgccttcgtcggctccggcccgctcccgctcagctccctcgtgctcgcctcgcgccacctccccgccgccgccttcgacaactacgacatctgcggggacgccaacgaccgcgcgcgccgcctcgtgcgcgccgacgccgcgctcgccgcgcgcatggcgttccgcacctccgacgtcgcccacgtcacccgggaactggccgcctacgacgtcgtcttcctggcggcgctcgtgggcatggccgccgaggagaaggcgcgcgtcgtcgagcacctcgggaggcacatggcgcccggcgccgcgctggtggtgcggagcgcgcacggcgcgcgcggcttcctgtaccccgtggttgaccccgaggagatccgccgcggcggcttcgacgtgctcgccgtgcaccacccggagggggaggtgatcaactccgtcatcatcgcccgcaagcccctcccggtcgtcgacgagcacgccgtcgccggggtggggcacgcgcacgcgcacggcgccgtgctcagccggccctgcctctgctgcgagatggaggcccgggctcaccagaagatggaggaggtggccatggagcagctgccgtcctaggcacaagatggattgccccggccggcagcccatgcaatcgcattgcatctatctcatcgatctacttacgtgtctacaccacatgcgtgataataatctgcagattgacctggctactagctggtatattgtcaccgtgattatattaagtttttgtttaacaaaagggtagaagtcgaagtccgagccggcaaaagaaaaaatactggagaaaaaaaatagtgcacgaaggagacggaggcagagcgaacaggctggcctaatttcatttgtatgctaatgttacgtgtgtcaatgatgatggagtggttaaatt

SEQ ID NO: 15863 - DNA, 1184 bp, Zea mays
  Clone ID: LIB3060-095-B10_FLI
gagaagcgttcttcctcggggaatccgttggaagaagcggtctccggtgcaatcccatggcttctagggatttcctgggagggttcggccgggatggagggcaagcgcctgtgggtggcgctggcgccgccccggggcccggcggggagtcggacgagatcgagctcagcctcggcctgtccctcggcggctgcttcggcgccgagccttcgcaggaggggaggagcgccgaccctcggctccagcgctcgtcctccgtcgcgtcgatctgctccttgcctgctgccaccaccggcaccagctgcggggcgcaggacgccggccccgccgccgcgcctccgccggacctgctccgcacctcctccctgcccgcggagtacatggaggaccggctccgccgccgcgcgatgcagagccagcggcgcctcgaggccaagcgcaagcgcctcgagcgccgcaactccatgagctcgggaaggccggttccggcggccggtggccgcgacgacggcctcgagcacaccgtgcccagcggcttccagctccgccgttcggtcgccttgacgacggcggggtcgccgacgcccagccggccgcagcaagggcccgcggaccgccgtgcggcggaggcgaccggaccggacggcgcggcctgccacgacgagccgctgccgctgcgcctgcgcacgctgcggtcgctgacgatgcggacggcgagcacgggcgacctccggagcgccatggcggaggacatgcccatggtgtcgtacaaggcggagggccccggcgggcgcaagacggacgggttcctgtacaagtacaggaagggagaggaggtgcggatcgtgtgcgtctgccacggcagcttcctcacgccggccgagttcgtggagcacgccggagggggcgaggtccccaacccgctgcgccacatcgtcgtcaacccgcagcagtcggtgttcttgtagcgcccggccgcctcggcctcgcgatggagatggaggtggtggatgtaccgtcggagcttgagctttttaacgagggactgtagaagctggaaaccttctccctctctctttttttggttctgctttgtttattttctgtttcttttggtactcatgtagtcatgtggttactattattattacaattattattaacagcaacagtagtaattgatt

SEQ ID NO: 15864 - DNA, 1276 bp, Zea mays
  Clone ID: LIB3060-095-C12_FLI
cgtgctcccacctctccaccgcctggtcctcctcggcgctcgccagcagcgcctccaccacccgacggcgctcccccccgcgctcgggtctcctggtgcggtgttccctccgtgagctccgcacccgcatcgactccgtcaggaacacgcagaagatcacggaggccatgaagctggtggccgccgccaaggtccggcgcgcgcaggaggccgtcgtctcctctcgccctttctcggaggcgctggtggaggtgctctacaacatgaaccaggagatccagacggaggacatcgacctgcccctcacccgcacccgccccgtcaagaaggtggccctcgtggtcctgaccggcgagcgcggcctctgcgggagcttcaacaacaacgtgctcaagaaggcggaaacccgcatcgatgagctcaagcagctgggcctccagtacaccgtcgtcagcgtggggaagaagggcaacgcctacttccagcgccgcccctacatcccgttggagcgcgatctagaggtgagcagcgtgcccaccgtcaaggactcgcaggccatctgcgacctcgtctactcgctcttcgtctccgaggaggtggacaaggtggagctgctctactccaagttcgtgtcgctggtgcgctccgaccccatcatccagacgctgctccccatgtcgcccaagggcgagatctgcgacgtcaacgtcgtctgcgtggacgccaccgaggacgagctcttccgcctcaccaccaaggaggggaagctcaccgtggagcgcgagaaggtgaagatcgagacgcagcccttctcccccgtggtgcagttcgagcaggaccccgtgcagatcctggacgcgctgctcccgctctacctcaacagccagatcctccgtgccctgcaggagtcgctcgccagcgagctcgccgcccggatgagcgccatgagcagcgccaccgacaacgccatcgagctccgcaagaacctctccatcgcctacaaccgacagcgccaggccaagatcaccggggagatcctcgagatcgtcgccggtgccgacgccctcgctggctgagcctgagtccccttggtggtgcggtgctcctgctatatataattctttttcctcattttctccactctgcctgtaattcctgataatagcacaaacgcaacggagttctgtgttccttgcgacacacaagaatttcaatccagagatgccaaaatgtataatcttgccgcaactgagacgtcgaagctcagtgtattttt

SEQ ID NO: 15865 - DNA, 1214 bp, Zea mays
  Clone ID: LIB3060-095-D2_FLI
cccaacttccagtcgatctcctcgctcggctgttgcctcccaaagccgcgccttacaacgagattcctcccctcctctctccaataaccctagcctcctccgccgccggcgacgaatccggcgttttgagtttctgttgccagcgtagccatgtccatgttcaataggatcttcgggaagcccaaggagcaggccaactccaatgccttggccactctggacaagttaaatgagactcttgatatgctggagaagaaagaaaaggtgctggagaaaaaagcagccgctgagcttgagagagccaaggagttctcaaaagctaagaataaaagagcggctatccaatccttgaagaggaaaaaactttatgagcaacaaattgagcagcttggaaattttcagttgagaatccatgatcagatgatcatgttagaagcagctaaagctacaacagagactgttgatgcattgagaactggagctgcagctatgaaagcaatgcaaaaagcaacaaacattgatgatgtagacaagaccatggatgaaattaatgaacagactgaaaatatgaaacaaattcaggatgctttgtcagctcctctcggagcttctgctgatttcgatgaggatgaactggaagccgaacttgaagaactggagggagcagagttggaatctcagcttctggagcctgttgcagctcctccggtgcatccagtgcatgccccagccaacaagcaaccagcgcgccctgctccacagaaagctacagctgaagatgatgagcttgctgcactgcaagctgaaatggcattgtgatcaggtttccaatgaagaggtggaatgtgtatatgaatggtgttatgctaccaagatgaaagttgagtcaggatttattatatttgccatgtgtataatcttgggggatatttggcaagcagaaaaaaagctgctccaggcagtgtttgtttcagtgattttgggctctgttttccacaaacagtttaatgtcgcccggttagctctaagctaactattcaggtcaccaacgtgcattgtttgtcacagtatttttcatttgcccatattgtctggagccatgtaagagtgttgtgtaacaccctaatccgtcaatgaaaaataacttagcttatattattaattcctagtagaaaaaattattatgttttcaattaatgaaatggtgatttcct

SEQ ID NO: 15866 - DNA, 1643 bp, Zea mays
  Clone ID: LIB3060-095-E6_FLI
ggtgctcagcggaacagctagctatagcctgtagctagcagctagcttcagtcacaggccggacggtcggctcacacacagctagccgccgccgccgctagcttagccaccagtagtccgatctgatctacaggcaaggggcaactagctagctagccgcgcgccggcgccatgatgaacctgaacctgaagcagcctctggtgctgcccgcgcaccacagcaatgtcgtcggctcgcgcctgtcgtcgtcgtcgccctcggcagccgccgccagcaggaggaccggcggcggcgtgtcctcccggtccggctcccggcggcacgtgcggctgccgaggatcagctgcagcgccaccgaggaggtcagcggcgccgtgtcgtccgtcaccgtggagaggatgctcacggtgacggcgtcggtggaggcgtcgccggccatcgggcagatgtacttccagcgcgccgtcgacgacatcggcgacctcctcggcaagacgctgctgctcgagctcgtcagctccgagctcgacgcaaagtcgggcgtggagaagacgcgggtgacggcgtacgcgcacaagacgctgcgggagggccactacgaggcggagttcaaggtgccggcgtcgttcgggccggtgggcgcggtgctggtggagaacgagcaccacaaggaggtcttcatcaaggagatcaagctcgtcaccggcggcgacagcagcaccgccgtcaccttcgactgcaactcctgggtgcactccaagttcgacaacccggagaagcgcatcttcttcaccctcaagtcatacctgccgtccgacacgcccaaggggctggaggacctgaggaagaaggacctgcaggcgctgcgcggcgacgggcacggcgagcgcaaggtgttcgagcgcgtctacgactacgacgtgtacaacgacctgggcgacccggacaagaacccggcccaccagcggcccgtgctgggcggcaacaagcagtacccatacccgcgccgctgccgcaccggccgccccaggaccaagaaggaccccgagacggagatgcgcgagggccacaactacgtgccccgcgacgagcagttctcggaggtgaagcagctcacgttcggggccaccacgctgcgctccggcctgcacgcgctgctgccggcgctccgcccgctgctcatcaacaagaaggatctgcgcttcccgcacttccccgccatcgacgacctcttcagcgacggcatcccgctgccggcgcagaccgggttcgacgccatccgcaccgtcgtcccgcgcatggtcaagctggtggaggacaccaccgaccacgtcctccgcttcgaggtgccggagatgatagagagggaccggttctcgtggttcaaggacgaggagttcgcgaggcagacgatcgcggggctcaacccgctgtgcatccagctgctgactgagttccccatcaagagcaagctggacccggaggtgtacgggccagcggagtccgccatcaccaaggagatcctggagaagcagatgaacggcgcgctgaccgtggagcaggcgctggcggcgaagcggctgttcatcctggactaccacgacgtgttcctgccctacgtgcacaaggtgcgggagctgca

SEQ ID NO: 15867 - DNA, 1138 bp, Zea mays
  Clone ID: LIB3060-095-F10_FLI
gcagccgctagccgtacgatggcggacaccggtgacgtcgccgccgccgccgaggcctcggcgcgaccggcgggcagcagcagcacccagccgctggcggggcgcgtggcgatcgtgacgggcgcgtcgcggggcatcggccgcgccatcgccacgcacctgtcctccctcggcgcgagcctggtgctgggctacgcggcgcgcgccgacgaggcgggcgcgctggcggcgtcgctcccgcgcgcggtggccgtgcgggcggacgtctcggacgaggccggcgcgcggtcgctcttcgacgcggcggacgaggccttcggcggcgcgcacatcctggtggccagcgccggggtgctggacgacacgtaccccgccgtggccggcaccgccaccgaggccttcgaccgcgtgctcgccgtgaacctgcgcggcgcgttcctgtgcctccgggaggcggccaaccgcctccgccgcggcggcggcgggcgcatcgtcgccgtgacgtcgtccgtggtggggagcctcccgccgcggttcggggcctacacggcgtccaaggcggcggtggaggcgctggtgcggaccatggccaaggagctcgggggcacccgcgtcacggccaactgcgtcgcgcccggggccacggccacggacatgttcttcaagggcaagagcgaggccatggtgcgacacgccgtggagacaaacccgatgcagaggctcggcgagcccggtgacatcgcgccggtggtcggcttcctgtgcaccgacgccgccgagtgggtcaacggccaggtcatccgcgccaacggcggctatgtgtgatgtgatctttagctttcacagcttcttggtgtccatcgtcgttttcctttgccacgcactgtttcgccatcttgttatctttacctttaaccttattatcattctagcacaaattcataggaatattttctcgaggatcgttgggcggccggcttgacggccttgacctcggctagtggtcattgccataatgccaggtcagccttcaatcatgacagaaatagctcgcccatccaggatccaacatagaatctaagatcatctcaatatatgtaacatcacaagtgtaattatacttagagcaaggttatgt

SEQ ID NO: 15868 - DNA, 2221 bp, Zea mays
  Clone ID: LIB3060-095-H2_FLI
ggctggacacgattgcgcgtctgcgcttcagcctccagttcccggtgacgacgcccactagtctctactagataggcagcgccggtgctgctgctgccgccgccgatcagggcttcgcctcccctgttctcgcgaagatccgattgctttcgcccgccacccgcatggctccggcgtccgagacggagctgcaagcaccaccaccggcgtcggctaaggagatcaagtcgccggaggtgctgccggagccaggctcgctgtcagcgttgcagcgcaagaagctgggtgcgcacttcatggagagcgacgagcgccgcgtctcccgcgccaggacacctctcggcgccgcctacgaaccgccctccgccgccggcggcggcggcggcaccacgccggtcaacatccgcggcgagcccatccaggacctgtcgaggaccggggggtgggtggccgccttcttcatcttcggcaacgagatggcggagcgcatggcctacttcgggctctccgtcaacatggtcatcttcatgttcaaggtgatgcaccgcccgttcgccagctccgccaacgccgtcaacaacttcctcggcatctcccaggcgtcctccgtgctgggtggcttcctcgccgacgcctacctggggcgctactggaccatcgccatcttcaccaccatgtacctgctggggctcatcgcgctcaccgtgagcgccagcgtgccggcgctcgtgccgccgcaggagggctgcgacaagctcgccatgctgctgggcgcctgcgcgcccgccgcgccctggcagatgggctacctccagacggcgctctacgtgacggcgttgggcgcggcggggatccggccctgcgtctcctccttcggcgccgaccagttcgacgagcgcagccccgggtacaagcgccggctcgaccgcttcttcaacctcttctacctcgccgtcacgctcggcgccatcgccgccttcacggccgtggtctacatccagatgcagcacggctgggcggcggcgttcggcacgctggcactggccatgggcacctccaacgcgctcttcttcgtgggcacgccgctgtaccgccaccgcctgccggggggcagcccgctcacgcgggtggcgcaggtgctcgtcgccgccttcaggaagcgggacgcggccttcgacagcggcgacttcgtcggcctgtacgaggtcgccggcgccaagtccgccatccgtggcagcgccaagatcgaccacaccgacgacttcagatggctcgacaaggccgcgctgcagctggagggtgacctcgccggcggcgaggacgaggaggcggtgaacccgtggcgtctgtgcacggtgacgcaggtggaggaggtgaagatcctgctgcggctgctgccggtgccggcgtgcacggtgatgctgagcgtggtcctcaccgagttcctcacgctgtcggtgcagcaggcctacacgctgaacacccgcgtggcggcgctgcacctgcccgtgacgtgcatgccggtgttcccctgtctggccatcttcctcatcctggcgctctactaccagaccttcgccccgctggcgcgccgcctgacgggccacccgcacggcgcctcccagctgcagcgcgtcgggctgggcctcttcttctccatcctgtccgtggcctgggcggggttcttcgagcggtaccgccgcgggtacgccgtccgccacggatacctcggcctcttcctcacgcccatgccggacctcagcgcctactggctgctcatccagtactgcctcatcggcgtggccgaggtgttctgcctcgtcgcgctcctggagttcctgtaccaggaggcgcccgacgcgatgcgcagcgtcgggtccgcgtacgccgccgtcgccggcgggctcggctgcttcgtggcgtcggcgatcaacaccgcggtggacgccgcgacgcgggacgatgaggaggggcggccgtcgtggctggcgcagaacatcaacgtgggcaggttcgactacctgtactggctgctcgccgtgctcagcaccgtcaacctgctcattttcgtcttctttgccaagcggtacaagtacagggtcagggtcgacgtgccgaccacagttgctgttgataagcagtagctagccgctagcgccattacaaggatttgagtttggatgtgctgtaactattgattactgggaataccataaaacat

SEQ ID NO: 15869 - DNA, 1500 bp, Zea mays
  Clone ID: LIB3060-096-A1_FLI
ccaacacacacagagagaggacaactcctcacaactctcccttccctcctgtaggggccaaaagggttagagagtaagagaagtagttcattcccttgcccaacacaagaaaacaagctctcctcatcaccctaatccaagcaactgcttgtgtgttgggaaattcttgtgacccctgttatattattatccgtgtagctactagcttcattcccccctttgtacccatcaaatggctggcatgtctctgcaacacccctgggcgtttgctttcggtctactaggtaacgtcatctcattcatgaccttcctggccccgataccgacgttctaccgcatctacaagagcaagtcgacggaaggcttccagtcggttccctacgtggttgcgctgttcagcgccatgctgtggatcttctacgcactgatcaagtccaacgagaccttcctcatcaccatcaacgccgccggctgcgtcatcgagaccatctacgtcgtcatgtacttcgtctacgcgcccaagaaagccaagctgttcacggccaagatcatggtcctcctcaatggcggcgtctttggggtcatcctcctgctcacccttctcctcttcaagggtagtaagcgcgttgtgctgcttggctggatctgcgtcggcttctccgtcagtgtcttcgtggcgccactaagcatcatgagacgagtgatccagacgaagagcgtggagtacatgcccttctccctctccctctcgctcaccctcagcgccgtcgtctggttcctctacggcctcctcatcaaggacaaatacgtcgcgcttccaaacatcctggggttcaccttcggcgtggtccagatggtgctctacgtgttgtacatgaacaagacgccggtggcggcgactgccgagggcaaggatgccggcaagctttcctcagctgcagacgagcacgtcctcgtcaacatcgccaagctcagcccagccctcccggagaggagctccggggtgcacccagtcacccagatggcgggcgttcccgtcaggagctgcgctgctgaagcaaccgcgccggcgatgctgcccaacagggacgtggtcgacgtcttcgtcagccgacacagccccgccgtccacgtggcatagattctcgatcgatcgcgtgcatggcccatgcatgcgcccgccacacgtacgctagcttttatatattcgaaggacttgctgctggtcgtgagcatatatatatgatggagaaaatgattaagtagtatatatataagtaattaactgccatgcatggaagctagctaatggatggaggcagaggccagaacgatgaagggggaagctatacatatatgtgtgtaattaatatagatatatgggctttgtgttcatctttgcagctatgtattaatttgcatggatatctgttattcctttttatgtgtaacgtcttctaataaaatgtaattgaacccacactactgttgttagctacc

SEQ ID NO: 15870 - DNA, 2058 bp, Zea mays
  Clone ID: LIB3060-096-D1_FLI
cccctgctcggcctctgaggtttcccagtagcggcgcctagcatcttctccgcgcgcagcttgcttcctccctctgccgctcgtctccatctctccatctcccaaaagaccgcgcctagctccagccatgagcgccgacgtcctctctctgtgcttgatctcccagtcctccgctccctgaaaccttcacccacatgtttgtgaaggtccggtagtggagatcttgcgaggtccactgctctgcgctcctattccacctgtctcatcccctcatcatgctcgacacttgctccctggcagcatgtcgtagcagcatctgtgcttactgtgccgtgctgtttctctgcacgcgtcaagctctcgcgctgaatccagccccatgttgacgcgttcatgttccagcttgtcgtgccgcgtcgtcatcactttctgtcgcgagctcgattcccgttgtcatcgggctttgtgcgtgctcgcgtttgccgtcgagtcgttgaacccgtcatcctttgctcaaccctaccccgccagctcgctccagatacaatcttgttatcgtcccgcgcgtcatcaagaatcccaagaatcgggtgaaaacgaagctagcagcgcgatattccccaagcgctcgacaattgcctggatcggaaaatcactaccgatctcgcggattcgagtcggctattgaaacggtacgttaattaatcgcgtgatgcggaagatgagccaagtcgaccccaagcgtgggcttcttcgcaaggcgatgctgatggataaacctgaagatggtcgtcaagtgctcatcgactaacaacactaacctagtgttactcaggcaagccccggtgcatttgccaccttccttgatgtttttaaaatctttctcacttgattgctgcattaggtgataggagttgattgctaaaacaattcctgcattaccttccttgaacttgattaccttccttgatcacccgttttataaaagatttttgatgcttagtcttgctttagaaaaacaaaatgttttgtttttacaaaatatgatgtggcaaaggtgggtgggttgttttcaaaaataaaacttgatggtgaatccatcacggccgtgatggattcaacatcggaaaagatgtacctctgccaggtaccaacctttggggttaaatgattaagctgagaccgggcgggtgacatgcacgagaagagagtctcggtgtagtgtctccgtctgagtcgattaaggaccttgtcgatgtaggcctgctgaccgaggaccctttaactggtcacatgcctcgtcatgggtaagccttgcctcgggtagactaaggccggaataagatcacacgaaatgggcgtggagcggtggcgagagtagcgtgtaccctccgtggcaagaggctggacggtggtgtatctgtgctctcggtttgcgtgaacctgatccggtcttaagaaccccggtggcgggttgacatatgcaagggttaagtgctacatatgtcgtgtgattggagatcctcagctgagtataatcgattcggatcgccgtacctccgcggttatggagacttggccactgacttacatgtagcattccactaaagataaagggtttttgttgagaaattggctagtgtaggaccagtgattgaactagggtagaaagaactctagctgcaggtaattttacttaacctgacaataaaattggattttaaggatccactcgtagtaagcttttctgcaaaacagagtctttgattcttgataagccataccttgactcccttaagccagcatacccttgagagtctttttctttagtcgggtaagtcttgctgagtaattccatactcagggttttattccctgttgtttttcaggttctaactttgtgctattgttgatggtgttaagtgccggtgggctcggccttcttataagtctaagtaacccttctatacttcttattgaggatgatcccttgagctagcatatatttcaaacttatacttttgtaatcactccgataaactaatgtaaaatttttgt

SEQ ID NO: 15871 - DNA, 2585 bp, Zea mays
  Clone ID: LIB3060-096-F8_FLI
gggcccctagattctctctcgcgcttccgctttccttctcctggtcctggccatggcccacgaacgggagccgctcctgcagcaacgacagaccggcgtcggcaatgcctgcggtgccaaggactcgtcctcggcgccggcgccgtcggctgccgcgctgccgtcgctggctaggaccgtgctcaagttcctgatgtgggcggtgttcctcacctgggccgcggggatcttcctctacccgaccaagcccgtgcaggccgtgttcaggaagtgggtcgggctcaccagggactccatgttcggcatcgccgggggtattttcctgaccttcagcgcgccaattctgatcattgcgcttctcgcatatgtgtacatctccttcttcccgagtgagcatgtggtggagaaaaggaagctgcgctcactgagtttcaggctctggactttccctgttcttgtagacggcccctttggagttgtctctgcagttgagttcatcggaattgtcttgtttatagtttttgttgtctactcaatgacctattatgccgtggaagctgtgagccttgtctcgaaatttgatatcccatcaatgactgagagtgaattgatactggatgtcattggcctccgtttaggggcggttgggttgttctgcatgctcttcctcttcctgccagtcgcccgaggctcggttctcttacggcttatcgatattccatttgagcatgctacaagataccacgtctggttggggcatctcacgatggctctatttacattgcatggcttgttctatgtgatctcatggtccatgcaagggcgcctccgtgaagaactgagacagtggaaggaaattggagtagcaaacctgcctggtgtgatcagcttggcagccggcctacttatgtgggtgacatcacttcacccagtgaggaagaggttcttcgagctcttcttctacacccaccagctctacgtcgtcttcgtcgtgttcttggcgtttcatgttggtgacttcatcttcagtatttgtgccggagctgtgttcctcttcatgctcgaccgctttttgaggttctggcaatcaagggccaaagtcgacatcatttcagccgcctgccgcccgtgtgggacggtggagctagtattctcaaaaccagcaagcctccactacaatgctttgagtttcatcttcattcaagtgcgcgagctatcgttcttgcagtggcacccgttcagtgtatcttcaagtcccatggatgggagataccacatgtcggttctcataaaagtactcggcacgtggactgaaaaactgaggagcatcatcaccgatgtacaggagaagaacgggggtgactctgagctgcaatgcgggcgcatgacagcctgcgtggaaggcccatatgggcatgaatcaccctaccacttgatgtacgagaatctcgtcttggtcgcaggaggcattggaatatcgccattcttggcgatcttgagcgacataatccacaggatcgaggagggcaagcaatgcatgcccaagaacgtgctggtcctttggtcagttaagaagtccaaggagctttctctgctgtccgccgttgatgcccagaccatcagctcatctgtctcggacaggttgcaactggatatccaggccttcgtgactcaagaaccccatcctcctttggaggatggcatcgtcggggacgaccagaaagtccctggcatgttcgtcaagaacggtacagccatgtctgggctggtcggcaccggggacaacttctgggcggccatgtacttcctggcgtccacgctcggcttcctcctggcgtacgccctggtgcaggtgtactacgtgaagccgcacaacgtggtggcgtggtggtacctgggcctcctgttcatgctgtgcatggttgccggcgtcgctctacccggcgggctcgtggtcctcctgtggcatctgtcggagaagcagaggttggaggacgacaagtgggacgcctctcagtcaccgcgcgccgagcagacaggccccttggctgcggcgggtggtggtgacgacgacgctgctcccagcgtcagcctcgccgccctgcggacgacccggtacggctgccggccgaacttcgaagcggagttcgcggcgttcgcggagcgcgccggggacgcggcggacgtgggcgtgctggtgtgcggaccgcaggggctgcagacgagcgtagcgagggagtgcagggcgcggaacctccgccgcggcggcttgggggcggccaagagcaggagcggcgcggtcttccatttcaacagccacagcttcgacctgtaaactacgtacgtctcgtttggtcggttcaacgatcatcagtacatgttgcacagcacacacgcacagacgatagttggatgtacatgttgatccgtcataatttgatatcgtgtatatatatgtatagctgatagttaatatagttaagttatataagagatgtataaatctgtatgcgtatactataggtgtagcatatgcatgcatgatagaagcacgaaggttaaatgctgacgaatcacgtgaaatc

SEQ ID NO: 15872 - DNA, 1355 bp, Zea mays
  Clone ID: LIB3060-096-G3_FLI
atgcagtcagtctccagcttgctgctcgccggtccttcgcctagctcgccggaagccgcggagacgacgccgccaccgatgcagccgctacaatgtcaacatgagcgattggtgggcaacatgtgcccttctctctatctcgccgtctacagagggcggatagcggacgtcacggcgctgcttctggaacaacccgccgttgcaatagattgtcaagccactaccacgccgggtattaagggcactgctattatgcacggacagtgcgacatacttgagttgacagcggagaggaacaccgctctacatgtggctgcggagcaagggcaccacgagctgatccgggagctctacttcaggttctcagaccagggcctcctcaatcgcctgaactcggcgctggacacgccgctgcattccgcggcgagggcagggcacgtcagggcagtcgctgttctcttcgagctggcgagggatcgtggcgtgaacattctgggatgcaaaaatgaggcaggggacacggccctgcacctggcggcgaggcacgggcacggtgcagcggtggaggtcctgatctcggcggcggcagaaccggcggccgagctgaacaacgccggcgtgtcgcctctgtacctggcagtaatcagcggctcggtgcaagcagtcagagcgattaccacgtgcaaggacgcatcatcgctggggccaggcgcacagaatgctctgcacgctgccgtcttccagagctcagaaatggttcacctgctattggaatggaggccagctctggccgaccaagtcgacagcggcggcagcagcccgctccatttcgcttcgtccgacggcgaccgcacaatcgtgaaggcgatcctgcgtgcctcaccaccaagcacagtttacaagaaggactcggacggcctgtcggcccttcacgtcgcggcgcggatgggacatcgccgcgtcgtgaaggacatgctacggagctatcccgacgccgccgagctccgcgacggtaacggcggtaccttcgtccacgcagcagccagggagaggcgctcctcggtggtgtcgctcgctatcagcaactccatgctgcgcggcgtcctggacgcgcaggacagggacgggaacacgccgctccacctcgcggtggcggtgggatcgaccggcgacgtggaggccctgctacgggagggcaaggtgcgtgccgacgttctgaacaacgacggtcacacggcgttggatctcgccgccagatcgaacgccggtttcttcgccacgatcaacctggtggtggcgttagtcgccttcggggcacggctccggccgcagaggcaggaccgcctggagcagtg

SEQ ID NO: 15873 - DNA, 1175 bp, Zea mays
  Clone ID: LIB3060-096-H12_FLI
ggcaaaagccaaaaggcatcaccgccgcgacgacgatggcagcctcgctccaagccgcggccaccctgatgcagccggccaagatcggcggccgggcgccctttgcctcgctgccgtcccgcccgtcgtcgcaactcgcctgcagggcgttcggcgtcgacgccggcgccgccaggatcacgtgctccctgcaggacgtcgccagcaggtgcgtcgacgccgcgaagctcgccggcttcgcgctcgccacctcggcgctcctcgtctcgggcgcgagcgcggagggcacgcccaagaggctgacctacgacgagatccagagcaaaacgtacatggaggtgaagggcacgggcacggcgaaccagtgcccgaccatcgacggcggcgtggagtcgttcccgttcaaggccggcaagtaccagatgaagaagctgtgcctggagccgacgtccttcaccgtcaaggcggagggcatcgccaagaacgccccgcccgagttccagaagaccaagctcatgacccgcctcacgtacacgctggacgagatcgagggcccgctcgaggtcggctccgacggcacgctcaagttcgaggagaaggacggcatcgactacgccgccgtcaccgtgcagctcccggggggcgagcgcgtgccgttcctcttcaccgtcaagcagctcgtcgccaccggcaagcccgagagcttcggcgggcccttcctcgtgcccagctaccgcggctcctccttcctcgaccccaagggccgcggcggctccaccggctacgacaacgccgtcgcgctccccgccgggggcagaggtgacgaggaggagctccagaaggagaacatcaagaacgccgcctcctccaccggcaacatcacgttgagcgtcaccaagagcaacccggagaccggcgaggtcatcggcgtcttcgagagcgtgcagccgtccgacaccgacctcggggccaaggcgcccaaggatgtcaagatccagggggtctggtacgctcagctcgagtgattcgagtgtctaactgctaggtgtccgaccgccgtcatggatcttgggaaggtgtatgtataccatggaaaactttggagagcagaggaggaatcgtgtatgtaatgtacttgttaatgcaaattcgggctgtcgcttttttactccgct

SEQ ID NO: 15874 - DNA, 1285 bp, Zea mays
  Clone ID: LIB3060-097-C10_FLI
ggtctgcctcgtccgcttctctctcacccttccttcccctcctctcctgtggatgctccctccctctccggctctccgcctctcccccgccccccaagcccaaatcaccgcgcctcgccccacagcaccggttgcgtgggaggagggagggaggaaggaaggaggggaggcggctgtcgggcgagatgagcgactcctactgccccgactgcaagaagcatacggaggtggcgttcgaccattcggcgggggacacggtgtgcaccgagtgcggcctcgtcctcgaggcgcactccgtcgacgagacctccgagtggcgtaccttcgccaacgagtccaacgacaacgaccccgtccgcgtcggcggcccctccaacccgctcctcaccgacggcggcctctccaccgtcatcgccaagcccaacggcgcccagggcgacttcctctcctcctccctcggcaggtggcagaaccgcggctccaaccccgaccgatccctcatcctcgccttccgcaccatagccaacatggctgacaggctaggtcttgtggctactattaaggaccgagcaaatgaaatcttcaagaaaattgaagatctcaagtctattaggggaagaaatcaagatgccatattagccgcatgtctatatattgcttgtagacaagaagatcgccctagaactgtgaaagaaatatgttcggttgctaatggggccacgaagaaagaaattggcagagccaaagaatttatagtgaaacaactggaagttgagatggggcaatctatggagatgggaaccattcatgctggagattttctgaggcgtttctgttcaactcttggaatgaccaatcaagctgttaacgcagccaaggaggcagttcagcgctcagaggagcttgatataaggaggagcccaatctcaattgcagccgccgtcatttacatgataacccaactctcagaggacaagaagccacttaaagatatatccttggctactggtgtggcagaaggcaccatcagaaattcgtacaaggatctgtatccctacgcctcaaggctcatcccgaatacctacgccaaggaagaagacctgaagaatctctgcacaccttaggaagctttactttttttcccttctgttatataaatcggaattagatttgtcaaagaggagtgagtgaagttgttcctgttgtgaccgactgtactgagcaatgtgtcgtcgccggcgcgcttaactttgtggatggaccaatgagaacataagttgtcatc

SEQ ID NO: 15875 - DNA, 2075 bp, Zea mays
  Clone ID: LIB3060-097-D10_FLI
gaacaagtccagtctgtccagaaatacattagaaaaaagagccaaagaggagaacaccggccggcgaggtggacgaagcggcccgccgaggaaatggcgtcgatgcagagctggcgcaaggcctacggcgccatcaaggacaccaccaccgttagcatcgccaatctcaactccgacttcaaggatctggatgtggcgatcgtgaaggcgactaaccacgtggagtgcccgcctaaggagcgacacctgcgcagggttgttgcagcgacgtccatcaccaggcctcgggcagatgtcgcctactgcatccacgcgcttgcccgccgtcttgccaagacccgcaactggatcgttgctctaaaagcacttgtagtgatccatagacttcttcgcgagggtgatcctacatttcgagaagagcttctcaactttacacagaggggacggatcctgcaactttcaaactttaaggatgactccagtccaattgcttgggattgttctgcctgggtgcgcacatatggtttgtatttggaggaaaggttggaatgcttcagagttctgaaatatgatgtcgaagctgagcgcttgtccaaacaaggtcaaggtcctgaaaagggtcacagtagaacgagagagttggattcacaggatctgttagagcagctgccagcattgcagcagttactgtaccgacttgttggatgtcggcctgaaggagctgcaaataataactacttggtgcaatatgctcttgctttggtgctaaaagaaagctttaaaatttattgtgcaataaatgatggaatcataaacctcgttgataagttttttgagatgccaagacatgatgcacttaaagctcttgaaatctacagaagggctggccaacaggctgggaatctatctgatttctacgagaattgccggggattagaacttgctaggaattttcagtttcccactctgagggagccaccacaaacatttcttgctactatggaggactatgtgaaggaggctccacgcatggtcccagttcgagaacccctggaacttcctgagaggctgcttcttacatacaaacctgaagaatcagaggaaattcttgagcctgctcctgttgaagaggaaaaagtaccagttgaagaacctgttcttgtaccacctgttactgaagttgtttcacctcctcccaaggctgaggtgcccgatactggtgacttactgggcttagatgatacaaatcctgctgtatcagctatagaggaaagcaatgctcttgccttggctattgttccaacagatggcgcttcaacaactggtaacactgcatttcaagataaggggtttgatcctacaggatgggaacttgcccttgttactgcaccaagcaatacaacttcatctacttctgttggtcaattgggtggtggactcgacaagctcattttggagagcctttatgatgatggggcctacaggcagaggcaacaacaacagctgtatggttcagcagctcctaatccattcatggcaaatgatcctttcgcgatgtcgaaccaagttgctcctccaccatcagttcaaatggctgccatgtctcagcagcatcagcaaatcccaacgatgatgcaaccaaatccctttggaccacctatgcatccacaggtgagcatggcccctgcaacaaacaatccctttctggatgctggcttcggggcattcccagcggcgaacaacggccatcagcaacacaacccatttggcagtgcccaacttctgtaggtcacttagtcacaagagcaaatttgtgccccagcagatgcgatttttgtgtgattatatcatgcattgtgctggacctttcttgcatgtgacgcgtgtattatgttatggcttcaccacacggagagctgtgcctatgtcgtgacccaactcttgttgtaaagaaattagtcacctgtgtaacatccaatatatgtcaataaacagtaggcagtgttattacatctataaacaaaagaacagtggtatgtaggaaattcttaatattgtttattccattgcttttt

SEQ ID NO: 15876 - DNA, 1476 bp, Zea mays
  Clone ID: LIB3060-097-D7_FLI
ggtaaccactgaagagcggctcgccacgcgggcacgcggccgacacaggatcagagccgtcttggccgcgtcgcctccttggcaaacgggcgcgtgtggcgccacgccacgccataccgctgccacccaccgcaatccaagcacgcagcccagctatgtcggtcgctgtgctgcgagtgcgagccatggagctactggcacgacccgcagcggcagcgtcctcctgctgcgcgcgaacctcgctacagctccccgccccgggcacatcccgtccccgtcggcccgggttccctactctccgcgcagctgcggcggcggcgatcgccgcggagccgcaatcgaacgagcagcagaatgtcattatggaaactgaggtgtttgcctgccctgtctgctacgagccattgatgagaaaagggccaccaggcataaacttgccagcaatttataggtcgggattcaagtgttcaaagtgcaacaagtcatttaccagcaaagacatcttcctggacctcactgtaactgcagggacaaaagaatatagcgaacagaagcccgctagaactgagctgttcaggagtccacttgtctcatttctttatgagagagggtggcgacaaaactttaatcggagtggtttccctggtcttgacgaagagtttcaaatggctcaagactattttcaacccattgctggtggtatccttcttgatgtcagctgtggcagtggcttgtttactaggaaatttgcaaagtctgggacatactcagctgtgatcgctttggacttctctgagaatatgctccgccaatgctatgaattcattaagcaagatgattctctcctcaatgcgaatctcgcactcgtgagagcagatatttcgaggctcccttttgcttcttgttcagtagatgccattcatgctggagcggctatccattgttggccctcaccctctaatgcggtagctgaaataagccgcgtcctgaggcctggtggagtgtttgtgggaaccaccttcttatcctctcccaggaacaacccattctctgttgaagcactaaggccacttagacagattgttggaccagttaacaccagctacaactattttactgaaggagagctagaagacttgtgcaaatcctgtggccttgtcaactacagcagcaatgttcagaggtcatttatcatgttctccgggcaaaagccgtactgaagaatcctgtcaaatccaagctctgttgtttcttcaggattccttgcaaaacacgtttacaagtatttgcatatatttgtgccatactgtgcataggttccttaatttctgtactattcctgaatgtattcagtacaacaacaaaaaatgcatgctgcagactctcagaaaagccctacgtttctgtgaatcagcacactgtttgttgtgcttcgttgggctacaagcctaaaagcctagaataatgcttgaattc

SEQ ID NO: 15877 - DNA, 1772 bp, Zea mays
  Clone ID: LIB3060-097-F9_FLI
cacacatctgtgagtagaaaccttgtgctcggcgatttggcaccctcaagttaattatccttggtttgaggaagaacaacacttcagccagacatgctttaagcagggagaccattttttatttcgagcgcgctacgatggagctctactccggataccttgacgaccatttcaacccccacaagctaagcatcgccggcagcgccgtctcgccgccggagtacatggcgtcggcgtcgccggcgcagttcgcggcggcgcccctcaggatggggtacgggaggccggcgccggcgccgcccccgcccgtgatgggcatgtggagcagcgagccgttcagggtcgacagcggcagcgcccacgccaccagcgcgtccaccgtcaacaccaagctggaggagacaaggttagaagacgacgcacaggtagcacttgagccggcaagaagtacggagcaggaaaccagtaggccgccagagagggcccagagaaggctcgcgcagaacagagaggctgctcggaagagtcgcctgcggaagaaggcctacatccagcagctagagacaagccgcatgaagctgtcgcagctagagctagagcttcaacgggcgcggcagcagggtgcatatgcgaatagtgggagcatgggagactcggctctcggctacagatgcccgatagatccaggtgtttctgtgttcgagatcgactacagccactgggtggacgagcagaagagacacacggcggagctgacgtcggcgctccaggggcagcagacatcggagctggagctccgcctgctggtggagacgggactcagcaactacgagcacctgttcaagatcaaggcggcggcggccaacgcggacgtgttctacgtcatgtcgggcttgtggaagacccccgccgagaggttctttctctggatcggcgggttccggccgtcggaagtcctcaagatcctgagcccgcagctggagccgctggcggaggcgcagcgcatgctggtgggcggcctgcagcacacgtcggcgcaggcggaggacgcgctgtcgcagggcatggagaagctgcagcagaacctcgcggagaccctgacggccgaggccgacccgttcgggccccccgacccctacatgctgcagatggccaccgcggtgggcatactgaaagagctcgtcaacttcgtgacccaggcggaccatctccggctgacgacgctgcagcagatgcacaagatcctgacgccgcggcaggcggccaggggcctcctggcgctcggcgactacttccagcgcctccgcacgctcagctcgatgtgggcggcgcgcccgcgggaggcggcggtcagctagatgcgcctgcggcgtggcaggccaaaagctcgctcactggtgaggcgaccgtaccaaagaacacgacgccgacgacgacgaagactaaagatgagtggtagcagttcgctgtatacttgccccccaatgcaaggtgtaaagcccagtggaggacgaagagatcgacctcgctgtacgagtacgacgaacggaagggacgcttctcggtcagcggcggcggcgacctcgctgtacaaggcgattagtagacatacaaaatgtaaatggaaatcgatcgatgggcggaggatatgtacgtatcttgttttgatacccgcggccggggccctcctagaggcgtactgtatgattgattatgcgggccttctacaactactactggtgttgggctatatgtatatctctacaactatt

SEQ ID NO: 15878 - DNA, 696 bp, Zea mays
  Clone ID: LIB3060-098-E10_FLI
catcgtcgccctcaaattcgttccgtccaggcaaggaagaaatcgagcagccaaggagaggagaagatggctcgtacgaagcagaccgcccgcaagtccaccggaggcaaggccccgcgcaagcagctcgccaccaaggcggcgaggaagtctgcgccgacgaccggcggcgtgaagaagccccacaggtacaggcccgggacggtggctctgcgcgagatccgcaagtaccagaagagcacggagctgctgatccggaagttgcccttccagcgcctggtccgtgagatcgctcaggacttcaagacggatctgcggttccagagccacgccgtcctggccctccaggaagccgccgaggcctacctcgtcggcctgttcgaggacaccaacctctgcgccatccacgccaagcgcgtcaccatcatgcccaaagacatccagctcgcccgccgcatccgcggcgagcgcgcgtaggcgtatctcgcgcccggccccagtggcggcggagggatggaggagggcaatttgtaaccttatgctgtttgttcgcttttagacggcgtggtgaagaactagtgtaaaaacggctttaaagtctattttgtgcggtagttcgtgtaggccgcttcgtcccgaagcgatcttggtaaaagacttattcgtgttgccaaacgacacaattcgtattttttt

SEQ ID NO: 15879 - DNA, 820 bp, Zea mays
  Clone ID: LIB3060-098-F12_FLI
ccaaagccatcggaggagcagctggacgaccatggcctcgccgctgctcaagtcacactctcagctagccgccgccaccgccctgcactccgtgaggagagccgaccgctgcccggcgacaatacacctgggcaagttccatgaccacgggctcaggtccggccgttctaagagatccggttcagcgaaggtgggcgccttcccgtcgctggacgtggtgccgctgatggtgacgatggtggagcacgtggacatgtcgcgggactacgtcgtgaccaagtccatctggcatctcagcgacgcagccctcaagagcgtctataccttctacgccatgttcaccgtctggggagtctgcttcttcgcgtccatgaaggatcccttctacgacagcgagacgtacaggagccagggtggcgacgggaccgtgcactggtactacgacaggcaagaggacctggaggcgtctgcgagggaggagctgctgcgggaggagctgctcgaggagattgagcagagggttgggggcctcagggagctggaggaagcgagcaaggaggagcagctcacaaagtgatcacgcgggcgaatgggctactcatcagctctctatctgagcttcgttagcaaataagttcagacttctctttactgccatgctcaagtctgtatatggccaaaacccaaaacgattgatcaactgcgctactgcagtgcaatagcaggatacgtatagttttcttttcaagggaaacaggaggggagtgcagtgcacccccgcccatactgcatgttattaataaaagaaagttatttacag

SEQ ID NO: 15880 - DNA, 1209 bp, Zea mays
  Clone ID: LIB3060-098-F6_FLI
ggccaacctctgcgaggaatggagatggagtcgactcctctcttgacaccatacaagatgggcgatttcaacctggcacacagggttgtgctggcgccgctgacgaggtgccgggcgttcgggaacgtgccgcagccggagcacatggctctctactaccgccagcgggcgacgcccggcggcttcctcatcgccgaggcctgcgccgtgtcggagagcgcgcgcgggtacccggacgttccggggctgtggacccaccaacaggtcgtggcctggaagccgatcgtcgacgccgtccacgccagcggtgccgtcttcttcgcccagctctggcacaccggccgggcctccccctcagaattccaaccaaatgggcaggcaccgatctctagcacggacaagcaaatcccagcacaggtgaaccattccggtgacgtcaacacgttcgcggtgcctcggagactagagacagaggagataccacacgtcgtcaatgacttccgggttgccgccagaaacgccatcaaagcaggctttgatggagtggagatccacgcggcaaacgggtacctgttcgatcagttcatgaaggacagcaccaatgaccgagacgactcctacgggggcagcttggagaaccggtgccgtttcacagccgaggtgatggcagccgtcgcggacgaggtcggtgccaaccgcctcggtgtgcgcctctctccgttcgcggattatatggactgccacgactccaacccagaggcgctcgcgcttcatgtcatcgacgagacgctgaacccgctcggcgtgctttactgccacatggtagagccaaggatgcgggtgaacccagacgacggtattatgactctcgagcacatgctgctaccgttcaggagggcgtttcgcgggacgttcattgctaatggaggctacgaccgtgaggaaggcaatgacgccattgcccgtggctatgcagatctcatcgcatacggccggatattccttgccaacccggaccttccgatgcgttttgccaagaatgccccgctgaacaagtatgataggagcaccttctatacctctgatccggtggttgggtacacagattatccatttctcgatcaactctaggatgattggcttataaacaatttccccacctggagtactatcttgaccttaaaataaaatgagtgtcactataatatt

SEQ ID NO: 15881 - DNA, 1707 bp, Zea mays
  Clone ID: LIB3060-099-B1_FLI
gccgcctcccttttcgtctctgactttttctacaagctcattcttcctcccccgatctcgggagcagccgaagcatgtcctggcggtggactctcgcgcgccgcgtcgccacgctggccgcgatcggtggcggcggtgcccaggcgcagaggctcctgtccacctcgtcagccggcggtggcactggcctcctgggtcggcactacatacccctcgcctcccagattcggagcaaggtagttggttgcagaggagctgctcttgtgagctccagatggttgcatgaggcccaataccaggttcgccaggacggggcttccagggctcaggaacagcaagatccatttgaattagtcgccgatgagctatcacttcttgcaaataggttacgatccatggtggctgctgaggtccccaaactggcatcagcagctgagtactttttcaaggtgggagcagagggaaaaagattccgacctacggttttgttgctcatggcatcagctctgaaatttcctttgtcagagtcaacagaaggaagagttctcagtatattggcagataaactccgcacaaggcaacagaacattgctgagataactgaaatgattcatgtcgcaagccttctgcatgatgatgttcttgatgatgctgatactaggcgtggtgtcagttcattgaatctcatcatggggaacaagctttctgtgctggctggtgatttccttctgtctagagcatgtgtggcccttgcagcacttgggaacacagaggtggtttctctaatggcaactgctgtagaacatctagttactggtgaaactatgcagatctcaacaagcagagagcaacggcgaagcatggagtactacctgcagaagacatactacaaaacggcatcattgatatcaaatagttgcaaggctgttgctattcttgcagggcacacagctgaggtctcggtgcttgcatatgaatatggtcgaaacctgggtctagccttccagttaattgatgatgttcttgatttcaccggcacctctgcatcccttgggaagggttcattgtctgatattcgccacggaattattactgccccgatgctatatgcgatggaggaattcccacaactgcaagaagttgttgaccggggttttgataatcctgcaaatgttgaaattgcccttgactatctccagaagagccgtgggattgaaaagacaaaagagcttgcacgagaacatgctgatcgtgcagtcaaggctatagaatctctacctgatagcgacgacgaggatgttctgacttcaaggcgtgctcttattgatatcacagaaagagtcatcacacggacaaaataggaaggtgttcggcgtccataaggtgaatggagagctgaacctcgcctttggcctagtgtttcacttggattttcttttttgtatacttcggttcattgcattcttttcgcagccaaaaccccaagttttgtgtatcattgctgaaatttaggattaagaaatggccctgcatttctgggaagcttctagaggttttggctgcatgtggcaacaaaatatatgtcaccgattgcaatggcaccagatatcgtgtagccatataagtgtgggagcattgtacccaatatacactcccgtaaagactaagatagtactaccataaaatatctgttaaccgttcctcttc

SEQ ID NO: 15882 - DNA, 1626 bp, Zea mays
  Clone ID: LIB3060-099-E3_FLI
gaaagcggccacagccagagccagggtggctcggctctcctctcacagactgcgccgcagcgcctagcgctcggctggcagccgccccggccggtcggccccgcccctgctgcctacatccgcctgcagccagaagatctgcctccagcgaccgccctgcctgcccttgtggcttctgtggttctgcacaccagcacacgcacttgtccccaaacaacggcggcggcgatgagtatctcagaagagcttcccggcgaaggatctgacggtgaggaggaggtcttcatcaacgaggaggacatcatccacgagataaccatcgacgaagaagatctccccgaccgcgacgacgaagatgacgacgtcgtcaacgggatggttgattccgaagacatcgatgattctacatacgcatttcaaggccaccaagatgaagtcttcattgtcgcctgcagtcctacagattcatcacttgtggcttctggaggcaaagatgataggggattcctgtggaggattggatcagaagagggtgccctggagctgactggacataaggatactgtcggcacagtggctttcagttcagatggaaatttgttggcttgtggaagttttgatgggcaaataaatgtgtggaatacagctacacgaactctcaagggaacccttgagggttccgggtcaggttttgagtggcttaaatggcattctcggggacatttgataatcgcaggatcagaggattgtaatgtatggatgtggaatgccgaccataatgccattctgaatacctttgctggacatagtaacacagtgacatgtggtgattttactccagatggtaaacttatatgcactggatcggatgatgcgtctttgaggatatgggacccaagaagtgcacaaagcagacatgttgttcgaggccatggctaccattctgatggattgacatgcttatcgatgacttcggattcacaaacggttgttagcggctccaaggacagttctgtgcacattgtgaatttaaactcgggccaggtcgttggctcattagcaggccacaccaattctattgagtgccttggtatctcgtcaagctatggctgggtagctacagggagcatggatcaaaagctgatcatctgggacctcacgcaccaatccagccgatgcatttgcgaacatgatgagggcgtgacatcgctgacatggctaggttcgtcaaggtacgttgcgtcaggatgcattgacggcaaggtgcgcatctgggacagcctctctggagcctgcgccagggagttcagtgggcatgcagatgtagtacagtcgctggccatcactgctgacggcaacaccatggtctccgcctcatcagatggctccgcccgtgtgtttgacatctccatgttcaagtgaaggaaaccgggacggagtacatgtttatgctatggcttgattgtgatgcacgattgatcatggcatgccatggtaatatgcgattgtactactctgctcatggaaaaatcgtgcatttgtattgcatatgactccacttgtagtatctattacagcagaacaaaggatgtatttatatatattccgtttttcccctttggagag

SEQ ID NO: 15883 - DNA, 1499 bp, Zea mays
  Clone ID: LIB3060-100-A6_FLI
ctccctccgagtccagggggcaggggcaccattaccgagtagtttaattagtgctagttgtattaccgttgttagtgacataattaccctcacgcgaagaacccctaccttggctagtcctcctacgtatacgtctcttctcttcgcttaatcttggtcggtgatttgattctgcacttcttgggcgcattgcagagggtgctcggtctgcagctatcttaggttaaccagtcgtgtgtggtctatcggtttcgatatagtactactgctctgttataatcagcggggaggaggaagatgacggtgacgccacggatcacggtgagcgacgggcggctgacggtgcgcggccgtacggtgctcaccggcgtgccggacaacgtgtcggcggcgcacgcggccggggcggggctcgtcgacggggccttcgtcggcgcccacgccggcgaggccaagagccaccacgtcttcaccttcggcacgctccgggactgccggttcctgtgcctgttccggttcaagctgtggtggatgacgcagcggatgggcgtctccggccgcgacgtccctctggagacccagttcatgctcgtcgaggtccctgccagtgacggcgacggcgacgacgcccccgcgtacgtggtgatgcttccgctgctggaggggcagtttcgggcggcgctgcaggggaacgaccgcgacgagctgcagatctgcatcgagagcggggacaaggcggtgcagacggaccaggccgcgcacatggtgtacctccacgccggcgacaaccccttcgacaccgtcaccgccgccgtcaaggcggtggagaagcacctgcagacgttccaccaccgcgacaagaagaagctgccgtcgttcctcgactggttcggctggtgcacctgggacgccttctacaccgacgtcaccgccgacggcgtcaagaacggccttcagagcctgtccaagggcggcgcgccgccgcggttcctcatcatcgacgacggctggcagcagatcgcctccgagaacaagcccgaccccaacgtcgccgtccaggagggcgcgcaattcgccagccggctgaccgggatcaaggagaacaccaagttccagaccaagcccgacggagacggcgacggcgagcaggcggcgggcgggctgaagcgactggtggccgagaccaaggacgcgcacggcgtgaagcaggtgtacgtgtggcacgccatggccgggtactggggcggcgtgacgccgacggcggggacggcgatggagcgctacgagccggcgctggcgtaccccgtgcagtccccgggcgtgacgggcaaccagccggacatcgtcatggactcgctgtccgtcctggggctgggcctggtgcacccgcgccgggtgcgggacttctacggcgagctccacgcgtacctcgcctcctgcggcgtcgacggcgtcaaggtggacgtgcagaacatcatcgagacgctgggcgccggcca

SEQ ID NO: 15884 - DNA, 1446 bp, Zea mays
  Clone ID: LIB3060-100-B10_FLI
ggctttatataatcattcgttcaccctttatccatcaccacctaatttcccaacaaatttcaatctccatcgatcgattcctcccgaacccgacccgatggcctccgacgccgccgccgagccctcctccggcgtcacccaccccccgcgctacgtcatcggttacgcgctcgcgccgaagaagcagcagagcttcatccagccgtcgctggtggcccaggcggcgtcgcggggcatggacctcgtccccgtggatgcgtcgcagcccctggcagagcaagggcccttccacctcctcatccacaagctctacggagacgactggcgcgcccagctcgtggccttcgccgcgcgccacccggccgtccccatcgtcgacccgccccacgccatcgaccgcctccacaaccgcatctccatgctccaggtcgtctccgagctcgaccacgccgccgaccaggacagcactttcggtatccccagccaggtcgtcgtctacgacgctgccgcgctcgccgacttcggactccttgccgcgctccgcttcccgctcatcgccaagcccctcgtcgccgacggcaccgccaagtcccacaagatgtcgctcgtctaccaccgcgagggcctcggcaagctccgcccgccgcttgtgctccaggagttcgtcaaccatggcggcgtcatcttcaaggtctacgtcgtcggcggccacgtcacttgcgtcaagcgccgtagcctgcccgacgtgtcccccgaggatgacgcatcggcccagggatccgtctccttctcccaggtctccaacctccccactgagcgcacggcggaggagtactacggcgaaaagagtctcgaggacgccgtcgtgccgcccgccgcattcatcaaccagatcgcgggcggcctccgccgcgcgctgggcctgcaactcttcaacttcgacatgatccgcgacgtccgcgccggcgaccgctatctcgtcattgacatcaactacttcccgggctacgccaagatgccaggatacgagactgtcctcacggatttcttctgggagatggtccataaggacggcgtgggcaaccaacaggaggagaaaggggccaaccatgttgtcgtgaaataagatgatgattgatggcactggatatctggcgaatgctgctgattctggatgcagaattcgatgaggggatttagttggttgtagtatctggcgaatgctgctggttctggatgcagaatttgatgaggggatttagttggatttcaacccatagcatgccgaggacctcctagctctttccaaaccagttgtttaggtatcttttctgggtaagtcagcttcatctagtttagtctgtctgaacaaaagagtgggacatgacccaaacggaattctaatgaaaaacgagctctctatctgcaatccttttgttcttgagc

SEQ ID NO: 15885 - DNA, 398 bp, Zea mays
  Clone ID: LIB3060-100-F10_FLI
gcgacaacaaagagtgcatggtcgccgacccgatagccgtcattccctgctcggtcatggcaactggccaccgcgcccctgctcccggctccctgcccctcccatggagcccagcgctgtgtcgaacctgccatgtccgttgccggtcgtcaattttctattcaccatggtcatcatgtcggctgtctctatccgagctagcccagctcaccagccgtcgcgccctttttgcccgttgggccgtacgttgtcgcgtccacctcgttgtgtcatcgtggacttgttggcgtgctgctgtggtatctgaatcgcgctcgcctcagcttggacgagttgtcatgccatcgtcttcgtcaaatgaaaattgttgtgctgacacgctaatgccgtcgatcgcc

SEQ ID NO: 15886 - DNA, 1302 bp, Zea mays
  Clone ID: LIB3060-101-D12_FLI
cgtctcctcccgctgtccctccccgacgcgcgccagcgccgcggtattctcccgccggcggcggcggcggcggccttgttgccatcgtggtcttgttcgccgccattgtctcggcttcgatcacgggggcggcaggctaaaacgaggctgcgagtcgtctctcccgagacatccagcaccgctgccaccgacgctgcgacgacgaccgccggcgcgccgccagataacagcaagtgggcagagttcgcgacgcgagtgtccggcgagtgggacggcttcggcgcggacttcacggcgtccggcgaccccgtggagctgccggagaaagtggtcccggaagcgtaccgggagtggggcgtgcaggtggtggactggcagacgcagtgccccacgctggcggacccgggcgcgccgtgcgcgctgcactaccgcctggtccgtctgctccccacggtggggtgcgaggccgacgccgccaccgtgcacacctcccaccagcgccacgcctcctccgccgccgccttcgcgtacgccgccgcggggtcctacgtcgccgcgtggcccaggggccccgcgctcgtgctcgaggtggagcactgcgtcgtgcgccccgacgcgcccgccgaggaggccggcagggtccgggtggtgcagaccgtggcgctgggcagggaggcgcggctccgcgggctcaaggtcttcgccgagcagtggtacggcccgttccgcgacggcgagcagctcggcggctgcgccgtcggggagaccccgttcgcggccggggagaagctcgacgtcgccgaggtgatcgggcagtgggagaccacggacgccgccgccgcgaggttctccggcgacctggaccccgagacgggaaagttcgcggagctgtcgccggaccagccgaggaagctggtgagggacgcggagggcgtcgtgacgctgccgaagcagctgtggagcgcgttcaaggagctcggcgacggcgagttcctgtgcgaggtcggctgggctctgggcggcggcggcgccgtcacgtcgcgctgcgttctgtccaaggacggagacgtcaaggagatcgctgccgcccacgagcgccgggtgtcggagaccacttgacttcggggccaattggccatacccgatccaacagagaacaaaacgcgctgctcgatgagccaactcaatttggtatcttcgaatcgaaggtacaacgactgcttggccgtctaacctcaacactcttcgccttaacaatcatcatttagacgattgcaacatttctgttcatttggccgtttc

SEQ ID NO: 15887 - DNA, 1303 bp, Zea mays
  Clone ID: LIB3060-101-H9_FLI
gcagcctcatccccttgcccacttctacagcccctctgctgcagcaagaaggaaagaagctagcgcttatagcttgtcagccatggccaccgccgccgcgtctagcctcctcaagtcctccttcgcgggctcccggctcccggccgccacgcggaccacaccggcgtccctcgtggtggccaccggcccgcgcggcgccggcgcggggcccatctgcgcgtccatgtccatgtcctcctccaacccgccctacgacctgacgtccttccggttcagccccatcaaggagtccatcgtgtcccgcgagatgacccgtcgctacatgacggacatgatcacctacgccgacaccgacgtcgtcatcgtgggcgccggctccgcggggctgtcctgcgcgtacgagctctccaaggaccccgccgtgagcatcgccatcgtggagcagtcggtgtcgccgggcggcggcgcgtggctgggcgggcagctgttctcggccatggtggtgcgcaagccggcgcacctgttcctggacgagctgggcgtggcgtacgacgaggccgaggactacgtggtcatcaagcacgccgcgctcttcacgtccacggtcatgagcctgctcctggcgcgccccaacgtcaagctgttcaacgccgtggccgtggaggacctcatcgtcaggggagggcgcgtcggcggcgtcgtcaccaactgggcgctcgtgtccatgaaccacgacacgcagtcctgcatggaccccaacgtcatggaggccaaggtcgtggtcagctcctgcggccacgacgggcccttcggcgccaccggcgtcaagaggctccaggacatcggcatgatcagcgccgtgccggggatgaaggcgctcgacatgaacaccgccgaggacgagatcgtgcgcctcacgcgcgaggtcgttcccggcatgatcgtcaccggaatggaggtcgccgagattgacggcgcccccaggatgggcccgacgtttggcgccatgatgatctccggccagaaggcggcgcacctggcgctcaaggccctgggcaggcccaacgccgtggacgggaccatgtcgccgccgttgcgcgaggagttgatgattgcgtacaaggacgacgaggtcgtggacgcctgagtgcggcaagcagagaggaggatcgacgccagcagcgtcttatcttaattgccttgttgttcaatgatgaatcgatcgaattcccttgggttagctttattattgttgttgttattattaatttgactcgctatagtgtgtcgtgttcatagcacc

SEQ ID NO: 15888 - DNA, 797 bp, Zea mays
  Clone ID: LIB3060-102-B3_FLI
gcgctccgatcgacctgctccctccccaccaccgagcccatggcggaccagctcaccgacgaccagatcgccgagttcaaggaggccttcagcctcttcgacaaggacggggatggttgcatcacgaccaaggagctgggcactgtcatgcgctcgctggggcaaaatcctacagaggctgagctccaggacatgatcaacgaggtcgatgctgatggcaacggcaccatcgatttcccagagtttctcaaccttatggctcgcaagatgaaggacaccgactctgaggaagagctcaaggaggccttccgtgtgtttgacaaggaccagaacggcttcatctcggccgccgagctccgccatgtcatgacaaatcttggtgagaagctaactgatgaggaggtggacgagatgatccgtgaggctgatgtcgatggtgatggccagatcaactacgaggagtttgtcaaggtcatgatggccaagtgagccacagaaccataatctgaaggcagagaagattatgcattgcatattagtcaagatgcaactttttattccatcgacttctagtgaaacattctgctagttgtagttgctgaaaaaggcaatgtagttcctgctttgttcttccctccagtgtgttttcagaactgttgtttcatgtgaacttgtaatgattgccctctctgctgtgtcttgattgcagttaaaatcatatgtagtttcaccccacccacacatcaacttctgtttcacgctgtttgtatcaatggatggcccgttgtttttagtgc

SEQ ID NO: 15889 - DNA, 1929 bp, Zea mays
  Clone ID: LIB3060-102-F5_FLI
gccgcccccttctcctcccactcccgcgcctccctcctttcacacccatctcgatcctcccaacccaaaccctagcggacgcaccgctgccatggccgaatccggcgagtcgtccccgaactcagccgcggccacggacgacacgcaccacgagatgccggaggccggagcggctgcggcggcggtgcatgcgcagccgcgcccgccgccgccgccatccaaggtgcggctgatggtcagctacgggggccgcatccagccgcggccgaacgacaaccagctcgcgtacgtcaacggcgagaccaagatcctgtcgctcgagaggccgctctgcttcccggacttcgccgcgcgcctcgccgcgcttgtggggaacgccgcggacgtccgcgtcaagtaccagctgcccggggaggacctggacgcgctcgtctccgtcaccaacgacgaggatctggagcacctcgtccacgagtacgaccgcctccacgtccatcgccacgccacggcctcctccgccggctccagccgcggcggatccgcgcccaggctcagggtcttcctcttccccgtccagtcgcccccgcctccgccgcagccggccgggatcctcgagcctaaggttgagcagcgccaatggttcgtcgatgcgctcaacaccgtcctgctgccctcgtccaagcaggacccgccgcccgtgcccccgcagcagcagaagcaggagcaggagtcggtcttcgcgcagcagtcgccaccgccgcaggccaagcacgaggcggtgttcgtccagcagtccccgcctcagccgcagacggtggtgcagatgcagatgccgccgccgcagcacgtggtgctcgcggcggcgagccccgactacctgttcggcctcgacaatggcttcgtccatccccccgcggtgaaggtcaaggacccggcgggcgatcctcctgcggtcagggagagcgtgcccgtggagttaccagccaaaaacgaggaccgccatcccattcccaaccccgcgggcgacaacgtggctgtctcccctgcggagtaccagcgccagatcccggggctcgagaagctgcaggtcgccgacaacgccgcccaccaaccacctcctcctgcgccagcgcctgcgccggcaccttccctcgccccgactcccgtccccgccgcgctcccgagaaacggcagcgacgactccctgacccgtggctaccctctcgcgacccccaccccgaactccagcgcggagtactaccttccaaagttcccggagaagccccccgtgccgccgccgccgcagtcatccgctccgcccccaccgacctatctgcaggtgcagggcaggtacacatccgtggcccctggctccggcgcagaccgtggccccgtgttcttcatcccggcgccccacggctacttcgccgccacggcctcgccaggtgcgacctcctaccccgccgtgtacgccgtcgcgccacccagtaccgccgccaacggctccgccgcgtcgcccgcggcgtcgaatgccacggcctactcccccgcccccacgcaggtcgcgtacgacagcaacggccgcgccatctactacaccagcatgctcccccagtacccgtcggctgtcaatggcatgtcctcggcgggcgccgttctcgggacagagcccgtgaatccggtggccgtgaagccgaccgtgtcgtgaccaccccagcttacacctcgcctcatcacaaacaccaatggatcaaaattttctttcatcctcaccagtggtcaatggactgtctagagttgtttttttgtgcctgttggtgttctgggttcatgatatgatgacgatgcaagtatgagtagttgtttgttgtgcttagctgtacatacagagcctgtggctgtggacataatgtataagtattatattgt

SEQ ID NO: 15890 - DNA, 994 bp, Zea mays
  Clone ID: LIB3060-102-H8_FLI
cgcaaacacacggcacgagcagctgagcgcccatggcaggtccccggcgtctcctcctcctcctgctcccgctgctcgtgctcctcggcgcgcacccgccgcagcgcgggtccgcggaggaggggacgaaggtctccctggagctctactacgagtcgctgtgcccgtactgctcgcggttcatcgtcaaccacctcgcggggatcttcgaggacgggctcatcgacgccgtccacctccggctcgtcccctacggcaacgcgcgcgtcgcatccaacagcgagatctcttgccagcatggtccgtacgagtgtctgctcaacaccgtggaagcttgcgccatcgacgcctggccggatctggatgtgcatttcagcttcatctactgcgtggaggacctggtggtgaagcggcagtacaaggactgggagtcctgcttcgagaagctgggccttgacgccaagcccgtaacagaatgctacaaaagcgagcatggccacaagctcgagctcaagtacgcgaaccagaccgacgctctcgagccgccgcaccggtacgtgccctgggtggtcgtcgacgggcagcccctgctagaggattacgagaatttcgaggcttacatctgcaaggcttacaagggcactccaccgaaggcctgtgagggcctggaacgtctgcagatggccctcgagacagcggcggaggcgcgcaacggcgtcagctacaactccggtgtcagcaagcttgcgactgctgaagatgagggtggggagcataaggtgggagaatactagtacgtaattgactagcgacgtgccctttttttgggtcatgtgaagatatgaaggaccgttccatctcgttgtccgggtttttattgtacagtaatagctaatatggtaatgataataattacatttctaatcttctccaaaaatatagtacgtctgaccttgcgagcagcgtgcgatatttgctgcggacagactgctct

SEQ ID NO: 15891 - DNA, 1882 bp, Zea mays
  Clone ID: LIB3060-103-B10_FLI
tctcgccatatatgccctactactataccgacatgccgtaacagattcatggtgaccatcgccacatctctccgacggttaaatatccctcccagaacgcccatcatctgcggcgtcatccaacatgcaagggaaaacctcgatgatgggctcgaacgcgcgcccccacgcggtgctcatcccgtacccggcgcagggccacgtcacgccgctgctgcagctggccaaggtgctgcactcgaggggcttcttcgtcacctacgtcaactccgagtacaaccaccgccgcctgctccggtcccgcggcgcggactcgctggcgggcctcgacgacttccggttcgagaccatccccgacggcctgcctccgtccggcagcgacgacgacgtcacgcaggacatccccgcgctctgcgagtcgctctcccggagcggcgccgcgccgttccgtgacctcctggcgaggctcaacggcatgccgggccgtcctcctgtcacctgcgtcgtactggacaacttcatgagcttcgcgcagagggtggccagcgagatgggcatcctggcagtcgtgttctgcaccatgagcgcgtgtggcttcatggggtacctccacttcaaggagctcatggacagaggctacgtgccactgaaagatgagagctacctgaccaacgggtacctggacacggtgctcgactgggtgcccgggatgcggggcatccgtctgcgagacatgcccagcttcatccgcactacggacccggacgagttcatggtccacttcgacagcggggaggcccagaacgcgcgccgcgcgcaggggatcatcgtcaacacgttcgacgcgctggagcaggacgtcgtgggcgcgctgcgcggcgtcttccctcgcgtctacaccatcggcccgcttctcacgttcgccagagccatggcccgtcccgacgcgtccgcgatctgcgggaacctctggaaggaggacctgagctgcctcgggtggctggatgcccagggtcccggctcggtcgtgtacgtcaacttcggcagcatcacggtcatgacgcccgctcagctcgccgagttcgcgtgggggctggcgaactgcggcaggccgttcctgtgggtcatcaggccggacctcgtcacgggcgagaaggctatgctgccggaggagttctacgctgagacgagagagagagggctcttcctcagctggtgcccgcaggaacaggtcctgtcgcatccgtccaccgggctgttcctgacgcactctgggtggaactctacgctggagagcatacgcgccggcgtgccgatgatctgctggccgttcttcgcagagcagacgaccaactgccgatatgcctgcgcgaactggggcattggactggagatcgacaacaatgtcacgagggacgaggtggcacggctcatagaagaagccatggacggcgagaaaggcaaagacatgaaggcgaaggcaacagtgtggaaggagaaggccgtggcagcaacagaaagcggcgggacctcgagcgtcagcattgatcgtttggtcgagttcctgcttgaaggaaacgttcctacagctgcaggctaataatatgaacagtacgtgcatatgaaaaccgaagtataatgttaccagcaaatttgtaatatataagtataaatactgaatttgtttctttcatgacggtcagcttcacagtagaaaatatggtgtcgcatgaacatgacaatttcagaattcagagtgaagatgcaagcttgctgtcagtattttcaggtaggcctgtcagctgtggcttcacctgccatgctacagagcgaactgcgaaccattttatgattctgtgagcaatagaacagcagttgaaat

SEQ ID NO: 15892 - DNA, 1168 bp, Zea mays
  Clone ID: LIB3060-103-E8_FLI
ctgcactgctcccttggtcctccaagaagaaaggaacaaaggagagagatctcgatccgcacacctcacgcctctcttcctctcgccccaaggacaacgaaaacatcaaacaagagaaccaaaggaaacagagcaagagcatcgctctcgaagcaaaacgcgcaccacgccgtcgccggccggccacttcgcacgtacgtaggacgcgcacgcaccggtgcatatatggggctcctgaaccagctgtgggacgacacggtggccgggccgcgcccggactccggcctcggcaagctccgcaagtacgcctccttctccccctcgtcgtcgtcgtcggcggcggtggcggcggcggcggcggcgggctccgcgccgcctccgggcgccgtgacgcggagcttgaccatgctgcggcggccggcggcgctgtccgtcgtcacgtcgccccgcagcgagtccagctccgcgccgtcgtccccgtcgcccgcaagcggcgctccggattcgcccttcggcgcagcgacgacgcccaggggagagggctggacgaagaagctgcgcgggaaagccaggatgggcggcggcggcggtgacgacgcccccggcacgccgaggagccccaccgtgtacgactgggtggtgatcagttcgctggacctctgaagcccaagccaagacgagaactgcacaaggaaacccaccaccaccatcaacacagctagcgaactgaaggagggagggggcagaggggccatggccatgtaatgtaacgaccaatctctttcagagcttctggtgacgtgtccagttactatatacatacatacgttaacggtgtactatgtgtcttgttgtaaatgtcacccctgcgaggtgttgccgattttgtaagctactacgtactactacgctcggcatgtcaccgtgtgcaagtgcaacacaagtttgtaaaaatgactagctagtagtagcaatgctgttgctgtacgagtaggcctccctctgctttgtacaggggtagtccaacaagtatatggtttgctggtgccatgtaaaaatgtatatagaatcctacgttcacgcccagcaaggatgcgtggttgagtgttctggactctggacaatactactatccaataacagccataccgtgtttttttcctgggcc

SEQ ID NO: 15893 - DNA, 2005 bp, Zea mays
  Clone ID: LIB3060-103-H6_FLI
ggcgtcgtctcctgtcctctccacgccaagcaacctccccaccccgccccaccctccatgctcgcctcgagatcttagcgggcagctccggagagcgccgacgagccccctgatccctcctcgccgccgccgccaaccgaccgggggaggagaggaggggaggggagcgatggagaccgccgactactccgggaagctcttcgtcggcggcatctcatgggagacggacgaggaccgcctccgcgagtacttcggccgcttcggtgaggtcactgaggccgtcatcatgcgggaccgcagcacgggccgcgctcgagggttcggtttcgtggtcttcgctgacgccacggtcgccgagcgcgtcaccatcgaaaaacacatgatcgacggccgaatggtggaggccaagaaggctgttcccagggatgaccacagtattgtgagcaagagcaacacaagcagcatagggtcacctgggccgggccgtaccagaaagatctttgttggaggtctgccctcaaatgttacagaggctgacttcagggggtattttgagcagttcggtgtcataactgatgtggttgtgatgtatgatcacaacacacagagaccgaggggctttggattcatcacctatgattcagaagatgctgtggacaaagccctgcacaagagctttcatgagctaaatggtaaaatggttgaggtcaagaaggctgttccaaaggagcagtctcctggacctgttgcacgctcacctgcaggagtggggcagaactatgctatgaacagggttcatagcttcttgaatgacttcaaccagggttacaatccgaaccctataggaggttatggcatgagggtggatggaaggtttggccagctttcaggtgcacgaaatgggctctcttcttttggcccaggttatgggatgggtatgaacgttgaaggtgggatgagtggaacttttggtgcaaactctggtttcatcagtaactccaatgggaggcaaatgggttcatacttcaatggaagttcgaatagattgagtagttctattgggtatcttggttatgactcaggatcgatgttgagttccatgtctaggaattttaatgcaggtgtaaactacccgatcaatcctacaaacatgagtgcttttgctgcccttggaaatgggggtggcgtcaattatatgggtctcccttctattgcccctgagttggcccagttgggcaacatttcaagccttgggtcagggaactttagccgtggagctggagttaataacttaagtttaccttctggctcctatgggaggagcaattcaactggtacaattggtgagcctttttctgcatcaggcaatgcatatgaagtgaacaacccagatacatatgggaacagctctatttatggtggcacatcctggaggttcccttcatctgaagttgacgtgccttctttcagtcatgatcttggaaatgttgatccgaatatgaaatcagacatatcagcaaattacatgggaaattattctgttagcaacaatcagccaagcagaggtatcacttcatagtgggagtattactacacattcatatatgacttgggatagatgaagcacccattcagtcaggcagccaggtgcgtgcatggcaactgtgaatgggtgatatgtcaggttagttttgtctagctgaccagcggtgtggtttacaacaccaacatgctagaggaggaggaagcggatacagaaacattttctgaggggcttcttttctttgagtcatgtttttagttttgattcctgcgcgtggctagctccttttggtttttgaatgagatgtgtagtggtgattattgcggcgcatattttagagatcgtggttcttccaacataagctggaaaaagaagtctgtatacggatgaacatgtataccaaccaaagggatgctgtattatcttgcccatttgttactacattagcctgtgttttatatc

SEQ ID NO: 15894 - DNA, 780 bp, Zea mays
  Clone ID: LIB3060-103-H8_FLI
gttgcactttgaggagagacgagatcatgaggaagcaatactcccctgtgctctccttgtgcctgatggcccttgtcgtagctgctatggtctgtgtcatgtacaccacctcggcacaagcaggaaggagtggctacaactcgtacgaacctgatggaaggggtggatacaactctgttcccatcaacggcggtggcagcccctagctaggcggtggatcggagcctgtatcagaaatcgaaataatataagactgtcttcaacggatcacactgccgctcccccacgctaaatttgggggctacagtgcacacgctagccgatcaacggctcacgctaccaggcgctctacgcggatgtgccccctagccagcttctctctccccctcgttctgtggtgcctctctcaccctctctaatattgttcacgtgggcccacttccaattattagtagatgaaaaattgataggaggtgaaaagtaggtatagaaaatgatattttatggttgtagtggggtataggggaaggatttagggggaaacgctgtacagagtggagatataggggggaagagaacgctgacgtggcacgtgagtgggatatagggagagaaatttaggggtaaccgctgaagacagtctaaaggctcatctgtgtgtattctgtcatgtcatgtcatgtcatgtgtgttggtatatgatggcttggtcgtcgtaatgtaatgtgtggacaataaatatgcggggttgcacctcaacgtaacttactagtacttgct

SEQ ID NO: 15895 - DNA, 2417 bp, Zea mays
  Clone ID: LIB3060-104-B12_FLI
ccccctcccagacctccgcccggatctcgccgcctctcccgcccctgctcgcgagccgccgtcgacagccaccgccatgggcacggccaacggccagcagccggcagagggcgctccctctgacaagctccgccacgtcgagtccatgtcggagctgccctccggcgccggcaagatctcggggatcaacgccgtcgtgctcggggagtcgctcgccgccgaggagaacgacctcatcgtccccagccccgagttctctgccagcgccctcgtctcttctccgaaacagtatcgcgagatgtatgagaggtccattaaggacccggccgggttctggtcggagattgccgagaccttttactggaaggagaagtggaaccccgccgaggtctgctcggagaacctcgatgtcaccaagggacccgtccagatcaactggttcaagggagggaaaaccaacatatgttacaacgctgttgaccgcaacatcgagtctggcaatggcgacaaggttgcaatgtactgggagggtaatgagcccggtcaggatgggaagcttacctattccgagctcctggagaaggtttgccagcttgcaaattacttgaagagccttggtgtcggcaagggtgatgctgttattatatacctaccaatgttgctggagcttcccattgccatgcttgcctgtgcccgcattggtgccgttcactcggttgtgtttgctggcttctcagcagattcgctagctcaaaggattgtcgattgcaagcctaagcttgtcatcacgtgcaatgctgtgaagcggggagtcaagcccatctttctcaaagatatagtggatgcagctttggttgaaagtgagaagaatggagtctctgtaggtctctgtttgacgtatgaaaaccagtcagccatgaagagggaaaacacaaaatggcaagcagaaagggatgtttggtggcaggacgttgtcacaaaatttccaaccaaatgtgatgtggagtgggtggatgcagaggatccattgttccttttgtacacaagtggcagcacagggaagccaaagggtgtactgcatacttctgggggctacatggtgtacactgcaacaacatttaagtacgcatttgactacaagccaactgacatatactggtgcactgcagactgtggctggattactggacatagttatgtaacatatggtcctctcctgaatggtgctacggttctcgtttttgaagggacgccgaactaccctgattcgggccgatgctgggatattgtggacaagtacaatgtgacaatattttatactgccccaactcttgttcgttcactcatgcgtgatggcactgagtatgttacacgttactctcgaaagtctctccgagtcctgggaagtgttggtgagccaatcaatcctagtgcatggagatggttctacaatactgttggggattcccggtgccctatatcagacacctggtggcaaactgaaactggcggtttcatgatcacccctttgcctggcgcctggcctcaaaaaccaggttctgcaacctttcctttctttggtgttcagccggtcattgttgacgagaaagggcaagagattgaaggggaatgtagtggatatctttgcataaagaaatcatggcctggggctttccggactctgtatggagatcatgagagatacgagaccacgtacttcaaaccatttgctgggtactatttcactggtgatggttgcagcagagacaaagatggttaccactggctgactggaagagtagatgatgtcatcaatgtcagtggacaccgaatcggcacagcagaggttgagtcagctttagtgtcacatccacagtgtgcagaggctgctgttgttggtgttgagcatgaggtcaaaggtcaaggaatttatgcttttgtaactttggtggatggtgttccgtatagtgaggaactacgaaaaagcctcataatgacagtgcgcaaccagattggggcatttgcagctcctgacaagatccactgggcaccgggacttcctaaaacccggagtggcaagatcatgcgaaggattttgcgcaagattgctgcacggcaactggatgaacttggggacataagcaccctcgctgaacctgctgtagttgaccagcttatttcgctcagcaattgttaggttgcaacgtaattggatggtggatacatccttgagcgcatgttgcgtttgtctgtaatatgagtagaaggtgcatttcaatatcgagaactcaagtgggacgtggtgacatgttgtcgatgtttccttttaaacttttgtatcagatatcaagataggtccatcagaatgtattattgattgacacagacaaatatatcaataaaattgttaatttttc

SEQ ID NO: 15896 - DNA, 2373 bp, Zea mays
  Clone ID: LIB3060-104-B6_FLI
caacgcaacgcaacggatcgccaaatcaacttgagcttgagcatcccaccaatccactccccaacagcaatggacgccgcccagcgccgcgtcggtacccacctccagcgcccgccgccgcccgccgggggctacggcctcaccgtcaaccccacagcggccgagtacgtccacgcgcagggctacagtgtcctcctccctgagaaattgcaaaccggcaggtggaacgtgtaccgatccgcgcgttcaccgttaaggctgataagtagattccctgacaccccagacattggaacgctgcatgacaatttcacgtatgcagttgagacatttacagactgtaagtacctgggaacaagaatcagagcagatggaacaattggagactacaaatggatgacatatggagaagctagcacgagcaggactgcagtaggttctggccttatatatcatggagttcgtgaaggtgcatgcattggtctgtattttgtaaacagacctgagtggattatagttgaccatgcttgttctgcatattcatatgtatctgtgccactttatgacacacttggcccagatgctgttcaattcattgtgaaccatgcagcggtggaagttatattctgtgtgcctcaaactctaagcactctgttaagttttatagctcaaatgccatgtgttcggcttatagtggtagttggtggagatgatgcaaatctgccatcaacgccagtaactactggagtgcaaatcataacttactccaggttgctcatccagggaaaggctagtcctcaacctttttgtcttccaaaacctgaagatgttgccactatctgttacactagtggcactactggcacaccgaagggagctgttctttctcatgggaacttaattgcaaatgtagcaggatcaagcctaaacattaagttttacccctccgatgtgtatatctcatatctgcctttggctcacatttacgagagggttaaccagattgcagcactgcactgtggtgttgccattggattctaccaaggggataatttgaagctcatggatgatctggctgctttgagaccgacaatattcgcaagtgttccccggttatataacagaatttatactgcgattacaaatgctgtgaaggagtctggtgggctgaaagaaaaattgtttcatactgcatacaatgccaagagacaagcaatccttaaagggaaaaatccatccccagtgtgggataagttggtatttaacaaaataaaagctaggcttggtggacgagtgagacttatgagttcaggtgcttctccactgtcagcagatgtcatggaattcctgaggatatgctttggtggtgaagttcttgaaggctatggaatgacggagacatcctgtatcatatctgcaatggatattggtgacagatcaattggtcatgttggatccccaactgcatcttgtgaggtgaaacttgtggatgtcccagaaatgaattatacatctgatgatcaaccttatcctcgtggagaaatttgtgttagaggacctataatattccagggttactataaggatgaagttcaaacaaaagaagtcattgatgaagatggttggttgcacactggagacataggtctgtggctacctggaggacgtttaaagatcatcgataggaaaaagaacattttcaagttagctcaaggagaatacatagctccagagaagattgaaaatgtctatgccaaatgcaagttcattgcccaatgttttatatatggcgacagtttcaactcttccttagttggtattgttgcagttgaaccagaggttatgaaggcttgggctgcatctgaagggatccagtgcgaagacttgagacagctttgtgctgaccctagagcaagagctgcagtcctggccgacatggattctgttgggaaggaagcacagctaagaggttttgaatttgctaaagctgttcggcttgtcgctgagccattcacagtggacaatggtctcctcaccccaacattcaaggtcaaaaggcagcaagcaaagacatactttgcaaaggaaatttcagatatgtacgcggagctgcgggaggcagaggcacccaggtcgaagttgtaatgatcaattcaaggagaagcgacatatacaggcttacagatcatatgtctagaagaaacgtaatcatctttttactggcgcagcaaataatggttcctgcaatggtcaggaagagtcgagacttataccagacggaggcagtgcttggtgcaaatcatatagatgaatgctgttttcccttgtccaacgtgccaagccacgttagcctcaacgaaagatactagatag

SEQ ID NO: 15897 - DNA, 828 bp, Zea mays
  Clone ID: LIB3060-104-E4_FLI
cgaggagcaaggtgaggcaccaccagtaccaaccgggctccgagttcatcacgcacgcatggaaggctcggcggcacaggcgccggggaagaccgtcctgagggtggtggcgatctccggctcgctgcgcagggcgtcggccaacaccggcctcatccgcgccgccgcggagatctgcagggagtcgatcccggggctggaggtggagcacgtggacatctcggagctgccgctgctgaacaccgacctggagggcccgggccccggcgcgttcccggcggccgtcgaggcgttccgcggcaaggtgcgcgccgccgactgcttcctgttcgcgtcgcccgagtacaactactccatctcgggcccgctcaagaacgcgctggactgggggtcgcgcccgcccaactgctggggcgacagggccgccgccatcctcagcgcgtcgggcgggtcggggggcagccgctcgcagtaccacgtccgccaggtcggcgtcttcctcgacctccacttcgtcaacaagcccgaggtgttcaccagggcgcaccagccgcccagcaagttcgacgacgacggcaacctcgtcgacccggacaccaaggaccaggtcaccaaggtgctcctggcgctgcaggctctcgcgctcaggctgcacctggggaagctcgctgttgctgcacactcttcttgaacgtcgtcgtcgtcgggggtgcactaaactacactacacatcgtcgccgagctccaaatgccgtgccgtgtccgtgtgtgcgcgcttcaataaattctcggcgtccaacttttaatgagtgatgcacaatcgtgttc

SEQ ID NO: 15898 - DNA, 1897 bp, Zea mays
  Clone ID: LIB3060-104-F8_FLI
cattattatatatatcttcccgcgcccgagattccccgtggatgactcgctgacatgtgggccctctctgcgaacctcgccagcactaatcgagccgccactggcagcatctgaagagaataaaagacagccccacacgcagctcgaatcccggcacgtgagcggcggaggcagggacggccatggcatgcagtgggtgcagctgcgaggcggcggtgggggcgatggcgtcggaggcgtacctggagggggcgccggtgcgggaggcgcgggagctggtggcggagctctgtcggcacttctacgcgcagggatgggtcacgggcaccggcggcagcatcaccgtcaaggtcaacgaccccaccgtgccgctcgccgatcgcctcatcgttatgtcaccctccggtgtgcagaaggagaggatggtagcagaggacatgtatgtgatggctgcagatgggaaagtgctttctgcgcctgtagcaaagccatggccaaacaagcctcctaagtgcacggactgtgctcctctgttcatgaaggcgtatctgatgagaggagctggggctgtcattcacagccatggaatagagacttgcatcgcaacaatgctcatccctggtgcaaaggagttcagagtgacccacatggaaatgatcaaaggaatcaaaggtcatggctaccatgatgaattggtcattcctattattgagaataccccttatgagtatgagctcactgactccctaagtgaggcgattgcagcatacccaaaggcaactgctgtgcttgtaaggaaccacggaatatatgtatggggggagtcttggatcaatgccaagacacaggctgaatgctaccattatcttttagatgcttgcatcaagctctatcagctaggtattgattggacaacccctgaacatggttcaataaacaatccaaggagaccgcacagcattttgagccctgaaatttgtaatggatgtcatgctgctgattcatcaaagtgtgttgtactagacattgaggggacaaccactccaatatcatttgtgactgatgtcatgttcccttatgctcgtgataatgtacgaaaacatctgacttctacatttgactttgaggaaactaaagaagacatcaaactattgcgcatccaaattgaagatgatctacaaaatggagttgctggggctgttccagttccacctgatgagggtggcaaagaagaggttatcaattcattggttgccaatgttgaatcaatgattaaagcagaccggaagatcacatcattgaaacaacttcagggtcatatttggaggattggatttcaaaagaaagagctacagggagttgtctttgaggatgttcctgtggcgctaaagaactggcatgctagtggcataaaggtctacatatactcaagtggaagtagagaagcacaaaggcttctatttggcaatacaacatacggtgacctgcgaaagttcctgtgtgggtattttgataccacaactggaaacaaaagagaaacaaggagttattttgagatctctcagtcactgggcgtggacagtccatctcaaatcttattcatcaccgatgtcttccaagaagccattgctgctaaaaacgctggttttgaggtgataatctccattcgcccgggaaatgccccacttcctgacaatcatggtttccgcactatcaaatcattcagcgagatctgaggaatctggtgatctggacatgtctagatatatgtaattcgcgagtgctttagcccgcgtgccagttcatgcagtagaagcattatagcaccgcagcatggcaaaacgatgtgacgtaacaataagttacatggcgaaataaaaactttggttcgttgtgt

SEQ ID NO: 15899 - DNA, 1260 bp, Zea mays
  Clone ID: LIB3060-104-G3_FLI
ggccaccttctatccgcccgccagtccccgctggcctccgcggatcatctgcctgggatcaagatccgtcgaggccgaggcacccgcgcaccaaagatcgtttcttgatctaaatttgggtggtcgtagggatcaaagctcggttctctgcggtgcagttgagagggcaccaatattcttggcatggtggctgacacggaaagctcagattcactgcctggcagttcaaatgctgcttctgagatgcctgctaatgggtctattcaccgaaagtctcaggaaaagccccccaaaaaaacacataaagctgaacgagagaagcttaaacgtgatcagttgaatgacctttttgttgagctcggcagtatgctagttctgccattacagatcttgatcgacaaaacactggaaaggctacagtgctaggtgatgctgcgcgagtactgcgagatctaatcactcaagtggaatctctcaggcaggaacaatctgctcttgtatcggagcgccaatatgtcagttccgagaagaatgagctgcaagaggagaacagttcgctcaagtcccaaatatcggaactacaaaccgagctctgcgcaaggatgaggagcagcagcctgagccaaaccagcatcgggatgtcggatccggcaactcaccagcagatgtggagcagcattccccacttaagctccgtggccatggcggcccgcccagcaagtgcagcgtccccgttgcacggccaggagggctactctgctgacgccggtcaagcgggctacgcgccgcagccgcaacctcgggagctgcagctctttccggggtcatcggcatcgtcttcaccggagcgtgaacgttcttcccggctcggaagcggccaggccacgccgccgagcctgacagattccttgccgggtcagctctgcctaagcctcctacagccatctcaggaagcaagcggcggcggcggcgtcgtgtcgcccagcagagaggaacggcgggatgggtagccaactgacagacaacgcacttgaatcggggtgtgtggcggcggcggcgattgtcctgtaaataccaagaattccctccctttactgtggctgtctcgttcatccagaactaatgctggtagctgccctgtgttgagcggcagctctgcttgttctagaagcttctgagaacatgtgtggggtatgttttccatgagattgtaagatgtgaggtggagccgctagaacacctagcgtgcgttttactgac

SEQ ID NO: 15900 - DNA, 1882 bp, Zea mays
  Clone ID: LIB3060-105-A9_FLI
gcccagtctagaagatctgcaccgttccaaccaccaactccggccgccaagcatatatccagcgcggcgaagaattcccaacgcgaaagccaaaacctcttcacttcacttcacgtcgacacgtgcggggagaatatgcgcgcgacaatcccagccctgtcgctcctggtgacgccgcggctcccctcgctcgccgtgccgctggctggaggccgcctccgcgtgggcggtcgtcctcggacccgccttcgcgtggcggcgccgacgtccgtcccaggggaggcggcggagcaggcggagccgagcacgtcggcgcccgagtccggcgagaagttctcgtggagggatcactggtacccggtctccctcgtcgaggacctcgaccccagccgccccaccccgttccagctcctcaaccgcgacctcgtcatctggaaggaacccaagtccggcgagtgggtcgcgctcgacgaccgctgcccccaccgccttgccccgctctcggagggcaggatcgatgagacggggtgcttgcagtgctcgtatcacggatggtcattcgatggctccggcgcctgcaccaagatcccccaggccatgcccgagggtcctgaggcccgtgcggtgcggtcaccgaaggcgtgcgcgatcaagttccccaccctcgtctcccaggggctgctcttcgtgtggcccgatgagaatgggtgggagaaagcggccgccaccaagcctccaatgttgccgaaagaatttgaggacccggccttctccacggtgacaatccagagggacttgttctatggttatgatacgttgatggagaacgtctctgatccgtcccatatagaatttgctcaccacaaggttactggacgaagagatagagccaggcctttgacattcaggatggaatcaagtggtgcctggggttactcaggagcaaattctggtaatcctcgcattactgcaacttttgaggccccttgttatgcattgaacaaaatagagatagacacaaagttacccatttttggcgaccagaaatgggtcatatggatttgctctttcaacattccaatggccccagggaagactcgttctattgtctgtagcgctcgaaactttttccagttcacaatgccaggaaaagcatggtggcagcttgttcctcgatggtatgaacattggacttcaaatttggtctatgatggcgatatgatcgttcttcaaggccaggagaagattttcctagctgcaaccaaggagtcttctacggatattaatcagcagtacacaaagatcacattcacgcccacacaagctgatcgatttgttttagcattccgcacatggctaaggaaatttggcaatagccagccggagtggtttggaaatcctacacaagaagcattgccttccaccgtcctttcaaagcgcgagatgctagacagatacgagcagcacacgttgaaatgctcgtcctgcaaaggagcatataatgcattccagaatctgcagaaggtattcatgggagcgacagtagtttgctgtgctgccgctggtattcctccagatgttcagctcaggttattgatcggtgcggctgctttggtcagtgccgctgtagcatacgcattccatgagctccagaagaattttgtattcgtggattacgtgcatgctgacattgattgaaagattcgtgaggatctgttgtgtcgacatcactggctcgcgagtcgtgtctgtagtctagggctctaggcgtctagctagggaaagtaactttttgccgggtataggtcatattgctcacatatgtattttgtatagtgtatgcactcaactgtagccgattcagtgcgaaaatatagttttt

SEQ ID NO: 15901 - DNA, 710 bp, Zea mays
  Clone ID: LIB3060-105-B12_FLI
gacgctgcgctcccgttcccccgtcacaaacacacacactgcggagaggaccgcaacgcgagcccaccccaggccgaacgccgagagcgatccctcccgtccgtgttgccctttgcgctccgccttcctcctcttccaccccgtcacttccgtgccatccgcggctcgcctccccaccccccattcccgccgccccatgcctccggctcgaccgtagccgcccgacgacgaccgccatggccgccgattccggcagcggtgcccgccgttcccccccttaatccttgattgggatggccggcctggagatcgggccggcgtcgccgggctcggagggggcgccatcgccggcgtcgagcgtgggcgcctccgtggagcggcccgagcagtcgtcgccgcgggtgaccaagcgcccaggcctcgtcatgtccttctccgggaagcggctggaccagtcgccggccgggtcgccgtcgccgtcgccgtcgctgtcgcgcccggtgctggtcatgtcccactccagcaaccgcctcgaccagtcgcccgcgcgcccggtgctcgtcatgtcccgctccagcaaccggctggaccagtcctccccggcgtcgtcgccggcgccagtgaaggcgcccgtgctggtcatgtcaggctccagcaatcggcttgacagctcgcatccgtcgccgtcgccgtcgccgtcgccgaccgcc

SEQ ID NO: 15902 - DNA, 2964 bp, Zea mays
  Clone ID: LIB3060-105-D3_FLI
ttagagtgcctgcccgcaagtatgttgagttctatggtggtgcccatgtccaatcctcttcccatgctcacccttaccatcatatgcgccactttgtggctaactggtggtgctggtggcactggtaccgacaccggcggcggcggctgcatcccatctgagagggatgctttgctgtccttcaagaagggcatcacgagcgacaacaccagtcgcctaggctcatggcacggccaagattgctgccggtggagaggtgtcacctgcagcaaccgaaccggcaacgtcctcatgctcaatcttgcctacccgagctatccatatgatgactcgtactacacagatgtatgcggcgattacagaactttggttggtgagataagtccctctctactcttgctgagacaactagagcacatagacctaagctggaactgcttgttaggcccaaatgggcgtatgccttcattcctgggctccatgaagaacttgagatacctcaatctctctggagtaccattcaaaggtagcgtgcctcctcagttaggcaacctatctaggttgcagtaccttgatcttggcaattcatatgtaggatatggcatatactcaaaggacattacttggttaacaaacctacctctgctgcagtaccttggcatgcgttctgtcaatctctcagggatagctggtgattggcctcatatactgaatatgctaccatctttaagggtcattagtctctctttctgttggcttggcagtgcaaaccaatcgctcgcattttttaatctcacaaaacttgagaagcttgatctctcgttcaacaactttgatcacacatatatatcgagttggttctggagagcgacaagtctcaagcacctagttctgaaggacaccggactgtttggtgaattgcctgatgcactaggaaacctgacatcccttgttgtccttgatttatcaagtaatgggaacatgacgataacacaaggcttgaagaacctttgtggtttggaaatccttgaccttacctacagttcgataaatatagacatagcagagttgatggacacattaccactgtgcacaagagaaaacttacagttacaggagctccatctggggtacaatagtttcacagggatcctgccaagttcgatagggtacttcaggagcttacgtatccttgatctcacggataacaatctcagaggaagtgtacctactgaaattggtacccttacaaatttgacctctttggatctaagcaataacaacctcggtggagtaatcacggaggagcactttgtaggtctgatgaacctaaaggaaattgaactgtctttcactaatttgagtgttgtagtggatgctgattggatccaaccattcaggctggagtctgcagggtttgcatctatccatttgggtcccctgtttccagtttggcttcaccagcagctccttcaaatcacttacctagacatttcaagcacagggttggtgggaaacattcctgattggttttggtcattttcaaaggctgcttttcttgacatgtcttacaatcaattaaatggtaacttgccggcagatatgagtgacatggcctttctaatgctaaacctctgttcaaacaagctcacaggacaagtaccaccgtttccaagaaacatcacaatgttagacatctctaacaatttattttcaggcatcatgccacaaaatttatctgattttgaaaccctatattttctcatcctaagcaacaacagtttatcaggaacgttcccagcattcctgcagaactgtaggaatatgattttcttggaccttgcatggaataatttatctggaaggttaccttcttggatatgggagctgaagggtttacatgttctacgtctaagccacaattcattttctgggaatattccgtctgaaataaccagcctttcttatctgcaatacttggatctatcaggaaactacttttctggtgttatacctccacatctttcaaatcttacagatatgaccatgaacgcagtggatcattcattcaatattgaatttgaaaaatatacgattcatggtggagtcgatcaattcaatgatatatggttagtagtgacaaaagggcgacagcttacatatagtcagggagctatatatttcgtaaacattgatttatcaggcaactgcttaacaggtgaaattcccttcgatatcacagcccttgatgccttgatgaaattgaatttgtcatcaaaccaactgggtggaaagattcccaacaagattggtgccatgaggtcgttggaatccctggacctctccaacaacaagctttttggtgaaatcccatggagcttatcaaacctgacatttttaagctacatgaatttgtcctacaacaatctgtcaggaaggataccctcaggccgccaactggataccttaaactcggacaacccgtcacttatgtacataggcaacagtggactttgtggacctcctcttcaaaataattgttcaggaaatggtagcttcatgcctggttatcacagaagcaataggcaaaagttcgagcctgcatcattttatttcagtcttgtattggggcttgtggtagggctgtggatggtgttttgtgctctgttgttcataaacacatggagagttgcttatcttgggctcctcgacaaggtgtatgacaagatctatgtgtttgtagctgtaaaatgggcaagtatgactatgagtgcagcagctgcagaatgagagcacacaaccaatacaatgtaagtactgcgtgtgagttcgtccaaataaagaccatgttctaattaatccttctgttagctgtaaaccataatacttttttggactcgaacactacatgtgtaactatattgttttggcagatttatatgtttatcaatatattgctttttc

SEQ ID NO: 15903 - DNA, 1719 bp, Zea mays
  Clone ID: LIB3060-105-F7_FLI
gcgacgcttccggctttccgtgcgaccgtgcccttttcctcctctcgcagctcgcaggcgcaacagattccacccgttccttcgggtggccggacggaacgaggaaggaggcaggatggcctccgatggccacccgccggagccggggaagaaggaggatgtcgccaccacggccgccgggcctggagcaaacgatctggacgacccgcaattcatgtgctgcgtatgtctggatcttctgtacaaaccagttgttatatcatgtggtcatatgtcatgtttctggtgtgtccacaaagctatgcatattttccgggaatcgcattgtgctgtgtgtaggcagccctatatacacttcccgagtatttgtcagctcttgcatcatttgcttctaaagcttgaaactaatgattacaaaagaagggaaaaagaagtactagaggaagagaagcgcatgcaaacatactctccccaaatcattgagttcttaaactacaagactaacgttggaagctataaggagaacagaaatgaagacagtaaagctagacctccacaagaagttccattgaatgacagcgttccagatgagcatttgaagaaaattaaattggaggatgtttcatgccctctctgtatggagatgctgtatcaacctgctgttcttaattgtggtcatgtgtattgtgtatcctgtttgtcatccttgaatgaggaaacgctgaagtgccatgtttgtggaagtcttcaccctggagatttccctaatgtttgcctggaccttgatcatttccttgaagaatattttccagcagaatatgaattgagagggcagaaagttcaatttaagaaggatcagtgcaatcgtgaaacatcatcttcaggtacttcaggcagaaaaggaagcactagggcactgcatgctgaagacccgtcaaatattcacattggagtaggatgcgactcatgtggggtatatccgatacgtggtaagagatacaaatgccaggactgcactgagttaataggctttgacctttgcgaagcctgctacaactccagttcaaagctcccaggacgctttaaccagcggcacacccctaatcacagaatggaagttgacaattcagcactcgtgcataggatactgagacaccatggcatacccgaggaaggccctgagggactgatgatggaagtggttggtcctgatgcaatggtgcagatactcattgataatcaaggaatggaggagggcaatgacgagggcccaggagaggcggccattgaagaaccagttggttctcttggctcaatgtcgcgtctgtcgcatctattcatgtataatccagaaatggaggatggcaatgacgaggactcaggagaggaggcggccattgaagaaccagttggttctcttggcgcaatggcgcctctattcatgtatgatcaagaaatggaggacaacgaggaggatcaggcacactagatgcagattgcaccagctgcagcgaagcctttgttttgtgttgctggggcggctctacttatgtaatgtggaatggagggattgcgcaagcttaaaagtatggctggatcggccttgttttttaactggttctctagttactgccatctaatagccaacatttttcccgcttttgtaaatccgtgcagttgtttgtttcaaaggaaaatgcaataaggatatgcagaact

SEQ ID NO: 15904 - DNA, 2153 bp, Zea mays
  Clone ID: LIB3060-105-H12_FLI
ccgttgcgctgcggcaaagcctccccccacacctctctcctccacccgccgcccccgcgggaccgaaaccctagctagggttctgcccgccgccgccgccgccttcgatccagacgcggccagccttcccgcaacaccgccatggacacggggcgcaagcggaccgcaccggagggcgccaacggcgcgggcggccccaagcgcgcgagagaatcggagacaactggtgtaggaagcaaatccaagccgtgcaccaaatttttcaggttctaatctagcttaaaatgaacagtcatccggtaacatctactatcgttattatgctcttctttttttaaattaaaatttgttatgttactaaatgctgtgcttgatgctaacaaatgggtcggtctagattctgctacaggatggttttatctaatcattgcttaagaacactcaacggagtaaaaaattggaatctactgctgtttatcactgtgaaaattggtgcaacaagggaacgtactgctgtttatcactgtgaaaaccgatgcaacaagggaacctactgctgtatatcactgaaaatctgaaccatgcaacaatgttttcaaggaagcaaaacttcctctcaaaaggaacaatcagtcaataacaccatggaacaggttcacttgaagaaatcaagaagattagattgaacatggggactgtaattcaattccttgtgaattgtaccagttatttgttcaattgcatttccttatcaatatgttgcagtagtagttctgagcaccttgaagcttgattatgaatggcatttctatataagcatgatttctaaaagattagtttgtatcatttacttcaacttttattctttgcatatatatttttagcagtcatctagtgaggttgcattatccagctgcatgtaacttaatctcttccatcaacattgtttgcatttgtgtatcaactaaaatcatctgtaggttgtcagatatattagcatgttctgttgcttatattatgttttcaatgtgcagcactgcgggttgcccctttggtgcaagttgccattttctccataacttcccgggtggctaccaggccgtttcaaagatgaccaacttgggtggaccgcctgttccggctccaccaggaagaatgcctatgggacctggtggtcctgatgggccaccttcacctgctgtgaagactcgcatgtgtaacaagtacaacactgccgaaggatgtaaatgggggagcaagtgccactttgctcatggagagagggagcttggaaagcccctgcagatggacaacccgatgggacctcctccaatggggccagggcccaacgggcacttcatgccaccgccaatgcctttcccagacatggttcctccctccacattcggtgcttccgccacagccaagatcagcgtcgatgcatcccttgctggtgccatcattgggaagggtggtaccaacacaaagcatatatcccgagtgactggggccaagttagccatccgggacaacgaggctgatcccaaccataaaaacatcgagctcgagggaacatttgaccagatcaagcacgctagcgcaatggtcacagaattgattgtccgcatcagtggtaagccgcctccacaagccaagaacaacccaggtagggggcctggttctcatgcggggggtcctggaagcaacttcaaaaccaaattgtgcgagaacttcaacaaaggctcatgcacctttggagacaggtgccacttcgcccatggcgaaggtgagctgcgcaaacctgctgctgcttgacaggcatgcttattgtggcctgtggtgattaatctgcctgtatggctgaataacaccataaccaaggacagtcgcgccatggtgaagtgtgctgagccacatgctgcctgagagagagcatttccctgtggctcgtatttgatcttaatgctgtaacaaactctcctcgatggagattaagcaatggccgtttatttaggatttgtaggattgccgtattggtcacccttttatctatcctgtttttgtaccgtttcttaggcactcttggctggcagatcattgtgagtctgttgaacttgagaatagttgctattgatgttatcggtttgtggatt

SEQ ID NO: 15905 - DNA, 1133 bp, Zea mays
  Clone ID: LIB3060-105-H5_FLI
gccctcgtgcgagactcgggtattcaatttctgaaggtcgaggcgtgaaagaaaaactccggaggtcgaatggcggcggcggagaagcccgcggcggtgcggcgagcggaggagctagtggagagggagatgggcgggcgcgacgcctcccacgacgccgcgcacgcgctccgcgtccgagaccttgcgctctcgctcgcagccgaagagggcctctccgctcccgaccgcctcctcaccgtggaactggccgctctcctgcacgacgttggagattacaagtataccaagaacaatgtggaggatatgagcgtcgttgagatgtttcttcaagaggtaggattggatgaaggccaaaaggatgaaatagtggcaattattaaggggatggggttcaaaaatgaagtttcaaataaatctattgttgagcccactcttgaatttgcaattgtacaagatgcagatcgcttggatgcaattggggcaattggtattgcaagatgttttacatatggtggtagcaagaacagcgcattacatgatcctagaattctgccacgtgatagcttgtcgaaagaaaagtacatgtccaaggaagagaagcagacatcaatcaatcattttcatgagaagctttttaaactgaaggacatgatgaagacagaggccgggaaaaggagagctgagaaaaggcataggttcatggaggaatttgtggctgaattctacgaagagtggagtggcagggcttgaggttgaacaaccaggttttgacttgagcctatgtcaaagtgtgcagttggcgaaccatttctcaacaacccatgatgatgttgtctacctgggcctactttttgccgatgaagccacgcaaataaacaatggaaagcctatttagattggctggacaaatcatacggttctgtgataagcaatcaacccactaccaattccgtggatgaagctgaatttttttttcaaacagatgacatggcatcttgctgctgttgtattgaaataatactgctacaatattaccggttacatcacctgaaggtcaagcgttttgccaacacatatacatatgtatctatacatatatataaaagttctatactagatgtaaatgaaac

SEQ ID NO: 15906 - DNA, 1711 bp, Zea mays
  Clone ID: LIB3060-106-B1_FLI
ctagccgacgccgagaagcccctcgatggcgaggcgaaggcgcgcagcaatcctgcctcgcttccctccaaattcccaaagctctcgcgcgcggtgccatggcggagcgcctcgccgcctccctcctccctgccgcctcgccgtccccgtccgcccgccgcgcaacggtcgcagccgcagccgccgcctctttcccctccccatgctccgcccgcgcggggctgcgcctacgctcccgcccgcccctcttctcgcagaaggcggccgggcgcgggtgtggcctgcgggtggtgcggtgcatggcagcgtcggacgcggcgcagctcaaggccgcgcgggaggacatcaaggaactccttaagagcacatactgccaccccatcatggtccgtctggggtggcatgattctggtacctatgacaaggatattaaggactggccacagcgaggtggagctaatggaagtttaaggttcgatgctgagctgagtcatggagccaatgccggcctgattaatgcattgaagcttatccagcctatcaaggacaaatacccaggtatcacttatgcagatttgttccagttagcaagtgctacggcgattgaggaagctggtggtccaaaacttccaatgaaatatggacgtgttgatgtcacagcagctgaacagtgtccgcccgaggggaggcttcctgatgctggcccacgtgatcctgctgaacaccttagggaggtattttatagaatgggccttgatgacaaggaaattgttgcactatctggagcacacacacttggaagagcaaggcctgaccggagtggctggggaaagctagaaacaaaatatactaaggatgggcctggtgagcctggagggcaatcatggacagttgagtggttgaagtttgataatagttacttcaaggagatgaagttattttttttgaacgaaattcaggacatgaagtttttgagccagcttccctggaaagagcagaaggaacaggatcttctagttttgcctacagatgctgcattatttgaggacccatcgttcaaggtatacgcagaaaagtatgcagatgaccaggaagcgttctttaaagactatggtgaagctcatgctaagctgagcgatcttggtgcaaagtttgatcctcctgagggattctcactcgacgatgacacaagctcttcaccttccgacgagaagacggaagaacctacactggtagcggtaggagcggcagtagcaacagcgacagcggacgacaacaacggcgcagctccgcagccggagcccttcgtcgctgccaaatactcgtatggaaagagggagttgtcggatgcgatgaagcaaaagatcagggcggagtacgaggggtttggaggcagcccggacaagcccatgcagtccaactacttcctcaacatcatgatcctgattgcggggttggcgttcttgacatctctgcttgggaactgagtgttatatcatcatatgattatgatccgatttctgaagtctacgagtgtccactattgcaaactctgtaaacgtatgaaacatatctacgactagcattagagctacgtacactgtgcaaacagttttttttttttcgcgaattttggagagagacgagcaaaagaaatgtataacgagtgttggagaaatagcgacctgactatcaacacactgttgctgcc

SEQ ID NO: 15907 - DNA, 872 bp, Zea mays
  Clone ID: LIB3060-106-C2_FLI
gaccgagctcgcccgcatctgcgacggcatcctcgccctgctcgactcccacctcgtcccatccgccggcggcgccgagtccaaggtcttctacctcaagatgaagggtgactaccacaggtaccttgctgagttcaagtctggtgcagagaggaaggatgctgcggagagcaccatgaatgcctacaaagctgctcaggacattgctcttgcagatctggctccaacccaccccatcaggcttggccttgctctcaacttctcagtgttctactacgagatcctgaactcccctgatcgcgcctgcaaccttgcaaaacaggccttcgatgaggcgatctctgagctagacagcctgggagaggagtcatacaaggacagcactctgatcatgcagctcctgcgcgacaacttgaccctatggacttccgacaccaacgaggatggcggcgacgagatcaaggatgctgctgccccgaaagaatctgcggagggtcagtaagatggattcagtctcacgacctgctgctgctgatgttgaggagtaaccagaaccagaaccgccgtcctcgattctgatagattatcttctagtataccttgtgttgttgctgttgtcgtcgtcgcgccggtgtatgcgatgaagctgccattgctgctgttttaattaagcattctagatgttataccgcatgctttgtttcggtttctaatgtcgataaatggtggccggatgctggttttcgtgctccgagccggccaccaggaagaagacctgcctgcccttgtgggtgcagcgttgttagaatgacctacggtgtatttgacttcgacaggcctgctgcctagtggactgatattctgttatgcgc

SEQ ID NO: 15908 - DNA, 1178 bp, Zea mays
  Clone ID: LIB3060-107-A8_FLI
cagaggaaaagggcaaaagccaaaaggcatcaccgccgcgacgacgatggcagcctcgctccaagccgcggccaccctgatgcagccggccaagatcggcggccgggcgccctttgcctcgctgccgtcccgcccgtcgtcgcaactcgcctgcagggcgttcggcgtcgacgccggcgccgccaggatcacgtgctccctgcaggacgtcgccagcaggtgcgtcgacgccgcgaagctcgccggcttcgcgctcgccacctcggcgctcctcgtctcgggcgcgagcgcggagggcacgcccaagaggctgacctacgacgagatccagagcaaaacgtacatggaggtgaagggcacgggcacggcgaaccagtgcccgaccatcgacggcggcgtggagtcgttcccgttcaaggccggcaagtaccagatgaagaagctgtgcctggagccgacgtccttcaccgtcaaggcggagggcatcgccaagaacgccccgcccgagttccagaagaccaagctcatgacccgcctcacgtacacgctggacgagatcgagggcccgctcgaggtcggctccgacggcacgctcaagttcgaggagaaggacggcatcgactacgccgccgtcaccgtgcagctcccggggggcgagcgcgtgccgttcctcttcaccgtcaagcagctcgtcgccaccggcaagcccgagagcttcggcgggcccttcctcgtgcccagctaccgcggctcctccttcctcgaccccaagggccgcggcggctccaccggctacgacaacgccgtcgcgctccccgccgggggcagaggtgacgaggaggagctccagaaggagaacatcaagaacgccgcctcctccaccggcaacatcacgttgagcgtcaccaagagcaacccggagaccggcgaggtcatcggcgtcttcgagagcgtgcagccgtccgacaccgacctcggggccaaggcgcccaaggatgtcaagatccagggggtctggtacgctcagctcgagtgattcgagtgtctaactgctaggtgtccgaccgccgtcatggatcttgggaaggtgtatgtataccatggaaaactttggagagcagaggaggaatcgtgtatgtaatgtacttgttaatgcaaattcgggctgtcgctttttt

SEQ ID NO: 15909 - DNA, 2969 bp, Zea mays
  Clone ID: LIB3060-107-D3_FLI
ctctcttcttttctccccctcccgcttccttgtttcccctcgttctatttggattggaagcttctccgcggccaaggtcacgcacacccacccacctggacctggtgcccgccgtgtaggcctctcggccttcgtcgtcctccagccccaggcggagcacgaggcggcggacgtacgggctcgacggaggcgagctgccggccgagcgaccaggaagacgcattcagaagaggacatcgatcgatcgcggagagttccccgggtagctgacgacgatccatgcttgtggcggccggatcagttcgcccgtccaaccgggattgctaggcagaagcgcaggacgaggcagcggcagcgtgagcgacgccaccacccaagcggacggcaataatggacgctaaccactcgccgccggcgcagccggagaggcatcatggcagcttcaactacgacatcgagagcacggacggcacgtggcgcggcgcgggggcgtggcaggagcaggacccatcgtcggaggccctgctgcggtacgacgacgacgggccccgggagccgctgctgcgaaggcgcaccatgaacaccacctcccagattgccatcgtcggcgcaaacatctgccccatcgagagcctcgactacgaaattgtggaaaatgaccttttcaagcaggattggcgatcaagaaagaagcagcagatattccagtatattgttctgaaatggtcattagttcttcttattggcctgtgtactggacttgttggcttcttcaataaccttgcagttgaaaacattgctgggttcaagttgttgcttacaagtgatctgatgctcaagcataggtacttcacagcatttctggcatatggaggttgcaatctagtcttggcagctgctgctgcagcgatctgcgcttacatagcacctgctgctgctgggtctggtatccctgaagttaaagcataccttaatggagttgatgcttatgctatattagctccaagcacactgtttgtgaagatatttggttcaatacttggagtttcagctggatttgtccttggaaaggaaggtcccatggtacatacaggagcatgcattgccaacttacttggtcaaggggggtcacgcaagtaccatctgacatgtaactggctcagatactttaagaatgatagagataggcgggatttgattacttgtggctctgctgctggagttgcagcagcattccgtgcgcctgttggtggtgtgctctttgctcttgaagaagcagcatcatggtggcgaagtgctctcctgtggagaacattctttacaactgctgttgttgctgttgtactgaggggtttgatccagttctgtcgtagcggaaaatgtggtctttttggtcagggagggttgattatgtttgatcttagctcaaccgtaccgagttacagtacccaggatatcattgcaattattgtccttggaataattggtggggtcttcgggggcctgttcaactttctcttggataggattctccgagcttatagttttatcaacgagagaggtgctccatacaagatccttctcaccgtcacaatatcaatcatcacatcagcatgctcctatgggctaccttggctcgccccatgcactccgtgccctgctgatgctgtggaggaatgccctaccattggccgctctgggaattttaagaactttcagtgcccgccgggctattacaatggtcttgcgtcgttgttcttcaacacaaatgatgacgccatccgcaatctattcagcagtggcaccgagaatgagttccacatgtccactctttttgtgttcttcactgcgatttactgccttggccttgtgacatacggtattgctgttccatctggtctcttcatccctgttatacttgctggggctacgtacgggcgcatagtggggacccttcttggtccaatttcagaccttgatcctggactattcgcacttcttggcgcggcatctttcctcggtggaacaatgaggatgactgtgtcagtctgcgtgatacttctggagctcaccaatgacctccttatgctcccgttagtcatgctcgttcttctgatatcaaagaccatagccgacagctttaacaaaggggtttatgatcagattgtggtgatgaaaggcttgccattcctggaagctcatgccgaaccatacatgacgcacttggttgctagcgatgttgtgtctgggccactgatctccttttcaggcgtcgagagagtggggaatatcgttcaggcgttgaggatcacaggccacaacggatttccagtggtcgatgagccacctctatcagaggctccagaacttgttgggcttgtgctcagatcccatctgctggtcctgctgaaaggtaagggctttatgaaagagaagatgaaaaccagcggtagcttcgtgctggaaagatttggtgccttcgattttgccaagccaggctcagggaaaggcctgaagattgaggacctggatttcactgatgaggaaatggacttgtatgtcgatctccatccaattacaaatacatcaccgtacacggtggtagagaccatgtcacttgcgaaggctgccgtccttttccgggcactgggactcaggcacatgctcgttgtgccaaagaccccagggagacctccaattgttggaatcctgacgaggcacgatttcataccggagcatattcatgggctgttcccaaatatacacaagtcacactaatggaacactcaatcagtccatatcttttcttttcttttttgccgtcgccttgtaggttgtagctagctgtacgaaaacgaagctacttttgtccaatatttgctatcggccatctggccttttcttttccattttgtttcttcaggagtactccagaatcatataatcactggataatattgtattttttc

SEQ ID NO: 15910 - DNA, 890 bp, Zea mays
  Clone ID: LIB3060-107-D7_FLI
caaagcgactacagagagtaggagatgcttactctccacaccattcagtcatgcccctcgctgcgcagatcctctctgttccggcgtgctctgctaggcaggaagagatctttcatttctgccagcagttctgaggatgccgaatccggcactcccccgccgcttggtggcgacaaacaccagcaggaggttcttgcacagatcgccatgcttcagacgcagaaggtgcgcatcacagacttcttggacgagcgctctgcttacctgaccaagttcgccaaggacgccgactcggagttcgacctgattgggcagaacgctatgaaagaacttgatgccgttggtgaccagatactggagaggctcgacagcaagatgcaagccttcgaggagacggctgaggtgcaacggcaagagatagaaatgaacgataaggtgttagaggacttcgaagactggatcgaaaaggagaaaaacgaagggatgttcttcaaaagccttggcaaggtcaaacctcggaacaagatggaaataaaggtgaaagccaaggtggaagcacagaaggtcaaagagattgcagaggagagtgcaggatcaaaaactcgtatgaacatttacctggggctgatggggatactcgggattacaattgcgaatgccatctttgcaacaccagaggtggagtggaggaaggttgctgctctgggtctgattttcattggtctggttgctcaggtcatctacgagcaggatatctcaccgccggaagctgagaagacagagaaaatagaagaataaaaaaggagttgcagacatatcggtagggtggtgtaatctcacacaggcaatgtaaactgtatatggtagcatgaatagatacaaggtttaat

SEQ ID NO: 15911 - DNA, 704 bp, Zea mays
  Clone ID: LIB3060-107-F2_FLI
tgcacccgtccctcaaccagctcctggccgtcggcgacgacggctccgatctcatgatgttctcgccgcccccggccgccgcggcaggcgggaagcgcaaggcgatggtggcgatgaacatgagcccagctgacgagtgcgccgtcactgcccatcagcaccagtctccggcggccaagcggctcaacggcggttcctgcttcgacgacgcgccgcagccggccagcggcttgccggcgacgatgtcgtccgtgcttggcggcggcctcaaccaccacatgctcccacagttctagatagacgacttctggtagctgactttgttgggggcacatcttccgtgcatgtactgcgtcatcaactgatcgatatggtggatcgtctacgcggaatagctagcaacctgcggcgacatggaaagcaaggatcgagctcgtggattggaggccattaataaagatgggtcgtgcggtgaagaagaattgtagcagtacgtagcactatttgtactggagccagtgttgatcaacgttaggcgtaaccatggtatgtatcccattttttccctccgttgtagagtacaggtactctatattcatttcaggcgcagtgcgaaggtagctggagcttgatgggtccatgtactactacactagtactcttatttattagtcaatacgaagtatatattatattgtcttgct

SEQ ID NO: 15912 - DNA, 1217 bp, Zea mays
  Clone ID: LIB3060-107-F4_FLI
gcgcacgctggccgactacaacattcagaaggagagcaccctccacttggtgctgcgtctcaggggcggcatgcagatcttcgtgaagactctgaccggcaagactatcacccttgaggtcgagtcttctgataccattgataatgtcaaggccaagatccaggacaaggagggcatccctccggaccagcagcggctcatttttgccggcaagcagctcgaggacgggcgcacgctggccgactacaacattcagaaggagagcaccctccacttggtgctgcgtctcagaggtggcatgcagatcttcgtgaagacacttactggcaagacgatcacccttgaggtggagtcctcagacaccattgacaacgtcaaggccaagatccaggacaaggagggcattccaccggaccagcagcggctgatcttcgccggcaagcagctggaggatggtcgcaccttggctgactacaacatccagaaggagagcaccctccacctggtgctccgcctcaggggtggtatgcagatttttgtgaagacattgactggcaagaccatcaccttggaggtggagtcgtctgacacaatcgataatgtcaaagccaagatccaggacaaggagggcattccaccggaccagcagcgcctgatctttgctggcaagcagctggaggatggccgtaccctcgccgactacaacatccagaaggagagcaccctccacctggtgctccgcttgcgaggtggtatgcagatctttgtgaagaccttgactggcaagaccataaccctggaggttgagagctccgacaccatcgacaacgtgaaggcaaagatccaggacaaagagggcatccccccagaccagcagcgtctgatcttcgctggcaagcagctggaggatggccgcaccctagcagactacaacatccagaaggagagcactctccacctggtgctccgcctccgtggtggtcagtaagccatggttcatttaagctgctgctgtacctgggtatctgcgtcgtctggtgccctctggtgtacctctatatggatgtcgtcgtctaataaacatctgtggtttgtgtgtcatgaatcgtggttgtggcttcgttggtttaatggacctgttgtgtcctctgtgttgtacccaaaactcttctgcagcagtatggcttgaatccttatgaagtttgatgtttgaactt

SEQ ID NO: 15913 - DNA, 1509 bp, Zea mays
  Clone ID: LIB3060-107-F8_FLI
caaatctctcgcgcctcccactcctccccgccactcgccgccagcgaccaaccatcgcccgcccagcagcagcacggccccacgccaggactccacccacgcgcggctagctaagctcccgccgccatgatcacggccctgcaggtctccggcggcggcctgccgctcatgttcacccggcggcggcgccgggcgttccggccgccccaagcggtggcgtccgacgccgccgccgcggcgggcacggcgagggaggagggcgggaaggtggccctgggagggtccggcgtagccgtcaccaagctcggcgtcggggcgtggtcctggggcgacaccacctactggaacgagttccggtgggacgatacgaagctgaaggcagccaaaggagcgtttgacgcgagcatcgactgcggaataaccttcttcgacaccgccgaagtgtacggagcaggggtatcgggagcgattaattcagagagtttactaggaaggtttatcaaggagaggcagcggaaggagcaggtggacgtggctgtcgcgaccaagttcgcagctcttccatggaggttcggtcgtgggagcgtcatctgcgcgctcaaggcctcgctggatcgccttggcgtctcttcggttgagctctaccaactccattggccagggatatggggcaacgaagactacctggacggccttggagacgctgtggagcaagggcttgtgaaggcagtcggggtctcaaactacagcgagaaacgtctccgagacgcgtacgagcgcctcaggaagaggggggtcccgctcgcctccaaccaggtgaactacagcctgatataccggaacccggaggagaacggggtgaaggcggcctgcgacgagctcggcgtcactctgatcgcgtactccccgatcgcccaaggtgctctgacgggaaagtacacgccggagagtcctcctaaaggccctcgaggacggatatacacgccggagttcctgacgaagctccagccacttatcaaccggatcaaggagatcggaggaagctacgggaggacttcaacccaggtggtgctgaactggctggtgtgccagggcaacgtggtgccgatcccgggcgccaagaacgccgagcaggcgcgggagttcgctggcgctctcgggtggagcctggcgcccgacgaggtggaggagctccggtccatggcgcgccaggtcaagcccgtcatcggcttcccggtggagaagctgtgaccacccccatggcactggtatatatcaggccactgtagtagtgtaatgtatagtaggactgtaggtacgtagatgggcaaagcataccatttccatcgcgagactgcggacgatgtatgctacattgctactgaacgtagcgtcacgccgtcgaccagagatcacagtagctgtctgcgctaaggacgtggttcactacttgcgaaagtcagtgttttaattacatggaaaaaattataaaattatacaatttttatc

SEQ ID NO: 15914 - DNA, 1735 bp, Zea mays
  Clone ID: LIB3060-107-H7_FLI
cacccccactgtgccgcgccccgccccgccccgccccgcccacgccgccgtggcaacgccatggggaagcgatccggcggccggaagctgccgttcttcaccagatcctcctcgtcctcgtccaagcggaatcgctccgcccgccgcctcccttccctccccaagcaggacaacgcgacgagggctcttctcgcctccccctctgctgcctcgccgtccgcgaccccgggatcggcggcggcggggcagaccgcccagctgccccctcccctctcagttaccgcgggcggcggggttgccgtgtcggggaaggtcaacaagaagaaggccggcacgcgcctatggatgcggttggaccgctggagtgcctccgagatcgtcgagctcgacaaggcctccataatccgccgcgccggactgcccccgcgcgacctacgcatcctcggccccgttttctctcgctcctccagcatcctcgctagggagaaggcgatggtgatcaacctcgaattcatcagggcgatagttactgccgaggaggtgctcctgttggaccctctcatgcacgaagtgctccctttcgttgaccaattgaggcagcacctgcctctgaggagccgggtgggtgagaatggtgagtgtgcccctgatggcaatggggaaaaacagaagggctcgcttaatgaagcgaccggggcagagcatgagctgccattcgagttccatgtgctggaggtagcactcgaggttgtgtgctcatcgttggaccttagcgtgtctgaccttgagaggcatgctactccagtgcttgacgaactgaccaagaatgtaagcacaaggaaccttgagcgagtgcggaaccttaagagtcatcttacccgtttgcttgcccgtgtgcaaaaggtcagggatgaaatagaacatcttctagatgataatgaagacatggaacatctgtatctaacaaggaagcaagtacaaaaccaacaggttgaggctttaatgtcatctgctgcttccaacagcattgttcttgccggaacaggtgtgcccaggctgaactctagcttccggcgtagcctgagcattgctactagcatgcatttggataatgatgtggaggacctagagatgttacttgaggcctacttcatgcagctggatggaattcgcaacagaattttgtcggttcgggagtatattgatgacacagaagactacgtcaacattcaactcgacaaccagcgtaacgaactcattcaactccagcttacacttacgattgcatcctttggcatagctgccaacactttcattgctggagcttttgcgatgaacatcccgggctctctgttcaacaccgatggcagcctcttctggccatttgtcgggagcacctcatctggctgctttgtaatcaccgtcctcttgttggggtatgcctggtggaagaagttgctgggtccttgaacatgaagcaagatggcagagagccttgtcatgcttgcagaaaggaagaaggcgtcctatcctaaggatattagagaaccgtggggatagcatgaaaacctgtatataacatctcaacagtgttcataagatgagtacgtataatatatcattagcataaacgagatgatgtgatgatcgatatacttccttgttaacatcattagctggcaactgaaaaatgttgccatgaaactatattatccagcagcggctggctttgtgt

SEQ ID NO: 15915 - DNA, 1212 bp, Zea mays
  Clone ID: LIB3060-108-A1_FLI
ctcggcaatctccatccccgctacgccatggctgctgcctcctccccaaccttcccgccgccggcgaccgacgtcgccgctccaggcgtccccgatctctcgatcccctacgacctggccacccgcgggcagtggcaggcgctcttctcccacctctcccatccggcccacacgccccatccgcaccaccgcctcctcctctccgctctctccgccctctgcctggccaagctccgacgcttccccgacgccgccgcgcttctagcttccctccacccggatccggcctgcccgccgccgcccttcctcatccgcctcctccatgctctcctcccactctttctccccgaccgccccctcgcgctcgaccgcctctacacgctcctctcctccgtccgcgtccgccccaacgccgggcaccccgagtggcgccgccgcgacgcgctcgtcgcgtccgtcctcgccgccgaccacctcgcccaccgcgagttcgacgtcgcactcgcgctcctcgccgacatcgccggccgcgagccgggcgacccggtgctcctctcgcgcctcgcctacgcgcacctccagatcggcaacctcggcgcggcctcggctgccttccgccacgtggagtccgtggccgccgcgtccgaggacccgacgcggcatgccaacctcctggcccgcaaccgtgcgctggagtgcatcgtgggcaaggactacgcggcggcggtgcgggagtacgagcgctgcatcgaggcggaccccgcggacgccgtggccctcaacaacaaggcgctgtgcctcatgtactcgcgggacctcggcgacgccatcaaggtgctggagggtgccctcgagagggtccccacggctgcgctcaacgagacggtggtggtcaacctgtgcagcatgtacgagctcgccttcgtcaaccacggcgaggtcaagaggagccttgctgagtggatcgccagggttgcgcccgacgacttcgacacctcctgcacgcgcatgtagccagccatgtaggaggtactctgccttttgcaattcagcattgtagccagccatgtgtagtatggctgttatgtcaacatgctgaaatgtgattatctctgtttcgatagcattccaattcaaccaatttctgtttatatgcatggaaattgtgacacgattggtatacatgattgaaaacaagagtggattggagac

SEQ ID NO: 15916 - DNA, 1179 bp, Zea mays
  Clone ID: LIB3060-108-F8_FLI
gcgcacctcgtatcgtcgtctagctccgtttcgtttccgggaagcaaccaaccttcgttcccgggcagccgacgacccttgcgccgtcttcgtctgtcaagagcacagtttgacgcgagcagctgccggttccttcttctctcgtgcgcctttgctagctttgggatcgatcaaagccggtgagcgagcgagtgaggaccggaacatctgccagcatcatggcctccgagcatgcgcagctgtctgccaaggccgccggcggcagcaggttcgcggtgacgtacggcctgctgaggcagtacatgaaggagcagggcggcagcggcgccaccaggtgcctcgcgccggccgtgggcgtgggcctcatgccggaagccgacgctgctgctgctgcggcggaggcgaccgaggagaggaccaccgtgctggagctcttcccgcagcaggctggcacgctcaaagacgagcagcaaaggaagaggaaggagcgcgctgacgggagagcgccgctgaccatcttctacggcggcaagatggtggtcttcgacgacttccccgccgagaaggccgaggagctgatgcagctcgccggctccggcaacgccgcccaggacgcgctggcgggacagcccagcctcacagacatgcccctcgcgaggaaggtgtcgctaaagaggttcctggagaagaggaagaaccggctcaccgcggcagatccgtacccggcagcggcggcggcggcggcggcggcaagcgagtcgtcgactaagcctccggcagtgaaagacgagggcgcgccgtgggtcggcgtgaactcggcgctcagcctcagctgaacaatctcatcgacggcagcctgcctacctatcgctatagggaaaaactagctatttcccggccgtaaaaatatgtacgtgtttggccccccttgacatttacaccagtaaaatggctgcttcagttcaggggaattattagctgggtagctaattaccatgatcggtttatttagttgtctgtttgagaattctttggccagaacgaagaagaattctttttttcttccttgctggtattcatcatatctgcgaggatacgaactgattaattagacctagtcgaactcatatatatacatagtgtgtaaattcaaataagatgatggaacaggttatatgc

SEQ ID NO: 15917 - DNA, 1426 bp, Zea mays
  Clone ID: LIB3060-108-G2_FLI
atcatccccgtctctctcttgaaaaaaaaatctcccggaaccaatcacaatcacaaacgcaggcgcagggaggcgagtgtgggcatggccaggaggggagcggcggcgaagggcacctggaggccgaggaggaaaccctcgcgcgcgcaagcggatgtcgacggcgacggcgacgcggtacaccgcggcgccgaaggcgggcgccctccgccaaagggacacacaaatgccaccggcagcggcgggtttttctgctgctacctgctccggtccctctgcccgcgcagcaagggccgcacctatatcggcttcacggtgaacccgcgccgccggatccggcaacacaacggcgagatcgtcagcggcgcgtggcggacccggcgcggccggccctgggagatggtgctctgcatctacggcttcccctccaacgtcgccgccctccagttcgagtgggcgtggcagcacccgacggagtccctcgccgtgcgcaaggccgccgccgagttcaagtcgctcggcggcatcggcaacaaggtcaagcttgcgtacaccatgctcaacctcccctcatgggaaagtctgaacctgacggtgaacttcttctcctcgaagaacaccaagttcaccaccggttgcccgtcgctgccgagccagatgaaggctgtcgtgtgcgctatggaggatctgcagtgccagcccgacggcccgtcatccgaggaggatgacaatgacatccgcgacgagtcccaagataatggggaagaaccgcctgactcgcctatccgagatggattttcatattctgactactgtttccagcaaccgtcctctgatcaagcgcagtcgatggacgagcaaaccataagtgcaggttctggtgtcgaggatgactttgttgacgagttcgcttcttcaatggaaaggagcgaaatccttggcacaagaagaggaccgaacggaccaagaacatcgcctctatgttccttgggcgcgtgcagcaacgatgacggattggaagaagaggcaggactgatgtctccattattgatgcccaatgctagctcagatgctggtgacggccgccatagcatcaacggaaaccacgtggtggacttggttaccccgactccactaggccggctccggagaagagactgcatttccagcatctgtccaaagatcattgatctgacgtcctcgcctattgtcattcagttgtagcgtcttgtattcgtgacacttttcagtgtcataccatgtataagttaaagagtacaagacagataaacacaggaacatggacattcttgtgctacaagcttgcaaatagtatttctattaagcaaggcattaggcatatgaatgggtgtggcactgcaattgctagttctcctttttttaacgaagcattgctgttttcttg

SEQ ID NO: 15918 - DNA, 2578 bp, Zea mays
  Clone ID: LIB3060-109-A5_FLI
ggaatacaaagccttctgcgaagaggaattggagtacaccacgctgggcttctccctattgtgaaggaagttgttgagatgctattttgccgtggtgtaatcaaggttatgctttgaatgtctggtatatgtacggtatttaatcacatgatagatgctgctttacctagtactaagcttggcggaagaatcatatttttgttttgtttgccttagattgtatgtgctgaccagtgaccactgacttagcccatcctggccaaagtcattgcagtcatgtagactataactgtagcaacctttaccgtactgtcatgggcatcatagggagcgagacgcaacagccaggctgggataaggctagagaataagattgagatgagctgggataaggttagagaataagattgaaatgagagaattgtggagagttggttagcatcagataagtccaagaaagtaggagttagttgagagtttgtaggaaaagttggttagccatagggctatttataagccgcatgacagcagggaataaatcaagcaagatcattatcaaaccaatctctctcccttgcaatgaccctctcaagcgcctagggctgctaccctagaaccaagcctgcgacagaggggtataacctcgccggagaagacagctatccccatggaccgaaggtccatgacacctggtatcaactacaggttatcctcaccaccaccagtcgccgcgccatcagccaccgcaacgccctcccacccgccctctccaactccagatgcattcactcgactcgaagagagttttggccgtctcgaagagaagtgggatcagttcgttgtgatgttcctggcagctccaagcagcggtgcggcttcagacgacagcgcgagggttcctggcacgccgccaggtacagtcccttcgtggggagaagcaccttgctgtggcctccagggccaccccatggccgtcatcacatgagcaggccgtggtgcgcctgcaagccgcagtgcgcggcttccttgttaggcgggcagtgcggaagctgcacttgctgatcagctcatcgctgcaccaactcgcagcatgcgcgcccaaccaacaggtctcgtctatactttttgaaccccctgcagaagtcgagatctgggtatgcagcccccctgcacgaccaaagagggtcgtctccttcattcgggcaactgccttggtgctggacagacccaacataagaacggaccggttcctctttcacctttcatccaacgtgaagtccgcagttcagctctttccttgggatccaggaggacaggaggacatagctgcagttcaaatttatattttagtttcacaattattttgtattttcgtcttaaataataaaggtaagccgagatgtaaaaggcttaaccttaagtcgtgtcaggtaagtctatggcagctcgaggacgagctggtcctcaagggagggggagatgtcatgggcatcatagggagcgagacgcaacaaccaggctgggataaggctagagaataagattgagatgagctgggataaggctagagaataagattgggatgagagaattgtggagagttggttagcatcagataagtccaagaaagtaggagttagttgagagtttgtaggagaagttggttagccatagggctatttataagccgcatggcagcagggaataaatcaagcaaaatcattatcaaaccaatctctctctctcttgcaatgaccctctcaagcgcctagggctgctaccctagaaccaagcctgcggcagaggggtataacctcgccggagaagacagctatccccatggacaggtccatgacacgtacacagttctttaacttgaatggacaatccaacagaaaattgatagtcctaataacatcacactgctcctgaaaagctatttttttccaatgctccagcggcaaatatagcatgttctggtacatttgtcttataatttacaaaatggtgagcttctgacttcttgaactcattgtaggtactgttttccactgagacatttgcaatgggtgtcaatgcaccggcaagaacggtgagattctatttttttatttagggtttcaatgctttggcatcttgaacaaatcactctagtatctaattctatgttatgtggcacctcttgcattctacttcctacatattaattttaccagtgttccttcaaccatgggaacaaaatttatttcaaattttcctgtggatgaaaccgtctcttctacattcattgtgttttcaaggaagctgctacctgggttaatcatttgtatttaacaatctagttttctcgagcatgcagaagagctgcatatcattatatcaaaaagaaaaatgcgacaagaactcaaacacccacaagaaccgacacataccccacactgctggttcctagaaaaggcaatatatttttctatgttggcactatgaattgcaggcgggtatgctgtgggaccaatttttatgtactagagcatctccacgggttttgtaaaacaactccctattttaatattttagc

SEQ ID NO: 15919 - DNA, 1023 bp, Zea mays
  Clone ID: LIB3060-109-B3_FLI
accgctgaaccctagcatactccggccatctgccgccggccccggcgatcccccgccatggcctcccccgagggcacaacgtgggtcttcgactgtccccttatggacgacctcgcggtcgccgccgacttcgcggcagcccccgcgggaggatttttctgggcagcgccgccgtcgctgcagccgcaggcgccagtgcagtctgtcgttgccgcgtcggctcccaacccatgtatggaaatcagtagctctgtggactgtggtcaggaaaaagaacagccaacaaataaacgtccaaggtcagaaagtactacagaatcaagcacaaaagcatccagggagaaaattagaagggacaagctgaacgagagattcttggaattgggtgccattttggagccagggaaaactcctaaaatggacaaaacagctatattgagtgatgctattcgtgtagtaggtgaattgcgtagtgaagcaaaaaagctcaaggattcaaatgagaatctccaagagaagattaaagagctgaaggccgagaagaatgagctgcgagacgagaagcaaaggctgaaggccgagaaggagagcctggagcagcagatcaagttcctgaatgcccggccaagcctcgtaccacaccacccagtgatcccagcctctgcgttccctgctccccaggggccagcagccgccgccaggcacaagctgatggtgcctgtgattggctaccctggattcccgatgtggcagttcatgccgccttcagatgttgacacctctgatgaccctaggtcttgtcctcctgtggcgtagaagcgtgcgaaatcctgttggaaagaggcgatgctgccctccattgattcaaatcttgatcggtccgcagtgttgctggtgtagttgattccagaactgaaggggatgttacatgtgtcggacggtgacatggggtgatctgatgacccctttgtatattatatatggtatggtataaataaattccgtgaccagaagctaatgtct

SEQ ID NO: 15920 - DNA, 1520 bp, Zea mays
  Clone ID: LIB3060-109-B8_FLI
gaggctctcaccagtcaccactcacctgacgacgagcgagcgagaggaacggggcgagggaagttaaacgcgcggcgatgccggagctgccggaggtggaggcggcgcgtcgggcgctgcaggcgcactgcgtggggaggcgcatcgcgcgctgcgccgtggcggacgacgccaaggtggtcgttgccgccgccggccgcgcggccttcgagcgggccatggtcggccggaccatcgtcgccgcgcgccggaggggcaagaacctctggctccagctcgacgcgccgcccttcccgtccttccagttcgggatggcaggcgcgatatatatcaaaggcattcctgtgacgaattataagagatccgttgttaattccgaagaggagtggccctccaaatactctaaattctttgctgagcttgatgatggtttggagttctctttcactgataaacggcgctttgcaagagttcgtttgtttgaagatcctgaaaccgtacccccaatttctgagctaggtccagatgctctgtttgagccaatgtccgtcgatagtttcttggactccctgggtagaaagaagatagggataaaagctcttctacttgatcagagcttcatatcaggcattggcaattggattgcagacgaggtgctttaccagtcaaggatccatccattacagattgcttcaaatctacctagggagagttgtgaagcactgcaccagagtatcgaagaggttgtcaaatatgctgtcgaagttgatgctgacatggaccgctttccgaaggaatggttatttcatcaccgttggggcaagaagcctggcaaagtcgatggaaagaaaatcgagttcataacagctggtggcaggaccactgcctacgtgccgcaactgcaaaaactggttggaacccagtccagcaaaacgatatccgtggccgagaacggtgatgccaaggatccagggaccgagggagaagatgcagatgttttgaagccaagaaagcgagccgcgacctccagtgctgccaggggacagcgaaacaaagataccgccggctcgagaaaagcaagagtaaatggcgccgatgctgaggcagctgaaccaacaacaggtatcgtcggaagcaacggtgagcaagcttttggccaacccaacagtgacgctgtcgataaatcagatcgggctacaagacgatcgtcgaggaaagtgaaagcccgcaagtaaatctgaacaaggtagccagggatctgtccatggagtttcattatatgtgtactggccagcgtatttgcgcctctgagtaatgtatcttaggaacagaagattatattcatgctgcatattcctgggggattcgctccggaccaacgtttgctcagtggtgcagctccttgtgctatggatagtagcatatctaggttgtgcataaatgcactgaggtttatgtactctttccaatcttccatgatgcattgatgcatattgtgatggaataagtcttgagcatct

SEQ ID NO: 15921 - DNA, 699 bp, Zea mays
  Clone ID: LIB3060-109-D3_FLI
cgccatggcgagcaagcacctcgtcctcgccgcatgcctcctcctcctgcccaccgcctcggtcgccaccgacgtcgactactgcagtaagaaggactacccggtgaaggtgagcggggtgcagatcgtgcccgatccggtcgaacccggcaagcccgccactttcaagatctccgcttctactgataaaaccatcgagaaggggaagctggttatcgacgtcaagtatttcttcttctacgtgcactcggagacccgcgacatctgcggagagacttcctgcccagcgaccggcgacttcgtgctgtcccaccagcagacgctgccaggcttcactccgccgggctcctacacgatctacatgaagattgtcggggacgacaacgaggagctgagctgcatctcgttcgggttcagcatcggcttcgtcgcgtccagctgaacgcgtccgagcctgggcacgagaggcagccagcccatggatgtaaattacgtggagcacactctgtatcctatgactttcaagtatctaggtccatgtaagctttttgtgggtgtctgtgttcaactgagacgtttttatccggagttgaacatcacaataaagcaaagtcactgataccatgtaatggaactctgagcgcttgatgggacccgtgttttttagactcacaataaagccggtttgtgtttgtgcct

SEQ ID NO: 15922 - DNA, 1354 bp, Zea mays
  Clone ID: LIB3060-109-F11_FLI
attccttaacatccttgttgcaagcggcgccagcttgctcgcgctctctcgcagctgctacgctaaagcaagtctagtctctagaggaggaggcggagggggaggccatgggcaaggacgacgtggtccagagcggcgcgggcggcggggagttcgccgccaaggactacacggacccgccgccggcgccgctggtggacgcggcggagctgggttcgtggtcgctgtaccgcgcggtgatcgcggagttcatcgcgacgctgctgttcctgtacgtgacggtggcgacggtgatagggtacaagcaccagacggacgcgtcggcgtcgggggccacggccgacgcggcgtgcggcggcgtgggcgtgctgggcatcgcgtgggccttcggcggcatgatcttcgtgctggtctactgcaccgccggcatctcggggggccacatcaacccggccgtcaccttcggcctcttcctggcgcgcaaggtgtcgctggtgcgcgcgctgctgtacatggtggcgcagtgcctcggcgccgtctgcggcgtcggcctcgtcaaggcgttccagagcgcctacttcgaccggtacggcggcggcgccaactcgctcgcgtccggctactcccgcggcgcggggctcggcgccgagatcgtcggcaccttcgtgctcgtgtacaccgtcttctccgccaccgaccccaagcgcaacgcccgcgactcccacgtcccggttctggctcccctccccatcggcttcgccgtgttcatggtccacctggccaccatccccgtcaccggcaccggcatcaacccggccaggagcctgggcgccgccgtcgtctacaacaaggacaagccatgggatgaccactggattttctgggtgggcccgctcctgggcgctgccatcgcggccttctaccaccagtacatcctccgggcgggcgccatcaaggctctcggctccttcaggagcaacgcgtgatgagcagagctaaagaaaggccttcgctggactgcgtgctggagcaacggcgatcgatcgatctagcgtggggagaggcggataggcgggcgcgcgagggaggagaataagtttgtgccggtggcccggtctcgtcggtcgcttttgttccagcatgcagctgcgtcgcgttcgtgtgcgtgcgtgggggtctccttaatttccccggcccctgtaatcatcaatcaccatgtgtgcgtataatatctgctgccaagggatcgattattccccccccccccctctctctctctctgctcttgtagctccttctgttttatcgttattatgtagcgacaacaacgacgacgaccaccatcatcagtgag

SEQ ID NO: 15923 - DNA, 1342 bp, Zea mays
  Clone ID: LIB3060-109-H1_FLI
gcgcagcatcatcagctggatcctaaggactaccagcagcagacggcgcagcaccaggagcagcagcagcaccaccatcacccccacctgcaaatccaaatccaccagccgccgccgccgccgcaggacgggggcggcggagtgaaggagcagcagcagctgctgcaggtggtggcgcagcccggggatcggaggcagcaggcgctcgcccccaagcggagctccaacaaggaccgccacaccaaggtcgacggcaggggccgccggatccggatgccggcgctctgcgccgcgcggatcttccagctcacgcgggagctcggccacaagtccgacggcgagactgtgcagtggctgctgcagcaggccgagccggccatcgtcgccgccaccggcacgggcaccataccggcgtccgcgctcgcctccgtcgcgccctcgctcccgtcgcctacctccgggctcgccaggccgcaccaccaccacccgcaccacatgtgggcgccgtccgccggcttctcctcgccctccttcctgaattccgcgggcgcgggcgacggcaccggtatcggcggcatcatgcagcggatgggggtccccgcgggcctggagctgccgggaggcggcgccgccggcggccacatcggctttgcgcccatgttcgctggacacgccgcggccatgccggggctcgagctcggcctctcgcaggacggtcacatcggcgtgctcgccgcgcagtcgatcagccagttctaccaccaggtgggtgccgctgccggcggcagtggccagatgcagcacccgcacgggcaccagcatcaccatcatcagcagcaggaggacggggaggacgaccgcgaggacggcgagtctgatgacgagtctgggcagtagtgtagtcgttcaaccttgcgttttctgggtcttccctcaagtggaggaggagagaaaagtgtatgcgtgcagccacggaatgcttctgctactcctggattcttgttggtcgatggatttttatgttttttttttctctcgtgtggtatccaaactcggcggaggcctctcttgctgtgaagacttgcgggctcaagatcatcctcacttcttcctacaatctcatggggtggatgatcgccacagccttctctccgacttccaggtgtataatagctgaaaacttgatggattggaccaatcacccttgagtgagtgccttatttgttatattgcaaagtgtgtagatattcaggtaattttgcagttagagaggtgttctttttattggagtaaacatccacgttttaaaacaatcaaggtattcgccggcaattcgaccatc

SEQ ID NO: 15924 - DNA, 1296 bp, Zea mays
  Clone ID: LIB3060-109-H10_FLI
gccggcgccgcctccccgctccgctccctcctgccacctgcgcgcagcctcacggcgatgtcagcggctacgtcgacggcgccgtcgatcggagagtatccttccccggtgtcccctccctacccggccacctccaaggacctggagctccggcgcgccatgaccgcctccgcgcgctccgcggccttcgcgtctgcggacgtcgtgttcgaggacgagtggctcgccgtcgtcgacaaacctgccggcgtctactgcgacgccctcctcacctccttcccttgctctgccgtctcagagaatccagcaactaaacctaaccttcaccttgcaaacaggctggaccgtgatactagtgggctcatggttatcaccaaatgcaacaaagttgctgggaagctagtgaaggcattcactgaccataaagtcaagaaaacatatctagctctctgcataggtttcccaccggcatgggaaaagatcaagatatgttctggccatgggcgatcgaaacacggcgcttggcgtgtatatgctatgtctgatgttggccgttcactcccaggcggctctgtcgtacgggacatgagcacgcggtttgaagttctaggcgtcaacggtaaagggcagttcagagaaccctacagcttggacaccgacgatatcgagccaattactgtgcaagaaaaggcgactgaccagacttgtggcggtgatgcgaacagcagtgtcatcttggttagagcctatccccagagcggacggacacaccagattcgtctacactgccagtatcttggtctccctatcagaggtgatgtgaagtacggcggggtgatcgagtgggacggcgtagagtgtgagggccatgcactgcatgcggagagcttgtcatttgtacaccccatcactggattgcccatcactctccggtcacctctccctccatgggcaaaagattgcatatcagcaatggaataaagttcccttggcctcaatgtgatgcacgatgctccatttggcactgaaatgtccaccaaggatgtaactctgagatctcaaaaggcatcatctcttgaagaccttttctgggagtagcgttgggaaatagcactatcaaatatactgagtccactgttacaggcagttctacttgagactgtaattttagcacgtgtaccgtagagatattgagttgtttgttgtagttttgtttcaaattgtgagtacccaaacgcaggcacacacaacacatgttgtaccatggatatttatttatttatttggtcgttcaac

SEQ ID NO: 15925 - DNA, 1674 bp, Zea mays
  Clone ID: LIB3060-110-H8_FLI
ctactacccgaacagtttacctgagtatagtgccatgtcgacggcaccccacttcgtgctggtgccgctcctggcgcagggccacatgatccccacgatggacctggcgcgcctcatagccagccagggcgcgcgtgtcacggtggtgctgacgcccgtgaacgccgcgcgccacagggccgtcctggagcacgacacgcgtgcggggctcgccatcgacttcgccgagctcgcgttcccggggcctgcggtcggcctccccgagggctgcgagagcttcgacatgctggcagacatctccctcttcgccacgttctacgaggcgctgtggatgctccccgagccgctcgaggcgtacctccgctcgctgccccgtctcccggactgccttctctgcgactcgtgcagctcgtggaccgccaccgtcgcgcggcggctcggcgtcctgcggatcgtggtccacttcccctccgcgttctacatcctcgcggcgcacagcctcgcgaagcacggcgcgtacgaccgcgccgccgacgacttcgagccgctcgaggtgccggcggagttccccgtgcgcgccgtggtgaacagggcgacgtcgctggggctcctccagtggaccgggttcgagaggttccggcgcgacacgctcgacgccgaagccaccgccgacggcatactgttcaacacctgcgctgccttggagggcgccttcgtggagcgcttcgcggcggagctcggcaagaggatctgggcggtggggccagtatgcctcgtcgactccaatgctgcccgcgcgacggctgagagaggcgaccgcgccgcggtggacgccgagcaggttgtgacctggctcgacgcgcggccggcggcgtccgtgctctacgtcagcttcggcagcatcgcgcgcctgctcccgccgcaggtcgccgagctcgccgtcgctctggaggcgtcgcgctggccgttcgtctggtcggccaaagagacggccggcctggacgccgggtttgaggagcgcgtgaaaggccggggcctcgtcgtccgcggatgggctccgcagatggccatcctgtcgcaccctgccgtgggcggcttcctcacgcacgccgggtggaactcgatcctggagagtctctgctacggcgtgccgatgctcacttggccgcacttcgtcgaccagttcctgaacgaggcgctggtcgtggacgtgctcggcgtcggcgtccgctcgggcgccaaggtgccggccacgcatgagatgcacgtaacgatagaggtgcaggtcggaagggtcgacatcgagaggaccgtgtcagagctcatggaccaaggctcgtcgtcggcgatgcgcgcgagggctaaggagctcgctgcagaggtgagagccgcaatggcgaagggcggttcgtcggacgccgacgtgaaggacattgttcgccacgtcattgaggtggccaagaataagagggagcacgcacgagggcaccattcttgatggaagactccaatggtaatcgctaaggacaaacacaaccagcgcgcgcggaaacaagaagctctcgaggagtagacaacagaggcctaacatgcgaagaggacatgctgctgttgtatatatttctccacctttcatccgaatcaatcaaacaatatagatgcctgttaacgacg

SEQ ID NO: 15926 - DNA, 2254 bp, Zea mays
  Clone ID: LIB3060-111-C12_FLI
ggcttttctcaaaaacgcgccgtcgccgtttcttccccctttttctttgagaaaattcgcccgcgagatctttagtttcagaccccgtgtggattagtcgctgtcacgatcgaggcggggcgccaattgcggtggccaccacctccaatccactccccgcggtggcctcgccgagctgttcttgctccgtcctccctccaactccaagatttgtttcgcacccgattcctgagcttccgcggcgcttcttgctgaaaagaaagctccgagttcttcagttctggatcgatagagaggcggttcctttgcgggctctgaggttcagctctcgctcttgatttgtctcatcgacgcatcagttgggctgcaggcttagagctggaaggaataatttgactagagaaatggggcagtgttgtagcagagctcccgccccggactctggacggggaggcaccaatggttatggctattctaaccaggcaaagccagcgcaaacaccttcgagttacaaccctcctcagcagccggccgaggtgaggtacacgccgccggcgacgaaccctccggtagtcccacctgtgcctgtgcctgtgccaccgaagcccacggcggacacgattcttggcaaacagtacgaggacgtacgctctgtctactccctcggaaaggagcttggccggggccagttcggggtgacatacctctgcacagaggttgcctctggtaagcagtacgcctgcaagtccatctccaagcgcaagcttaccagcaaggcagacagggaggacattcgaagagagatccagatcatgcagcatctgtctggacagccaaacattgttgagttccggggagcatacgaggacaagagcaatgtccatgtggtgatggagctctgcgcaggtggggagctcttcgatcgcatcattgccaaggggcactacacagagcgtgcagctgctacaatctgcagagcagttgtgaatgttgtcaacatttgccacttcatgggtgtgatgcaccgtgacctgaaaccggagaacttcttgcttgcgagcaaggaggagaatgcaatgctcaaggccactgattttgggctttccgtcttcatcgaagaaggaaagatgtacagggacatcgttggaagtgcttattatgttgcgcctgaagtccttaagcggagctatggaaaagagatagatgtttggagcgcaggtgttattttgtacattcttctcagtggtgtgcctccattttgggctgaaactgaaaaggggatatttgatgctattctgcatgaggagattgactttgaaagtcaaccttggccatcaatttctgagagtgctaaagacttggttagaaagatgttgacacgagatccaaagaaaagactgacttcagctcaagttcttcaacattcatggctcagagaaggtggaggtgcatctgataagcctatcgacagtgctgttctttctagaatgaagcagttcagagcaatgaataagctgaaaaagatggccctaaaggttattgcctcaaaccttaacgaggaagagatcaaggggctaaagcaaatgttcatgaacatggacacagacaatagtggcacaatcacgtatgaagaactcaaagcaggactagccaaacttggatcaaagctgtcggaagctgaagtaaagcagttgatggaggctgctgatgttgatgggaatggatccatcgactatgttgagttcatcactgccacaatgcatagacacaagctcgaaagagacgagtatttgtttaaggcattccagtacttcgataaagataacagcggtttcatcacaagagatgagctggagtctgctttgatcgagcatgagatgggtgacacgagtacaataaaggagatcatatcagaagtggacacagacaatgatgggaggattaactatgaggagttctgcgcaatgatgagaggagggatgcagcagccaatgaggctcaagtagcctgttcccttagtagaaatggtgtaccgttagttactgttcttcactctttttcccccttcgtatttggtactcttggtagccggattaagcttacaatgggcgtcgctcttttgcattgtcaagagatgattgtgtatatctttttcttttgctcgtgtttgttgcattgtagtatcctgaacgtcccttccttttgtaagtttgtttatacacaagcacatccaatagaaagtgcaatttgtgtc

SEQ ID NO: 15927 - DNA, 2136 bp, Zea mays
  Clone ID: LIB3060-111-G1_FLI
tttcaggcctaatcgctctagcctgcgcttgccgcttcgtctccgggcggccgggcgggggaagaagaccacctggatccatctccttctcggtcaactacaaggagatcttatttcggttacaatgaagcgcatgcacagaatgcaaacgagaaagtcccattcatggtggtgggacagccatattagcccaaagaactccaaatggctagctgagaatttggaagagatggacaagcaagtcaaagagatgctgaagctcatagaggatgaaggtgattcttttgccaagaaggctgagatgtattttcaaagaaggcctctgcttgtaaatcatgttgagaacttctatcgcatgtaccgtgctcttgctgagcgctatgacaacgtgactggggaattgcgcaagggtcttgcgctgcagtctcagggctctggtatatccgaaactgattccgagacacaatcaacttcatcgtgtccagagcctaacatggaacagaacacagcaaaaccgaagcgtaatgtgctccttggttctggtggaagctcagacatttccaagaaggagagtgatggatcatcttcttcttcttcagattctgattcagaggttgacgaggcaagtgaagaaaatggcaatgggatttcttatataagtgatgaacggattgctgagctggaagatgagcttcaggaagcaaggcaacaaattgaggcgcttgaggtaaagaacatgcactgccaatgtgagaaacttgaagagagtctcaaacaagttagcaatgaaaaggaagatctggtagctgcgattctggcaagcaagaatgaggtcgaggatctaaaaggagacatggtctcggcagctaaacattttgaagcccaactagtgcaccgtgaccatgagattgagaagtgcaagcaggaggctgagcaagtttctgaaaagtatttccatgagaaatccactctcgaatctgaaatcgaaaggctccaggaagttgttaggagttttgaagagaacctaacaaaagttgctggagagaaatttcagcttgaggcccaggtaaaggaacttgaacagacttctaatgatttagatgactcttctgcggagattataaagctacaagaaataatcaaggatctgcaaggaagattggaaaatgactcaaacgataagagtgtacttgaggaacgtgctatggagctggagcaagttcgtaggcagttagaggattcaagggctgaggctagtatgaagctacaaactacaattaagaacctgaatcaagttcttgaagagaaagcagaacttgagaatcgtatgaaggatgcggagcaggcaaccagcgacctaaactccctggtcggttccctcgacggcaagctgaaagccacagaggcgcagctcgaacagcttcacgcggagaaagcagaagcgatcctcgagagcgagaaacagatatccgagctgaaccaagccatcgcccgtctcaagacgcggctggagctgctgtcttcggagaaggccgcagtcgataccaaggcgtccgctctgctgaccgacgtcgccgtccgcgacgagaagctgaaggagacggaccgccacctgcagcagctgcacctggagcacgtcgagctgatcggagcggcggacgccgcgcggaaagacgcgtcggggctgcgctcacgcgtgcgcgagctcgaggtggaggtcgagaggcagaggctcatggtggcagacagcgcggaggggaagcgcgaggcgatcaggcagctgtgcttctcgctcgaccactaccgccacgggtaccagcagctccggctgctcctgcagggccacaggcggccccggcccatggtgatgacagcgtgatgagttgaagtggttattgtcctggatgttgggacttgggaagtatgtaagctgctgcttctcggtgtgtctgttgtcctggcgacatgagtgagtttctatctggatgagagcgggtgttaggaggatgtcgaaactctacatagttcgaggagagcttgtgctctgtagttatttgcactgcggagttactcgtcaatttgtgctgtgtgatgtagctatatggttctatggataatcacggtgttcccttcttt

SEQ ID NO: 15928 - DNA, 1710 bp, Zea mays
  Clone ID: LIB3060-111-H8_FLI
ctgacggacggacgggctgaggcaaggccgcctgcgggcgggaggaagaaaagcgaagctgctgcgccctcccctcccccatctccgccccccgcctcacccaccagacgagagagcgagcgcagttcggccgccggtcgcgtccgactccagcaaagccgagcgcccaccccctcaccctattaccttcctctcgggtccaattcggtgcctggctgactccgcacgtcttccccccttttccctccctcgaccgacgaccgtccgtccaccaccggatccaggagcgaccctccctcgtgctcgtcgacgatcgaccggccgccgatcgtccaggaaggatgtcgagcctcgaggagccgctgggtctcggagacctgcctaagttgagtattaacagactcgggcggttcgtgtcgctgggcgctcggaggccaccggccgacgacgacgaccacagcactggcaaatacagcagcagctcctgcaacaatggcagccatcagatggccttccatcatggcagcaactcctcctatccctggcacccgcagtgccgccaggccgccgatccatcacgcgatgcagtggagcttagagatctccctcgcaaggtcatgtgggagctgccgaggttcgtgaagatagtggaggtggggcctcgggacggcctgcagaacgagaagggcaacgtcccggcgtccgtgaagatccagctgatacacaagctggtcggcgcgggcctgtcggttgtcgaggccaccagcttcgtctccccaaagtgggtgccgcagctagccgacgcagaggaggtgctgaagggtataaagcaggagccaggcgtgcggtacccggtgctaacacctaacctcagagggttcgaggctgccatcgcagccggcgcgaaggaaatcgcggtcttcgcgtccgcgtctgaatccttctccaggtccaacatcaactgcaccatcgaggagagccttgctcggtaccgcggcgtcacagcggctgccaagaaacacgggctaagcatccgggggtacgtgtcatgtgtgattgcttgccccgttggaggcgcaaccgatccggcgaaggtggcgtacgtagctaaggagctgtataccatgggctgctcggagatctcgctcggcgacacgactggtgtcgggacaccaggtagcgtggttgctatgcttcaagctgtcatgtcgtttgtcccggtggacaagattgccgttcatttccacgatacgtacgggcaggcccttgccaacatcctcgtctcccttcaaatggggatcaacatagtggactcgtcggtgtcgggccttggaggctgcccgtatgccaagggcgccactggcaacgtcgccacggaggatgtcgtgtacatgctccatggcctggggatcgagaccaacgtcgacctcaacaagctcatggaggctggtgactacatctccaagcatctgggcaggccgctgggttccaagaccgccactgctctccgcaagctgaccgcctgaaaaaaccttttcaagcactcccaagagaaatgtatcggttcgaggtcccatctctcagtcatatgaatgtcctgtagttttactttatgctttttttccgctcagacattgcctactctgagcattttattcacacactttgtaccccccgttggatgattctgaataatcttggtgttcctgg

SEQ ID NO: 15929 - DNA, 1228 bp, Zea mays
  Clone ID: LIB3060-112-D10_FLI
gctgtgtcaaatttctgcgaccttgccgccgccttcatcattctggagctcggattgatttcttcctttgctgtgctgtcattaccgaactaaagcagtttctgagagcaagcgtcacaatcgccatggaagctgggagaatggatcagccttgcatggcttctatcaatagccagcctttcgtggctgatattgagccagtgaagaaagccagtggggacatgcctgcggcgccgacaggaagcgggtgcttcgactgcaacatctgccttgattttgcagcagaaccagtggttaccctctgtggtcatctatactgctggccttgcatctacgagtggctgcggcctggggtggaggagtcaaccgccagcgacaacggcagttcggcaaggcggcaatgccctgtatgcaaggcaacactctcaccggacacccttgtgccgctatacggccgcggagggaactcaaaaaagtcactggatggcatggccatcctgcgccgccccatggtacaccgggaggctgttgagcaacagaatgcacggagcaacgtcaatgaccagcactaccaccagagcacgggagacagctctcagcaccagccattgatgcaggcgcaccaccatcccgttccccctgggttcgacttcatctaccctccagcgccggtagggcgtggtttgatccactcgactgccggaggggtgctcggagggatggcagaggttgtgctcccgtgggtgctccgtggccagctgccagccagcttgcactacacgagcccataccatgttgcggcacagaacgtgaaccccagactgaggcgtcatcagatggaaatagagaggtccctgcaccagatctggttcttcctctttgtgtttgtgctgctgtgcctgctcttgttctgagacggaggactgttctatatgcctctttgtagatattgaagagggggagagagggatactaatggatgatgcgtatagtagacagggtaatggtctgtatcgacaagcatgtgtctaaagcatgctgatatagagttgtaatatgatgagacatgggaggtgaaatgtatatttcattcttctcgtcataacgtcagcggtttcctgatctatcgctgttggcctgttaggtaggttgcctacctgacatgtcttcatgtcagggccttcgatttgctcatttgcatatgtaaatcgaaaatgatgttttggct

SEQ ID NO: 15930 - DNA, 1739 bp, Zea mays
  Clone ID: LIB3060-112-D12_FLI
gtttccagcaccatagcaacgatgacatccaacttcacgcccaatgtctgggcttggatcgccagcctgcccccattcacccagtggcgcaccagcaccatgtccctttgcatctgcgccacgccatcagcatcatcttcacagccacagccacagccatcgataaacctctcggctacgaaaactacttccatcgcacagcctccttatgttatcttctccgtcttcgcaagctacagcatgccagtttcgctgtggaagtcacagccattccacctgaaaacaaaggcgcagcaaagtctagacgaacaggacatcatacatatcttcgtcaacatcgtcgactccgtgctgaggtactgtccagacaagaactcgtcgttccggttccctggggcacagcagcctcgtggcaacttcagtgacgtgttcaacatagctttcttgtccctggccttcctgctgtgcatcttcgaggtccctcgcgacctccgtccaggatgcctgggctcgctaggagcccagctcaccggttccaggtgcagagatgccgcaaagagcctcgtgaggatgctcggtgccaacctcgaggaccagtggatgcagacgatgaacctcgcagtaaccaactggatagtcgagctgagatcctcgagccgctcgtccggcccgccgtcgccgctcttctcatacgccgtctcagcaagcgggctctggaaggtgcagctgtactgcccggtcatagccatgggtatggaggaagctgcagagacaccacaggatgagcgtctcctcttctcactcatttatcaacaagtcgagtgtgtcattcagctggcctatagaacgacaagaagggataactggatcgatgtcgaggtgaaggtggacaacgtaaggtgtgatgtggactctttggtctccgagacccttatggcggagcgtggatatggctccgaagagaagcacttcccatctcgtgtgatgctgcaaatcacacctacgcaacaatctgatgtgctctctgtttctgtcggcaagtccaacgacaaccccacacacgaattcggcatcgagaagggctttgagggttcatttgaacccccaaacgcatttggcctgaaggcgtcagtaactgaaagccttacactagccatgaagccctggaaattcgagcagtctgtgcatgggaacactgcaaccttgaactggtttcttcatgacggcgtcaacgggagggaggtttattcctcgaaaccttcaaagatttctctgctccaaccgaaggcctggttccgtgacaggtactcaaatgcgtaccgccccttcacaaagcagggcggtgtcattttcgcacgtgacgagtatggagacagtgtctggtggaaggtgtgtggtgcaacgttaggacagactatgaactggcaaatccgaggctggatttggctaacctactggcctaacaaacaacggaccttccacaacgaaacgagatggcttgaatttagagagtgcctgcagctcccccttaccaagtttccataaaccacttgtactctgaaatgaatgggttgtatagcagtgtagaaccatagacattgaaaaatccatgcatatttggggggcacaaaaaagagtatgatactctattgtaactgaatgtactgttacatcgaaatgacctcctcatatgcctgccttgcaattttaatgcaatcctaaaaatttattcggtgtac

SEQ ID NO: 15931 - DNA, 1076 bp, Zea mays
  Clone ID: LIB3060-112-D6_FLI
cgccgcggagacgtcgagcggcgtcggcggcggcgaagtccacatatcgatcccgcccatggcggccaccaccccagacgggatacgcgagagctcggcagcaccgagccccttacgtagccgcggtagcaccccgccgcggcagctcaaggcagccccagcgcttgcggtagctgacacgccggcgacggccatggacaagacgctggcgagcgtcgccaatctcgcgaagctactgccgactggcaccgcgctggcgttccagtcgctgtccccttctttcaccaaccggggcgcgtgtctcccctccaaccggtacctcacggccgcgctgctctacctctgcctcgtctcgtgcgtcttcttctccttcaccgacagcttcgtcggcaccgacggcaagctctactacggccttgctacggtcaagggcttcctcgtgttcaactacaccggcgacgatgacgacgagggcgatgccgagcgaaggaggcaggtcttcaaggacctccgcaggctgaggatacggtgggtggactacgtgcacgcgggattctctgccgtggtgttcctgacggtggcgttcggcaccgccgccgtgcagagctgcttcttccccaacgccggggagaacgtgaaccaaatgctcatcaatctgcctctcggcgccgggttcttctccaccatggtgttccttgttttcccgacgacacggaagggaatcgattacaccgggcatttcaccaatgtttagcctcgcagtcgcaggaagcgtcgttgacgcgttgtgtgtgtcgtcgctgaaccgtagctttctttctccccgtttgacatcgactccgttgtgtcaagtttagagagtttgtattagaaatatgccattcagttttggccctttgtctgggctccagcttccattgcaatggcgttaagttttgtactttcaaattgcaatggcgttaagttttggccctttgtctgggctccagcttccatcgctgaaccttagctttcttgctgggccttcggcttttcccttgtaaacagcatccttcaatctcatttgaatatattct

SEQ ID NO: 15932 - DNA, 1580 bp, Zea mays
  Clone ID: LIB3060-112-E12_FLI
caaaaaccagtcctttgttcttcttcccccggcacgcccagcgccagtcaccaaccttccactccctccctccgtcgccatggcgcgcaagaagatccgggagtacgactccaagcgcctcctcagggagcacctcaagcgcctcgccggcatcgacctcaccatcctctccgcccagatcacgcaatcaacggacttcgcggagcttgtgagccagcagccatggctgtcaaccatgaagctagtggtgaagcctgatatgctgttcgggaagcgtgggaagagcggcctcgtggctctcaacttggatttcaatcaagtcaaggagtttgtcaaggagcggctgggggttgaggttgagatgggtggctgcaaggctccaatcacgaccttcatcgtcgagccatttgtgccacatgatcaagagtactacctttcgattgtctcagagaggttgggcagcaccatcagcttctcagagtgtggagggattgagattgaggagaactgggacaaggttaagactattttccttcctactgagaagccaatgacgtctgattcatgtgctcctttgattgcaacccttccattggaggcacgcggaaaaattggtgacttcattaaaggagtgtttgccgtcttcctagacttggatttctcatttcttgagatgaatccgttcaccatggtcaatggggagccatatcctctggacatgagaggagaactagatgacacagcagctttcaagaacttcaagaagtggggaggtatagaatttcctctaccttttggaagagtactcagccctacagaaagtttcatccatgaactagatgagaagacaagtgcctctctgaagttcacggttttgaacccgaaaggtcgcatctggaccatggtcgctggtggtggtgctagtgtcatttatgctgatacagttggagacttgggatatgcatcagagcttggaaactatgcagagtatagtggtgctcctaatgaggaggaggttctgaattattctagagttgttcttgattgtgcaactgctgatcctgatggccgcaagagagcccttctcattggaggtggcatagctaacttcactgatgttgctaccacattcaatggcatcatccgagccttaagggagaaggaatccaagttgaaggcttcaagaatgcacatttatgtccgccgaggtggtccaaattaccaatctggactggctaaaatgcgtaagcttggtgcagaactcggcgttccaattgaggtgtatgggccagaagcgactatgactggaatctgcaaacaagcaattgaatgcatcatggctgcagcgtaatcagagcgtagctctgggtagtttgggatctgcaaacacgcaattgaatgtgtcatggactcagcataaatgagagatggatagtagttgcattatatagttcacacatggtgtttctgttttttgtttcagatatgttgtagcgtgttgtttgaacgaaaccttcacagatcattactgcaaagaaattgctgtgtgttaaaataaattcaaagtctagttttgtgcc

SEQ ID NO: 15933 - DNA, 1428 bp, Zea mays
  Clone ID: LIB3060-112-E4_FLI
cggcactagctggccgcgtgcaccccgcgacgaagccggcgttggccacccaccaccacagcgcacgcgtcgctgtcgcgcgcctggggttttcctagggttttgtttttaccaaccccagccgggggagcgcggaggtggcggcggcggcggagatggacggggaggagattggcctggtcctcgcccgcgcctcggacctccgcaccaggatatcggcctgcgccgctgccgcggcgggggcgccgggtccgcggcgggacgatgaggaggcagcgaagcggttggacgcggcggagggcgatgaggagggagccgaggaagaggaggatgaggaggaggaggtggagagccttgtcggcatcagcgacgcgctcgagtcgctcgagcggcagctcgccgcccttcaggatctccagcaccaacaaagatacgaacgggaaaccatcttgagccagatcgaccgaagccggaggtccctgcttgccaagctcagagagtacaaagggcaggactgcgaggtgatccacgaggctgccgccttcgctggcgagagaatagagcgcgacgacagcctcgtcctgcctccttactcggaccatgtcaccaactcgttcgcgctcgacgacctgtaccctctgagctacatgtccaagcccaagcgcctgcacactcaaccagactccgaggacgacgggactgcgcaggacgacgcgagaaggaacgggcgtgagagcagagataccagggcctcgaaacgcggctcgggaggcggagggggaggaggaggaggaggaggcatcggagccttcatgggatgggtggctaaaacggcggtcatggtggtgggcgccgtctgtgtcatgaaggccgctggatacgagtccgtgacgtggaggaacggcggcgccaggctggacattgcgggtctgttcggtggcggtggtggtaagcaggcggtggcggcgggcggcggagatgagcggcgcgctcctctgcggtgccctcccggcaaagcgatggtggtcgagaacggcagggcgcgttgtgtcgtgaaggaaagggtggaggtgccgttcgacgccgtcctggcaccgccgagttcgaggtacggtttaggctgaagcccactctcccccgctgcgcccgcgcctgtgtgtgtgaatagtagtagtagggtgtagctctatctatgtggtgcgggagttgcttagtagctgctggggaacggttctttgtagaacgtgttgctgggagctttgtttgttaattctgcgtttggtgctgagcattgggcagcctggagatgttgaggctatgtatcatggagaagaataaacccttgtgctctcacactggcgttgtggtgagcagtgagctcttctattatccggcatgtctggcactatatgagccaatcactgtacc

SEQ ID NO: 15934 - DNA, 1177 bp, Zea mays
  Clone ID: LIB3060-112-E5_FLI
cgagcactcgacaccagcgtccaacgggatggcgagcctgaccatgccgccgatgccggcgtggccgcggcaggacgccatcgacctccacaaagcattcagagggttcggttgcgacagcacgacggtgaccaacatcctggcgcaccgcgacgcgacacagcgcgcgctgatccagcaggagtaccgggccgtgtttaaccaggacctggcccggcgcatcgcgtccgagctgagcggccaccacaagcgggcgatgctgctgtggatcctggacccggccacccgcgacgccaccatcctgaagcaggcgctcacgggcgacatcaccaacctgcgggcggccacggagatcgtctgctcccggacgccgtcgcagctgcagatcatgcgccagacgtaccgcgccaggttcggctgctacgtcgagcacgacgtcaccgaacgcacgtccggcgaccaccagcgcctcctgctcgcgtacctggccatcccgcgcgccgagggccacgaggtcgacccgtcgacggtgacgctggacgcgcgcgacctctacaaggccggcgagcggcggctgggcaccgacgagcgcgccttcatccgaatcttcagccagcggagctgggcgcacatggcggctgttgcccgggcgtaccaccacatgtacgaccgccccctggagcgcgccgtcaagagcgagacgtcgggcaacttcggtttcggcctcctcaccgtgctccgctgcgccgacagcccagccaggtacttcgccaaggagctgcacagggccatgaaggggctgggcaccagcgactcggtgctcatccgggtggtggtcaccagggcggagatcgacatgcagtacatcaaggcggagtaccacagcatgtacaagcgctcgctcgccgacgccatccacgccgagacgtccggcaactaccgcaccttcctcctctccctcgtcggccgcgaccgcacctagtgatgacgatgatcgctgtttcgtctctcatctatgcctctagtagcaacaacgtacgaggcgacactgggcgccattgccactcgcgtgtgcttgctattcctgttatctccatggaaatcttcctccttgtaaatactcctacttgttttcttgggatagttgttcgaataatggtgtactggttgcattgac

SEQ ID NO: 15935 - DNA, 1594 bp, Zea mays
  Clone ID: LIB3060-112-F5_FLI
cacaaagcgcagcagcccgccagagagacaagcagccaaatcaggcctttatttacgatccggccggccggaatctagaccacctctctctctctctcctcgtacgtagtcgttgagtctttgaggtcgaatggcgcccgtctacgctgccgcggaccacggcaccaacggcggctccggcctgaccctgaacccggtggcggcgcgccgggcgctcagcctcgtcggcgcgcccacgccgtcgtcgtccacgccgccggcgtacgggagcatcgtcaccgtgctcagcatcgacggcggtggcgtgcgcgggatcatcccgggcaccatcctcgccttcctcgaggagaagctgcaggagtacgacgagcggccggacgcgcggctcgccgactacttcgacgtgatcgccgggaccagcaccggcgggctggtcaccgccatgctcacgggcaagaacaaggacggccgcccgctcttcgccgccaaggacatcaacggcttctacctcgaccactgccccaggatcttcccgcccggcggcggcggcggcggtcctctgggcctgctcaagaagctgtcggggcccaagtacgacggcaagtacctccacgccctcgtccgggacctcctcggcgagaccagggtcagccaggcgctgcagaacatcgtcatccccaccttcgacatcaagctcttgcagcccaccgtcttctccaaatacgatgccatcaccgatgtttccaaggacgccctgctgtcggacgtgtgcatcagcacgtccgccgcgccgacctacctcccagggcaccagttccagaccacggacaaggacggcaaggcccgtgccttcaacctcatcgacggaggcgtcgcagcgaacaacccgacgctgctggcgatgacggacgtgagcaagcagatcctgctgggcaacccggacttcttcccgatcaagccggcggactacggcaggttcatggtgctgtcgctgggcacaggctccgccaaggccgaggagaagttcgacgccgtgcagtccggcaagtggggcctcctggggtggctcagcagcaaggacaccacgccgatcatcgacagcttcagccaggccagcgccgacctcgtcgacatccacgcctccgtgctcttccaggcgctgcactcggagaggcagtacctccggatccaggacgacgagctcacgcgacagacgtcgtccgtcgacgtgtccaccgcggagaacctcaaccgcctcgtcgacgtcggcagggggctgctgaagaagccggcgtgcaaggtgaacatcgagacgggcaagaacgagcccgacggcaagagaggcaccaacgaggatgaactcgtccgcttcgccaagatgctcgtacgggagcgccgggcaaggatccagaaaaaagaagccagcaacacactctagacagagctagctagcactagcagagacaccaatgcaacacaaagtgtctactacatcatagcctaattaagcctcatgtgttctacaatcagtcatgcatgttatgtgtatccacttcaatagttctttcaaagtgtctaccccctttcgtgctgc

SEQ ID NO: 15936 - DNA, 2882 bp, Zea mays
  Clone ID: LIB3060-113-E2_FLI
cctcgcctccagccaccgcgtccgcctccgatggcgtcggcggcggggtcctcgaacgtgatgctcgcgatcaacgagaagaaaacgatcaccactgacctctaccgcccgctgcgcctctacatcgcctccacctactcggaacgcgaggccgctgcggccgacgacgaccttagcgtggtgtgcgacctccgcgctgctgtcgagaagccctccctcccggatccgtcctccctcgagcagcgccgcgacgcgctcctcgcctacgcgcgggctctggcactcgtggagccccgcttccccatctcccccgatcgcgcccacgtccactccctcaccttcacctggcacgacgcattcaaggggaacaagaagtgcgccctcgcctccatccacctcgagaaggcatccgtgctctttaacctcggcgccgtctactcccagatcgcgctcgccgcggaccgctcgactgacgtcgggatcaggatcgcgtgcggcgccttccagagtgcggcgggggcgttcgcgtggctcagggagagcggggccgcggcgaaggctgtcgctgcggggaccaccaccgtggacatcacgcccgagtgcgccggcatgctggagaaactcatgctcgcgcaggcgcaagaatgcttcttcgagaaggtcataggtggagggaagccacccgcgctgtgctccaaggtggcgcggcaggttggcatactctatgaagaagcatacacagctctcagtgcatctcctctaagtcagcactttgataagacatgggtgtcccatgtccagcttaaagctgctcaattctacgccgatgcttgctacaggtattcactggatcttcatgagaaagaagaaattgctgaggaaattgcacgtttaaagattggtatgagtgccttggcagatgctaagaagactacgaagggagttgctgcccaacttctggattccgtcaacaagctggaaagtaacatgaaaaccaacttggaaagggctatgaaggagaatgatcgtgtttacttgatgcgggttccagctgctggttccttgggtgccctccctgcagcgtcccttgtaaaacctacctctttggctgaagttttagatgccagcaaggaaaggcttttttcatcacttgtgcctgatggcagcatgaaagcactttctaagtacacagagatggtagataatagtatccggacccaggctgagaaattgcagcaagctagtgagatcactagagtcaggctgaaggaaatggacttaccagattctattctttcattggaaggaaatataaccttgcccatggatctgaaggaagacgtagaggctgtgcagataagcggtggccctgctggcttagaatctgagttgcagcaacttagggatttgagcagggtcaatcaggaactacttgtccagactgaagagcttctacagaaggaggcgaatgaagacgctcaatttcgtacacaatttgggagtcgttggactagacctcaatcaagcaccctaacaaagaatattcaggatagattgaatctgtttgcttctaatttgaagagagctgctgatagtgattctctgattgaacgaggcgtgaaggagaactattcattgatgtctatccttgacaaaagaccgatagagtctgcacttccaagtatttccaggcctatcatgtccttggatggaaatgaagatgccattgttggagccctgaaacaaagcttgagacaactggagtctcttggcgcacaaagggcaggtcttgaagacatgctcaaagaaatgaaaagaaaggatgatatattgcctaagttgatggttggcgtgggatcacatgatgatcttttcaagaaggagattgctaagtatgatcctatatgtgctgatattgctgataacattgtggcacaggaacaattgttgctacaaatacaggcacaaaacgagcaatttgctgctgtattcaacctagaggattacaaagctgcccgtgagagatgttacaagcaaatcgctgctgctgttgtgaaataccaggagtttaaaaagaacatcaacgagggcctaaacttttatgtgactttacaggaagcaattggcaaaataaaacagcagtgcagcgacttcataatgacccgaaacattcagtgccgtgaaatgatggaagatgtgcagaggaagctacccggcttcagattctcgtcgtccagccgctcctctatgcagaggaatgctgcttctgtgccacctgacgagagcagcccatcaccgccaccgccgcatgcccaggctccctatgcctctccaccaggggtagactcgaggcatggatattctcaaccggaggcaagacctgcatactcgcagccataccccccatcctatggcgcgacaccgcaacagccgacgtatggtgcacaacaccccgggcagtaccagccgcctcctggccatgactgcggtcagccggcatatcctggatggcgcgggccatacccatactacaatgccccccagccgcagcaatctgtgccatgtccacaggcgccgtacaatgccactggggcttaccctccgcaccagagcaactattaccgacctcaataagtgctgcaactatttcttattattttgcttcttttttttccattgggtcttaccattctggtgtactactactgcatacgagagagttcgggtagtgtaatagcaggtatagctttgtatgatttagtggcggacccagaaagacccggaccgaagcgaccataaactataatatagtagcatataaaaaattgtacggttaaacaatgttgtcatagatgttaaagatgacatacaagttatgatgt

SEQ ID NO: 15937 - DNA, 1794 bp, Zea mays
  Clone ID: LIB3060-113-H6_FLI
cgctgcttcccctcctccacacctctcggtttcgggaaacctctcccccgttcccctcgaagcctacgggctcggggggcttcgatcgaatcgaatcggatcggatcggaagcatggagatctcgctcgaggcgtcgtgggtgggcgtgcagcggcacgggcaggacctggcggaccgcctcgcgcagggcttctcggggctcctcctccacgcgcagccgccgcagctgcccccatggtcgccggcggcgctgttgccgcccaagctcgtcatccccttcgacctcgacctccccgttgtccccttcgtcgccgggatgcgccgcggggtcgggaccgtggacctccccgccgtggccgtctcgtcgctcgtcgagatcggcggcaggctcgggcaggcggggtccgagctcggtgcggcggttcagcatctcgcgcgccaggtgcctgtgcctgtgcccttccggaaatgggaagccgcacagccgccgaccgtggtgacgggggatgttgcgctcgctgtggggacggttgggtccgcgaacgtcgctttggaaagggctgtagacatagggtccctcgaggtggcagcggctgctgctgcggcggccactggaagtgccactgcaggtagtgtgggcgcggttggggccatggacgacgatagactggatgatgaggaagacggatttgattgcgaaattgggacattggagaacattaagaaggctaagggcactgtaaatgtctcagcaacttacaacaccaggcaccatgactttgagagttcagtagtcgcacgaggagacctttggaggttggagtcatcgcgtggcaatttaacttcagggaatgatagctcaccacttttccttgttcaacttgggcctttactgtttgttcgagactccacgcttcttttgccggttcatctgtcaaagcaacaccttctttggtatggttatgatcgcaagaacggaatgcactccctatgcccagctatctggtcaaagcatagaaaatggatgctgatgtcaatgatgtgcctcaaccctgtagcttgttccttcatggatgtgcaatttccaaatggacaaatgacatatgttgctggtgaggggataacagcaagtggttttatccctttatttggtggattactccaagcacatgcaaagtgtcccggtgatacaagagtgagcttctccttcaagaacaaacaaggtactaggttcagtccaacgtttcagtggcctgacaattctgtttcatttggagtcgcacaagctgtagcatggaagagatctggccttatggtcaggcccagcattcaaatcagtgtttgccccactttcggaggaactgatcctggaatatgcaccgagtttgtccactctttgaaggaggaagtcagcgtaatgtgtggtttctcttgctcaagacatccctcagcattcacagctctctctcttgggcgatccaaatggaatggccaggtcggcagttcgggactagtaatcaccttggagacaccccttgacaacatggcaaggccttctttatccgttcaattgaacgggggtttcgagttctgacatttcccccgtgggctctagaatacaactgtatatactgtatctcatagcgagaagatgatatgccactgtatatattgcacacatgtagctgtgattaagtagatatcttcccaaccggtgaagtgtatagtcctaaaaacagacaaatggcttactgttttggttcactgaataaatttgaaggcttgtatgtcgt

SEQ ID NO: 15938 - DNA, 1123 bp, Zea mays
  Clone ID: LIB3060-114-C2_FLI
ccatgtctcgcgacgcccatctcggagtcggagtcggagtcgagggagacgccgccaaggaaaagaacggcgccgctgacgaagaagtcgggtccaggtcaggcggcggcggcggcggccacaagctgtccctggtgccgctcatcttcctcatcttcttcgaggtggcggggggtccctacggcgcggagccggcggtgcaggccgcgggcccgctgtacgcgctgctgggcttcctcatcttccccttcatctgggccatcccggaggcgctggtcaccgcggagctctccacgccgatgccgggcaacggcggcttcgtgctgtgggccgaccgcgccttcggcccgttctcgggctccctcatgggcacctggaagtacgtgtccagcgccatcaacggcgccgcgttcccggcgctgtgcgccgactacctggcccgcgtcgcgcccgccgtgtccgggggcggggcccgcgtcgccaccatcgtcgccttcaacgtggcgctcacgttcgtcaactacacggggctcaccgtcgtgggctggtccgcggtggggctcggcgtggcctcgctctcgccgttcctcgtcatgtccggcgccgcgctgcccaagatccgcccgcggcggtggcgcgtcgtcgccgccgagagggactggaagctcttcttcaacacgctcttctggaacctcaactactgggacagcgtcagcaccatggccggcgaggtggagcggcccgggaagacgctccccaaggcgctcgtgtccgcagtctccatgacgtcgctcggctacctgctgccgctcatggcggccactggcgccatcgacgtcgcgcctgacagctgggggaacggcttcttcgccgatgccgcaggcatgatcggcgggcgttggctcaagtactggatagaggtgggcgcggtgctgtcctccatcggcctctactcggcgacgctgagcagcgcggcgttccagctgctggggatggcggacctgggcctgctcccgcgcgccttcgcggcgcgcgcccccgtcttccgcacgccctgggtcagcatcgtggccaccagcgccatcatcctcggcatgtccttcctcagcttcaacagcatcgt

SEQ ID NO: 15939 - DNA, 1293 bp, Zea mays
  Clone ID: LIB3060-114-D7_FLI
gcggcctccccaactaaccctatcccccggcgaccgggaactgcaaccgatggaccgcctcgtcgtcttctcccggcgccgccgccgctggatcctcctcgctgcggccggtgcggcggcggccgtcggcgcgtacaagatctaccaccaccctgccgtcgcggaacgtcgccgccgcctcgtgcgcctagccgccgccatcgcggccttcgctgatgccgccgcatcatccgccgacgccgtggccctggtgacatccgatctcgccgactttgtccgttccgacgcggacgaggtcccccgcagcgtcaagcagctggccaagctcgccgcctcccgtgaggtatccgccaccgtctccaccctatccgaggcagtaacctccgggatccttcgcgggtcgggatcctctagctccgggcccgcatccggcggtaccgtggccctctccgatcgtctcgtagacaggctcttctctgactcaggcgagcgccttgcgtccgcggttgccggcagcttcgcccgccatctcgtcctcgccttttactccgctccttcaccacaaggggaggcgtcctcctccccgacgatgtgggtcaacgtggttgcgactggaaagtgccggaaggcgataagcaactgggttgaggtcttcgtggggactgctgtgagggagttcattgacaagaccatccacatcaacacctacgagcagctcttcgaagggctcaccaatccgagacatgacgctaaggtcaaggaattgctagtttcagtgtgcaatgctgcggttgagactttggtgaagaccactcaccatgctctgtacagtactaatggcaacttgggtgcaaatggtagtgtcagtggcaatgccaatggagctggggaagggtgggtggagacggtgtcgagcacgttggcagttcctagcaacaggaagtttgtgcttgatgttacagggagggtcacatttgagacagtgcggtcatttctggagtttgttctttggaagctgcaggatggggcaaggaagggcggtggctccgtggttgacagtggcctgcgcgtcgtgaggtatatgagcgataagtcgatggttatcgccacgatctgcattacgttgtgcttgcatgtgttgaatgggactaggctcttggtaacagcttgagagtgtacttgtttggttttcctattttttgcacattgtttgtgtaaaactgtaggactcatactgaaactgtaaatccaaaaggaatggaaataatagaaataagatcaattgtgctgtac

SEQ ID NO: 15940 - DNA, 1036 bp, Zea mays
  Clone ID: LIB3060-114-E2_FLI
ggcctctgaggtttcccagtagcggcgcctagcatcttctccgcgcgcagcttgcttcctccctctgccgctcgtctccatctctccatctcccaaaagaccgcgcctagctccagccatgagcgccgacgtcctctctctgtgcttgatctcccagtcctccgctccctgaaaccttcacccacatgtttgtgaaggtccggtagtggagatcttgcgaggtccactgctctgcgctcctattccacctgtctcatcccctcatcatgctcgacacttgctccctggcagcatgtcgtagcagcatctgtgcttactgtgccgtgctgtttctctgcacgcgtcaagctctcgcgctgaatccagccccatgttgacgcgttcatgttccagcttgtcgtgccgcgtcgtcatcactttctgtcgcgagctcgattcccgttgtcatcgggctttgtgcgtgctcgcgtttgccgtcgagtcgttgaacccgtcatcctttgctcaaccctaccccgccagctcgctccagatacaatcttgttatcgtcccgcgcgtcatcaagaatcccaagaatcgggtgaaaacgaagctagcagcgcgatattccccaagcgctcgacaattgcctggatcggaaaatcactaccgatctcgcggattcgagtcggctattgaaacggtacgttaattaatcgcgtgatgcggaagatgagccaagtcgaccccaagcgtgggcttcttcgcaaggcgatgctgatggataaacctgaagatggtcgtcaagtgctcatcgactaacaacactaacctagtgttactcaggttctaactttgtgctattgttgatggtgttaagtgccggtgggctcggccttcttataagtctaagtaacccttctatacttcttattgaggatgatcccttgagctagcatatatttcaaacttatacttttgtaatcactccgataaactaatgtaaaatttttgtaacctgtaaaatttggtagtaagatttccgctgcaacaaat

SEQ ID NO: 15941 - DNA, 1118 bp, Zea mays
  Clone ID: LIB3060-114-G5_FLI
ctcttccgtcgtgtcttctcgcgctttccactcccaacgagatccatcacccccgacctctgtaagcttcccttgacgtcgtcgtcgtcatccatggagagcaaggacggcacccacgatcccgccacgacggccgcgccaccggccggcgcgccgcagcccgcgatgccttccgcggagacggcgcggtggggcacgcggcagatgggcccgccggcggcccccggggcgcacccggagaaccaggaggcggcgcggtggacggccgcgcgcggggaccaggagctgccgccgtacgtcatcatcggtgagcccgtggcggcgccgccgccacagcataggggcaagggggacagccccatggagcacatcctcgacttcttcaacacctggagccgcaaggccgaggagctggcctccagcatctggttcaatctgaaggccgcgccatccatgtcggacgccgcgatggggaagctaagcctcggcgcgaaggcgctgtcggagggcggcttcgagaagctgtacaagcagacgttctcgtccagccccgacgagcacctgaagaagacgttcgcttgctacctctccacggccacgggccccgtcgccggcacgctgtacctgaccaacctgaacgtcgccttctgcagcgaccgcccgctctccttcgccgcgccgtctggccagaccgcctggagctactacaaggttatgatcccccttggcaagatcgcgacggtggagccggtgacgatgaaggagagcccgccggagaagtacgtccacgtcgtcaccgtcgactcccacgacttctggttcatgggcttcgtcagctacgacaaggccgtgcacaacctcgtcgaggccgtctcccagcacggcgtcgccactgccggcggcaagtgatgaggcgacgccgctccggagactgggtgggcgttcggcacccgtcgtcgtgtgtatatatgtagctgatggctctgcctgtgcattactcgtgttctgctactactagtactacgatggtgtcccggcgtgtgtttgaatgttctcggtgtgtgtggcacagatgcgccactgctattctatgcacttgtgagtattattatgctttc

SEQ ID NO: 15942 - DNA, 960 bp, Zea mays
  Clone ID: LIB3061-001-A12_FLI
cattctccaatctgaaggcgaaacaaggagtgcacatctttgttgtagagggcaaagtttgctcagctgctgctggacattggagagcgcagtggtggttgtacgcctgaaaggaattctttgtaaatttcccctatatctggttctgttatcatcattattttccttgcgttagacaataatgtcggagaacgaattagcagtaataaaaccagaggtacatctcctgttgcacttcctgttaattagagattaaatgttgcattcttatcttgattgcatcatttgggcctaaatcaactaatcaagtttattggtgaactctgacaggcattgaaaacttatatttggcttcagtgctttgatggctccatacaacaagtggaggaagaagttgcgatgttctgccctatgatatgtctggaaatagtgaaaaatgggacaggatcatctaagaatcatgctatagtactaccagaaagagttagtccggcaagtttgagtttgattcttaattattgtcgctttcatcaggtccctgggcgctcaaacaaggagcggaagtcatttgatgaaaagtttgtccggatagacacagaaaaactctgcaagttggcttccgcagcccttggtctgcagttaaggccactagttgatcttacttgtggagcgcttgctcgaatcattggaggaaagacacccgatgaagttagagatattttccatttaccagatgacttaacagaggaagagaaactagagccactaaaaaatgtaaatgatgatcctacgattcgattattgaaccgattgtatgcaaagaagcggaaagaactgcaggaacgccagaaactaaaggatgtccaaacacaagagcaaaaagatgagagatctttggatgaattactttgttttataaatggacatggagattccagaggtgggaaagcgtctaagaat

SEQ ID NO: 15943 - DNA, 505 bp, Zea mays
  Clone ID: LIB3061-001-B11_FLI
cgagaggttgcgagaagtagccgccggaggagcacgccaaggccgccgcctacgaggacggccatggggttctgggtgaccacgctcatctttctcctcgccggcgtcgccgcatccctcttcacgctcctctgctgcaaccgcgggccctccacaaacctattccatttgaccttggtgactacagctgtaatttgttgttggatgatgtatgctatcgtttaccttgctcagatgaagccattgatcaaccccatcctgagcggggagtgatctctcctctgcattaaaaagaatgaaagctaggtctgctgtaccattattcagtctgtgaacttcctattcatttggccccacctgatgaaataaataaactgccatgagtttttttttttttttgctactccttcactgcagacattgagaaggctcgctgtgattagtgtatgcaattgtatgatatacgcaataataataatagtatctaaatatatgtgtgccgctc

SEQ ID NO: 15944 - DNA, 1732 bp, Zea mays
  Clone ID: LIB3061-001-D5_FLI
cagtgtccggcatcttggccccttccccacccttcgccctctcaaggaggccggccacgcctcacactcccgcccgcctccggcgattcatccacccaataaagtatccaaccctaacgatccggatcgccttaccccgcgtcatccacgcgaattgtttcgattatcctcggatttccccgtttttttgtgggtttcctatcttcttcgatcggagtgctagggtttgggcgcgctcggtgggcggcgtactccagggtcatcgttagttggacgggctagggtgctttctcaccgggggaagggaagcgaatccaaacaatggagaagaagaaggtggcgatcccgctggtgtgccacggtcactcgcggccggtggtggatctcttctacagccccgtcacacccgatggttacttcctcatcagcgccagcaaggacacaaatccaatgcttcgtaatggtgagactggtgactggattgggacttttcaaggtcataaaggagctgtttggagctgttgccttgacaggaatgctctgagggctgcatctgcttctgctgacttctcggctaaagtatgggatgcacttactggtgatgaactacattcatttgaacataagcatatagttcgggcatgtgctttctctgaggacacccaccttttactcactggaggcatggaaaagactttgcgtgtgtatgatattaatcgtcctgatgcagctccaagagagcttgacaaatcacctggttctgtccgaactgctgcctggcttcatagtgaccaaactatattgagttcctgcactgacatgggtggagtaaggctatgggatgtgagaacaggtaaaattgtccaaactcttgaaaccaaggcttctattactagtgcagaagtaagccaggatggcaggttcatcactacagcagatggctcaagtgtaaaattttgggacgcgaatcacttcggccttgtgaaaagctatgatatgccgtgcaatgtggagtcagcttcacttgaacccaagtctgggagtaaatttgtagctggaggagaagatttgtgggttcatgtattcgatttctttactggtgaagaaatagcttgtaacaaagggcatcatggaccggtccactgtgtccggtttgcacctggtggtgaatcatacgcatcgggttcagaagatggcaccattaggatctggcagcttagcccagttaatgctgatgacgacgaggcggccaatgcaaatggcaaggcaaatgctgcagtgaacgaggttacaaccaagctcgagggcggcttccacattcccaaggagggacaggctggggggtaggacctcatgtgctttgttgtggtgcttgtggttcttattgcgaggagattgcccatagggctgccacggtcattcagtttctccctgcagagccatcaacacctgtttgcgatccaagggtatcatggcttcaagagtcatcaccctggtaactggggaaaaaccatacccctcgtaagcatggtggtgggtttttggatggggccttcgctttgatagaacatagcaactgtagtgtcaaaaataaacaagagaatacaacttgggtaggtatcgtgtcttcggtcattaaagtgaagtattctgtatcgccgccagtaatttttgtggcttttgatgttggaacgccgattttcaaatcaaagctgacgaccacttcttgatc

SEQ ID NO: 15945 - DNA, 845 bp, Zea mays
  Clone ID: LIB3061-001-E12_FLI
cctaccccacacagaagcggcggcggcggagcaaacgcaggcgaaggcgagggtgtgagggaaggagcaccagccatggtgcacgtcaacttctaccgcaactatggtaagacgttcaagaaaccaaggcgtccttatgagaaggagcgtcttgatgctgaactgaagctggttggtgagtatgggctgaggtgcaagcgtgagctttggagggtccagtatgcactgagcaggatccgtaatgctgcaaggcacttgctcacccttgacgagaagaacccccgtcgtatctttgagggtgaggcacttcttcgccgcatgaaccgctatgggctgcttgctgagggtcagaacaagcttgattatgttcttgccctcaccgctgagaacttcctcgcaaggcggcttcaaacacttgtcttcaaggctggcatggccaagtccattcaccatgctcgtgtcttgatcaagcagcgtcacatcagggttggcaggcaaattgtcaacgtcccatcattcatggtgagggtggagtctgagaagcacattgacttttcactgtcaagcccattcggtggaggccccgcaggaagggtgaagagaaagaatcagaagaaggcaagcggtggcggggatgctggtgatgaggatgaggagtgaggatggacaagtagtgttacaccaatataataatattatctagttttcttgaacttgttcgaatgatgagtgcttagctgtgtgatctgacgcagagtcccctgtgctgactctgtgtcatggatggtccattttatcttgtggtattatcagcctttacataactgctatgtttggatatgttc

SEQ ID NO: 15946 - DNA, 1301 bp, Zea mays
  Clone ID: LIB3061-001-F3_FLI
tcaccctcattccgacagttccgctagaaggaaaagaagaaaaaaaaactctctttctctctctttcccagccctctctctccctctccacccggccgccaccatgtcaggcctctacagccagggcttctcccctgcaagaaccctctccccccagattaggagcaaccccgacgctgacagccagtacttggccgagcttctcgcggagcatcagaagctggggcccttcatgcaggtgctgccgatatgcagccggctgctcaatcaagaaatcatgcgggtatcaagcatggttcatgaccatggatttagtgatcttgacaggcgccggtttagaagtcctagccctatgtcctcaccaattgtccggcctaatctacatggcaatggatttggtccttggaatgggatgcaccaagagagattgggctttcctcctcctggaacaagtatggactggcaaggagcaccaccaagccctggctcttatattgtcaagaagatcgttcgcttggaagttcccgtcgactcttaccctaatttcaactttgtggggcgcattctagggccaaggggtaattctctaaagcgagttgaagcatcaactggctgccgtgtttttattagagggaagggttccatcaaagacacagaaaaggaggagaagcttaaaggaaaacctggctatgaacatctgaatgagccactgcatatattgatcgaggctgaattaccagcgaatatcgttgacacaagactgagacaggcacaagaagtcatggaagaattgctaaagccagtggacgagtcacaagatttctacaagaggcaacagctgagggaactggctatgctgaactcaaccctgagagaagacagtcctcatcctggaagcgtatcccccttcagtaacggcagcatgaagcgcgcgaagccaagccagtagagggaagcttctggctctcctccaacccttgagtcgtccacggcgcggcaccgacaaggtggtgcccttggaactcgcgctgtccgtgtctgtctcgtgggtgcttgtgtaatagaaggtatgcatctgctgctagacaggatagtctgggtaccaggtgcgtcgtcgtctcaaggagacgagggatcggtggccgatgaactgcctttgatcttggtgggtggatccggccgtgctgttgttgtaactgcttgtaagggtgatggacattattcgttttattcgttgttggctgttaaccctgagtagattatggtgctgaggagatagtggtttcagtgggagactagtt

SEQ ID NO: 15947 - DNA, 1551 bp, Zea mays
  Clone ID: LIB3061-001-G8_FLI
ccaatcgccaagccaagccaagccagaagcggcagcctcgcgcagcggtctggtctctcttgtgggtggtgcccttcttcgccggtggccggaaagggcagtggagtgggaccgctcaaggagaggccggcgtccccaagtctcacttccgccgtccactttccccctgtagggatcgagggaggaaggaaaggaggtgcttcacaatgaaggccctcattcttgtcgggggtttcggaacccgccttcggcctttgactctgagcttcccgaaacccctcgtggattttgcaaacaagcccatgattctgcaccagatcgaagctttgaaagaagttggggtcacagaggtggttttggctatcaactatcgcccagaggtaatgattaatttcttgaaggactttgaggataagcttggcatcacaattacatgctcccaagagactgagcccttaggaaccgctggccctcttgctctagcaagggacaagcttgcggatggatctggccagccattctttgtcctcaacagtgatgtcataagcgaatacccatttgctgaactcatcaaatttcacaagtgtcatggtggtgaggcaacaattatggtcactaaggtggatgaaccatcaaaatacggtgttgtggttatggaggaggcaactggcagggtggaaaggtttgttgagaagccaaaaatatttgtgggtaacaagatcaatgctgggatttacttactgaacccatctgtccttgaccgcattgagctgaggccaacatcaattgagaaagaggtcttccctcaaattgcagctgatcaacagctctatgcaatggtccttccaggtttttggatggatgttggtcagcctagggactacattactggcttgcgtctttatctagactcgattaggaagaaatcagctgccaagctagctactggagcacatgttgttggcaatgtgctggtgcatgagagcgccaagattggagaaggttgtctgattggtcctgatgtcgccattggacctgggtgtgtgtggaggacggcgtgaggctttcccgctgcactgtcatgcgcggcgtgcgtatcaagaagcatgcttgcatctcaaacagcattatcggctggcactcaactgttggtcaatgggcacggatagagaatatgactatcctgggggaggatgttcatgtgtgtgatgaggtgtacagcaatggcggtgttgttctcccacataaagagatcaagtcaagcattctgaagcctgagatcgtcatgtgagctctccagttttagctacagtacattcttaacttctttgacgaagggaggattgcagatccccttttataaacgatattgcttggtatcttcgatctaatgcaaacagcttcatacttggtctcttgttaaactattgacaatgtatcttgttttttgttgaaaagtttagtacttgagtgtcaatcatacgtattcgcttgctaaactattgacaatgtatcttgttctttgttgaaaagtttagtacttgagtgtca

SEQ ID NO: 15948 - DNA, 1229 bp, Zea mays
  Clone ID: LIB3061-001-H3_FLI
tcggaattcgcaacttctcccacgcggcgaacacggcagagatgatgagctcccgggccggatccatcctcctccgccacgccggctcccgtctcttcaccgcagcggcgatctctccggcggcggcctcgaggccattgctcgccggcggcaatggtgttccggcagtcatgctacggctgatgtccacctcctcccccgccgctcccacggaggcgaaggacgaggcagccaaggcctccaaggtgggaggggacaagaaggcggtggtgatcaacagctactgggggatcgagcaaaacaacaagctagcgcgggacgacggcaccgagtggaagtggacttgctttaggccatgggagacgtacacggcggacacgtccattgacctcaccagacaccatgagcccaagacgctgatggataaggtcgcatactggaccgtcaagtcgctgcgcttccccacggacatcttcttccagaggcggtatggctgccgggcgatgatgctggaaaccgtggctgcggtgcctgggatggtgggcggcatgctgctccacctgcgctcactccgccgcttcgagcagagcggcggctggatccgcgctttgctggaggaggccgagaacgagcgcatgcacctcatgaccttcatggaggtggcgaagccgaggtggtacgagcgcgcgctcgttatcaccgtccagggcgtcttcttcaacgcatacttcctcggctacctcttgtccccgaagttcgcgcaccgcgtcgtcggctacctggaggaggaggccatccactcgtacaccgagtacctcaaggatctggaggccggcaagatcgagaacgtccccgccccggccatcgccatcgactactggcgcctccccgctaacgccacgctcaaggacgtagtcaccgtcgtccgcgccgacgaggctcaccaccgcgacgtcaaccactttgcatcggacatccattgccagggaatgcagctgaagcagtcccctgcgccgatcggataccactgaggatgtttgtgctcttcttaattttgcatcgctaataagcaattgtctttaagggaaggaaaggatgcttattgagttacgagtactgctacggcgattaggatattttccaaccagttgtttgagagtgaaacctattatatgtacgcatgttacatgtacatatctctaagtgcgagaggtgcttttctggcgttt

SEQ ID NO: 15949 - DNA, 712 bp, Zea mays
  Clone ID: LIB3061-002-A8_FLI
catggagctcgccttgggggccatggccagcttggcccctaagctaggcgacctgctcatggaggagtatgtcgtgcagaagggcctcaagcccgacatcgagtctctctccagggagcttgtgatgatgaaagccgccctcgtcgacgcgtctcgggtaccacctgatcagctcaccgaggtggaaaagctttgggcacgcaaggtccgggacctgtcgtatgacatggaggacgccgtcgacgatttcatcctgcgtgtggctggtggtgacgactctgccgctgactcaaaattcttcaagaagacccttgccatggtcaaggacgtgatgtcgatgaagaagttcaaggatcggcgccagatttgcgacaaggtcaaagacatcaagaaactctccaacgagttagctgaacttcgtgccaagtacatggtaaggggtgtgggtgctgatctcgccgcgagcaccggcatcgacccccgtctcatcaatctgtacaagaaagagacagatctcgttggcatcgaggagtcaagggacaaagtcattaggatgctgtctatagggaccaaatatgatgatgcacttgagtcccatcaagctctaaagatagtgtctatagtcggggttggaggactaggtaagactactctagccaaaacagtgcatgacatgcttaagaaacaattcgactgttcggcttttatttct

SEQ ID NO: 15950 - DNA, 1030 bp, Zea mays
  Clone ID: LIB3061-002-H5_FLI
ccgaattcccaggcaggcaggtcggcgaggagggcaggaagaccgaagaccgagccgtgcgggggctcgggacgggaacgggacaggaccccaaaatctcagatccttcctgcccgcccgcccgtgcccgtcgacgcgtcgttcttgccggccgcgcctcacctccgccctctcctcctccagggggatcggatacgccacaggctgcgcgatggtgctgtgggtcttcggctacggctccctcatctggaaccccggcttcgacttcgacgacaaaatcctcggcttcatcaagggctacaagcgcacctttaatctcgcttgcattgaccacagaggcacaccggagcatccggcgaggacctgcacgcttgaaaccgacgacgaggccatatgctggggaattgcatattgtgtcaagggtggtccagaaaaagagctaaaagcaatgcagtacttggagagaagagagtgtgagtacgaccagaagatatccattgatttctacaaggaaggagatcccttgaaaccagctgtgacaggcgtcttagtgttcgtttccactccagatccaattggcaacaagtactatcttggccctgctcctttgcaggatatggcaaggcaaattgctacagccaatggccctactggctataatagggattacctgttctcaatggagaaggcattagccagcattagccacgaagatgattcgatcatagagcttgcaaacgaggtgaggaaggtgctcaacagaacaaaggagaccaagatcactggtgccaatgcttccctgaaatcacatgcccctcttgtgcacctgtccgcgcttccagaaggcaccgttgtggactcgagatagcgagagccttggacgttggacctctactcggaatctacttccagctcttgcatgtttgtggccatcatgtactgattttcccttttcaacagttgtcgtgaggctgtatcttctggagttaaaaaaatgctaaaagccggcactaataatgatattaacttg

SEQ ID NO: 15951 - DNA, 853 bp, Zea mays
  Clone ID: LIB3061-003-C5_FLI
ctcaccccgttcatccgcgacgtggccacccagttctgttaccaagaagtcgggcacctcagggcgatcaagcagacggtgaggggcttcccgaggccgttgctggacatcagcgcggccaacttcggcaagatcatcgagcaagcgctgaacgcgacgctggacccgcccttcgacccctacgagaacagcctcaacttcctcgtcgcctcctacatcatcccctacgtcggcctcaccggctacgtcggcgccaaccccaggctcctcacccctcaggccagaaagctgctggcggggctgctggcggtggagtcggcgcaggacgcggtgatccgtacgctgctgtacgagcgcgggatggcgcgtgtgccgagctatgccggcggggtggcggagatcacggcacgcatctcggacctccggaactcgctggggaggaggggcgtgaaggacgagggcctggtggtggcgcccgagctggggcccgaggggctgaccgtggggaacatcatcgccggcgaccacctgtcgctcgcctacgaccgcacgccggaggagatcctcggcatcgtgtacggcaccggtaactccgcccagcacggcggcttctttccccagggcgcagacggccgcatcgccaggggtctcctcgcgtagcgcatgggtgagttgtgaccgtgcgctgagcagtatgaatccgtgcacggcgcagactgtagactagctagcagtactatacttgtttgtgagttggtatggtgtggccttgagtgccttgtgtaaactgggtgatatacatgaatgtaggtggaaacaaataaagtaaataatgggttgctgcactatacgc

SEQ ID NO: 15952 - DNA, 1455 bp, Zea mays
  Clone ID: LIB3061-003-D6_FLI
ctgccgaggcggatgcggatgacccctcctcctccaccccctcgcttccgatggctgtcctcgggggcggtggcggggagggccggagcggggtgccgaacaagctcgtggtggcggccctcgccaccggggaagaggccgcgccggctctctcccccgatacggtggtcgaggtgaatagtgaggaggaggtgccgtacagaatggccgtccacccgcgtggcgatggcgtgttctgtgccttccccaacggctgcaggttgtatcgatgggaatcacaggaaggagagggaccacagaggttggctttggagccggaccaggatgctttagcagagctgaaagatgtcggtttgcagttggccgtatccttcagtggagaaggttcaatacttgctattggtggtgaagatgggtatttaagagttttcaactggcctaccatggggtctgttctcacagaaatcgatactaaaacatcgattaaggatcttactatcagttccgacgagaagtttcttgctgtgaataggagcagtggcccatgtagagtgtgggatttgcagtcatctgaagttgtagccagtctgccaagagaaacaggggaaatatttggattctgcagattctctaataaggctgacaacagtcatgtcctatttataactgtgatggaaggcgattatggaaaaatagtgtcttggaatactacctcatggacgagaaccggatcaaagaaaataactcgtgaggcaatttcagcttttgctgtgtcacccaacggtgctcttcttgcaattggaacaatagaaggaagcatcatcgtagttggctcaaaagacatgcggacacttgtaacagttaaaaaggctcatcttggtattgttactacgctgaccttctctcaggattcaagaacattgctgtcaacttccttcgactcttctgcaagggtgacatctgttgggtctccaaagagtaatggaacaagcatatggcccatgctactagttgttattcttgcaattttggtgtactactgtacgcagcacaaagaagacattttggcaatgttgcagcgttgagatagatttctgttcagcccctgactggtctactctgctggacgtattattagtgttgcttcagtgattgaagaaattttggacttgggccaacttcattattctctcaaggacaaacaatacagcaaaaggcactgagccctgttatgttttgtagtaaaaagggtaatgtacttactcatgttgtcgaagtttttgtaagttgatggccgcaagtgatagacatatgtggcaatgtttcttcatgctgcacttgtgaattgcaagatgttcgccccaagagtccaatatagagagttcagaaacaaatttttttggtgtgcgaaacaatttattatgtatgcgtaataaagctgtacaaagaatatct

SEQ ID NO: 15953 - DNA, 567 bp, Zea mays
  Clone ID: LIB3061-003-E1_FLI
ctattctggcttcccagagggagccagagtctcctgtgatcttctccctgcgcacaacccagccaggatcacgacggcgccccagcgccgccaccctggtcccaccaaatcccctccctacaatctgcgcaatctgcccggtagaatccgtagttctaccagtttcactgtttctgagttccgtgatacttggacgtttgtgaaccgcagaataaaggatgctctcgatcttcagaaaaccttccaagaggccgcatacctcgctgaagccgtgggagcaggcatgggcggcaccgtgcagggtgttctcaacagggtcttccagaaccgtagcggatgaactttctttttctcaaacacgtaatggatggactaattccgtcttttgcaagctgcacaggataatgcacattttcccgttgaccaactggcgtatgtttataataaagcaaatggtgatgtggttgagatgcatcacgttagggtagaaagtgacgatgtgtatgctggtggtgttgttgagcttcagatttttcaaatgaatgctttcgtcgcggagtccagtcc

SEQ ID NO: 15954 - DNA, 651 bp, Zea mays
  Clone ID: LIB3061-004-E11_FLI
ccctgcgtttccttacttcctggtaaagaaagaagcgaagccaggtacttgttgttgagcgcggagagaggagaggcgcagagcatcgacgatggcgagcggcagcatgaagagggagatcagcgagacccacgacaccctccgcttcggcctcaatgccggcgtcaaggccgacctcgcgccgccgcacccgctccagtccagcatccaatcggaggccaagttctgggcggacaagaagaagtttgggacagaggccatctacggatccgccttgaacatccgcaaggatctcgatgcccaaatcctctcaaggttccaaaggccccctggtgctttgccatcatctctgcttggatatgaggcactgacaggttccctagatgattttggttttgaagattatcttaacatgcctcaagattctgaaggtttccgtcaacctgacatgcaccacggaatggaggttcgccttggtttgtccaagggacctatctgccctagcttcagttgaggcagtgaatgtagttctgcggttctgccgcacgttgatgcaccttagtccagtacactcgggtcaataaaagaccacattaggatggtgaaacggtgaaaactgatggcttgcatatgttcagagtgttatgttgt

SEQ ID NO: 15955 - DNA, 1305 bp, Zea mays
  Clone ID: LIB3061-005-A9_FLI
atcgggatgtcaagccagaaaatctactgcttacttctgatgggcacatcaagattgctgactttggtagtgtgaagcctacaagggatactcctatcaaagttctcccaaattcaactactgaaagggcctgtacatttgttggaaccgctgcatatgtaccacctgaggtcctgaactctgccccagcaacctttggaaatgatttatgggcattgggatgcacactgtaccaaatgctttctggctcttcgccatttaaagatgctagtgagtggttaattttccagagaatcattgcaagggacctcaaatttccagagtatttttcagctgaagctagagatcttgttgacaaattgctggatgttgatccaggcaaaaggccaggtgcaggacctgatggttattcttccttgaaggagcatcctttcttcagaggcatagactggaagaacctgaggaagacacggccacctaagctcgcaatcgatgcaaatgcaaatgaagatgaggatagccaagattcaaattggttggcacacatgggaagtgtggcagtcaaccaacagtcaaatactgttggtaataatggtgccccgtcatcatctgaagtgcgctcccatatatctaaattagcttccatcgactcctttgactcaaaatggcaagaattcctggaccccggcgagtctgtagtcttaatatcaaagctgaagaagattaataagctagcaaacaagaagatccagttgatcctcactgacaaacctcaattgatctgtgttgacccttcaaaaatggtggccaagggaaacattatttggtctgatgacccaagtgaactcagtgtgcaagtatcagattcttcacattttagaatatgcacgccaaagaaggtgtcaacatttgaggatgcgaaacagcgtgcttggcaatggaagaaggcaattgaagacctccaacgctgccaaaggaattaattttcaattcaaatcaaaactctaaaatgtcgaattaggcactgttaatacatcatatccttttcacttgggaggaacatgagggggtttatttctcctgcatcctgctccaatgcctggttgcaaggaacttgctactcgctaattcacacactgaatgatggcccccaattttttcccttcccatccatgttttcaaatagtacacaattttgtttgtcacttttgtgaaccgttggagcagatatcttcaaaacaggctgcagtctggaaatattgacacaggaaactattttaacagtctgccatacttgattctctt

SEQ ID NO: 15956 - DNA, 391 bp, Zea mays
  Clone ID: LIB3061-005-C7_FLI
cgcgacatggacctgttcgagcacttcgccgccgtcgcccagcgcctcggcgtgtacaccgcccgggactacgcggacatcgtcgagttccttgtcaagcggtggaagctggagacactggagagcgggctctccggcgagggccgcagggccagggacttcgtctgcgggctcgcgccgaggatgcgccgggccgcggagcgcgccgaggacagggccaagaaggacgagcccaggatggtcaagttcagctggatctttgatagggaagccgttgtttaggcacttgttgctaactgtgatatgtgctcagatcatgtcgctagctgtcagtgtctttgtcacattgtgtttatgtgtttgaaatgccgtaagagtgtttttttcctgc

SEQ ID NO: 15957 - DNA, 629 bp, Zea mays
  Clone ID: LIB3061-005-D9_FLI
tttgcacagcgatgaggttatattcttacttgagtattttgtctctcggtgtcgattataaactattaatcatgtgtatatttgtgtgttcttgtgaggagagaaaccctcgggaccgatgatgaagaagtgaggcccgttcgacgtttgctaaatgttcggtagaaggttcgaaccaaaaatcatcgtcgatctcgtgatttcgagtttggtttagttatggttcgttacacgtgatgcggaggacaagagccgagttgatctcaaaatgatgctggtgaacgaaccagcggaatggatgatctgatcaagtgctaggacggaagatgctcaccaagtggtcgtcatctaaccacactaacctagtgttatcccaggttataagtttgttccgttgtggatggtgctaagtgccggtgggctcggccttcttatataagtatatcccatctttagcttctttattgaggattgtcacttaagctagcatgtatttgaaaacctataaatgttttatacattttaaattgtaatttttttgaatcactttcttttgtaatcactccgatgatatatattgtaatcttgttataacttgtaaatgttgtaacttgtaaccattttgtaat

SEQ ID NO: 15958 - DNA, 373 bp, Zea mays
  Clone ID: LIB3061-005-H8_FLI
gcagacgtgcggggcagagcacaacagcaggggatccggggagggagggaagccatgggcgaggaggcggccaagaaggaggaggtggagaagcccaaggaggccgccgcggcagaggagaagaagaaggacgacaagcccaaggaagtaggcggcggcggcgagaagcccaaggacaaggaggaggacgagaagaagaaggaggacgcgccgccgcctccgccgcccccgccgccggaggaggtcgagatgcgggtctacatgcactgcgaagggtgcgcccgcaaggtcaagaagatcctcaggcgcttcgacggagtggaggatgtgatcgccgactccaaggcgcacaaggtgctggtgaaggggaaga

SEQ ID NO: 15959 - DNA, 918 bp, Zea mays
  Clone ID: LIB3061-006-A8_FLI
ttttactttttttcttttcatttcaattgttcattcaggtcattgctcacactgacactgccacccatggtgatgcgtgacacattattactcaatcatcgccgctaaatgactcaactagctagctagccagcggctatactacagcacatagtttcttcagtgggggacacccagctgtgcaagcctataggctacaacaagcgattgcggcgagcgtcttacaacaaccaattgcccaattgcaacaacaatccttggcacatctaacaatacaaaccatcgcaacgcaacagcaacaacagttcctaccagcactgagccacctagccatggtgaaccctgtcgcctacttgcaacagcagctgcttgcatccaacccacttgctctagcaaacgtagttgcaaaccagcaacaacaacaactgcaacagtttctgccagcgcttagtcaactagccatggtgaaccctgccgcctacctacaacagcaacaactgctttcatctagcccgctcgctgtggccaatgcacctacatacctgcaacaagaattgttgcaacagattgtaccagctctaactcagctagctgtggcaaaccctgttgcctacttgcaacagctgcttccattcaaccaactaactatgtcgaactctgttgcgtacctacaacagcgacaacagttacttaatccattggcagtggctaacccattggtcgctgccttcctacagcagcaacaattgctgccatacaaccggttctctttgatgaatcctgtcttgtcgaggcagcaacccatcgttggaggtgccatcttttagattacatatgagatgtactcgataatggtgccctcataccggcatgtgtttcctagaaataatcaatatattggttgagatttatctcgat

SEQ ID NO: 15960 - DNA, 781 bp, Zea mays
  Clone ID: LIB3061-006-B10_FLI
gaggaaagcaaattgagactacaacaatgggttacaggttcttggtgcggagcataatgccagttcacaccggaaatgtcgaatcacaaccggaaaaaagaagagtgatcctgccggggagcaagagcaaccaacgcggcggagggagatggaacaagcaaggagcacacgctaaaaaaaaaaatccagatctccttgctctttcgttcccccctccttcaccaacagcgggagcagctagccagctactgacaaatctaccatatgtacacagagacggccagacagagaccgggctacggcggcggcgcaacccaccggcgagctggccgcgcgcgcaccaaccctaggaggagcgtgcgaggcgcgacgcgatggcggagtggtacatggcgtcgtggaaggactccgtctgcgccatccgcgcccgcagctcccgggccttctcctccgtcatcacccccacgaactgcctccgcggcgcctcgtcctgcgcccccgccggcgccggggccggggcctccaggtagtcggccttccccgaccaccccagcagcggcgcccaccacttggcgccctccgccgaccccgcgaaagcgtggaccgccccggcgcccgcggcggcgcggggcccggccgtggacgccgccgggcgggcggggaacgagacgacgcatgctgcggacggtgccatcgccattggattggatctgtttggtcgcgccctctctttgcctgcacttgcagggttgcttttcgattgctttggtggttgtttgcg

SEQ ID NO: 15961 - DNA, 793 bp, Zea mays
  Clone ID: LIB3061-006-D7_FLI
atttgccaggcaggagtgttcgttggtatcgctttagcacttcttctgtttgtctcttttggtagacttgcagaaatattctccaaagaccccatggttatacaaattgtgaggagtggtgttttgttcgttagtgctagtcagcctatcaatgccctcgcttttatctttgacggactccattttggtgtctcagacttctcgtactcagcttcctccatgatggtagttggagcaatatcctctttgtttttgctgtgtgctccaccatttttcgggcttcttggtgtttgggctggcctggctcttttcatgagtttgcgcatgactgctggatttatgagattgggatggagagcagggccttggtggtttttgcacagaaaagaacccaaatacaggctgcaatgaacaaaatgtggatctatggagccgaataaccaaatggcgagattaggatggaggatacaagttatgaaggcacactacaatggagaaacatactttcatgtcgactcccgtgtatgttttaaccagttcggttattctaattccgtgtgtggtttagaatgtattttgacttgttatggatttcaaccgactcaatatcagccaatccacatgggattaacggtgaaacaaacaagcccttagatggttttagaacttggaatttgagagtaaagctacattggacaaattttcacttgtaggtgtcacataggcgatgattgttcagtatctctatcctctccgtcaaactgtaaattgaatattgcagatttatttagac

SEQ ID NO: 15962 - DNA, 802 bp, Zea mays
  Clone ID: LIB3061-006-E2_FLI
atgggcgatgaatatggtcacacaaagggagggaacaacaatacgtactgccatgaccattatgtcaattatttccgttgggataagaaggaagaacaatcctctgatttgtacagattctgccgtctcatgaccaaattccgcaaagaatgtgaatctcttggccttgaggacttcccgacttcagaacggttgaaatggcacggtcatcagcccgggaagcctgactggtcagaggcaagccgattcgttgccttcaccatgaaggacgaaaccaaaggcgagatctacgtggccttcaacaccagtcaccttccggtggttgttgggcttccagagcgctctgggttccgatgggagccggtggtggacaccggcaaggaggcaccatatgacttcctcaccgatggcctgccagatcgtgctgtcaccgtctaccagttctctcatttcctcaactccaatctctatcctatgctcagctactcctccatcatccttgtattgcgccctgatgtctgaaagaagcagatacaatagagtatactatagcggttgttctctaggctgtagcatgcagtggaaactggaaaatgttggggttgctctgttgtcggtagtttacatgcgcatgtcggtatgtgtagctaaagctggtggatctcagttctcagatcggactcgagacggggaaaaccattgcccagttggctggttctctgaagttttgtttggtgtaaagaaatggtggtccatcatctactcaaatttttttctcttttttaatgaaataagttgactc

SEQ ID NO: 15963 - DNA, 727 bp, Zea mays
  Clone ID: LIB3061-006-G3_FLI
tagtagggactggggttccttttgcccggaagtttaaggaggatgaacccctgttggacatgattgatgataaagtgcttcgacgctggcgtcacaggcctgttcctggcgcatggtgcacaggcaaaaggaggtggttcagtgatccttgctcccagtggagcaacgtcaacattgtaagacccggtcctcaagctgagaagttccgaacatatataaaccagattatggaagaatcaaagtcaagcaacaactcttgcaagcaatagcggtagaatccgagcacgaggcttcacttcccgcagttgaagcgttgagcttgtctcattttgcgccgaggagctctccatgtctcgagcacttcctggcatctgcttcaggagcaagcatttttgcacctgttgtatgaactgaacacacggccaaggtgatagatggatttattctttccagaatttttttgggtgacatggcttcaagggcttagtgcacactagtgttgttggaagccaagaaagcctactgtgggaatacagaagctaatagtcattgtaattagtagcagcgagttgaatggcctgtgcctttgttcatagatctgatggaattgttggtgcttccatacaaaattgcgaaaatgaagagcgggggaatgttatcgattggttggtcacggtggtggttgttatggacatatggtcaatacaatgcatactgatcctccccc

SEQ ID NO: 15964 - DNA, 517 bp, Zea mays
  Clone ID: LIB3061-006-H10_FLI
cacatctaaccatacaaaccatcgcaacacaacagcaacaacagttcctaccagcactgagccaactagatgtggtgaaccctgtcgcctacttgcaacagcaggtgcttgcatccaacccacttgctctggcaaacgtagctgcataccaacaacaacaacaattgcaacagtttctgccagcgctcagtcaactagccatggtgaaccctgctgcctacttgcaacagctgcttccattcaaccaactgactgtgtcgaactctgctgcgtacctacaacagcgacaacagttacttaatccactagcagtgcctaacccattggtcactgccttcctacagcagcaacaattgctaccatacagccagttctctttgatgaaccctgccttgtcgtggcagcaacccatcgttggaggtgccatcttttagattacatatgagatgtaatcgataatggtgccctcataccggcatgtgtttcctagaaataatcaatatattgattgacattt

SEQ ID NO: 15965 - DNA, 679 bp, Zea mays
  Clone ID: LIB3061-007-B10_FLI
gtttctgtctgctaccagcaccagcctagcaccccaccgcgtctagggttttctgctccaatggccgccgcgagggcagacggggagcgcaggatcggggtggccatcgactactcggagagcgccaagaaggcgctggactgggccatcgacaacctgctccaccacggggacaccctcgtcgtcgtccacgtcctgcaccacggcgcggaggagaccaagcacacgctctgggccaagtccggatccccgctgatcccactctccgagttccgggagcccgaggtgatgcagggctacggcgtgcgccccgacgccgaggtgctcgacgcgatcgacacggcagcgcgccagaagcagctgaaggtggtggcgaagctgtactggggcgacgccagggagaagctctgcgacgccgtcgaggatctcaggatcgattccctcgtcatgggtagtcgcggcctcggcccgatccagaggattctcctgggaagcgtgacaaactacgtgctgtcaaacgcatcgtgcccggtgacagtcgtcaaggggaagtagtggcctgggcagcgtgccagtgatatgaatgaagatgctagcgtgcagtttgtgtgggttatagctaaacactatgttccgtcctgttgctgcatttcaataaagcatgtgtcttctagatttc

SEQ ID NO: 15966 - DNA, 942 bp, Zea mays
  Clone ID: LIB3061-007-C9_FLI
acgaattattcaatgcaagtccagtgcggggggccgagctaccaagtgcagctgggcagaagggacggcatggtgtcgcaggcgtccatggcgagcattctgccgggccccaacgtcgacgtccccaccgccatcgatctgttcgcgcggaagggcctcaacagcttcgagatggtcagcctcatgggcgcgcacacggtgggggtgacgcactgctcggtgatccacgaccggctgttcaacttcaacggcaccgggtcgccggacccggccatggacccgatgtacgtgtggatcctgacgacgtacgcgtgccccaggggccaggccttcgacaacatcgtctacctcgacgacccctccagcatcctgctcgtcgaccggagctactactcccagatcatgaagcgccacggcgtgctgtccgtggaccaggccctcggcgacagcagcgccaccgcgtggatggtcaagttcctcgccaccaccgacttcttcccctccatgttcagctacgcgctcaacaagctcgccgcgctcgacgtcctcaccggcaccgacggcgagatcaggaagagctgccggaggaccaactgatctgacggatcggatcgatctgccgcagttgttagttgattgatacacagagataggttaatcaatcattaccagcagctacctaatagctggctagacgagcagctgctgtgctgtgagacgcaaagggggaaaaaaggacaagagaaagcatatcgaaccaatggatcgaggactgagggagcattaccagtggtagcatttggttttaccgtagtaaatttgagtaaagattcaatttactggtgtagtacaaggatgcattttgtgtgtgtgtgtgtctgtacgctgattcttttgtacgtggccgctataaaaatatacgttccatgcatatacaccact

SEQ ID NO: 15967 - DNA, 754 bp, Zea mays
  Clone ID: LIB3061-007-E12_FLI
ggacggagaagtagagattctggggttcaagatgcctaccgaggaaagagtgaggaaaagaaaggaatccaatagagaatcagccagacgctcgagatacaggaaagccgctcacctgaaagaactggaagaccaggtagcacagctaaaagccgagaattcttgcctgctgaggcgcattgccgctctgaaccagaagtacaacgacgctaacgtcgacaacagggtgctgagagcggacatggagaccctaagagctaaggtgaagatgggagaggactctctgaagcgggtgatagagatgagctcatcagtgccgtcgtccatgcccatctcggcgccgacccccagctccgacgctccagtgccgccgccgcctatccgagacagcatcgtcggctacttctccgccacagccgcagacgacgatgcttcggtcggcaacggtttcttgcgactgcaagctcatcaagagcctgcatccatggtcgtcggtggaactctgagcgccacagagatgaaccgagtagcagcagccacgcattgcgcgggggccatggagctcatccagacggcgatgggatccatgccgccgacctccgcctccgatctacaccgccgccgcaggattatgagctgctgggtccaaatggggccatacacatggacatgtattagacactgcgggtttcgtaatcgctgggaacattttatttgcaggcgtcgctgaataaggctggttgtctctcccttg

SEQ ID NO: 15968 - DNA, 1387 bp, Zea mays
  Clone ID: LIB3061-007-F5_FLI
gctgatacatctttcggtggtgaacaaaaggaagagcaatcaacagaaagtgcaccgcaaaacaaagtagttaatgtgtctgaacaaagctcaacagtgagccggatcagcccggcagctaaattactgatcaaggaacatggactggatacatcatcactgagagcatcaggcccccgtggcacccttctgaaaggggatgttctggcagcattgaagtcaggtatcaattcaagttcaaccaaagaaaagaagtctccagctcaaccttcgtctcagccaactcgagattcccaatctcaagcatcctctatttcacaaaaggatgatacatatgaagatattccgaatagtcagatacgcaaggtcattgccaaaaggttgctcgaatcaaaacagacgactccacatttgtatctatccaaagatgttgtgctggatcccttgctcgctttcaggaatgaactaaaagagctacatggcattaaagtttcagtaaatgacatcatcataaaggctgtggcaattgcgttgcggaacgtccctgaagcaaatgcttactggaacaatgataaggaagaaactcaaaagtgcgattcagttgatatatctattgctgttgctacagagaagggcctgatgaccccaataataaggaatgcggatcaaaagactatatctgcaatatccgcagaggttaagcagctggctgaaaaggcaagagctgggaagcttgcacctaacgaatttcaagggggaactttcagtatctcgaatcttgggatgtaccctgtggaccatttctgtgcaatcattaaccctccacagtctggcattctcgcagtgggtagaggaaacaaggttgttgaacctgttgtggacagcgatggaaccgagaaggctgctgcagttacaaagatgagcctgacactatctgctgaccatcgtgtatttgatgggcaagtaggaggcaagtttttcacggagctggcgctgaatttcagcgacatcaggaggctgctattgtaaatgaaaggaggcaattaccgtgttttgacgtattctttgggagcgaaaaccgctcaggaaaagagaacatttggatgcaacccgtggtctgctgcttgatcggcatcccgtacaaaagtaaccaattttgtaataaatttataataagaatgcactggcaccttcacggttttttaacccgttttccattagttgggaggaggcatgtcctgagaatttagcaggtacggtgccattcaacttcgtggttccgcaacaatgaccacccttagattatgcaatctgagcggttctggatggacgcccattttgttgatgaccttgtgatacatggaagtaataacagaatgcttttgtt

SEQ ID NO: 15969 - DNA, 493 bp, Zea mays
  Clone ID: LIB3061-008-B7_FLI
cacgaggacacgcgacgactgacaaggcgaggggagcagtcggcgggcgatggtcggcggcggcgcacatggcggcaccacctacaaaggctacaccatcccacacaacaagcgctggcacaccgtcgccggcaagggcctgtgcgctgtgatgtggttctgggtcttctacagggctaagcaggatggtgctacgctcttgggtttgcgtcatccttgggatgggcatgatgaccactctcatggtcatggacatgggaatgaggcatcgtgacattaagttgcctactctcggcggacggtgatttgatgctttgcatgtcacaacaactaaagattgagttaataaattctaccacccttcatggtactcatgttgtatgtactcatgttgtatgcaactggtttagcacaaactggtttcgttacgattgtgcttatgtatttgatttgaagcatcggttaatatatgttgtggaaaagaatctggttt

SEQ ID NO: 15970 - DNA, 1160 bp, Zea mays
  Clone ID: LIB3061-008-C9_FLI
tggaactgaacctgaatctggttcacctgaatttttgcatgagatgcgcataaaggcctcagcgaagctaactttgttgcactctatgctaaaaatattacacaaggaaggccaccgtgtccttatattctctcagatgacaaaacttcttgacatccttgaagattatctgactttagaatttggccctaaaacatttgaaagagttgatggctcagtatctgtggcagagcgccaggcggcgattgctcgctttaatcaggataagacacgttttgttttcttgctgtctacacgatcatgtggacttggtattaatttggcaactgcagatactgttatcatatatgattcagatttcaacccacatgctgatatacaggcgatgaacagggcacacagaattggacaatcgaatagactcctggtttacaggcttgtggtacgtgctagtgttgaagagcgtatcttgcaattagccaagaagaaactgatgcttgatcaacttttcgttaacaaatcagaatcacagaaagaagtggaagatatcattcgctggggtacagaagaactctttgggagtagtgacagtgtggatggtaaagatagcaatgaagcctcaggttctgttgctgatgttgaatttaagcatagaagaaaaaccggtggcctaggtgatgtttatgaggacaaatgtattggtggttctaccaaacttgtttgggatgaaaatgctattttgaagctgcttgatagatcaaaccttccatcatcagtggccgaaagcactgatggggatctggacaatgatatgcttggtactgtgaagtcaatagactggaatgatgagctgaatgaccaccctggtaccaatgaggatattgcacctattgataatgatgggagtgagttggcatctgaatcaaagcaaggtgctactaatcgtttagaagaaaatgaatgggataaacttttacgtgtcagatgggagcaatatcaaatagaggaggaggcatctcttggtcgaggtaaacgtttaaggaaggctgtttcttacagagagacatttgcaacacttcctaatgaagcattaagtgagggctctgatgagggagatgaaccaaagagagaatatacagcagctggactggtcttgaagg

SEQ ID NO: 15971 - DNA, 613 bp, Zea mays
  Clone ID: LIB3061-008-E4_FLI
cccaaaggcaaccaaaccatctcgactcgtggggaagtttcgctctcgcccgcgtcgacttcctagggttcgaggaacgtccgtccgtccgtccggggaaggagcaggagggaggcggagatgatcgaggtggtgctcaacgaccgcctggggaagaaggtgcgggtcaagtgcaacgaggacgacaccatcggcgacctcaagaagctggtggcggcgcagacggggacgcgccccgagaagatccgcatccagaagtggtacaacatctacaaggaccacatcaccctcaaggactacgaggtccacgacggcatgggcctcgagctctactacaactgagccgccgcccctctctccctctcgtcaggttggtctgaattctgaagtcatgggtgcaattcgcttcgcggtgatctcttaagctcatcacatatataaaagcaacctcagttggctatgtaagacatggcgtgccaaactatcagtgaccactgccagctttgcaatacgttgttgtatggtcaacctgcaaacttggtgtactgctactcgtactataaataacatagggttttaaccttggttgtgctaatggccatcttttctcatt

SEQ ID NO: 15972 - DNA, 538 bp, Zea mays
  Clone ID: LIB3061-008-G2_FLI
caagttctccgtgtcacgtagcacacgaccaaatggaacagattggtgcatcctcagaagctaagaagaggttgaattttaatgtggatgttataaatctgaggatgccggatcgtgcaagaccaaaaggacggacaataaaaaatatagaagataggattatgaaactaggtgccaaaagaaaaaaagaagaataggagatgccaattgtgtggaatagcagatggacataacagcagaacgtgtctgtctgtggaagagaacagggcaagactagcaaaactggctaatcgaaagagaggacgaccggccggatcaagactaaacaataaaacaactgctccacagtggaatgaaacatcgactgctaaaaaacatcgtattgatgaagaagtagaaaatgaataagccgctgagcatatggaattaggtgaataatttgaagtgtgactaaagggaggtcgatgaagtataaatttgtaatagcacaatgacctgtgttttagttttggaaattaatattttgcatgactgagtt

SEQ ID NO: 15973 - DNA, 867 bp, Zea mays
  Clone ID: LIB3061-010-B9_FLI
tgcccgattcatggctagatgcaagcaaaaatctctggcagataagagacaagctgccttgcccagatgaactgatagccttcgaaaaagttatctgtaacgtctcaaccattttgacagagaagactagcataggtagtgaccagaaggaagttgagggaaaatattgtttgattgcgaaagatgtagtaaagcttagaagatgtggaaacggatggcacatgactgaagatgatgaaagtagctgtgcatgttttgaggatgagcactgtttggtacctgttctgaacccaggcttttcatggattgaggtctcctatgccaggccatactctttgagatgtttacaaaaaggaggaaatttgttatcatcacatactgcaaatagtaactttggacagagtccttgtgaaggatcttttgtttatgtgggtgatctgtcatcagcagcacgttcggttaggttatcccgctaccgacctcgatgggcacttctacttttcattgcagacatcccatatatcttggaaaatggtttaagtagcttgcttcatgcatctgcagcattggctgtaatcaattgcctaccggtgtattttctggatggtgaagcgattctggagactaccttaagctatgtagcttggtttaccccaagactgcaacgcagaattctaaaagtatgcagcgtggtgtggacgggtttattagtcattactttctcaagtatttgttattccacagtgctacattatggcgtatagcaaataacccatgtaattttgtcttgaacaaagagaagatcattttaatggaacatgccaactgtactctgtccattgtaaattataagttgttttgactttt

SEQ ID NO: 15974 - DNA, 1175 bp, Zea mays
  Clone ID: LIB3061-011-E11_FLI
catatcagtggaggaagtaggggaagacatgaacactactgcctttaccagtaagattgatggccaagttttcttgaagcctaacaggccagcacttgttgtgagcagcacaagctggacgccagatgaagatttcagcatacttttggaagcagcactaatgtacgacagacgcgtcgctgcagctttaggtgaagatgattcaatggatgaggggcaactttggattgatatcaagaacgggaagcagtttgtctacccaagattactgttcattattacaggtaaaggacctgataggaagaaatatgaggatcaaataaaaaggttgaagttgagacgtgttgccttgcggacaatgtggcttgcatcagaggactaccctttattgctcgggtcagctgatctaggagtgtcgttgcatacatcttcgtcagggctggacctaccaatgaaggtggttgatatgtttggatgcggattgcctgtttgtgctgcttcattctcctgcattgaggagcttgtaaaagtaaacaaaaatggtcttcttttctcaacatcttcggagcttgctgatgaacttatgatgctctttaaggggtttccagaagaatgcaatgccttgaaatccctcaaagaaggtgccatgaagtcagcatcatcttcgaaatggtcaacagaatgggaaaccaatgcactacctttggtggaccaggtcattggatgagatgtgtgcttacatacatcagatagaattgttgtattgcagagaaccagagatcggtgtactagagagaccagatgtacattaaagggtacggtttgctttcaccaaaaatcaattgctagttgctgccagtgccatgtgcaccacttcagcaaaacttgggcaagtttgtagctacgaagctctttcctttttaggctgggaaacatactctgctgaacacatgtctaagttgtttcaggatgtatactactgtaggccagcactttgtttgataatatggcctgtattggaatacctctaatctgttacgtcagaaggaaaacatagaaaaccatattgttttccctggcttcgaaggccatctgataagatcctatgcagagaggcgtgtaccaaacagaagtgtacaaggaatcaggatctctagcacgatgtctggagaatg

SEQ ID NO: 15975 - DNA, 949 bp, Zea mays
  Clone ID: LIB3061-011-E4_FLI
tattttgagcattcagaaacacaccaagcgaagctacctagcaacgacttaacaacaatggctaccaagatattagccctccttgcgcttcttgccctttttgtgagcgcaacaaatgcgttcattattccacaatgctcacttgctcctagtgccattataccacagttcctccgaccagttacttcaatgggcttcgaacacctagctgtgcaagcctacaggctacaacaagcgcttgcggcgagcgtcttacaacaaccaattaaccaattgcaacaacaatccttggcacatctaaccatacaaaccatcgcaacacaacagcaacaacagttcctaccagcactgagccaactagatgtggtgaaccctgtcgcctacttgcaacagcaggtgcttgcatccaacccacttgctctggcaaacgtagctgcataccaacaacaacaacaattgcaacagtttctgccagcgctcagtcaactagccatggtgaaccctgccgcctacctacaacagcaacaactgctttcatctagccctctcgttgtgggtaatgcacctacatacctgcaacaacaattgctgcaacagattgtaccagctctgactcagctagctgtggcaaaccctgctgcctacttgcaacagctgcttccattcaaccaactgactgtgtcgaactctgctgcgtacctacaacagcgacaacagttacttaatccactagcagtgcctaacccattggtcactgccttcctacagcagcaacaattgctaccatacagccagttctctttgatgaaccctgccttgtcgtggcagcaacccatcgttggaggtgccatcttttagattacatatgagatgtaatcgataatggtgccctcataccggcatgtgtttcctagaaataatcaatatattgattgacatttatctcgat

SEQ ID NO: 15976 - DNA, 568 bp, Zea mays
  Clone ID: LIB3061-011-E9_FLI
cttagttctgtgctagaaccagaagggccaaagtgcatgaatttttcatttgcagacaacatagaggcaaggaaaacgagtcagacagccatatagctgacttgagaaggaattatggacaaggcacattgagacaaggatgccattacattgcaattaacatattcagtttgattattgtcctactgatgttttggtgtcttaaatggaccctgttagaagttcaaaaaaattccaactgcgaataactggcccttcggggccaggaagatatgtttgtggatgaacactcgcgaggccacatgactgttacttttgtttcttccccttttttttgtagaaaaaggtcaaggctatctaaatgttgtccggcaattgttggagttgatggaggttctgattcgtttggtcaatctggccagtcgatcgtgtactgcaaacccatttgggtactgtaaatgttatgttgataatgctacctcagttgctgtacaagttgagttggcggtatttagccaagcgtttccaggaaagcttcaataatgataaatattgttaccgcggtttc

SEQ ID NO: 15977 - DNA, 1061 bp, Zea mays
  Clone ID: LIB3061-013-A5_FLI
ccgcagcaacgaacacgaaccttggcagaacgaagctgaagtagttcgttgtgaacccagtatggcaaacgcgccgaggatcctggccctcggcctgctgctagcgctcctgtgcgctgccgccggcccggccgccgcgcagaactgcggctgccagcctaacttctgctgcagcaagttcggctactgcggcacgaccgacgactactgcggcgacgggtgccagtcgggcccgtgccgctcgggcggcggcggcggcggcggcggaggcggaggcagtggcggtgcgaacgtggctaacgtggtcagcgacgcgttcttcaacggcatcaagaaccaggccgggagcgggtgcgagggcaagaacttctacacccggagcgcgttcctgagcgccgtcaacaagtacccgggcttcgcccatggcgggacggaggtggagggcaagcgcgagatcgccgccttcttcgcgcacgtcacgcacgagaccggacatttctgctacatcagcgagatcaacaagagcaacgcctactgcgacgcaagcaacaggcagtggccgtgcgcggcggggcagaagtactacgggcgcggcccgctgcagatctcgtggaactacaactacgggcccgccgggagggacatcggcttcaacgggctcgccgaccccaacagggtggcgcaggacgccgtgatcgcgttcaagacggcgctctggttctggatgaacaacgtgcaccgcctgatgccgcagggcttcggcgccaccatcagggccatcaacggcgccctcgagtgcaacgggaacaaccccgcccagatgaacgcgcgcgtcggctactacaagcagtactgccagcagctccgcgtcgacccagggcccaacctcacttgctaggccagcagctcctgctagctcgtccacaataaatgctcggcgtcgcaccctcgcgaaaccaagagtttactactgactagtacgagctagctagcatgcagtaataataatcatcgtaataataataataaaacgacggggctgagccactttgttcgacctg

SEQ ID NO: 15978 - DNA, 461 bp, Zea mays
  Clone ID: LIB3061-013-G6_FLI
gttcgatgcaccgctactccgacaaacacgactgccagttcgactatcgaactgcagctagggacgctatcgccaaggccaatccagtggtgaaggcggagaagcttgacaagatctgaggcgggggcattgggtaacgaaaaatggttgcgatctgcaagaattcagcatgtctctttgctgctttatcattgaacttcccattcttgtcttgctgtcacgtcccctggggttcaatactatgatgcgcacagcatcctggcagctgcaagaattcatccccagtcgagtcacgaaaatggtttgcgtgttgactatgtcgtgtaagcttattcagttattcttggtggtttgggtcggtatcgtgtcattccccgtttaggtagctctgtaatctactattctcaatttctcatgtgtgttgccttccaatcagtaatagtaatcagcaattgtctgcc

SEQ ID NO: 15979 - DNA, 1590 bp, Zea mays
  Clone ID: LIB3061-014-A1_FLI
gccgtctgccttctgcgcctccatttcggcctctgtccctcgcaagttcaatctcacctccaaccatgggtaaagagaagtcccacatcaacattgtggttattggtcatgtcgactctggcaagtcgaccaccacaggacaccttatctacaagcttggaggcattgacaagcgtgtgatcgagaggttcgagaaggaggctgctgaaatgaacaagcggtccttcaagtacgcgtgggtgctcgacaagctcaaggctgagcgtgagagaggtatcaccattgatatcgctctgtggaagtttgagaccaccaagtactactgcacggtcattgatgcccctggacaccgtgacttcatcaagaacatgatcactggtacctcccaggctgactgtgctgtccttatcattgactccaccactggtggttttgaggctggtatctccaaggatggccagacccgtgaacatgctctccttgcgttcacccttggagtgaagcagatgatttgctgctgcaacaagatggatgcaaccactcccaaatactccaaggcacgttatgaagagattgtgaaggaagtctcatcctacctcaagaaagttgggtacaaccctgataagattgcctttgttcccatttctggttttgagggcgacaacatgattgagaggtccaccaaccttgactggtacaaaggcccaaccctgcttgaggctcttgaccagatcaccgagcccaagaggccttcggacaagcccctgcgtctgcccctccaggatgtgtacaagattggtggtattggaactgtaccggttggtcgtgtggagactggtgtcatcaagcctggtatggtagtcacctttggtccaaccggcctgactaccgaggtgaagtctgttgagatgcaccacgaggcacttcaggaggctcttccgggtgacaatgttggcttcaacgtgaagaatgttgctgtcaaggatctgaagcgtgggtttgtggcctccaactccaaggatgaccctgccaaggaggctgccagcttcacctcccaggtcatcatcatgaaccaccctgggcagattggcaacggctatgcccctgtgctggactgccacacctcccacatcgctgtcaagtttgctgagctcattaccaagatcgacaggcggtctggcaaggagcttgagaaggagccaaagttcctgaagaacggtgatgctggtatggtgaagatgatacccaccaagcccatggtggtggagacattctcagcgtatcctccccttggtaggtttgctgtccgtgacatgaggcagacggttgctgttggagttatcaagagtgtggagaagaaggacccaaccggcgccaaggtgaccaaggctgctgccaagaagaaatgatgcgatcctgcgcctgctttagcaatacctagttttcatcattacaagttttgtttgtggtcgttgctgttattgtgtgaactgttgagctctgttagcctgtgcacttttatctatttatttggtaccttcttgctatttcaccttctgcaatacaagaatgctgtaagagctatatgtt

SEQ ID NO: 15980 - DNA, 394 bp, Zea mays
  Clone ID: LIB3061-014-A11_FLI
agaagcacggcacctgcgcagccgacgtcttcgacgagcacggctacttccaggccgcgctgcgcctccgcgaccagctgggagtcctcggcgcgctcacctccgccggcgtcaagcccgacggcggctactacacgctgagccagatcaagggcgccatccgccagggcaccggcttcgagccctacgtggagtgcaaccgcgacgaggccggcaacagccagctctaccagctctacttctgcgtcgacgccgccggcgacagcttcgtcgactgccccgtcctccccagcggcaggcccttgcattctatgcaagaggataatggaatgttcattccccattcttcatttttttttgcaaataaaaggagggcgatcggtgttccatattt

SEQ ID NO: 15981 - DNA, 1717 bp, Zea mays
  Clone ID: LIB3061-014-C4_FLI
cttttatggccatccctatgaagccctctccgggttcctgatatagatgtttccttgttctgaacatgaaaagttctcaggtactccgccgttgatgaactgcctccacacctgcagcgacaagaagacgctgaagaagtggtttttcatcgacaagacagtaggctaaatccagtcccagagaacaaattgaagcaccactccccagtaccgcacagcagcacagctcttctcttcaccgatcccgatggatatgggcagcggctcgtcacctgtcatcaccgatccgatatcgataagcccaccgctgctgggaggcttgacgtcgaacctgatgccgttctcggtcatgtccggaggctgctcctccagtcctagcatgagcgccagcagcaggcgtaaaatcgaggaggtccttgtcaatggcctgctagacgcgatgaaatcgtcgtcgcctcgcaagaagcacaacctcgccttcggacaggataattcgcccgacgaagatcctgcttacactgcatggctgtcaaaatgcccttctgcgctggcctccttcaagcagatagtagccaacgcacagggcaggaggatcgctgtgttcttggattacgacggcaccctgtcgccgatcgtcgacgatcccgacaaagcgttcatgtcccctgtgatgagagctgctgttagaaatgtcgcgaagtacttccctaccgcgattgtcagcggaaggtcccgtaagaaggtgtttgaatttgtaaaactgacggaactgtactacgctggtagtcacgggatggacatagtgacatctgcagcagcacatgctactgaaaagtgcaaagaagccaatctcttccaacctgcttgcgagtttctccctatgattgatgaggtttccaagtgcctcgtggaggtcgcgagttcaattgaaggtgcaagggtggagaacaacaagttctgtgtatctgtacattaccgcaacgtagcagagaaggactggaaagtggtcgcagggctcgtgaaacaagtcttggaggccttccctcgtctcaaagtaaccaacgggcgaatggtaggagcctagactgttctactgcgactgccattggtcttgatacttgctccaagactcaacgaaaaaaaaaatcttttgctacgctgcaggttttagaggttcgcccggtgatcgactgggacaagggaaaggctgtcgagttcctgcttcggtcgctcggcctaagcgactccgaagatgtggttccaatctacatcggagacgatcgaacagacgaagacgccttcaaggtactgcgagagcgaagctgtggatacggaatcctagtctcgcaggtgcccaaggacactgaagccttctactcgctgagagacccgtctgaagtgatggggttcctcaattccttggtgagatggaagaagcacccgctgtgacggaactgaaaacacgacgactgattcagaagccgtaaagcgactgtacttcgtgcggcggcaattttgtagagtttttggctcaccgggtggctcattctttcatgcgtttttattttttatttttttaactgtcccagtccttcgtcactgagaaataacaagtggttgtcccacaccctcttgcaactgtaatctgtaagcaagaggccctccctgttaggtctatatatattgaataaaaccgggacgcttttgccttgccctg

SEQ ID NO: 15982 - DNA, 714 bp, Zea mays
  Clone ID: LIB3061-014-H8_FLI
cgccgccaacatctccggcggccacgtcaacccggccgtcaccttcggcgcgctgatcgccggccggatctgcctcgtccgctccctcatctactgggccgcgcagttgctcggcgccgtcgccgccgcgctcgtgctcaggctcgccaccggagggatgcatctgccggagtacgcgctggccgggggcgtgagcggatggaacgcggcggtgctggaggcggccatggcgttcgggctcatgtacgcctactttgcgacggtgatggacaaagcgcggagggtccgcgccggcgccggagcgctggcggcgccgctcgccgtggggctcctggcgggggccaacgtgctggcctgcggcgcgctggagggcgccgtgatgaatccggcgcgcgcgttcgggcccgccgtcgtgggctcccgtcgctggagacaccaatgggtgtactgggtggggcccatggtcggcgccggcctctccggcatcgtctacgagcacctcgtcgccggcccggccgccgaggaggaggaggagcccgcgccgagctgcggcgaccgccgtcgtgcgtagaggactacatgcatgcaggagcagcaggacgtcgtcgtcgtccccgctcctcggaatcttctgaataaaaaaacagcttgcatgcgtgctcaattgttgtgtgtcgtggtcgatcatgagtagaattaatgtttcatgcatgc

SEQ ID NO: 15983 - DNA, 1063 bp, Zea mays
  Clone ID: LIB3061-015-E4_FLI
accaacacacgcgcccgtgtcctcctcagcgtgccgcgcgggattctcctctagcggtgtatccttccccaattttcgctcggcagcggcttcggcccctgggtggcggcgcagggagccgtacccggcagtctccgtagtgtcgagctccccgcagtctgtggcaggagctataaccgtcgacaccgaggttgacacattgctagacagtgtgaagtgggacagcaaagggttggctgttgccattgcacaaaatgtggatactggagccattcttatgcagggttttgctaataaagaagcccttgcaaaaactatatcaaccaggaaagccacattctttagccgttcacggtcttccttgtggacgaaaggggagacatccatgaacttcattaatgtgcatgacattttcctagactgtgaccatgactctataatataccttggaaagccagatggacctacctgccatacaggagcagaaacgtgttattatacttcagtttatgatgctctacaaagttcaaagcccaatgaaggcaggcaggttatgacaaccctatactcacttgaagatacaattagtagacgccacgaggagaaagttactgatggaggtggcaagccatcatggacgaaaaagctactccttgataaccagctactttgctcgaaaatacgtgaagaagctggtgagctaattcaaacgctgcttgagaacgaggaccaatctcgtgcagcttcggagatggctgatctgctgtaccacgctatggtgctgctcagagtcaaggatgtaaagatggaacaagtccttgaggtcctgaggaagagattttcgcagtctggtatcgaggagaaggccagtcgcaataaatcttagcgtgattggttaataatgccttgatggtggatgactctgatttgctatcggtgcggaatgtgcactattgaagaattttgtgtttgatggatcagttgtgtttttgttttctccgacaagacatctatgaaatatgtggcaggtgtcaataaagttatctcatacagcagaccgttt

SEQ ID NO: 15984 - DNA, 1409 bp, Zea mays
  Clone ID: LIB3061-016-H2_FLI
caaaagttgttctttgacctgacgaatgcggaacgctgcatctgactctaatggaatgcgtatgtgatgcaggtggagtcggaggacgaggcggaggcggcgtgcgcggtcgtgctgacgccgccgctgtcgctggagggcggccttgcggcggagctccgcccggccaatctcgcccagcgggtgctcagcctcttcctcaacgtccgcccgggctctgacctctcccacttccagctgccggcgacgttcaacctgcccaagtcgcagctgcagctgtacggcgagggcgtgtactgcgccggcgaggacctgctggggcggtgcgcgcgggggcgcgacagcctggagcgcctggcgtgcgtggtggcgtggagcatctccacgacgcggccccccatcttcggcttcgcgccctacaacccggtgctaggggagacgcaccacgtctccaccacctccggctgcggcggcggcctcaacgtgctcctggagcaggtctcgcaccggccgcccgtgacagcgctgcacgccacggacgcccgcggggaggtgcggctggtgtggtgccagagccccgcgccgcggttccacggcgccagcgtggaggccgcggtgcgcggcgcgcgggagctccgcctgctccggcacgccgagacgtacgttatcgggtgccccggcctgctgatccgcctcttcccgtcgcccgcctgcgagtggtccggcgacgtccgcgtcgtctgcgccgagtccgggctcgaggcccagctcagctactgccggacccgccgctccttcctcggcttcggcggcggcgacgcccgctgcgtcaggggcaggatcttccgctcggctgagcccggagacaccctgtgcgagatcgacgggttctgggaccgccaggtcacgcgcagggacctcgccaccggcgaggtctccgtgctctacgacgcgcagcgcgccatcggtgacctcgccacgcccgtggtgcaagaccgaaagggcgtgtcggcctcggagtcggccgtggtctggggcgaggtgagcaacgcgatcctgaagaaggactgggagacagcccagcaggcgaagcggcgggtggaggacacggcgaggaggttcgccaaggagaggaacgacagaggggaggtgtggacgcccaagcacttctcgctgtcgcagaacaagagcggcgactgggagtgctggccgctggaggactccgtgccgccggctcctattgtcgtcccctcctcctcctcatcatcatgaaagatctatgaatccatagtacacacatacggtacagaagtgagagaaacaatgttcatggaacaaacgatgaacagcctgttttggtcgtcgtaatctatacgtaaacggatccagtctgtatctgtattctgtac

SEQ ID NO: 15985 - DNA, 969 bp, Zea mays
  Clone ID: LIB3061-017-B10_FLI
ctcaaagatggtaggcaccttcctgctgatatggtagtagttggtattggcatccgtgcaaacactagcctttttgaaggtcaactgatgatgtcaacagagaatggtgggataaaggtaaatggacagctgcagacaagcgacagctctgtgtatgccgttggcgatgtggccgcgttccccatcaagctttttgacgatgatatccgacggctcgagcatgtggactcagctcgtagaactggtagacatgctgttgcctccatcttggatccttcaaagacgagggacatcgattacctgccgttcttctactccagagtgttcacgttgtcctggcaattctatggggataatgtcggggaagtggtccactttggagacttcacaagcagcagtccgaggttcggtgcatattgggtcaacaaagggcggatcgcgggtgcgtttcttgaaggcggaagtcgggaagagtacgaggccatatcgatcgctgttcggcgggaagctgtggtcacagacatgggtgaactcgagaaacaaggcctggcactcgccattcaggagagccagaaggaggtgcctgacagtgggcttgctgttgtcggaaaacctacttatgcgtggcatgccacagccggtgtcattgcagctgtgtcgattgctgcaattgggtattggtatggcaggaagcgccgcaggtggtgaggatttgcattggggtgattccctttggtctgccgggccgaactgctgctggtggaatatctgggacgagtgctattggctgttaatccaatcatagttgtatagcttgtatgagagtatagtctgtcgcaaacgtatactgaaacacagatgcctcgtgtattatctagtgaagaaaccagtggctgcctctaactcctcaggggttctcttgttgtaaaattgcaactcttttcttaatgagatccgcaattttgtggc

SEQ ID NO: 15986 - DNA, 1195 bp, Zea mays
  Clone ID: LIB3061-017-C2_FLI
gaaccctagctttgtctccggaggtggcatggccggggggcccggctgggagagggagaaggcggccatcgcggcgcacccgctgtacgagcgtcttctcgaggcgcacgtcgcctgcctccgcgtcgccacccccgtcgaccagctcccgcgcatcgacgcgcagatagcggcgaggcccccgcccatggaggccgcggctgcggctgctgcggcgggcggagcacactcgggaggcgaggagctcgacctcttcatgacacattatgtgttgctcctctgttcattcaaggaacaactccagcagcatgtgcgtgttcatgcaatggaagcagtcatggcttgttgggagctcgaacaaactttacaaagccttacaggtgcatctcctggtgagggcactggggcaactatgtctgacgatgaagacaatcaggtggacagtgagagcaacatgtttgatggaaatgaggggtcagatggaatgggatttggcccattaatgttgactgagggtgagagatccttagttgagcgcgtccggcaggagctaaagcatgagcttaagcaggggtacagagacaaacttgtggatattcgggaagagatattgcggaagcgaagagctgggaaactccctggcgacactgcttctaccttaaaagcatggtggcaggctcattctaagtggccgtacccaaccgaggaagacaaggctcgactggtgcaggaaacagggctacaactgaagcagatcaataactggtttatcaaccagcgtaagcggaactggcacaacaattcggcgtcatcctcgtcggacaaaagcaagagaaaaaggaacactgcaggtgatgggaacgcagaaccagcctggtagggcatggtcggggaacgaagtttatgtaaataatgcttctactgtgaagagttccatcatatttgttgctccagaaaagaccctcagaccggtgtttcctgaacccatattcatacaaagacatcagacgatgaataatgttgcgagtagtcaaataaaataaataacttgtatagtgaataactagaaactagcattcatcgttttggtattgtatagcgctagagtgtaattgtttggtcggactgtcttgtataatggtgtaaggttcaaatgcattttgacctagcattcgatattgtattttgtgatgtt

SEQ ID NO: 15987 - DNA, 689 bp, Zea mays
  Clone ID: LIB3061-018-D2_FLI
gcccgaaccagcgctcgggatcaacttcgccagggacggcatgaggcgtcgcgactggctctcgctcgtcgccgtacactctgacgcttggctcgtctccgtcgcattcttcttcgccgccaaactcaacggcaacgacaggaagcgattattcaacatgattaatgatcatccatctgtgtatgaaataatggctgaccggaagggaagggagaataatcctggtgttgataacagcagcaaatccaggcactcaacgaagcgatcaaatgatggaaagataaagaactcaagagtggcagttggtgaatgtaggtatgagaatgatgaagaccacagcgaaaccctttgtggttcttgcagtggtctctacaactcaagtgagttctggattggatgcgacatttgtgagcggtggttccacggcaaatgtgtgaggataaccccagcaaaagcagaacagataaagcactacaagtgccctgattgcagctacaaaaagagcaggcaataaaatcttggagctgctggcctcctattactgactcagctgatcaaccaaacaatacttttcaatttggccgtagatgttaactaccctaggcatttctttgttgtggtacatgctggaaaaagacatacaggatagttgatcttacagtctggtcaattgcttttgtgcttgtttt

SEQ ID NO: 15988 - DNA, 1039 bp, Zea mays
  Clone ID: LIB3061-020-A3_FLI
cctcctcgcctttctcgcagcttccgccactctactcgtcgccttacgcggcttcgacggcgtcgggcgtggctgggccgatgggcctgaaccagctcggcccggcccagatccagcagatccaggcccagctcatgttccagcaccagcagcagaggggcctgcacgcggcgttcctgggcccgcgggcgcagccgatgaagcagtccgggtcgccgccggcgcagtcgaagctgtaccgcggcgtgcgccagcgccactggggcaagtgggtggcggagatccgcctccccaagaaccgcacgcggctgtggctcggcaccttcgacaccgccgagggcgcggcgctggcctacgacgaggcggccttccgcctccgcggcgacacggcgcgcctcaacttcccgtccctccgccgcggcggcggcgcgcgcctcgccggcccgctccacgcctccgtggacgccaagctcaccgccatctgccagtccctggcggggtccaagaacagctcgtccagcgacgagtcggccgcgtccctgccggactcccccaagtgctcagcgtcgacggagggggatgaggactcggcctccgccggctcccctccttccccgacgcaggcgccgcccgtgccggagatggcgaagctggacttcaccgaggcgccgtgggacgaaacggaggccttccacctgcgcaagtacccgtcctgggagatcgactgggattccatcctctcatgaacgatcaactacaactagtattttagtagtagtagcagcagcagcagcaaggttcagtcagtgatagctctgtgtaattttcgatttggggtttgcagctgcggtggatcgatggcattttagacatcggccatggcggctgtgttgtgatgcagaagtaaacgtacgtgctaatctcctggttgagctgccggttgttttttctcacggcacggccagtcgagaaagtcagtgtaatcccctgtcatgatctctctgttgcaacttaattaactcttctggcgtatgtatgt

SEQ ID NO: 15989 - DNA, 1027 bp, Zea mays
  Clone ID: LIB3061-020-C12_FLI
cctgacgcgcggaactggcggtggcgagcgcagctaatggccatccatgccccgctccgcctctgcctccgcctccatgcgaggaaggtagccagacgcgtataaagggcagccagaaattcggatccacctgtatgcgtctccgttcgttcacgccacaggcaaggcacagaggcttgtgagggagagcgaggagcggaggaggacatggtgcacgggacgctggaggtgctgctcgttggggccaagggcctcgagaacaccgattacctctgtaacatggatccgtatgcaattctcaagtgccgttcacaggagcagaagagcagtattgcaactggaaaaggaactacccctgagtggaatgaaaactttatcttcactgtgtctgaccggacaacagacttggtaatcaagcttatggacagtgatacaggcacagcagatgactttgttggtgaagcaacgattccattggaagcagtgtatactgaaaggagcattccaccaacactctataatgttgtgaaaggtgaaaaatactgcggggaaatcaaagttggtctcacattcactcctgaggatactcgccagcggggtctcccagaggacttcggtggatggaagcaatcatcttagagctagatgctttaagggtgcaccagagcacagcgacaattcatgcgcttggagccttcagccgtcgagtacttcatgctaatgcagaattcattcgatttggcttcttttgattgtttcagaagaagtgttattagtgagtttcaacaaaaaatagctccatattgctctatatcccgtattggaaattctaaggccgtttgtgattactgcttacaacaagaagttttgtttctagttcccactacgctttttttttttgaagttttgagtggaacatctttgtgttcaacgttttgggaggtgtaggccagtaatactgcaagaaaggaataatttcccttgcagcaatattgttttttgtgatccttgaacaaaattgttccct

SEQ ID NO: 15990 - DNA, 654 bp, Zea mays
  Clone ID: LIB3061-020-F2_FLI
ggcgcattcgtgcagcctgcgttctacgaagcgttcggcctgactgtgatcgagtccatgacgtgcggtctgccaacgatcgcgacctgccatggtggccctgctgagatcatcgtggacggggtatctggcctgcacattgacccttaccacagcgacaaggccgcggatatcctggtcaacttctttgacaaatgcaaggcagatccgagctactgggacaagatctcacagggcggcctgcagagaatttatgagaagtacacctggaagctctactccgagaggctgatgaccctgaccggcgtgtacgggttctggaagtacgtgagcaacctggagaggcgcgagacccgccgctacatcgagatgttctacgccctgaagtaccgtagcctggcaagccaggttccgctgtccttcgattagtacggggaaagaagaagaagaagaagcccaggccggagaaccatcgcctgcatttcgatctgtttcaccgcaattcgcattgttagtcgtgtattggagttatgtgtacttggtttccaagaactttggttccttgtttttttttctttcttgtttgagcgtttttgggcagcgctggcctggttcctagtatggtgagaattggctgcaccttttgcttcgaat

SEQ ID NO: 15991 - DNA, 621 bp, Zea mays
  Clone ID: LIB3061-021-C2_FLI
acaggatccaacaggcaatcgcaacaggcatcttaccattatcacccttgttcctccaacaaccgtcagccctattacagcagttacctttggtccatttggtggcacaaaacatcagggcacaacaactacaacaacttgtgctagcaaaccttgctgcatactctcagcaacatcagtttcttccattcaaccaactggctgcattgaactctgctgcttatttgcaacaacaattaccattcagccagctagttgctgcctacccccagcaatttcttccattcaaccaactagcagcattgaactctgctgcttatttacagcagcaacaactactaccattcagccagctagctgatgtgagccctgctgccttcttgacacaacaacagttgttgccgttctacctgcacgctatgcctaacgctggcaccctcttacaactgcaacaattgctgccattcaaccaacttgctttgacaaactcaacagtgttctaccaacaacccatcattggtggtgccctcttttagattgcttatgagttatagttcaataatgaagttttttggatgatgtttgtggcgtcccagaaataagaaagtacatttctagatt

SEQ ID NO: 15992 - DNA, 1329 bp, Zea mays
  Clone ID: LIB3061-021-D3_FLI
attagcggctacacaaatgcctgaagagccagctggatggttccagggtacagcagactctatcagaaaatttatctgggtactcgaggattattacagtcacaaatccattgacaacattgtaatcttgagtggcgatcagctttatcggatgaattacatggaacttgtgcagaaacatgtcgaggacgatgctgatatcactatatcatgtgctcctgttgatgagagccgagcttctaaaaatgggctagtgaagattgatcatactggacgtgtacttcaattctttgaaaaaccaaagggtgctgatttgaattctatgagagttgagaccaacttcctgagctatgctatagatgatgcacagaaatatccataccttgcatcaatgggcatttatgtcttcaagaaagatgcacttttagaccttctcaagtcaaaatatactcaattacatgactttggatctgaaatcctcccaagagctgtactagatcatagtgtgcaggcatgcatttttacgggctattgggaggatgttggaacaatcaaatcattctttgatgcaaacttggccctcactgagcagccttccaagtttgatttttacgatccaaaaacacctttcttcactgcaccccgatgcttgcctccgacgcaattggacaagtgcaagatgaaatatgcatttatctcagatggttgcttactgagagaatgcaacatcgagcattctgtgattggagtctgctcacgtgtcagctctggatgtgaactcaaggactccgtgatgatgggagcggacatctatgaaactgaagaagaagcttcaaagctactgttagctgggaaggtcccagttggaataggaaggaacacaaagataaggaactgtatcattgacatgaatgctaggattgggaagaacgtggtgatcacaaacagtaagggcatccaagaggctgatcacccggaagaagggtactacataaggtctggaatcgtggtgatcctgaagaatgcaaccatcaacgatgggtctgtcatatagatcggctgcgtttgcgtctacaaaacaagaacctacaatggtattgcatcgatggatcgtgtaaccttggtatggtaagagccgcttgacaggaagtcgagcgttcgggcgcaagatgcgtagtctggcatgctgttccttgaccatttgtgctgctagtatgtactgttataagctgccctagaagttgcagcaaacctttttatgaacctttgtatttccattacctgctttggatcaactatatctgtcatcctatatattactaaattttt

SEQ ID NO: 15993 - DNA, 668 bp, Zea mays
  Clone ID: LIB3061-021-H7_FLI
tccaatccagatcagcaaagcggcagtgcgtagagaggatcgtcgaacagaacagcatgaagatggtcatcgttctcgtcgtgtgcctggctctgtcagctgccagcgcctctgcaatgcagatgccctgcccctgcgcggggctgcagggcttgtacggcgctggcgccggcctgacgacgatgatgggcgccggcgggctgtacccctacgcggagtacctgaggcagccgcagtgcagcccgctggcggcggcgccctactacgccgggtgtgggcagacgagcgccatgtaccagccgctccggcaacagtgctgccagcagcagatgaggatgatggacgtgcagtccgtcgcgcagcagctgcagatgatgatgcagcttgagcgtgccgctgccgccagcagcagcctgtacgagccagctctgatgcagcagcagcagcagctgctggcagcccagggtctcaaccccatggccatgatgatggcgcagaacatgccggccatgggtggactctaccagtaccagtaccagctgcccagctaccgcaccaacccctgtggcgtctccgctgccattccgccctactactgattcatgatatttgggaaatctcctctatccatccctctctatctatatatgtaataatgcagtaagacg

SEQ ID NO: 15994 - DNA, 866 bp, Zea mays
  Clone ID: LIB3061-022-B5_FLI
gagaccaacaagcaacatagaaagtggaatccagtagcaacaatagagcaacaatggcgaccaagatactttccctccttatgctccttgctctttctgcatgtgttgctaacgcgacaattttccctcaatgctcacaagctcctatagcttcccttcttcccccataccttccatcaatgatagcttcagtatgtgaaaacccagctcttcaaccctataggctccaacaagcaatcgcagcaagcaacatacctttatcacccttgtttcaacaatcgccagccctatctttggtgcagtcattggtacaaaccatcaaggcacagcagctgcagcaactcgtgctacctgtgatcaaccaagtagctctggcaaacctttctccctactatcagcaacaacaatttcttccattcaaccaactatctacactgaaccctgctgcttatttgcagcaacaactattaccattcagccagctagctactgcctactctcatcaacaacaacttcttccatttaaccaattggccgcactgaacctcgctgcttatttgcagcagcaaatattactaccatttagccagctagctgcagcaagccgtgcttccttcttgacacagcaacagttgctgcctttctaccagcagtttgcggctaaccccgcaaccctcttacaactacaacaattgttgccctttgtccaacttgctttgacaaacccagcagcctcctaccaacaacacatcattggtggtgccctcttttagattgcttattagttgtaattcaataataaagttttttggatgatgtatgtggccaaccagaaataagaagttacatttccagattctaatgtg

SEQ ID NO: 15995 - DNA, 916 bp, Zea mays
  Clone ID: LIB3061-022-E7_FLI
gcgaagcgcactagcaacgacctaacaccaatggctaccaagatattagccctccttgcgcttcttgcccttttagtgagcgcaacaaatgcgttcattattccacagtgctcacttgctcctagtgccattattccacagttcctcccaccagttacttcaatgggcttcgaacatccagccgtgcaagcctacaggctacaactagcgcttgcggcgagcgccttacaacaaccaattgcccaattgcaacaacaatccttggcacatctaaccctacaaaccattgcaacgcaacaacaacaacaacaacagtttctgccatcactgagccacctagccgtggtgaaccctgtcacctacttgcaacagcagctgcttgcatccaacccacttgctctggcgaacgtagctgcataccagcaacaacaacagctgcaacagtttatgccagtgctcagtcaactagccatggtgaaccctgccgtctacctacaactactttcatctagcccgctcgcggtgggcaatgcacctacgtacctacaacaacagttgctgcaacaaattgtaccagctctgactcagctagctgtggcaaaccctgctgcctacttacaacagttgcttccattcaaccaactggctgtgtcaaactctgctgcgtacctacaacagcgacaacagttacttaatccattggcagtggctaacccattggtcgctaccttcctgcagcagcaacaacaattgctgccatacaaccagttctctttgatgaaccctgccttgcagcaacccatcgttggaggtgccatcttttagattacatatgagatgtactcgacaatggtgccctcataccgacatgtgtttcctagaaataatcaatatattgattgagatttatctcgat

SEQ ID NO: 15996 - DNA, 398 bp, Zea mays
  Clone ID: LIB3061-024-G12_FLI
cacggggtgaccttgaccgtgacgcaggggaagcaggtgcagaagtgggacaggatctccaaggcggccttcgagtgggctgaccaccccaccgctgtgatccccgacatgcagaagcttggcatcaaggataagaacgaagcagcgaggatcgttgcgctcgttaagaatcaaactactgccgctgccgctactgctgccagtgctgacaacgacgacgacgaggcctgatcaatgcaacgacacatcatgatctgctgctgcacttaattactatgttcgtatacaaataaatacacccggcgtacgcggtgttccttatatggtctaaaatgtagccagtaaattttaaactactttatttcttgaggctctataaacaatagatttaaagtgtt

SEQ ID NO: 15997 - DNA, 657 bp, Zea mays
  Clone ID: LIB3061-025-A7_FLI
tcccgtcgtggcgtctcaccgtttccaggatacgaacatgaggtcggccaccctgcttacgatctgcaccttgtccgcgctgctgctggtggcgcgcggctcggagaagccatcggccgcgccgccgccggtggtggccgtgggcgtggcggcagccagcgacctcatccgctccggcggtcaccgctacctggacgtcagaacagaggaggaattcaggagtgggcatgtggaggattcactcaacgtgccctatcttttcttcacttcacaaggaagggagaagaaccccaagttcatcgcacaggtcgcagcgggtttcgacaaagaggacaacatagttgtgggctgcaaaagcggagtgaggtctgaattagcatgtgctgatctcatggcagctggatttagaaatgtgaagaacatcgaaggtggttataccgcatgggtggaaagtggccttgccgtgaagaaatctcaagcacaagatgaactatgatgtgccctatcatgttggttcttccttgctttgacgacaaccttcgtatagaaaataataggtttaaatgagcaaaaatatacttccttggttatttaaatatatgacacagttgattttcgaaccgctcgtcttgtttaaaaaatcgtcagttttcattt

SEQ ID NO: 15998 - DNA, 862 bp, Zea mays
  Clone ID: LIB3061-025-E5_FLI
ttgagaccaacaagcaacatagaaagtggaatccagtagcaacaatagagcaacaatggcgaccaagatactttccctccttatgctccttgctctttctgcatgtgttgctaacgcgacaattttccctcaatgctcacaagctcctatagcttcccttcttcccccataccttccatcaatgatagcttcagtatgtgaaaacccagctcttcaaccctataggctccaacaagcaatcgcagcaagcaacatacctttatcacccttgtttcaacaatcgccagccctatctttggtgcagtcattggtacaaaccatcaaggcacagcagctgcagcaactcgtgctacctgtgatcaaccaagtagctctggcaaacctttctccctactatcagcaacaacaatttcttccattcaaccaactatctacactgaaccctgctgcttatttgcagcaacaactattaccattcagccagctagctactgcctactctcatcaacaacaacttcttccatttaaccaattggccgcactgaacctcgctgcttatttgcagcagcaaatattactaccatttagccagctagctgcagcaagccgtgcttccttcttgacacagcaacagttgctgcctttctaccagcagtttgcggctaaccccgcaaccctcttacaactacaacaattgttgccctttgtccaacttgctttgacaaacccagcagcctcctaccaacaacacatcattggtggtgccctcttttagattgcttattagttgtaattcaataataaagttttttggatgatgtatgtggccaaccagaaataagaagttacatttccagattct

SEQ ID NO: 15999 - DNA, 960 bp, Zea mays
  Clone ID: LIB3061-025-G3_FLI
caaggctagggaaagtgaagcttgctgatttcggactcgctgcacgggtcactaatggtcagaaaatgtttggtgttgctgggagccctgcatatgtggcacctgaagttctttctggaagctattcggagaaggttgatatatggggtgccggtgtgctactacatgtactactacatggttcacttccatttcaagggggctctctggacgcggttttcgagtccataaagacacttgaacttgatttcagcagcaccccatgggaatcaatatcagttcttggacgggatcttattgggcgaatgctaaatcgagatgtctcttgtagaatgactgctgatgaagttcttagtcacccatgggtcgtgttttacacagaatgccccctgaaggtggtagctgctaatttgtgtctccctaacaaggttatagcacccaaaattccatggggcagacacaaatcagaatgtgactcattgtcagacgcaagccaaaggtcagaggatcaggatgagtgtggcatagttgacgcattggcggcagcaataacacgtgttagaatatccgagccaaagagaagtcggctttgtagccccgcaattaccattcagcaggaatgctcgtcaaacttgaagaataatctttgcacggctttctgacctgacctagtttatagcacctgatcggagtggcgtctattcttctcgctgagaaggtcgttctgatttaggtgttgtagaggcgaggataataactcagcttttccagccagcaacaaacgtctggtatttagtgtttctttcagttttcctgatgaaccccgcagttgtagctgctgtaaaattctgtaaatagcatggtcctttctcaagctgtgcctgggttgctaatttgtgccaccaaaaccttttcacgcaatgttcataattcatgatcgagttgtgcaagacctgtctt

SEQ ID NO: 16000 - DNA, 1710 bp, Zea mays
  Clone ID: LIB3061-025-G5_FLI
ttcgccgtgcgggccgacctgggcgccaccgtgggaacgttcaaggcgatcgtagccgatagctgcgacgtgccggcgccgcagcagcggctgatctacaagggccggatcttgaaggacgagcaaaccctagccagctacggtgtggagacagaccatacaatccacatggtacgtggtgctgcgccaccaccagcatccactgcacctgcagccaaccaagaacctaccactgctgctcctgccagttccccagcagcaggattgggtggcttgttgcaaaatctgggtgctacaggggctgctgctaacagtgggggtttgggtttgtttggatctggcctccctgaattagaccacatgcaacaacagctagctgaaaatcctaacttgatgagggaaataatgaatatgccactcatgcagaatttaatgaacagtcctgaactgatacgcagtataataatgaacaaccctcaaatgcgcgagctcattgatcgcaatccggatcttgctcatgtcctcaatgatccaagcatcatgcgccagacttttgaagcagttcggaatcctgaactcatgagggagatgatgcggaacacagacagagccatgagcaacattgaatcttctccagagggattcaacatgctccgtcgcatgtatgaaactgttcaagagccttttctgaatgcgacaacaatgggtagcgagggtgatcgaaattcgaatccatttgctgcacttctaggaaatcaggggtctaaccaagcaagagactcagctgcaaatggaacaactacagcttcagacaccacatcaggggctccagctccaaatactaatccacttccgaatccttggggtccaaatgctggatctgcccaaggagcagcaagatcccctcctgctaccaacactaggagtactacagcaggtggcccaggagggttgggttcagcagattttggaagtactcttggtgccagtggtggtggctctgatgctaccttcttgactcaagttttgcaaaacccaactatgatgcagatgatgcagaacattatgtctaatcctcagtccatgaatcagctgcttaatatgaatccaaatgtacgtaacatgatggaatccaatactcaaatgagagaaatgattcagaatccagaatttattcgccagttgacgtctcctgaaacattgcagcaattaatttcattccagcagtctttgatgtcacaacttggccaacaacaaactggacaggagcggacacaatcagcctctggtgcaggcaatgtgaacctcaacaccttgatgaacatgttcagtgggcttggtgctggtggtggcctaggtgttccaaatgctcctaatgtgccaccagaagaactgtatgcaacacaattagctcagctccaagaaatgggtttttttgacacacaggagaacatccgagccttggccgccactgctggaaatgttcatgctgcagtggagcgacttcttggaaacatgggccaatagaatatgatgacgaacataactgtgttctgatccatgcgatctgtagttggcattgtgagattatgtctggttcattggttttagacctgagattgagaggcggcatctagattctgtgtttaaggatgaataaagagtgtaccggtggaaccttacatataaatgtgggctggtgtcatggtt

SEQ ID NO: 16001 - DNA, 653 bp, Zea mays
  Clone ID: LIB3061-026-A8_FLI
tctagccgtccgctccctgttgcctcccaagccaaccatatccactctcggcgccgccgcgcatctctcccctcttcttgcccttccttccccccaggccccaacccacgcagcctcactaggggtctaccggcggcggcgacgagatggtgcagcgcctcacctaccgaaagcgtcacagctacgcgacaaaatccaatcagacccgggtcgtgaagaccccaggtgggaagcttgtgtaccaatacaccaagaagagggcgagcggtcccaagtgccccgtcaccgggaagaagatccaggggatcccccacttgagacctgccgagtacaagaggtccaggttgtctaggaaccgcaggactgttaaccgtccttatggtggagtactctctggaattgctgttagggagagaattatccgtgctttcttggttgaggagcagaagattgtcaagaaggtcctgaaaatacagaaaaccaaggacaagacagctgcaaagtagagctccaggaatggaatggaagcctagacactgcgagaagtaattttggtggatggaaaatctgtttgccttgtgtcgagcatttagcctgtgagacatgcctgttgaagtgtttgagtttagagactggaatccctttctcctttg

SEQ ID NO: 16002 - DNA, 1085 bp, Zea mays
  Clone ID: LIB3061-026-C2_FLI
tgcagctgctgctccaccaagaatcaaataactctgcgcagttgtcccaaatttgtgattctaaatgcccaacaacaactcaatcaaaacaatgtaattattggtgttatagtgtcctattgttttcagattgacacggagcaactgctggcccatctagtagaaacagaaatgataaagagaacgataatttccattgttgttgttatttcttgttttttttcttctctgaacctctgtccatagtgattggggatgtttgatatttcagaaagaaggaaggtacaagggaaggaagttcagttcagtatgtcatttctttggatatcaggcttgaggatctacaccatcaaatttcgactgtgactatgcttatgctcttggacgtatctccctgcatatgattgcagttggattgactggctacatggcaactgtggctaatctgaaagaccctgttgacaaatggagatgtgctgctgctcctttaactataataagatgcgatgatgagtgtgaagaggcatttacgtggccctggagcaatccctatagggaggccttccattcacccttctccaattgacttgaaagggaaggcttatgagttgctgcgagagaaggcttcaagcttcctccttgacgacttctacaggactccaggaggcattcagttcgaagggcctggttcagatgcaaagcccatcacgctgaccattgagaaccaggactacatgggtgacattgagatactgaaagagtaccttggcaaggttaggaccatggtgaagccagggtgctctcgggagatcctgaaggcggtgatcagttccatggtgtctgtgacggatgtgctgactgtgatgtcccaccccctcaacgccgagctgcccctctaccatttcaagctgcatatattcaacattatgaatgcatggttcatgtactttctgtgccacttcgattttaccaacacattgtgctttatgttctacaattttcatgtcatgcattttatttttacatagtagccaatcactgttatccttttgaaactatttaagttgctattgaatgttgtcagt

SEQ ID NO: 16003 - DNA, 1288 bp, Zea mays
  Clone ID: LIB3061-028-E2_FLI
aaaatcagtatgtaacaccagaaaaggcttcggcaccctcagcaacactcgagtcagatccattacctctcgtatggggaaaacaacgagatcacccgttaagtgtcgaagagtggacatctttcttagatcgtgaaggtaggattatggattcaaaggcactgaggaaaaaggttttctatgggggagttgatcatgctttgagaaaagaggtctggaaattcttgttggggtatcatgaatatgattcaacatatgctgagagggaataccttgctgtcatgaaacgagcagaatatgaagtcataaaatctcagtggaagagtatctcagccacccaagctaaaagattcaccaagtttagggaaagaaaaggcctaattgacaaagatgtggtgagaacagataggtccattccctattatgaaggagatgacaatcagaatgttgtagttttacgtgatattctgttaacatattccttctacaatttcgaccttggttattgccaaggaatgagtgactttttggctcccatactttatgtcatggaggatgagtctgaatcattttggtgctttgcttccctgatggaacgtctaggtgccaattttaatcgtgaccagaatggcatgcatgctcagctacttgcattatccaagcttgtggagcttcttgatccttcattgcacaactattttaggcaaaatgactgcttgaactatttcttctgtttccgctgggttcttatacaattcaaaagggagttcagtttcgaccagatcatgcttttatgggaagttctgtggtcccattatttgtcagaacatttccacttgtacttgtgcgtagcaatcttgaaaaaatatcgtcagcggataattggggagcagatggacttcgataccctccttaagttcatcaatgagctcagtggtcagatcaatcttgaccgggctatccaggacgcggaggcattgtgtactattgcaggagaaaatggggcttcctgcattccacctggaaccccaccttcaatgcccgtcgagaccgatggtggcatgtacgtgcaagaagacgaggtcttgtgagatatcggtcaccctagaaaataattgcatagaagcatcgcaagtttttatccagtagtgctttcgtcgtcgtcataaatgtgatccgttgtaagtttggaagaatcatgaaaacctagagttgtgtgtatatactaccttgataaacctgtaattgatactttcactattctgtatggaaccccaggttttacctc

SEQ ID NO: 16004 - DNA, 835 bp, Zea mays
  Clone ID: LIB3061-029-A10_FLI
attttcagctttgatgatgagcttccgcctagcttagcattggtagtacatcctagtgctcacccaaaggttggtattgactgggacgcacttcaaattgttgagagccaagatgaggaaggtatgatagaaattgttgccgatgacagaatgtatgagttgatcgggttgagagctgaggatgaagctgctgagaaggcgggtgaagctttcaagatgcaagagggtgatgtcaatagaagttatagtgagaatgaaattattgatgcagccatccctgttgatgatgaaattccagatgagagggtgatgttgcatgacccaacaagccttgtatggatattggaacagtgtaccccagcatgcgtgacttcaggctagctttgagacagtttgcgatcaatgaagagtttgagctagaaatatataaaaatgatccaagtcgatttattggtaattgcaatggagaaggttgcccttggcatattgtgggacgtaggcaataatctgggaatagtgttatggtatagacttgttattactaatctatgttgtgcccttgccatctatgttgttactaactgaggtttattattgcaggtaattgtcttaattgaggaacacacttgtacttccagtgctagaaggaaaaccacgacccctactagcgcttgggtagcatcaaaggttatccatctcctcaaggagtctaacatgggtccgaaggagctgcagaaaaggttggaagaaaaatataaatgtgaaattcattatgacacggtttggaaggggaggcaattggcgataaaagagttacatggcagttgggaagaga

SEQ ID NO: 16005 - DNA, 1017 bp, Zea mays
  Clone ID: LIB3061-029-C2_FLI
ggtcggcgaggagggcaggaagaccgaagaccgagccgtgcgggggctcgggacgggaacgggacaggaccccaaaatctcagatccttcctgcccgcccgcccgtgcccgtcgacgcgtcgttcttgccggccgcgcctcacctccgccctctcctcctccagggggatcggatacgccacaggctgcgcgatggtgctgtgggtcttcggctacggctccctcatctggaaccccggcttcgacttcgacgacaaaatcctcggcttcatcaagggctacaagcgcacctttaatctcgcttgcattgaccacagaggcacaccggagcatccggcgaggacctgcacgcttgaaaccgacgacgaggccatatgctggggaattgcatattgtgtcaagggtggtccagaaaaagagctaaaagcaatgcagtacttggagagaagagagtgtgagtacgaccagaagatatccattgatttctacaaggaaggagatcccttgaaaccagctgtgacaggcgtcttagtgttcgtttccactccagatccaattggcaacaagtactatcttggccctgctcctttgcaggatatggcaaggcaaattgctacagccaatggccctactggctataatagggattacctgttctcaatggagaaggcattagccagcattagccacgaagatgattcgatcatagagcttgcaaacgaggtgaggaaggtgctcaacagaacaaaggagaccaagatcactggtgccaatgcttccctgaaatcacatgcccctcttgtgcacctgtccgcgcttccagaaggcaccgttgtggactcgagatagcgagagccttggacgttggacctctactcggaatctacttccagctcttgcatgtttgtggccatcatgtactgattttcccttttcaacagttgtcgtgaggctgtatcttctggagttaaaaaatgctaaaagccggcactaataatgatattaacttgaaaaatc

SEQ ID NO: 16006 - DNA, 1828 bp, Zea mays
  Clone ID: LIB3061-030-B11_FLI
tcgtctccttccccctcgccggccgcgtgatctgcctgccgcgcggacgccgcgggcgcgacgatgcacgacccgtcggagatccgcaacctccccatcgacatcgcctttggccgcctccaggagtggctcgtggaccgcaagcgagtgccgcacgactggcggaagcgcctcgccggtattcgcgcccgcatcgcgcccgctttctccgccctgccgcggaacctgcacccctcactcctcgccctcgatccagaagaaattggctaccttgaagcaaagaagatatacagcattctcctagaatccaacaccgagagtcgcaacatatttggccgcctgacgggatccgcgggtgaatgggagtcaattattaaagcttacgagaaggaccatgtcttccttggagaggcagcgcagatcatggttcaaaatgttaactatgacattccatatcagaggaagcagatgcagaagactcagcagcagcttgcagagcttgatcgaagggaggctgacatcaagcgtcttgcggcattgtcagcgactagatatgtagaagcctgccaggaactcggtttacagggaataaatgtgagggaagaactaatagagtccgcaaaaacactcccatctacttttagcaaaatcttggaggtcctgaacagtgatcctgtctcaaatgctatggagtactacacaacttttgttaaggactgccatactgaggacaagagaaatagtgattctgtgctacccaaactgaaagacttgcaggccaatcctccttctttgcatgtctcagtatataatgagatcaagagttctcttggagaggcatcaaaatctcctgggtttactgtgatcgcgggagaaattgactcaaatgttgctgctgctgatgatattgattgggacatttctgtggatactaatgaaattgattgggacattggtgctgtggaacaacctggtgaagaatctggcgatggctttggatcgtatgaaattattgatgctaatatagagctggccggttctgaaaattataatgttggtgtctcagacaaatcaatgaacaaagaagatcttgcatcatctgagtctggtatttgctgggacatcactgctgatagttctgaagaaattgctagtatacagaatgcttcatctgtattagagcaatctcagtctcaaatgatagctgaagatagaagtttgttgctggaaaaagaatataggaataatattctggatgatttactcgaggtaaaatcatttttgactcaacgcttaggggagatgaggaatgcagacacatcatctctacagcatcaagtgcaagctgtctcaccttttgttctccagcagcatgctcctgacagtttggagaacatgcttgtagagatctcgtcagcaatctcattgctaactaatcagaagactcttgaccttataatgatccttaactctaaaaggtttctggatagattagtttcaagcttagaagagaagaagcatcacgaagtaaaactacgggaaggtttaggtgatttatctgttaagcgtatggagctgcaaaacgcactgtcatcatcatggccaaagcaagaggcagcaattacaaaaacaagggaactaaagaagctgtgtgagtcgacactgtcgtctgtttttgatggaagaccagtgtatataattggagagatcaatactttactgagctcaagtgttagtcaattagctggatgactgtatttccgttcctggaccaaataagattgcaaaaatattatcttatggtatatacttctgaatatttatggtt

SEQ ID NO: 16007 - DNA, 897 bp, Zea mays
  Clone ID: LIB3061-030-E1_FLI
gcggcgcgcggggtggcggtgctctcgcgatcctcgtgtcgattccagcggcgggggtgccattccctcccctggccgttgcccgcgcctcgcggtcgcgcaccggaaccggagccccgccgcgaatcgagggttgcctccgcctcgccccctcctcccgagactcctagcggcaggaattaggacgagggtaacaggcgacagaggctgcgaaggacgccccttcgtcaaatgcgccggcgaccgatccgtggaggagcagccggagcacgcaggaggtgaagtagcaaagttattttcagacgcgggccttgtatgtattgcaagtttgatatctccatataggagagaccgtgaatcttgccgtgcattgttatcggatggtagctttattgaagttttcttgaatatgtccttggaattatgtgaagcaagggacccaaagggcctctataagcttgctcgtgctgggaaaataaagggttttacaggaatagatgacccttatgaagcaccactgaattgtgagattgagatcaaggaaatagatggtgtatgcccttcgccttctgacatggcggggcaagtggttacttaccttgaggagaaaggcttcctgcacgagtaggctgaatcgaagctacattccgggaaggtttcaatcagactagcgcagaataagtcaaaagcgctgccagttaccgtatggttacatagattgatctggatgcctagtatttttctttccgcgcttgctctaccacaagttccattcagatgagccaagatggttcctaatttctttgacctctggaatagattacctgtaatgcaattctgatgacagcttggggcagtatcgatttgtcacgggaaggtacgcctaatgttgagaga

SEQ ID NO: 16008 - DNA, 672 bp, Zea mays
  Clone ID: LIB3061-030-E8_FLI
tgaccacggaaccacacccccagagaaaccattctacatattctcatatacactcattagcacatagcgctaggcgccataccaaccatgagcgacctgttatcctacatttccaaggtcatgtgcatcaaggcaagatcggaggcaacacaagccggcgaggacagcggctgcccagcggacgagtgccgcgtctgcctgtccaagattcggctcggcgaggctacccgccgactgccgtgtcgccatgtgttccaccgggactgcgtcgaccggtggctctcgtcctgcaagcgaacctgtccgctgtgccgagtttatgtggccgatgggaacaagcagccggtggcggcaaagcacaccagccgtgaagcacaggcactcgccgacgaccttgttatctggttctccaccgtgcttgttcccggtttctgatgccaaattccttcgtctgttcgttcgtttgaaaaagcttgattggtgtgtatttttttttattgcatgcatgatacatgtacgtactacgttactgttaattgtccttagaacagtttctagaaaatctgtgtgtatgtagcatcttgttgcatgaactgattggaacttctgtgtttgcagctgattactgaaaataagaagttcgagcaaatatatgttatcgaaatttatggt

SEQ ID NO: 16009 - DNA, 1178 bp, Zea mays
  Clone ID: LIB3061-030-F8_FLI
caaagctataagtaaccctcatatgtatttgcactcatgcatcacaaaacatccttctatcagtaccatcaatcatcattcatcttagtagtataggcaccaaatcaaatctgcaacatcaattatctaactccaaaaaccatgaagctggtgcttgtggttcttgctttcattgctttagtatcaagtgtttcttgtacacagacaggcggctgcagctgtggtcaacaacaaagccatgagcagcaacatcatccacaacaacatcatccacaaaaacaacaacatcaaccaccaccacaacatcaccagcagcagcaacaccaacaacaacaagttcacatgcaaccacaaaaacatcagcaacaacaagaagttcatgttcaacaacaacaacaacaaccgcagcaccaccaccaacaacaacaacaacagcaccaacaacaacatcaatgtgaaggccaacaacaacatcaccaacaatcacaaggccatgtgcaacaacacgaacagagccatgagcaacaccaaggacagagccatgagcaacaacatcaacaacaattccagggtcatgacaagcagcaacaaccacaacagcctcagcaatatcagcagggccaggaaaaatcacaacagcaacaatgtcattgccaggagcagcaacagactacaaggtgcagctataactactatagcagtagctcaaatctaaaaaattgtcatgaattcctaaggcagcagtgcagccctttggtaatgccttttctccaatcacgtttgatacaaccaagtagctgccaggtattgcagcaacaatgttgtcatgatcttaggcagattgagccacaatacattcaccaagcaatctacaacatggttcaatccataatccaggaggagcaacaacaacaaccatgtgagttatgtggatctcaacaagctactcaaagtgcggtggcaatcttgacagcagcacaatacctaccatcaatgtgcggcttgtaccactcatactaccaaaataatccatgcagcagcaatgacattagtggtgtttgcaattgaagaattgtgtctacctagccgttatactcctataacggtgttaagcaataaagtaccatacattatgatgtttgtactatgatatttgaataagaatactaattgtaatt

SEQ ID NO: 16010 - DNA, 2199 bp, Zea mays
  Clone ID: LIB3061-030-H4_FLI
aggttgacaggagattgcaagaatatgagcaaggaaggacagagtttgcaccagaagaggatgctcatgttgttggtgactgtgtaaaacatgttctccgggagcttccatcttctcctgttccagcttcctgctgtacagcattattggaagctttccgtctggacatcaaggaatctcggatcaaatctatgcgtgcagcaatatctgaaacatttcctgagcctaataggcggctgctacagagaattttgaaaatgatgcataccgttgcttctcatactgccgagaatagaatgactccatcagcagttgctgcatgtatggccccactcttgttgcgtccccttcttgctggtgaatgcgagctggaagatgattttgacatgagtgatgacagtgctgctcagcttattgctgctgcaaatgctgctaacagcgctcaaggcattgtaactactctattagaggaatacgaaagtatattcaatgatgagcactttaggtgctccttatcacctgattctcaaacaggagatagtggaagtgaagaatcaactgatgatgaaactgtggatatcaaggataatgggtttcatgatgcagaaaatgatgtagatcaagaattagatgatgccgagcgagtactgagtggaaaattgagtgaaaccagtgcatgtgtccatgctgacctccatgactacaaggaagttaatggcaatgattcagacgctgagctctctgttgaggataacacacttgaaccaaatgtaaatttaaatgatactcccctaagtcgtttaatagaaaatggaaagaaaccatcaaatctggcgtccagtcatgaaactccattatcagtgggagaaattcttttgtctttggatgctggagttccattacctggtcgtgcagctgaatattccaaggacagacactctagcaaacccaatggaattcagcagcatgtgaagcgtactaacttatggggacggagcaatgcaagaaagggccaacgttcagagttagttgatccttcaagtgaagaagagcttgctattcaacgacttgaggtaatgaagaatgacctacaggtcaggattgcaaaggaggctagaagtaatgcaatcctacaggcaagtttagaaagaagaaaacaagcactacatgagcgccgtgtggctctggaacaaaatgtgtcaaggttgcaagagcagctacaggctgaaagggatcttagagctgcactggagattggattaagcatgtattcttcacaattttctagctcgcactccatggactcaaagacaaaggcagagcttgaggaaattgctctcgcagaagctgatgttgcaagattaaaacagaaggttgcagagctgcatctccaactcaatcaacagcgccagcaccagtatggctcttcggtagatgcaaatgattgtcctccgcaccttccaaatcatctctcacagaacactgtccaaactggatttgataggaccgttgctttttgtaatcaagagaagcaaagaaatgaggagagcttgccgtgcacatcccactggagaagcatcaaacagcatgtgctctctcagggttcttcaaggcctttctcccgaaagcattcctcagacacctccttgagtgattcaagggaggcatcaacaagtgtgcttgcagagggcgggccactgttggtgaacatcgcccgaacaacagaaggtgttgaatacgggagacctccgactgtgccgtcatctactctagttgaactaacaaccaggctagatttcttcaaagaacggcggtcacaattgatggaacagctccacagcctcgatttagggcatggatccgcgtcccatgatttcccatacaaaccttcatctccctggaacagcccaaggtaggggggcttgttcagttgctgcattacccgcgcatctgtatattcttggtatagaatctcttttgtttcactttatctctgtagaagctggtctcgtttttgtttcacttgttatctctgtagaagctggtagtgagaatgtatataccccttgcctaccttcacttattttgctagtgcttgcagcagacatttttcgagcgtgatttttgttttgcttttgtatttattgtgtatgtaatgactcaaggggaaatatatagatgcgtctttttttcttgggg

SEQ ID NO: 16011 - DNA, 1703 bp, Zea mays
  Clone ID: LIB3061-031-A3_FLI
ccaccatctgcgcgcgcgcgcgcgcgcgagggaccggccggcgaacggaggcgccactgagctctgagcgggtgcggccggcatggcgacggcgctggcgcggcggggcgccgcggccctggcgcggtggcgcgggatgtgctcgagctcggcttcggcgccgcggcgcgccgcggcgctgtcctcagaggagctcatgcggatggaacaagactgcagcgcgcataattaccatccaatccccatggtgttttccaaaggagaaggttcacacatagtggaccccgaaggcaacaaatacattgattttctctctgcttattctgcagtcaatcagggtcattgccatccaaaagtcctgagagctttgatagaacaggcagaaaggcttactctcagttctagagctttctacaatgataagttcccaatctttgcggaatatctgacaagcatgtttggatatgacatgatgttgccgatgaatactggtgctgaaggagttgaaactgctatcaagctggctaggaaatggggttatgagaagaaacatataccaaagaatgaggctttgcttgtctcttgctgtgggtgtttccatggccgaactcttggtgtcatttccatgagctgtgacaacgatgcaactcgtggttttggtcctttggttcctggccatcttaaagttgattttggagatattgatgggttaaagaaaatcttcgaagagcttggagatcggatttgtggttttttatttgaacctatccaaggtgaagctggggtagtaatcccaccagatggctatttgaaaggtgtcagagacttgtgttccaaacacaacgttttgatgattgctgatgagatccaaactggcatagctagaactggtaaaatgctggcatgtgactgggaaaacatacggcctgacatggtgattctaggcaaagcactcggtgctggagttgttccagtcagtgcagttcttgcagacagggatgtcatgctgtgtatcagaccaggggaacatggaagtacattcggtgggaatccgttagctagcgctgtggcagttgcatcactgaaagtggtcagagacgaaggtcttgttgaaagggctgcaaagttaggacaggagtttagggaccagttacagaaggtccagcagaaattccctcaaatcctaagagaagtgcgcgggaggggtttgctgaacgcagtggatctaaacaacgacgcgctatctcctgcttctgcatatgacatctgcatcaagttgaaggagagaggcattttagcgaaacccacacatgacactataatccgacttgctcctcccctcacaatcagtcctgaggagcttgcagaagcatccaaggcgcttagtgacgtgctggaacatgacttgccacagctgcagctgcagaagcagataaaaaagccagaatctgaggcagagaagccagtctgtgacagatgcggccgggacttgtacggatgaatgaagcctccgaacagagataacttcattttcgtacgcacccatctcgccccagaagaaataataacagagcagaggatgccagctgcctagctacttgggttacggtaatgttatgcgacttgttgcatcgtataccaagtatatgagctattgcaaccttggtgaatatgtcaaataaatgggcagcattcacatgctc

SEQ ID NO: 16012 - DNA, 1041 bp, Zea mays
  Clone ID: LIB3061-031-G10_FLI
tccttcatcattgcaaaaacacgcataacttacattgtcatcttcgctcccgtgacctacatcgtcgtgtctcggcttggcttggcttcctcctccccgacgaccaccccgcgcttctcctctccccccgtcccaccttccgagaggctcgagccctgatcccacgctgagggcggcggtgttaggagtttagcgatggcgaggtggcggccggcggcgctgctggtagtggcgctgacagcggttctgtcggcggcgcggcgggcggatgcgctctcagtgacggtgaccgacaccgagtgtatccacgagttcgttccgtacgagggtgacaccgtgtccgggaacttcgtcgttgtcgaccacgacatcttctggagctccgatcacccaggcatcgacctcacggtaacgtcaccaggtggtaacactgtgcacacattgaagggaaaatctggtgacaaatttgagtttaaagctccgaagggtggcatgtacaagttctgcttccataacccatatggagcacctgaaactgtttctttctacattcatgttgggcacatacccaatgagcacaatctggcgaaagatgagcacttggaccctatcaacgttaaaatcgcggagctgaaggaagtattagaatccgtcaccgccgagcagaagtacctaaaagcacgcgaagctcgtcatagacacactaatgagagcaccagaaagcgtgtcatgttctacacaatggcggagtacatagctttcgtggctgctagcacgttgcaagtcctctacatccgccgcatgttcagtaagaatgtgggatacaacagagtgtaggatacagctctacttcaaaggcgacagtggaagaagcaccacatggtcggaacgggaaacattctctgccaatttgacaaattgtagctctgcaccctctttctttttgttagtttacaagaaacacttttacatttatcatgtacttttagcaacacctgtgatatgttacgtgcattttatgctgaacatagttccagaatt

SEQ ID NO: 16013 - DNA, 941 bp, Zea mays
  Clone ID: LIB3061-032-D11_FLI
tgagcattcagaaacacaccaagcgaagcacattagcaacaacctaacaacaatggctaccaagatattatccctccttgcgcttcttgcgctttttgcgagcgcaacaaatgcgttcattattccacaatgctcacttgctccaagttccattattacacagttcctcccaccagttacttcaatgggcttcgaacacccagctgtgcaagcctataggctacaacaagcaattgcggcgagcgtcttacaacaaccaatttcccagttgcaacaacaatccttggcacatctaacaatacaaaccatcgcaacgcaacagcaacaacaattcctaccagcactgagccacctagccatggtgaaccctgccgcctacttgcaacagcagttgcttgcatcaaacccacttgctctggcaaacgtagttgcaaaccagccacaacaacagctgcaacagtttctgccagcgctcagtcaactagccatggtgaaccctgccgcctacctacaacagcaacaactgctttcatctagcccgctcgctgtggccaatgcacctacatacctgcaacaacaattgttgcaacagattgtaccagctctgactcagctagttgtggcaaaccctgctgcctacttgcaacagctgcttccattcaaccaactgactatgtcgaactctgctgcgtacctacaacagcgacaacagttacttaatccactagcagtggctaacccattggtcgctgccttcctacagcagcaacaattgctgccatacaaccagttctctttgataaaccctgtcttgtcgaggcagcaacccatcgttggaggtgccatcttttagattacatatgagatgtactcgataatggtgccctcattccggcatgtgtttcctagaaataatcaatatattgattgagatttatctc

SEQ ID NO: 16014 - DNA, 686 bp, Zea mays
  Clone ID: LIB3061-032-F11_FLI
caacaaccaattgcccaattgcaacaacaatccttgccacatctaacaatacaagccatcacaacgcaacagcaacaacagttcctaccagcactgagccacctagccatggtgaaccctgccgcctacttgcaagagcagctgcttgcatccaacccacttgctctggcgaacgtagttgcaaaccagcaacaacaacagctacaacagtttctgccaacgctcagtcaactagccatggtgaaccctgccgcctacgtacaacaacaacaactgctttcatctagcccgctcgctgtgggcaatgcacctacatacctgcaacaacaattgttgcaacagattgtaccagctctgactcaactagctgtggcaaaccctgttgcctacttgcaacagctgcttccattcaaccaactgactctgtcgaactctgctgcgtacctacaacagcgacaacagttacttaatccattggtagtggctaacccattggtcgccgccttcctacagcagcaacaattgctgccatacaaccagttctctttgatgaatcctgtcttgtcgaggcagcaacccatcgttggaggtgccatcttttagattacatatgagatgtactcgataatggtgccctcataccgacgtgtgtttcctagaaataatcaatatattgattgagattt

SEQ ID NO: 16015 - DNA, 609 bp, Zea mays
  Clone ID: LIB3061-033-A7_FLI
cctttatcacccttgttgtttcaacaatcgccagccctatctttggtgcagtcattggtacaaaccatcagggcacagcagctgcagcaactcgtgctacctgtgatcaaccaagtagctctggcaaacctttctccctactctcagcaacaacaatttcttccattcaaccaactgtctacactgaaccctgctgcttatttgcagcaacaactattaccattcagccagctagctactgcctactctcagcaacaacaacttcttccatttaaccaattggccgcactgaaccccgctgcttatttgcagcagcaaatactactaccatttagccagctagctgcagcaaaccgtgcttccttcttgacacagcaacagttgctgcctttctaccagcagtttgcggctaaccccgcaaccctcttacaactacaacaattgttgccctttgtccaacttgctttgacagaccgagcggcctcctaccaacaacacatcattggtggtgccctcttttagattgcttattagttgtaattcaataataaagttttttggatgatgtatgtggccaaccagaaataagaagttacatttccagatttt

SEQ ID NO: 16016 - DNA, 555 bp, Zea mays
  Clone ID: LIB3061-033-D3_FLI
cggaacgaatcgagccggggcccacttcgatcgaaacgagatggctccggggaagcgaggcaaggccaaaggggcggcgccgccgccgcccaccgcggcggcgagtaccggagctgtagggttccctggctgcctccgcctgatgccgccgtcgaccgtggccatatctatacacgccaagcccggctccaaggtcgccaccatcacagagattggggacgaggcggtgggcgtgcagatcgacgcgccggcgagggatggcgaagccaacgccgcgcttgtcgactttatcagctcggtacttggggtgaagaaaagagaagtgtctataggctcgggttctaaatcgagggaaaaggttgtgctggtacaagatgcgactcttgaaggtgtctacgatgctctgaagaagtcttgtaattgtgcatgaggtatgtacgttaatcctggagttaacttgaatgggcagggcatgtgaatgcttttctgatacgtaacctatttgcgatgtgatcctgttccagcttgcaaacacaagttagaaaatgaagtgag

SEQ ID NO: 16017 - DNA, 1199 bp, Zea mays
  Clone ID: LIB3061-033-E7_FLI
ttgtggagggaagcgttccagaaacaaccgcactcttggaacagagatgggataagatcttctacacaggtaatggaactgtaggacgtatagtgatggcagcagccgcaaagcatctgaccccggtagctctggagcttggtgggaaatcccctgttatcgtggattcaaatgttgatctgcatgttgctgctaagaggattgttgttggcaaatggggatgcaacaacggccaagcatgcattgctccagattacatcataacgacaaaatcatttgcaccggagctggtggcctctttcaaaagagttttggaaaggttctatggggaggatcctctgcaatcagcagacttgtctcgtattgtgaattcgaagcagttcaaaagattgacaaatttgatagaagaaaaaagagttgctgacaagattgtgtacggcggcaaggctgatgagaagcaactaaaaatttctcctacactattgttagatgttcccgaagattcagaaattatgacaggcgaaatatttgggcccttgcttcctattgtgacggtcgaaaagattgaggaaagcttcgacttgatcaatgccaagcctaagccactagccgcctaccttttcaccaagaataggaagctgcaagaggagtttgtggcgagcgtccctgcaggagggatgcttgtaaacgacactgcgctacatctcaccaacccgtacatgcccttcggcggcgtcggcgacagcgggatgggctgttaccacggcaagttcggcttcgactgcttcagccacaagaagggagtcctgatccgcggctttggcggggaggcgaacgccaggtacccgccctacacgacggagaagcaaaagatcctgaggggcctcatcaacggcagcttcatcgccctcatccttgccctcctgggcttccccagggagaagcgttagatgctccggcctctttttggtttcggtacagcctttgtagtccctgttcgtcgtcaggtgcacagtatacaccgtcatatgctgtcaaatagatgcaatgcaacgactgcgcgccgtgcttgtgttgcaagcgtggataatgcatatattatattgtagcattgacatgatgtgcgttattgcattttactgtacgtaagggagttggataaataagtgtgatttgtttgtcaattattcagtgttgag

SEQ ID NO: 16018 - DNA, 835 bp, Zea mays
  Clone ID: LIB3061-034-E1_FLI
tggaatccagtagcaacaatagagcaacaatggcgaccaagatactttccctccttatgctccttgctctttctgcatgtgttgctaacgcgacaattttccctcaatgctcacaagctcctatagcttcccttcttcccccataccttccatcaatgatagcttcagtatgtgaaaacccagctcttcaaccctataggctccaacaagcaatcgcagcaagcaacatacctttatcacccttgtttcaacaatcgccagccctatctttggtgcagtcattggtacaaaccatcaaggcacagcagctgcagcaactcgtgctacctgtgatcaaccaagtagctctggcaaacctttctccctactatcagcaacaacaatttcttccattcaaccaactatctacactgaaccctgctgcttatttgcagcaacaactattaccattcagccagctagctactgcctactctcatcaacaacaacttcttccatttaaccaattggccgcactgaacctcgctgcttatttgcagcagcaaatattactaccatttagccagctagctgcagcaagccgtgcttccttcttgacacagcaacagttgctgcctttctaccagcagtttgcggctaaccccgcaaccctcttacaactacaacaattgttgccctttgtccaacttgctttgacaaacccagcagcctcctaccaacaacacatcattggtggtgccctcttttagattgcttattagttgtaattcaataataaagttttttggatgatgtatgtggccaaccagaaataagaagttacatttccagattc

SEQ ID NO: 16019 - DNA, 847 bp, Zea mays
  Clone ID: LIB3061-035-A4_FLI
gcttctgcttgctctggggggaaggagagagagagagcgagagagagagagagatctagtagagaggctagtaggtggtcctcgaacgaagatgttggcggtgttcagcgggcaggtggtggaggtgccggcggagctggtggcggcgggcagccggacgccgtcgcccaagacgaaggcgtcgcagctcgtggggcgcttcctggccgcgtccgagccggccgtgtccgtgcagctcggcgaccacggccacctcgcctactcccacaccaaccaggcgctcctccgccccaggaccccgagggcagggtgccgctcttctgggggatcaccgccgacggctgcgtcgccttctccgacgacatcgacatgctcaaaggctcatgcggcaagtcgctcgcgccgttcccgcaaggctgcttctactccaacgccctcggagggctcaagtgctacgagaaccccaagcacaaggtcaccgctgtccccgccgacgaagaagagatctgcggtgccactttcaaggtggtggaagggtctactgtcctgacggcgctgcactgatcgatcatcatcaggcggaggcgatgcgacgatacagaactttgtacatgcgtggtgggtgtaacatagtggctggcaacaagccatgctcatgcaaaccgatgaatctatctctgtatcatgcatcgatctcggttgcttgctagtccagactccagactccagacatggctatatatagctggtgctaataaataggagtataatcgtcatatcgatcggttgcgtgtggaatgccaatcaagtgtgtaatctgttccaaataacaaacctatgttcctcc

SEQ ID NO: 16020 - DNA, 1622 bp, Zea mays
  Clone ID: LIB3061-035-A8_FLI
tgagaagttctctgttcactctttgggactgccgtctcttctctctgatccaagtgcgaagacacctgaagaagctcttgtgcatatctttggggaagccaagagaacaaccccgtccattctatacatacctcagttccatctttggtgggatacggcacacgaacaactaagggctgtgttgttgactctgttgaacgatttgccctccaaccttccagttttattgcttggaacatcatcagtggtttttactgaccttgaagaagagtgtgcttccatattctcttctcgcaatgtgtatcaagtggatcaaccaagttttgacgatagattgaggtacttcagtatattgtttgagtcattgctctctttccaaatggaagaatcaagaaacaagtcaaagaaacagaagtctgctattgaccttcccaaagccccgaaagaagtggagggccctaaggtttctgagctaaaggctagggcagaagctgagcagcatgctgttcgtcgaatgaggatgtgcctccgagatatctgtaatcgcattttgtacaacaaaaggttcaatgtatttcacttcccagtattagaagatgaggtgcctgactatcgatcaataatccacaagcctatggatatggctactgtcttgcagcgggtggactctggacagtaccttaccagggcagcatttataaaggatattgatcttattgtctcaaacgcaaagacttacaacggggatgactacaatggatctaggattgtcagtagagcatgtgaactcagagatgtggtccaaggcatgttgtcacaaatggacccatctttggtgtccttctgtgataaaattgcttcacaaggggggccactgcaggctgtggatgatgaagatagagctattcttcaagcagcacctgttgctcagctggtttctggtactagaataagtgcaaggcttcgaaatgtacagcctgaagtaaacctgtcacaaagttatgaagtgctaaggcggcaaaagaaaagtgcagaaaatgaacaaagcatgactagagatgaaaagtctcctgaagatgtagatttgtcgaagccaactgacgcagaagaagctgcaaaagaaccagagtcaaatggcactacgaaagaagccaacgattcaccagccaaagaaccagaagtatctacttcccctgaacccatggagagtgacaacggcaaaattgccgcggctactggcgacgacttgttagaacagctagaagccctgaagcaacgcttcatggaactcactgcaagctatggcgtgccgcagctcgagaggctgtattccaagataatgaaaggagcaatagagttgacaagtaaagaaagcaacgaggatcataggcggttagtagttaggtatttgtggacattcgttgagaacagcaacaatttttaacctggcgccaataagattcttgttttccttgtacatcctctttggaacgaaacaatagtagccgttcatcttgggagttgtccccgttccatgccttgtaacaaatcttccaaatgctctagtgtcagtgacacagttttgccatgaaatgatgtagcaagtgaacccttcctagatt

SEQ ID NO: 16021 - DNA, 1370 bp, Zea mays
  Clone ID: LIB3061-035-E12_FLI
ctacccctcctgctaaggcgaagaagggagagaagctggcgcctgatgcgactcctgcaggaaaggcaaagaagggcaagaccgagctagagacactggcacctgatgccactccagcaggaaaggcgaagaaaggtaaggtcgagaagacagctcctgaggccactccctcaggcaaggggaagaagggtggggacaaactggagaagccagcagcgctcgatcgctcaccttcagacagcaagtctgaaaagcttgcacatttttcccgcacatgggagaaagatgatgagatgaagatcttggaggctctcgcggcccatgtcaagagtgagggcgtgctgccgaagactgattttcttcttgctagtgttcgtgaccgccttgtcaggaagaactgcaactacacggatatatatgagaaggtacgaaggctaaaggagcgctatgaaaaattggtgagcacgggcactgtaccgagtaaagaagatgagctccagatgtataatctctctaaaacaatctggggagagaagtcaaaggaggctactgctgccattacgtctcaaaaaggtggtgctgtgacaaagcgtaagaaggggcaggctaacaaagagaagatggatggaaatgcaaagagtggtgtggcaaaggaggctgcccatagtactgccaatcaaagtggcgattctcataaaggaagtaagaaggggcaagccaggttgtcagaggacgctaccaccactgtatccccaagtaagagtaagaagcaggaaactcgtaatgaggaattggacaaagatggtggtaatttggccaagggaaagaaggggaaaacagacaaagggaagatggacagagacacagataatctgacaccaaaggaaaccataaatgaaaatcagaatggtgacattctgattaggagtaaggaaggagaaattcatgatgatgaaacaggagatgctaatgtgcaaggtgtgcgcagaggttttgataagctgcagaagttgtattccaaccttgctttttatgtggaggagattgaggcccatcatccatgtggggagactctgaagagagcatttgagttcattgctgatgagaaggcagaaggtctggaatccaagatcaagaagcaaagagtagcagaggcgaaggcggaggtccgtcaaggcgacgtaaagaaggaggttcttaatttgctgctcagcttagtggactaaacctttctggattattgtggtataacattctacttgagttatttagtttcctcttgatgtctggtgcattattattgcccaatttgtagaattcataggttcaaaacttggatttcacatttgaatcaattaatcagtgttact

SEQ ID NO: 16022 - DNA, 786 bp, Zea mays
  Clone ID: LIB3061-035-E2_FLI
caaagataacctacaaactatgaccccacttgagtggtggcgttcgtatggtggtcgtgctattgagttacagagatttgctagacgtttggtgagtctttgtgcgtcttcatcaggttgtgaacgcaattggagtacctttgaatttatccatacaaagaaaagaaaccgattgttgcataagaggttgaattctattgtcttcatttcctacaacagaaagatgaaagctaggttccaaaaactacgccagaagaaggggaaaaactttgatccattggttcatgaggacttcaactgggacaatgagtgggctgattctttgcatgtagtccctgaaggtgggcgtgggtgtgagtgtgaccttacatgggaccttgtggataatgccattggagcatcgcaagcacttcgtggccgaaacttaccaagaagggcccataatgtgtattcaagaagaaattctgttgctgcacaaaacatgtcagaggctgaagaggaagatgaagatgaagatgttccacatgacgatgcagaaatcacagattgtgaagatgaatctaatggtggcaatgatggtgaagaaggggaggcacccaatatcccaggagagtttgatgatgatttttgagcgacgggagacagggagagtagctattgctagattgcattagcaatttagcatatttgctgcattactaactgcagctagttactattaattatgccattacaaactatctatgtggctatttcagatttggacatttggtattgtgttgtttt

SEQ ID NO: 16023 - DNA, 867 bp, Zea mays
  Clone ID: LIB3061-036-F8_FLI
gatttataccaactaccaacatacatagtgaagtacactagcaacatcttagcaccaatggcagccaagatttttgcgctccttgccctccttgctctttcagcaagtgttgctaccgcgactattattccacaatgctcacaacaatacctctctccagtgatagccgcgagatttgaatacccatctatacaatcctacaggctacaagaggccatcacagcaagcatcttacggtcgttagcattgaccgtccaacaaccatatgccctattgcaacaaccatccttagtgaatctgtatctccaaagaatcacagcacaacaactacaacaacggttgcttccaacaattaatcaagtagttgcagcgaaccttgctgcttaccttcagcaacaacaatttcttccattcaatcaactagctggggtgaaccctgctgcttacttgcaggcacaacagctactaccattcaaccaacttgtcgggagccctgctgccatcttattgcagcaacagttgctgccattccgtctacaagttgttgcaaacattgctgctttcttgcaacaacaacaattgctgccattttacccacaggttgtgggaaacattaacgccttcttgcaacaacaacaattgctgccattctacccacaggatgtggcaaacattgtcgccttcttacaacaacagcaattgctgccatttagccaactcgctttgacgaatcctaccaccttattgcatcagcccaccattggtggtaccatcttctagattttttatgctttatactgtaataataaatttctcatactgatatgtgcaacttctcagtaataaaagattagagatctatatttt

SEQ ID NO: 16024 - DNA, 742 bp, Zea mays
  Clone ID: LIB3061-036-G5_FLI
cctcgctagctcgctcgctctccttgcaactccagtgctgctcactgccactgccagcagatcgagctgctccgtctcacaaaccctcttgctttgctgctgcacctgcaagtctgcaaccgcgcacacagagatgtcgacgacggtgagccgtgcgtccctcgaccagaagctcgccctcgccaagcgttgctcccgagaggcgaccctcgccggagccaaggcggcagcggtggcgactatcgcctccgcgatccccaccctggccagcgtgcggatgctgccatgggccaaggccaacatcaaccccaccggccaggcgctcatcgtctccacggtggctgggatggcctacttcatcgccgccgacaagaagatcctgtcgctggcgaggcgccactcgttcgagcaagcccctgagcacctcaagaacacctccttccagggcaccggccgtccccacccagccttcttcaggccgtgagacgagacctccgtccagagctagctacctacctctttttccagtttgccaatgcaagcaccaaatgcccaccgatgcatgcctgaataaactactgtaattgcgaggctgctgaacgtcgatgcgctagtataactactactactacgaggctagctgcgcgctgaacacagcgctgtaaagtagtgttggtgtgctaaattcagaatgtgtaagtttaatttatgttattaccagttaaccaactttgtgtgtgct

SEQ ID NO: 16025 - DNA, 859 bp, Zea mays
  Clone ID: LIB3061-037-A12_FLI
gagaccaacaagcaacatagaaagtggaatacagtagcaacaatagagcaacaatggcggccaagatattttccatccttatgctccttgctctttctgcatgtgttgctaacgcgaccatttttcctcaatactcacaagctcctatagctgcccttcttcccccataccttccatcaatgaccgcttcagtttgtgaaaacccagcccttcaaccctacaggctccaacaagcaatcgcaacaagcaacttacctttatcacccctgttctttcaacaatcgccagccctatctttggtgcagtcattggtacaaaccatcagggcacaacagctgcaacaactcgtgctaccagtgatcagccaagtagctctggcaaacctttctccctactctcagcaacaacaatttcttccattcaaccaactgtctacactgaaccctgctgcttatttacaacaacaacaactactaccattcagccagctagctactgcctactctcagcagcaacaatttcttccatttaaccaattggccgcactgaacccctctgcttatttccagcagcaaatactactaccatttggccagctagctacaacaagccccacttcctttttgaaacaacaacaattgcttccgttctaccagcagtttgtggctaaccccgcaaccctcttacaactgcaacagttgctgccctttgtccaacttgctttgacaaacccagcagccttctaccaacaacacatcattggcggtgccatcttttagattgcttattagttgtaattcaataatgaagttttttggctgatgtatgtggcctcctagaaataagaagttacatttcc

SEQ ID NO: 16026 - DNA, 715 bp, Zea mays
  Clone ID: LIB3061-037-A2_FLI
cggtgacagccgcgggatttcaacacccaactatacaatcctacatgctacatgaggccatcgtagcaagcatcttacggtcattagcattaaccctccaacagccatatgccctattgcaacaaccatccttagtgcatctgtatctccaaagaatcgcgacacaacaactacaacaacagttgctaccaacaatcaatcaagtagttgcagcgaaccttgctgcttatctccagcaacaacaatttcttccattcaatcaactagctggggtgaaccctgctgtctacttgcaggcacaacaactactaccatttaaccaacttgtcgggagccctgatgccttcttactgcaacaacagcttctgccattccatctgcaagctgtggaaaacattgcttctttcttgcgacaacaacaattgttgccattttacccacaggttgtgggaaacattaatgccttcttgcaacagcaacaattgctgccattctacccacataatgtggcaaacattgttgccttcttacaacaacaacaattgctgccatttagccaacatgctttgacgaatcctaccaccttattgcaatcgcccaccattggtggtgccatcttctagattttttatgatttatactgtaataataaagttctcatgctgatatgtgcgacctctcagtaataaagtattatagatctaaattttaaatc

SEQ ID NO: 16027 - DNA, 368 bp, Zea mays
  Clone ID: LIB3061-037-B6_FLI
acagttgctgcaacaaattgtaccagctcttactcagctagctgtggcaaaccctgctgcctacttgcaacaactacttccattcaaccaactgactgtgtcgaactctgctgcgtacctacaacagcgacaacagttacttaatccactagcggtggctaacccattggtcgctgccttcctacagcagcaacaattgctgccatacaaccagttctctttgatgaaccctgccttgtcgtggcagcaacccatcgttggtggtgccatcttttagattacatatgagatgtactcgataatggtgccctcatagcggcatgtgtttcctaaaaataatcaatatattgattgagatttatctcgat

SEQ ID NO: 16028 - DNA, 855 bp, Zea mays
  Clone ID: LIB3061-037-E12_FLI
acatagtgaagtacactagcaacatcttagcaccaatggcagccaagatttttgccatccttgccctccttgctctttcagcaagcgttgctaccgcgactattattccacaatgctcacaacaatacctctctccggtgacagccgcgagatttgaatacccaactatacaatcctacaggctacaagaggccatcgcagcaagcatcttacggtcgttagcattgaccgtccaacaaccatatgccctattgcaacaaccatccttaatgaatctatatctccaaagaatcgcagcacaacaactacaacaacagttgcttccaacaatcaatcaagtagttgcagcgaaccttgctgcttacctccagcaacaacaatttcttccattcaatcaactagctggggtgaaccctgctgcttacttgcaggcacaacagctactaccattcaaccaacttgtcaggagccctgctgccttcttactgcagcaacagttgcttccattccatctacaagttgtggcaaacattgctgctttcttgcaacaacaacaacaattgctgccattttacccacaggttgtgggaaacattaacgccttcttgcaacagcaacagttgctaccattctacccacaggatgtggcaaacaatgtcgccttcttacaacaacaacaattgctgccatttaaccaacttgctttgacgaatcctaccaccttattgcagcagcccaccattggtggtgccatcttctagatttttttatgctttatactgtaataataaagttctcatactgatatgtgcaacttctcagtaataaaagattagagatctatattttaagttc

SEQ ID NO: 16029 - DNA, 782 bp, Zea mays
  Clone ID: LIB3061-037-H2_FLI
gccccaactacccccagtctcggaagagaactatccagaagcgcaagactccaaagccgtcgccttcctatccatcccttcctcgccacgggggtcgcctgagatcacataaacaatggtgaaggctgttgctgtgcttggtagcagcgatggtgtcaagggcaccatctttttcacccaagtgggagatggccctaccactgtcaccggaagtgtctctggcctcaagcctggcctccatgggtttcatgtgcatgcgcttggtgacaccaccaatggctgcatgtcaactggaccacactacaatcctgcgagcaaggaacatggagcaccagaagatgagaaccgccatgccggtgatcttggaaatgtgacagctggagcagatggtgttgcaaacattaatgttaccgacagccagatcccactgactgggccaaactcaatcattggcagagctgttgttgttcacgctgaccccgatgatcttggaaagggtggacacgagctcagcaagagcaccggaaacgctggcggccgtgttgcttgtgggatcatcggactccagggctgaactgaaacgaatggtcgctggacttcgggggcgcctgggagtgccgtcaccactcaccagcaggctagaataacatcccgagacatcgtgaaataataataataagagcgcctgatatgtgatcagtggtgtactcgccattaagcacctgtggcaaccgatgagctgaactgtgttggactgttggataatgctggttcgcctgagc

SEQ ID NO: 16030 - DNA, 857 bp, Zea mays
  Clone ID: LIB3061-037-H8_FLI
gaccaacaagcaacatagaaagtggaatacagtagcaacaatagagcaacaatggcggccaagatattttccatccttatgctccttgctctttctgcatgtgttgctaacgcgaccatttttcctcaatactcacaagctcctatagctgcccttcttcccccataccttccatcaatgaccgcttcagtttgtgaaaacccagcccttcaaccctacaggctccaacaagcaatcgcaacaagcaacttacctttatcacccctgttctttcaacaatcgccagccctatctttggtgcagtcattggtacaaaccatcagggcacaacagctgcaacaactcgtgctaccagtgatcagccaagtagctctggcaaacctttctccctactctcagcaacaacaatttcttccattcaaccaactgtctacactgaaccctgctgcttatttacaacaacaacaactactaccattcagccagctagctactgcctactctcagcagcaacaatttcttccatttaaccaattggccgcactgaacccctctgcttatttccagcagcaaatactactaccatttggccagctagctacaacaagccccacttcctttttgaaacaacaacaattgcttccgttctaccagcagtttgtggctaaccccgcaaccctcttacaactgcaacagttgctgccctttgtccaacttgctttgacaaacccagcagccttctaccaacaacacatcattggcggtgccatcttttagattgcttattagttgtaattcaataatgaagttttttggctgatgtatgtggcctcctagaaataagaagttacatttcc

SEQ ID NO: 16031 - DNA, 445 bp, Zea mays
  Clone ID: LIB3061-038-F5_FLI
caccagaagcgaaggcggaggcggaggagcggaggtaggagatctcgagcaagccggaggcagaggagatgaagacgttcgacccgtggccggtcttcttccgccgggagtggaagcgcaactggcccttcctcacgggtttcgccatcaccggattcatcatcacgaagatgacggccaacttcaccgaggaggatctcaagaactccaagttcgtccaggaacacaagaagaagcactgacgaaccaggtgaaggagttgtcagaaacgcatgtttggccagccagttctgttatgcttttgaatgaaaaatttagacccttctttctcgtttccttaatcgaaatgcttgcactctatgttccatttgtaatgtaataagaggcaaatggattgaaccaacaacaatcaacttctgattgaaaaatatcgatgtgtggcctg

SEQ ID NO: 16032 - DNA, 1002 bp, Zea mays
  Clone ID: LIB3061-038-G8_FLI
cccatgtaagagtgtgcctgcaaaatattctagcactgacaagagacgcttagaaggaatggatgcttctgatgtgaaatcgaagggtccctcaggtatcaaggagaaagagccagtacaagtgaggatagacttggaagacaaagagacaactccgtcatttcaagtgctaaacgacaaaacatggagtccagacccaaagttatcttcgcacatggacaggctgaagaagcaacatgctgaagctgagagttatcagataaggaccaggaatgagaatgctgtcgagacccaaagccctccaaaaaatggagtgtcgttgttgtctaagccatatgttgataggagggaacagaatggtgattctgatctattggggcatggcctaagagagacaggtgtgaagaggaaaagatcacatcatgacgtggagcaaaacgatgatctgtctgattcctctgttgaatctttgcctggaatggagatttctccagatgatgttgtcagtgctattggtcccaagcatttttggaaagcgagaagagctattgtcaatcagcagagggtatttgctgttcaagtattcgagctgcataggttgatcaaagtgcagaagttgatcgctgcatctccacatgtacttattgagggggatccttgccttggcaaatccttggcggtgagcaagaaaaggctggctggagatgtggaaacacagcttgaatcagctaaaaacgatgatggcgtgcgaccaacgcagctagagcactcgaaagagaagactgaagcgaaccaaccttcaccatctcaagacgaacaggccgcaactaatggtgacgttgctgcctcgatgcataccccttccgacaacaaacagaagagctggtgcattcctgcacctccaagtcagtggctgattcctgttatgtccccgtctgaaggacttgtctacaaaccttataccgggcactgccctccggtgggaagtcttttggcgccccc

SEQ ID NO: 16033 - DNA, 868 bp, Zea mays
  Clone ID: LIB3061-039-A12_FLI
gaactagcaacatacatagtgaagtacactagcaacatcttagcaccaatggcagccaagatttttgccatccttgccctccttgctctttcagcaagcgttgctaccgcgactattattccacaatgctcacaacaatacctctctccggtgacagccgcgagatttgaatacccaactatacaatcctacaggctacaagaggccatcgcagcaagcatcttacggtcgttagcattgaccgtccaacaaccatatgccctattgcaacaaccatccttaatgaatctatatctccaaagaatcgcagcacaacaactacaacaacagttgcttccaacaatcaatcaagtagttgcagcgaaccttgctgcttacctccagcaacaacaatttcttccattcaatcaactagctggggtgaaccctgctgcttacttgcaggcacaacagctactaccattcaaccaacttgtcaggagccctgctgccttcttactgcagcaacagttgcttccattccatctacaagttgtggcaaacattgctgctttcttgcaacaacaacaacaattgctgccattttacccacaggttgtgggaaacattaacgccttcttgcaacagcaacagttgctaccattctacccacaggatgtggcaaacaatgtcgccttcttacaacaacaacaattgctgccatttaaccaacttgctttgacgaatcctaccaccttattgcagcagcccaccattggtggtgccatcttctagatttttttatgctttatactgtaataataaagttctcatactgatatgtgcaacttctcagtaataaaagattagagatctatattttaagttc

SEQ ID NO: 16034 - DNA, 1047 bp, Zea mays
  Clone ID: LIB3061-039-A5_FLI
cgcgagaccgccggcgaatttgttgcagtgcactgaagccaacagctgcaggacaggaggaggaggaggagctgtttcaacaattatcccccgcgcgcccaggccagccccgcccccgcccgcccactctcccgaggattccaggttctcaacacaacagacaacaccgctcaccgcatatatatatatatagatgggttccgaggggccttctcccgtcaccgtccacgtcaccggattcaagaggttccatggagtcgccgagaacccgacggagaggatcgtgcgcggtctccagccattcatggagacgagagggttgcccaagggccttgttctcgggagctgcaccgtccttgaggccgccgggcagggcgcgcttggcccgctgtatgaactgctggagtcgaccgtctccggccgggaacgtcaggagcgagtaattctgctccattttggcgccaacagtggttcacataggtttgctcttgagaatcaagctgttaatgaagctactttccgttgccctgatgagctaggatggaaaccacagaggacacctatcatatcgtcagatggaagcatcttacacgcaagacagactacactgccagtggaggagataagcaagtctctccaacagatgggatacgacgtggtgccttcagacgacgctggtcgatttgtgtgcaactacgtctactaccactcactcaagtttgcagagaagcatgggatcgggtctctgtttgtccatttccccctcttcctggcaatcgacgaggaagtccagatgcagtttgtcgcttcccttctagaggtcctcgcttccttgaacttccagtgaacctagtggtagatctaccacttcccggtggtgtattgttcccagattatttgggaaaggtttaagttgttcccaacttacctgtggagaataagatcgaggaatcattcgtggaattatgtgtgtggttcaaaatgtgtaggggaacaaaaacaagtcttctcaaagaacatgtacatgcagtccagatgttaatatcc

SEQ ID NO: 16035 - DNA, 1035 bp, Zea mays
  Clone ID: LIB3061-039-D8_FLI
cacactgaaccttctactcaagaacctgaggctcaatccattgggtggggacaaggtgttgaccatgctggcgagtcagctgcgcaagggaacggtcatggatggcaatggctcaaagatcctcggttggactaccttggttacagaggaatttttccagctgacacgataccacccctagttgagtctgacaaagaagcagatgaacgccattatcaactttggcggatagaaaatggagtcgcagaaggttcgactgagatcccaaaaggcgaagcaatcccgctggagtacaatcttgctggcttgaacgccatttcgttcgagaagggctgctacatcgggcaggagcttatcgctcggacgcaccatcgcggtgtcatccggaagcgcctaatgccaatgaagttcgtcgacgggaatgggcaagaactcgagcaggccgtcgctccaggctcggaggtcgtggacgaggcttcaggcaagaaggtcggggcagtgagcaccgctctgggctcccgcgggatgggcctgctacggctcgaagaagcactgaaaccgggctcggccctccgcgccggcggcaacagggacgtgagggtccaggcgatcaggccggactggtggccagccgagtggacgcaggtgcttcaggaacagcgcgcagccgcttgacagcagcggagctgtatgtagtactggaccccaaacacaaaccctgcctgtcgtcagttagtcgcctcttggaagaggacccaaacaaaccccatagctaaccgttttcagcttcggtttttagtcttgttgtctggtgtatcaaggcggagcctgttttttttcctcgcagaagacgaggaaggcaggagggcctgtttctcttcctctctgcctgctgctgtgttcagctgcggcatctcgttcagaacgagatgagcaaactgtgtgagtgtgtgtgtggcccaaacacgcagtgtgttcgaataagtttatctgtactacactgaataataagtttctctgtcttgatgatcttgt

SEQ ID NO: 16036 - DNA, 762 bp, Zea mays
  Clone ID: LIB3061-041-D12_FLI
accaggacgacgaggacggcgctggtggtgctagtagccgcggcgacaagagacggggccagaaagacgacggcgtcggccagcagggccacggcggcggacgtggtgaggcagttctacgacggggtgaaccggcgggacctggcggcggtggagccgctcatcgcggagggctgcgtgtacgaggacctggtgttcccgcgccccttcgttgggcgggagcgtgtggtcggcttcttcggcgagttcatggggaccatcagccccgacctgcagttcgtcatcgacgacatctccgccgaggactccgccgccgtcggggtcacctggcacctggagtggagggggaggccgtttcccttcagcaggggatgcagcttctaccgcttgctcggctcgggctcggactcggacgcggattcggactcggagcagcagcggctgcagattgtgtatggtcgagactgcgtggagccggccgccaagcccggggatttggcactggtaatcatcaggggagtgacatggatcctcgaacgatttccgagccttgcaagcaggctctgatgaccccaggtccccaaccgaggcaatagctacaggatacgctacgcatggctttgctctcgaaagtccagtgagatcgagctagcagacgtgtataatgttctacaattaatacattattctaagaaactggccaaacgtatgtctcgtcgtgacgaaaagaaaaataaaaatataggcccaattacttttatt

SEQ ID NO: 16037 - DNA, 1599 bp, Zea mays
  Clone ID: LIB3061-042-A9_FLI
gctgatttggcacgcggtgtactaggcctacacaccagggggatattgatcctaaatatgaaaccttgcaattttctcatagacgaaaatgattgtgctgtgctgggggattttgggattccatccctgctgtttggcctttcattacctaatccggaccttatccagaggcttggaactccaaattacatggctcctgaacaatggcaaccaaacatcagaggtccgattagttatgaaactgattcgtggggttttgcgtgcagcgtccttgagatgttgactggcattcagccatggcgtggaaagtcagcagatgagatatatcagttggttgtcttgaagaaagaaaagccaatattcccgtgcagtctacctccagacattgaaaatgtgctttctggatgttttgaatatgactttagaaaccgtcccttgatgaaagacattttgcatgcatttgagagtgctaaaggtgcagatcatgacaacattggttggggcaattctgaaaatgctatggtagacaggataaccatgccaaatcgcatcaattggttacactttaaggacaagcttcaagtgggcgacaaggtccgttcaagaaagcttaaaaactcttgcggtcctgaaactataaaatccctgatggaaccatagttggcattgaggacgatggcgagcgtgacgcttacgttcttgtacgagtccacgcgctacacaaccctttaaaggttcgcttttcaacggtggagagggtaacatatggttttgctgctggagactgggtgcggctgagggaggaggacaagaagcgctctcaggttggcattcttcacagcatcgaccgtgacggtgcagtggcagttggtctgataggagtggataccccttggaagggcaattattcagacctccagatggctgaagcctactgtgtcggacagtttgtgcgcctgaaggccagcatttcaagcccaaggttcgaatggcagcgaaagcggggtggattagcttctactggccgaatttcacagatacatccgaacgggttgctcgtcgtgaaatttcctggcaagtttaaccttggcgaagtgtgcagttgcctggcagacccctccgaggtggaggtggtgagctttgacaaatgcgaggggattgtgaagaagtacgagcatctcgaggacttccattgggcagtgaggcccctgttcgttgctattggtttcctcacggcgatcaagctgggtgtttttgttggcaagagcatttcgaggccgaggagccggaaggttgccagcatctctgatcagagtggagattaccagcagcagcaccagcagcaggtagtccaacaaagtgctaatgcggcgtggcttcctccaccagttgcaaacatgttcttcggagatagtgttgggacttctggataagaaatcataactggcccggagttttgcttaaaatagcaatttggaattgtggttcctagttgtgtgcatatttaggcctgaaatggtttatcccttatctaagcatctgtacatatctgccttatgcaccacaagttctgtaaataaactctagaattatcgtctt

SEQ ID NO: 16038 - DNA, 826 bp, Zea mays
  Clone ID: LIB3061-042-C1_FLI
cttcgatattttcgctgccgggagtgagacttcatcgacggtgctagcgtgggccatgtcagagctcgtcaggaacccacgggtgctgcacaaggcgcagtcagaggtgagggagacgttcaagggccaggaaaggctaaccgaagacgacatgcccaggctgagctacctgcacctggtgatcaaggaggcgctacggctgcacgcgccggtgccactgctgctgccccgggagtgccgggagccgtgccgggtcatgggctacgacgtgccggagggcaccagggtgttcgtgaacgtctgggcgatcgggagggacgacgggttctggggcgacggcgaggtgttcaggccagagaggttcgacggcggcggcggcggcgtcgacttcaggggcaacgacttcgagttcaccccgttcggggccggcaggaggatctgccctggcatcgcgctcgggctggccaacatggagctcgcgctcgctagccttctctaccatttcgactgggagcagcccgcggacggccctggaactggaagcagcggcagcctcgacatggcagaggccttcggtataacgctgaggaggaagtccaagctcttgctcaaggccacacctcgtgtcgaaaccaagtagttgttctatgctagtactatgatgcatcggcagggcagtcatccgatccgtttgccgcttctacttgtagagccaatggatcaaaggcactgcctggttgagtgcaatgcaactgtagtttccaccagtttgggaccacctcgtgtgtatcgtttgatatttaagtctcgcgatcgagtacttatt

SEQ ID NO: 16039 - DNA, 987 bp, Zea mays
  Clone ID: LIB3061-042-F10_FLI
gatgtggtcgcgcacaagggcagggttcaccttgaacattatcgacactcctgggcttattgaaggtggatacattaatgagcaggctgttgacatcattaagagatttcttctgggcaagactattgatgttctcctgtatgtggatcgtttggatgcgtacagaatggatacacttgatggacaggttataagagccatcaccaattcatttggaaaagatatttggcgaagatcattggttgtgttgacccatgctcaactctcaccacctgatggaatcgagtataatgatttctttacaagaaggtcagaggcacttttgcgatacatccactcgggagcaggaatcaagaaacgagaatatggggatttccctttgccaatagcattggtagagaacagtggaaggtgcaagactaacgagcatggggagaagatacttccggatggaactccgtgggttccaaaactgatgaaagaaattactgttgttatctcaaacgggagcaagcccattcatgttgatcagaagttaattgatggtccaaaccctaacaatcgctggaagatgttcataccaattatacttgctgtggagtacttcttggtagtaaaaggaatccggagggcgatccatgcagatatcgcaaatgggaaggtggatgactgggagcagcgttaccgggacttggttggaagcagggaccctgtggagcagaaaggttctaccacccggaaccgcaaagcctaagttggtgtagcagaaatgattttattcgtgttgtgacccactcgatctgcttgctgttccttttcctaattatgtgttgagggctttatagagttcgctggttctacttgaaaaataattgctcgtgttgtagttgataagaatatcttttccattttatgatgcttggccctcttcgcaattttgaatattgttatcaaacccctgctattatgtttagcaagttgttaaat

SEQ ID NO: 16040 - DNA, 868 bp, Zea mays; identical to SEQ ID NO: 16033
  Clone ID: LIB3061-042-G7_FLI

SEQ ID NO: 16041 - DNA, 955 bp, Zea mays
  Clone ID: LIB3061-042-H6_FLI
ttttgagcattcagaaacacacctagcgaagcgcactagcaacgacctaacaacaatggctaccaagatattatccctctttgcgcttcttgccctttttgtgagcgcaacaaatgcgttcattattccacaatgctcacttgctcctagtgccattattccacagttcctccctccagttacttcaatgggcttcgaacacccagctgtgcaagcctacaggctacaacaagcgcttgcggcgagcgtcttacaacaaccaattgcccaattacaacaacaatccttggcacatctaaccatacaaaccatcgcaacgcaacagcaacaacaatttctaccagcactgagccaactagctgtggtgaaccctgtcgcctacttgcaacagcagttgcttgcatccaacccacttgctctggcaaacatagttgcataccaacaacaacaacaattgcaacagtttctaccagcgctcagtcaactagccatggtgaaccctgccgcctacctacaacagcaacaactgatttcatctagccctctcgctgtggttaatgcacctacatacctgcaacaacagttgctgcaacagattgtaccagctctgactcagctagctgtggcaaaccctgctgcctacttgcaacagctgcttccattcaaccaactgactgtgtcgaactctgctgcgtacctacaacagcgacaacagttacttaatccactagcggtggctaacccattggtcgctgccttcctacagcagcaacaattgctgccatacaaccagttctctttgatgaaccctgccttgttgtggcagcaacccatcgttggaggtgccatcttttagattacatatgagatgtactcgataatggtgccctcatagcggcatgtgtttcctagaaataatcaatatattgattgagatttatctcgatatatttct

SEQ ID NO: 16042 - DNA, 845 bp, Zea mays
  Clone ID: LIB3061-044-B3_FLI
acatagaaagtggaatccagtagcaacaatagagcaacaatggcgaccaagatactttccctccttatgctccttgctctttctgcatgtgttgctaacgcgacaattttccctcaatgctcacaagctcctatagcttcccttcttcccccataccttccatcaatgatagcttcagtatgtgaaaacccagctcttcaaccctataggctccaacaagcaatcgcagcaagcaacatacctttatcacccttgtttcaacaatcgccagccctatctttggtgcagtcattggtacaaaccatcaaggcacagcagctgcagcaactcgtgctacctgtgatcaaccaagtagctctggcaaacctttctccctactatcagcaacaacaatttcttccattcaaccaactatctacactgaaccctgctgcttatttgcagcaacaactattaccattcagccagctagctactgcctactctcatcaacaacaacttcttccatttaaccaattggccgcactgaacctcgctgcttatttgcagcagcaaatattactaccatttagccagctagctgcagcaagccgtgcttccttcttgacacagcaacagttgctgcctttctaccagcagtttgcggctaaccccgcaaccctcttacaactacaacaattgttgccctttgtccaacttgctttgacaaacccagcagcctcctaccaacaacacatcattggtggtgccctcttttagattgcttattagttgtaattcaataataaagttttttggatgatgtatgtggccaaccagaaataagaagttacatttccagattc

SEQ ID NO: 16043 - DNA, 465 bp, Zea mays
  Clone ID: LIB3061-044-F8_FLI
ccttgctgcatactctcagcaacatcagtttcttccattcaaccaactggctgcattgaactctgctgcttatttgcaacaacaattaccattcagccagctagttgctgcctacccccagcaatttcttccattcaaccaactagcagcattgaactctgctgcttatttacagcagcaacaactactaccattcagccagctagctgatgtgagccctgctgccttcttgacacaacaacagttgttgccgttctacctgcacgctatgcctaacgctggcaccctcttacaactgcaacaattgctgccattcaaccaacttgctttgacaaacccaacagtgttctaccaacaacccatcattggtggtgccctcttttagattgcttatgagttatagttcaataatgaagttttttggatgatgtttgtggcgtcccagaaataagaaagtacatttct

SEQ ID NO: 16044 - DNA, 1347 bp, Zea mays
  Clone ID: LIB3061-045-A8_FLI
tcgatcggtgcttttaatctctgagcaagcgatcgagctcaccaacaaccaccgcgctcaagagtagcagccggccggagccgaaaacgacgaggcggtggcatggggaggccgccgtgctgcgacaaggtgggagtgaagaaagggccgtggacccccgaggaggacctcatgctcgtctcctatgtccaggagcacggccccgggaactggcgcgccgtgccgaccaacaccgggctgatgcgctgcagcaagagctgcaggttgcggtggacaaactacctccggccgggaatcaagcgcggcaactttaccgaccaggaggagaagctcatcatccacctccaggctctccttggcaaccggtgggcggcgatagcgtcctacttgccggagaggacggacaacgatatcaagaactactggaacacgcacctcaagaagaagctgaagaagatgcaggccggcgaagggggcgggggagacggcgacggcgcagcaggtgcctcggaaggcggcgccgtcgccaccgcaggcgcgggagggaagcgcccggccgtgcccaaggggcagtgggagcggcggctgcagaccgacatccacacggcgcggcaggctctgcgcgacgcgctctcgctggaaccttcgccttcggcgccgccgccggctaaggtggagcctctgccggcgaccgccccggggtacaagacgtacgcgtctagcgccgagaacatcgcgcggctgctggagggctggctgcgccccggcagcggagggggcaaggggcccgaggcgtcgggctcgacgtcgacgacggccacgacgcagcagcggccgcagtgctccggtgagggcgcggcgtccgcgtcggcgagccacagtggcggagcgcccgcgaacgcggcggcgcagacgcccgagtgctcgacggagaccagcaaggtggccggcgcgggctccgcgccgccggcgttctcgatgctggagagctggctgctcgacgacggcatggggcacggcgaggacgggctcatgaccgacgtggtgccactaggggaccccagtgagttcttttaatcaaggccgctgtacaagtaccactaaaagcaaattaatcaagtagagatgcaagaacaaaagggaaaaaataatcgccgagttattaggtaataactagttaagcagaaatccaacgaaccaaatttctttgaattctcggtgatatggatcgagttgagtgtcgatctagtttgttttaatcccctcttttatcttttttacgctgttgtttctctgatgttagggattggaactgatcgtgtaagcttatactaatgacaggttcct

SEQ ID NO: 16045 - DNA, 2457 bp, Zea mays
  Clone ID: LIB3061-045-B12_FLI
cgcaagtgcatcagcctgaacagcgttggctttgatgtgaagcgggagatcttggtgccctctaagatgtcgtcatctgaacggcggtaccttcgaaagagattccgggcagagcttgattcggtgcgggatctcctcaagaagccagagtttgcagcccctgttcctctcaatcgggcacctgctttgtcatcctcagctgcacctcgagctaagaagccacagaagtctcagcgtggtgggaccaatgttatacgtggtgcaaagggacgattcttgcctacaaaaccgcggccggagacttccactgtgttatctgaagctgcagcgtttaagcagtgtgaagctattttgaagaagcttatgactcaaaagtatagtcatatattcaatgttccagttgatattgtgaagctgcaaattcctgattattttgacattgtgaagaccccaatggatcttggtactgtcaagaaaaagcttgaatctggttcatacacaagtccatcagattttgctgctgatgtccggctgacctttaacaacgctatggcttataatccgcgggggcatgctgtgcacgacatggccatccagctgaacaagatgtttgagagtcgatggaggccaattgagaagaaattggcttctgctgccactgagaaacatgttgaggttgacagggctgactcgaagaggaggaagacacctcctgtggaccgcagtgatgtgtcaatggagtgtgcacgacagacagagccagaaacaccgaagatgacagctgaagagagggaagcctttgggaactgcttggcatccatatctgatgagttacctcctcacatatttgaactgctacaacaatgcatcgacagcaatgcagatttgtctggggatggagagatagagattgacatccatgctgtcagtgatgacttgttatttgagctgaagaaacatgttgacaagtatttgcaagagaaagagcagagccagcaggtgaaatctgagccctccgagaatgaagctgtgaatgtatctggccttagccactcttctacaaatccttgcaaaggcggcgaacctatcgaagaggatgtggacatctgtggcaatgcctcacctatcatgctagacaaagatgcacaaatcaggaatagcaagtgtggtagtccaagtagttccagcagcgactctgaatcatcttctagcgattctgattcaggcagtgactctgaaagcgaatcagaaaaagttggcagccctggaaagcttgcgaaggggactaagaaacctgatcagctggtggagcaagaaaagagtgatgttattagtccagctgatgccaaccgtcctgctgctattgtggggcttcatggggaggacagtgagtcaaagcctgcaccagggggggaaaactcagaacccgatacacaagtctcaccagacaggctattgcgagcagcccttttgaggagccgttatgctgatgtgattgtcaaagctcgtggcattcttagtcagggtggagacaaacaggaggagctggaaaagctacagaaggaagagaaagagcgcttgttggctgaaggtactgcagccatggaggcttgtagagccgaagctgaagctgaaaagaagcgtaaacggaattttgagagggagaaggctcgtcaggccctacaggagatggagagaactgtagaaattaatgataacctccatctcaaggatttggaattgcttggaacagccacaacagaacatattgtaagctctgttgatgagactagtccagaacgctctcatgatggcatggccggctatcatccaggagctgtcaatcctttggagcaacttggactgttcataaaggtagacgatgaggaagacgacgagcagtgttccctgcattaaagaaagaagagaaaggagaaatcagctgatggtgctgtgtttttccatgccctgtcacgggctaggggctggtgccaacctattgatccaaagtgatcacctgttgcgggccatcatgtgtggcaatggttctaaactggggtggtgagagccgtccattttgttaaaaatatgcatgggaaggatgaagatcatcttgcatagtcatttgcttccaggaggcgcacaggaggtggagtaaaaacgaacgtatttatggtgcctagaggacggttttttcagccactgccaaaacggcttgaatgacgccaccgaagtagtggagttcaaatggctcattgtttgccgcaacctcaatttcaagcgggtttgttcagcggcttatagcttcttctctccttttgttgtctcatctgttttagattgtagaatttgggctagttgcttcctgctgtaaatccgaattttgatgtagtgacggaagtgctacctttttgttgagcatgatcgaaaagtttacaagaaaaatcgtttttttgt

SEQ ID NO: 16046 - DNA, 1187 bp, Zea mays
  Clone ID: LIB3061-045-C3_FLI
caagttcactgcagcaacttttgcaaggaccttttctggtttacatgctagaggaatcgagcctggtgttctttatccagctgtctctgttgagcagtttcacgaaccccatgcttataagtaacttcatgcttgcatatctccttacatttaggttgaatttcctatcaatcaaccggtttgagaggaaaaagaatcttgatcttgccatttcagcatttgctttgctccgttctgctgcttggactatacctggtgatgctctacaagaagcaacattaacagtggcaggtggctatgataagcgtctcaaggaaaatgttgaataccttgaggaactcaaaagactcgcattgacggaaggggtttctggacaggttaaatttgttacatcttgctcaacatctgaaagaaacgagcttctctccaactgcctctgcgttttatacactccaaaggatgaacatttcggtattgtacctcttgaagccatggccgcccataagccggtaattgcctgcaatagtggtggcccagtggaaacagttgtgaatgaagtaacagggtttctgtgtgatccctctcccgcagaattctccaaagccatgctgaaacttgtgaatgatcatgatcttgctgttagattgggtgaacaagcacgtgaccatgtggtgcaaaaattctcgaccaagacatttggtgatctcctcaacagctacgtcttgaacatctaccatgagaggatggaatgatctataatactgggtcagccatgccatatgaaaacaatttgttcaatacaaggttttttttgcacctttacgtctaatctgattttgatagacacacataatgacaatgacactccattgaagccctttggcatactatagtcactctatgatctgtatattgttttcaattataacatcaaatttggcttggtccatcctggagtctggaatggagctggagtagagatgacaatggggacctgattctctgtgtggaattcctttattaggagatgaggaagtttcttctccgatggaaatgtaaatggaaaaaaattatccccggggatagggatgggaatggggaagcattctccatcccagttctccacgtgatgatgttttcatgtaatagtttatgataaaaataaataattagtttgttaagagatc

SEQ ID NO: 16047 - DNA, 820 bp, Zea mays
  Clone ID: LIB3061-045-G8_FLI
ccacaatgctcacttgctcctagttccattattccacagttcctcccaccagttacttcaatggccttcgaacacccagctgtgcaagcctataggctacaacaagcgattgcggcgagcgtcttacaacaaccaattgcccaattgcaacaacaatccttggcacatctaacaatacaaaccatcgcaacgcaacagcaacaacagttcctaccagcactgagccacctagccatggtgaaccctgtcgcctacttgcaacagcagctgcttgcatccaacccacttgctctagcaaacgtagttgcaaaccagcaacaacaacaactgcaacagtttctgccagcgcttagtcaactagccatggtgaaccctgccgcctacctacaacagcaacaactgctttcatctagcccgctcgctgtggccaatgcacctacatacctgcaacaagaattgttgcaacagattgtaccagctctaactcagctagctgtggcaaaccctgttgcctacttgcaacagctgcttccattcaaccaactaactatgtcgaactctgttgcgtacctacaacagcgacaacagttacttaatccattggcagtggctaacccattggtcgctgccttcctacagcagcaacaattgctgccatacaaccggttctctttgatgaatcctgtcttgtcgaggcagcaacccatcgttggaggtgccatcttttagattacatatgagatgtactcgataatggtgccctcataccggcatgtgtttcctagaaataatcaatatattggttgagatttatctcgat

SEQ ID NO: 16048 - DNA, 1608 bp, Zea mays
  Clone ID: LIB3061-046-C4_FLI
gtctcccacaaccgccgcgcgcaagccctagcccgatctcgccggcgacagacaccagatctcgccgcccgttgcgcgccgatacgcgccccgccggattcaccgctcctcgcgctgcagcacgcccgggcctggaaaaagaggcaactctgggggaataacggatttcaccttgtttacaggttactgcgtgacatgtagtattgtataattggaggttgtcaccatcaccacaaagcatatgttgtgatttgtcgatggcgaggagatgaaacaggtgtaggggcggagcagcaaggacatgacagccatgccgcatccgcgccaccgaggcgctgctaagaagcccatgtggatcatagtgctattgtctttggtttgtgttgcacttatgggggcctatgtctacccaccacggcgctactccgcatgctacttctttgcttcgagtgtctgtactccgttcaaggattggctacctgctgttgctcgtgagcgaactgatgaagagatagtttcatcggtggttattagggatcttctttcaatgcctatggctatgtcaaagaacccaaagattgcctttatgttcttgacaccgggttcattgccttttgagaagttgtgggagaaatttttacagggtcatgatggccgatattctatctatatccatgcatctcgtgaaaaacctgtacattctagctctctttttgttgggcgtgaaattcacagtgaaaaggtagtatgggggaggatttcaatggttgatgcagagaagaggctgttaggaaatgcattggaagatgttgataatcaatttttcgtcttgctttctgacagctgtgttccactacatacatttgattacatatataattatctgatgggaaccaatgtcagtttcattgattgcttcttcgatcctggcccacatggaactggaaggtatacgatggaaatgcttcctgaaatagaacagagggacttcaggaagggtgcccagtggtttgctataacacgaaggcatgctttattgattctggcagacaacctttactacaataagttcaagctgtactgcaagccagcagaaggacgcaactgtattgctgatgagcattatttgccaaccctcttcaatatggttgaccctggtggaatagctaactggtcagtgactcatgttgattggtccgagggaaaatggcatccaaggtcatatagagctgcagatgttacatatcaactcttaaagaacataacgtctgtcaatgagaatgttcacattacaagtgatgataaaaaagttgtgacacagaccccatgtatgtggaatggaacaaaaagaccctgctatctttttgctagaaagttttacccagaatctttgaacaacctgctgaagctattctccagttacacatcggcttgagttctacatgattcttttggcattttgcctaggagattcctctaggatttatctttttgtgcttcatgtaaattgtggaattgatacttagaggcttaacagagttacagatccagggccttgatgtaattctgagccccttggtagggctgaggtgatgtttgtttattatt

SEQ ID NO: 16049 - DNA, 618 bp, Zea mays
  Clone ID: LIB3061-047-A4_FLI
cagttcccaccctagtaggaacaggatcacagttgatgtaaccaactcatatgagcatttccactgccatggcgtgaccgtggctgtcacatggcctggtgctgaagcccggggctcgtttggatctcgaagcagcaggcacagcgattcagatggagcagtgaactctggccgagacatcccagctgagaacagccagcacaattctgacgcaggcaccagtagacatccaggcgatagagcatccacatcctggcctgacgaaaagttaccgtcagccaagagcagccctggtcactgctcgtccgatctttgcattggagctatggatgtccagcgccggtctgcgtgggggttggtgattgtcacagctgggcggggaggcgagatcagggtgttccagaattttggcttcccggttcaagtgtaaagctagcgtgagtgagatcatgcagatagggtttgtttggttctttactgtatataccatcggtagatgtagattgccgacagttttacgaaaacttccctgtgtttctctgtctccttgggtgcttcaagattgtacccccagaaccacactatcatatagttagcaatatcacttgttgatacaat

SEQ ID NO: 16050 - DNA, 823 bp, Zea mays
  Clone ID: LIB3061-047-H6_FLI
ctcggcacgcaggcagaggcagcatagcagcagccaactccatccatcctctttcccctcctcgcttcgcttcctcggcggattcctcctccctcgaccgtccccgtccccgtccccttccggcgcgcgagctcgcccgagatggcaaacgcgagatcgggtgtcgctgtgaatgacgagtgcatgctcaagttcggcgagctgcagtcgaagaggctgcaccgcttcctaactttcaagatggacgacaagttcaaggagatcgttgtggaccaggtcggggatcgcgctaccagctacgaggacttcacaaacagcctccccgagaatgactgccgatacgcgatctatgatttcgactttgtcactgcagaagatgtccagaagagcaggatcttctatatcctatggtccccatcctccgccaaggtgaagagcaagatgctttatgcaagctcaaaccaaaaattcaagagtgggctcaatggcattcaggtggaactgcaggctactgatgcaagtgaaatcagccttgatgagatcaaggatcgggctcgctaggcatcatcatgatcatgcatcatggacttggcctactactgtggatttgtatgccattatagacttggtgctgtgaaagactgcttgatgatttgcgggtttgttgctgtgtaaaaaaaggtcccatggctcccagaagaccatgaaggttcggatctatcatgtaattccttgttatctgccaattatgtatggactatggacatgtgttgcgctgttcaacttactactacaaataagtaatcgataatgttcccttccc

SEQ ID NO: 16051 - DNA, 626 bp, Zea mays
  Clone ID: LIB3061-048-D12_FLI
tcgcagcaagcaacatacctttatcgcccttgttgtttcaacaatcaccagccctatctttggtgcagtcattggtacaaaccatcagggcacaacagctgcagcaactcgtgctacctgtgatcaaccaagtagctctggcaaacctttctccctactctcagcaacaacaatttcttccattcaaccaactgtctatactgaaccctgctgcttatttgcagcaacaactattaccatttagccagctagctactgcctactctcagcaacaacaacttcttccatttaaccaattggccgcactgaaccccgctgcttatttgcagcagcaaatactactgccatttagcgagctagctgcagcaagtcgtgcttccttcttgacacagcaacagttgctgcctttctacaagcagtttgcggctaaccccgcaaccctcttacaactacaacaattgttgccctttgtccaacttgctttgacaaacccagcagcctcctaccaacaacacatcattggtggtgccctcttttagattgattattagttgtaattcaataataaagttttttggatgatgtatgtggccaaccagaaataagaagttacatttccagattct

SEQ ID NO: 16052 - DNA, 758 bp, Zea mays
  Clone ID: LIB3061-048-G9_FLI
gcccaagttgccccagagcttgtagtttactcggagctacttagtacaaagaggctatacatgcacggtgtaacgaccgtaaagccagggtggcttttgaagtatgccagttccctctgcaccttctctgcgcctctggaagatccgaaaccgtactatgacccactgaacgaccaagtctactgctacgttagcccggtcttctctcgtcataactggcagcttccgttgcacagtttacctatcaaagacggtgcgagccggctgcaggtgtttgcatgcgcgttgcttaaaggggacgtcctgccatgtctacgggacgccaaggatttcctcgcgctgtcaccatccgctgtgttggggcctgccaggcaacgtagagtgggagaccttcttagcaggatgaagatcggtccgaagttagtcgacagccgggcagcactgagaggcgtgtggaatttggatcctggttttctctatcctgagctcaagttgtggtaccaggatagattccatgaccagtttgacttggtgtgggagcagatgcaccaacaggttctccttgaggggcgcaagcttttcccaaagaggtccaagaaagttaaaggctaggccaaaaattttggtgcagttggttcgctggcagaagcttttgtgtgtgtgtggttttcaggaatagatacgagagatgcagtgagacatcatgcacaagcagttttgtctagacattttgccttgatctggatttgttccattgc

SEQ ID NO: 16053 - DNA, 933 bp, Zea mays
  Clone ID: LIB3061-049-E10_FLI
ggcgctgaagtgcagaatttaattcaacgcctccgtgtgatggagcagaaccagcagcagatgatggcacttttggcaattgttgtccagaatccagacttcctgaaccagctcgtgcagcagcagcgcaggagtaactggtggaatgatgatggtaacaggaaaagaaggttccaagctctggaacatggtcctgtagatgaccaagagacttctggtggaggcgcacaaattattcaatatcgtcctcctgttcctgaaacttccaatcagccaataccagcaaatgaagctttctattcaacccctgcacaaccagcttcaagccctgcacttgagatgcccatggatgtagagatgacttcaaacaatgttaatacctttgattcaactggcaatgattttactgacacctctgctctatgtgaatgggatgacatggatatatttggtgatgaacttgagcacattcttcaacagccagagcaggactttcaagtggaccctcctttaacagttgaggattatggttatgatcatccacggttagagcaggactatcagatggaagcacaacagaattgcaaaaatcctcaatatgctgatgtcataactgaagcatgagcggtggtcccccagaatgttgtccagtaacattagtggatagagatttgtgatgaacagaatcttgagactggcaggttagccaccattgggaacctgaagaccgtcgggattgctcagaattcagtatactaatactaatactaaaaaaaaaaatatacagtaacacatgttgactatacatgatttcgttttccttactcgctcgaccaaaggcagccgtacaatgtttttacttttgtccaggtgggagcatctaggtctttaaatggtttcggtgattaatggtgatcctagattattatgatt

SEQ ID NO: 16054 - DNA, 1107 bp, Zea mays
  Clone ID: LIB3061-049-G1_FLI
cccgtgcgtcgcgcagtcgcaagaggtggtggtttcaggggattatggaatgcttaacaagttttccaagaaatgttggaaaagagtacatctgttcaagcaagttggtgtccggaaaccaatggatccccaaaaggatttgctgctacgtctcttgttcgacaaactccagtcgatgccacaagttcactgatgtggcatgccccatgagcccagttattcgaaaaaggttacgctggagatgctttgctgcaagtttgaacttagaagatggccctgcaccctctgactcgacgtcatcttcatcagagcagactactgatgctgatggaactactaatggtgatgtatctgaaaatctgctttctcgaaagccgagctctgatgagttaaaggctcttttggctgattcggaacgaagtaagcttttgagaagactcagtgaagcaaatcaatataaccgattcctcaagagacagttgcaaataaaggatgatgcagtcgtaaaattcaaaggtgaacttgcggttttggaactagaactgcaggctctggttggcctagctgaagaggttgctaattttgatgttccgttagggtctaggaagataaacggaaaatatattcaatctcatcttctctccagattagaagctgtccatgatatgattatggaacaggtaaacagtgttgacgctttaaagacccaagaaattcctgtctactggattggcatggctgagaatgtgcagatcatgggttcattcgacggatggtcacagggcgaggcgatgtccatggagtattcaggtgactacggaagattctctgcaactctgaagctaagacctggaaggtacgagatcaagtttttggttgatggggaatggaaattgtcgcctgaatatcccactgctggagatggactcacgcagaacaatattcttgttgtggagtaatacaacttcctcatctagcattctagccatccaaacaatgccgaagcgtacctacatgtcttcttccctctgtaatactatgcttactatgtggacatgtggttgcctcacagaaatcgaataaattagcctatcctggcttatgctc

SEQ ID NO: 16055 - DNA, 464 bp, Zea mays
  Clone ID: LIB3061-049-G4_FLI
gtgatttcaggtggcgcgcctggcaagcataaaatccagggagtaggcccagggtttctacctgaagttctggacacctcggtcatcgacgagaccgtcaccgtgagcaccgaggaggccatggcgaatgcgaggaggctggccagggaagagggcctgctcgtgggcatttcttccggagcaaacctggcagcttgtttgaaggtcgcttcgagacaggagaacaagggcaagatgatcgtcactgtgttcccaagtggcggcgagagatacatcaactccgacctctttgcagatgtgcgagaggagtgcattgccatgacattttgatcttccttttttcttttggacactttggtctgaatggtgtcagcattctccacaccacacagacatatttccaggacatggtgttgtaaatttagagaaataagtgacatgctttctacatatttaaatagatt

SEQ ID NO: 16056 - DNA, 1942 bp, Zea mays
  Clone ID: LIB3061-050-B5_FLI
attaattcacaaaagctgagaagacggggggtcacacatcatacttcttttgccattgcaatggaaaacaactacgcatgcccaccacccagcaagggaaacctgatcacagtcttgagcatcgatggtggtggggtcaagggcgtcatccctgctaccttccttgcattccttgagtctaaactccaggtaaactctacacgtttattgttccttgagcctaaatgcatatatacatgcaagtttgagtgccatttattcgttggtgttcttttacatttttttaggagcttgatgggagcagcgcgcgcatagctaactactttgatgtcatcgctggcacaagcacaggtggtcttattgctgcaatgctggcagctccgtcgctgagcaatgccaagcaaccatgctatgaggccaaggacatcgtgccattctacctcgagcacagtcctcgcatcttcccatgcaggtttgtatggctagctgtttaacgaatatctgtacgatttcccatctgagactgctcagttttatctatctctaaattgtttatgtacaaggtaaccagaatttcgcgttttgtctcagtatgtatgtattactatatctataaaactacatggaaaaaaaaatacttcaccttgttattcgttctgatgctgcaagaccagaactgggattttgggctggttcttcaagatcctacaaacagttaaggtgatgatcaggccaaaatatgacgggaagtacctgcacaaagtgaccagtgatctgctgggtggtaccagagtggaagagacgctgacaaatgtcgtcattcctactttcgatgtcaagtgcgtaaagccaacaatattcagcacattcaaggcaagatctagtgccttgatgaatgctcgtcttgctgatgtgtgcattggcacgtccgcagcaccgacggtcctccctgcgcactactttgaaaccgtggatcaccgcactggcgcatcgcgtagcttcaacgttatcgacgggggcctcgccgcaaacaatccggtgcttatttattgcttgcttggttatagtagtagttttttttctttcttctggctgggttttgacgactagcatgaaatcatgtgcgtattttgttatgatctttttgtccctgtccctgtcctgtcctctgatctgacagactctggtggcgatgggtgagataacagaacagatgaggcagaagagcaaggagttccccgagaccaagcccctggactaccacaggtatctggtagtgtcactaggcacaggccttccagagcaggacatcaagttcgacgcgtgccgtgtcgccaagtggggcatcttcggatggctcggccgccgggagaacaccgtgcccttgctgcagatgttcatgcacgcgagctcagacatgacggacagctacgtcgccgaccttttcaaagcgatcgggtgctcggaccaactgctgctgcgtgttcaggaccgcaacatacccatagcggctgtggcagctgacctctcgacggagaagaatctgcgagggctggttaagattgcagagaaccttctgcataagccactaggcgaggacgattataagaccgacgaccgcgtcgagacgacgccgagagatggccgtgccatactaacctatgctggtatgctcgcacggtttgcaaagctcctttctgatgagaggaagcttaggcttcagaacatgggacactgtatgccggtcatagcaaatcgtgaagcttgagaggtcttccgaaacacatattgatacatccatcttataggagttagagagttcgttcgtgtaggctatctgcaagctgttgtgtgtgtattgcaagttgtgacgacgacgtgagtgtgtacgtaaatggataaggcgatatggtttgctttggagccctgtacgtaaatggag

SEQ ID NO: 16057 - DNA, 558 bp, Zea mays
  Clone ID: LIB3061-051-B2_FLI
ggccaagatccaggacaaggagggcattcccccagaccagcagcgtctgatctttgcgggcaagcagctggaggatggccgcactctcgcggactacaacatccagaaggagagcacccttcaccttgttctccgcctcaggggtggtatgcagatctttgtgaagaccctgactggaaaaaccataaccctggaggttgagagctcggacaccatcgacaatgtgaaggcgaagatccaggacaaggagggcatccccccggaccagcagcgtctgatcttcgccggcaaacagctggaggatggccgcaccctagcagactacaacatccaaaaggagagcaccctccaccttgtgctccgtctccgtggtggtcagtaagtcatgggtcgtttaagctgccgatgtgcctgcgtcgtctggtgccctctccatatggaggttgtcgaagtatctgctgttcgtgtcagtgttggtttaataatggaccggttgtgttgtgtgtgcgtactacccagaactatgacaaatcatgaataagtttgttgtttgaaatt

SEQ ID NO: 16058 - DNA, 1025 bp, Zea mays
  Clone ID: LIB3061-051-H4_FLI
accaaccaaaaccacgggaaggagacgagacggggggaaaaacactgcgcaggcacaggcagggagagacgtaaagccgccgcttcgtgcgcgtcgacgtcacctcgccgccggggcccgtctcgccgcggggtcccttagagctcccttccgtcgccggactgggcggtcgccggacggatcgggaagcgacgacctgaggggactggctgggatggccgggaagaagcgcaaggcggaggcggcacgcctggaggagacggaccgggcgctctacggggccttccggggcgccgccaactcgctctcgcagctctacacgctcggcatgggcgcgcagaaggcctccttccacgccggcgaacgtcacgccatggaaaaactttatgaatggatcctgaggcagcacgaaaatggtttgaggctaacagttgctgatgtagcctcccatatccagcatgagattcagtatggaggtgacaatgcatcagcctctccaaggtcacaataccctagccaaagcactgcaccgacaatgcacattcccaacacaagcaaccagcaaccatcgccaagcttatttgcttcaggaaaccctgggttgacacagtccaagaattccatggtcttttcaagcgcattatccagccccatccggcggagcctgcaaccttaccacctagagcaggacggggatgcagggtacttcgcgaacggtgcaagccgcgatgtgaaccccacggcttcgaatgattcgtccatggacatgcactcggacagcccagctcatgactcctactgagcagctcccaccatggaaccagcctcaagaacagcacttcaagtggaagaagtctgctgtcacagccttcccaggcctagtagtaatattcaatttaacaccttccatagcctctcttacactaagcgtgtgatgtcttgtgttgttactactacttaccacttgttgctttgcgagaattatgtaatttgcatgtactatactatactggaccatttgattt

SEQ ID NO: 16059 - DNA, 2324 bp, Zea mays
  Clone ID: LIB3061-052-A12_FLI
tgcaattttaggccataccaatatgtcattgagttgcttggcacactgctactgaggaaaaagaccaggtcaaccacttagcctagctttagctccaccaatgcttacaaaagttagaaatatacagctcattgatttatgtatccatgccaaaaaaaatttgtaactaaaaatataattatacaaggttcgccacaccatcatcatgtgccacggtatgaacagaaaaataatatacaatggataaaagcaccaaacgttatggtcaaatgaacttaaccaaaagcaggcataagtgtttggatgcaaagagaaggattagagaaatggtatatcctatttttctgatattccaatactctcgaaaaggttgaatatccaaacttcccacttgcttttactatttcatgattattgcaaactaaggctgccaaacttaaaggacttctgatctcacatgtatccattagaatccacagaaactacagtggaaatcattgttagttgatctattgccacatcctgatctattcagcagtagttcaggtttagggtaagattgggagtgatttggtagtatccctaatttaggcacaccagggcttctattgaatgaactgcatgcgtcaagaaaattttgtttcttatcttgtgacctatgcatgttttatttgctgcccaactctgtcacccttgtcatggattaaatccaaaagtactatgtgcttggttgctcgccaactatagactaagatgtgacaggacatgtacagaacaatgagaggtacagaccgatcatgtgtagcagcagcaggtacaatagtaacacatattgtctgttgctagaatgatcttagtagcttgtctttctcagatctgaccgtactattgatttaatcaggttgtgcaattatttatcggataatttgtgtgtcgtcgcaacgcacggactattctattatatttctggacctacaattggatgttgatattatgctcctgccataaagtccaatgtatcatgctaactgtacactgatctgtaacaggtgctcgaccgactcgagagtttgtcgacgcttgaagaaggacctaatgtgagcttttacacacttgatgaacagcttgagctcttgagcaaggtgttgaatgcaggggatgacatgattggtgttgagttcttagaagaagattatggtggcaagattcgatgtcgcagtcacccagatgtcattgcttgttcttgattcacgacgagatgtatgcggttaggttgaaatccctcgagaacaatggggcgcacggtgctctcagatcaagaagaagatggcgacgatagcacgagcatagatggcggcgagcgggcgcggacgacagcacaacggtcgcgcgagctgtggccagatgggttattttcatcttggtgcaggataactgacgaccccaaccccaagaggtggtgcacgacgacgcgagcacgtatggaggtgtgggggcacggatggcgatgcagtggctaggatggttgacaaccctaagaggcggcgcaggtgcgcaaggacaacgaccaggcttgcacgcgacgacgcgagcacaattggcggtgcaatgggcgcgatggctggcgatgcttctgacggggccaacattatttctttaagagaaaatataaatagagaacaacacatgaataggggaaactagtgatgtggtggcatgctctgccagtgcaaatttcactccacctataattgttgtcgctcctgacgagggaagaatgtgcgccttcaaaggaaggtgaacttaagagtaaaagcagctaatgagttatagtttaacaaggatggctcagctatcaagaagctccaggtcaatccctgttttgttccaatgcttgaaagtgattgtcttcattttgttggttgtgacaaaagtcaaaaccggatggagatcccttctatgtaggtgtttagttgtggagcagattgcgggttttgaatttcttttccaaatgtcgtcttcgcgcccaccgcggaggggtggtgatcgaagagatagtggcagaggcgtcccttgtgggctctgctcctatctcgtggtatggagcctttaacttatgagatgagataggagtctgtgttcttatcccagtataaggtctacaatggcataatgcttgtaccatctgtttttattgtaacttattattatcatgtactgcatgtgactagaaactttgtgttagcctttattgctttctaccttatggcacctgtagtagtgaactgatgatattcttgtggactctaaagctttgtttgccc

SEQ ID NO: 16060 - DNA, 829 bp, Zea mays
  Clone ID: LIB3061-052-C9_FLI
attagagaggctttcagcagcatggacgacttttactccttcaggtctggctttttggcgccgccaggccagacattttgttgcaggtcgatgctgttgctggtcgccgaacaaagcatgcaggggtagccatgtccaccggcccgaaagcacgcaggcccagccgtggatacatccaatgaggcaacgcgcttgagaggctttccagtttggtcgtgcatgtaattggcagtgtctgatgcctcaaccaccgtgagcagacgtctggataattggaggctagcacccggtctcctgctgctcagtggggtactggggttcatggtgcctaggggctgagctgcaagacgtgaagacgacggtgggaaaacgcgaggaaaagaaaaatcttgggcctcctgccggcgtgggcttgtggtggcgggagggaaggcacatgtcaagatgcactagcatgactgtcttcgatgaactttaactgctttgagcctttgacaagcaacgaggcaatttcccgttctctatttaagacacttgtgtgttcgacacccttgtgcctcgccaagctaatattctggtttggttggttagatgatttggctacaacggcatctgcaactatctcttgtcagggtttttagggacgtaagtgctagcgctcgagtgtgaatcattattgttgccatttatgttatagttcgtaaaccaaacagttctctaattgtaaacgtggataccgcttcttttggctggtagcccacgacttattgtttgccccttctggacaaataccttagcaatacaatgctgaaacgaatcaatgcagggt

SEQ ID NO: 16061 - DNA, 781 bp, Zea mays
  Clone ID: LIB3061-052-D3_FLI
ggcgcgcgccgtggtgctgtccgccgcgggcccgcacttctgcgcgggcatcgagctcgggggccccggggacccgctgtccgccgcctccgccgatcccgtggccgccgcggaggggctccgccgcgcggtcctcgacatgcaggcggcgctcacggccatcgagcggtgccggaagcccgtcgtcgcggcggtgcacggcgcctgcgtcggcggcggcgtcgacctcgtggccgcctgcgacatcaggtgctgctccagggacgcctccttcgtgctcaaggaggtggacatggccatcgtcgccgacctcggcgcgctgcagcgcctcccgcggatcgtcggctacggcaacgctgctgacctcgcgctcaccggacgcaagatcaacgccatggaggccaaggacatggggttggttaccagggtctttgattccaagcaagacttggatgcgggcgtcgcaaagatcgccaaagaaatagctgacaagtcggcatgggcggtgattggaaccaaggccgttctgctgagaagcagggatgcgaccatagaacaaggcctggagcatgtagccacatggaacgcgggtatgatgaggtcgaacgatctgaaggaggccatcagagccttcctggagaagcggaagcctgtgttctccaagctgtaatgatcagataccatcataccatacctctgtgttacttaacaagtggtgctacgtatctggaaatgcaaaggaataaagtgtgctaggagtagacaattgtcagggaaaaag

SEQ ID NO: 16062 - DNA, 2090 bp, Zea mays
  Clone ID: LIB3061-052-F9_FLI
gaattcccggtgcggcgcccgtggggcccaccacggcgccgccggcagcgtcaccaacccccacccccacctccgccctcccaccggcactcccctcgcctgctccacgacgcttatgcgctcgcgtcccgctctcgccgcccacctccggcgcctgctcctcctctctccctccgcccacctcatcatcatccgccgcgccatggcatccgccgccgccgcgcaggcgcagccaggtggcgccccgctggcgaccgcggagtacgaggaggtgctggggcggctctcctcgctcatcacgcagaaggtgcgcgcgaacaccgccaaccgcggcaaccagtgggacctcatggagcactacgtcaagattctggagctggaggagtcgatcgcgcggatgaaagtgattcacgtcgcggggaccaaggggaagggttccacatgcacattcaccgagtcaatcctgcgatcgtgtggcttccatactgggctgttcacctcaccacatttgatggatgttagagagcgatttcagctagatggggttaatatttctgaagagaaatttttgaagtacttctggtggtgctggaacaagttgaaggagaagactgatgatgatattcccatgccagcctatttcaggttcctcgcgctgctcgtattcaagatattttctgctgagcaggtagatgttgctgttctcgaggttggcctaggagggaagtttgatgcaactaatgtggttaaagcacctgtagtttgtggcatatcttcccttggatatgatcatatggaaattcttgggaatacacttggagaaatcgcaggagagaaggctgggattttcaagaaaggagttccggcctatactgctccacaaccagaagaggcaatgactgctctcaaacaaagagcttcggaattgggtatctctctccaagtcgttgatcctctggagccccatcacctaaagtatcagcatcttggtctgcatggagaacatcaatatataaatgctggccttgcagttgctttggctagtacgtggcttgagaagcagggacataaagatacgttaccactcaatcgtactgatcccttaccagatcattttattagagggctatcaagtgcttctttgcaaggccgagcacagattgttccagattcacaagtgaattcagaagagaaggacaaagattgttctcttgttttttatttggatggagcgcacagtcctgaaagcatggaagtatgtggcaagtggttttcccatgtcacaaaggatgatacaaggctaccatcttctgtggagcagtcccatacatctaggtctcaaaagatccttctgttcaactgcatgtctgtgagagatccgatgagattgcttccttgtctcctggatgcatcaactcaaaatggagtccactttgacctggccctatttgtgccgaaccaatcacaacacacaaagcttggttctaacacttcagcaccagcggagcctgagcaaatcgatttgtcatggcagctgtcacttcaaacagtgtgggagaagttacttcaggataaaggtataaatactacaaaatccagtgatactagtaaagtttttgaatcgcttccggtcgcaatcgagtggctaaggagaaatgcccgagaaaaccaatctacttctttccaggtgctggttactggctccctgcatctcgttggggatgtcttgagaataatcaagaagtgattcgccgctcgaaatccaaactggaactggactatgatctatggtctctcccaaggctaacatgattagcaaggggggacatttgaacggtgcttgcttattggtgccaaccaagctgcgagcttcttgtgttttttttttctggccacggtcgcctgcctaccactcgggaaaccgcagcgcccgtccttgtgaaggcatgaaataggatgatcgtgccaccatagaacataactgggaaatgaattcgacatggaactgggacagtttgtctgtatactcacaaaataagatcgcgtggggttttcttcttgaaatgcaaagaaaccactcattcttctcc

SEQ ID NO: 16063 - DNA, 813 bp, Zea mays
  Clone ID: LIB3061-052-H7_FLI
ttcatgttcaacaacaacaacaacaaccgcagcaccaccaccaacaacaacaacaacagcaccaacaacaacatcaatgtgaaggccaacaacaacatcaccaacaatcacaaggccatgtgcaacaacacgaacagagccatgagcaacaccaaggacagagccatgagcaacaacatcaacaacaattccagggtcatgacaagcagcaacaaccacaacagcctcagcaatatcagcagggccaggaaaaatcacaacagcaacaatgtcattgccaggagcagcaacagactacaaggtgcagctataactactatagcagtagctcaaatctaaaaaattgtcatgaattcctaaggcagcagtgcagccctttggtaatgccttttctccaatcacgtttgatacaaccaagtagctgccaggtattgcagcaacaatgttgtcatgatcttaggcagattgagccacaatacattcaccaagcaatctacaacatggttcaatccataatccaggaggagcaacaacaacaaccatgtgagttatgtggatctcaacaagctactcaaagtgcggtggcaatcttgacagcagcacaatacctaccatcaatgtgcggcttgtaccactcatactaccaaaataatccatgcagcagcaatgacattagtggtgtttgcaattgaagaattgtgtctacctagccgttatactcctataacggtgttaagcaataaagtaccatacattatgatgtttgtactatgatatttgaataagaatactaattgtaattataatgctact

SEQ ID NO: 16064 - DNA, 613 bp, Zea mays
  Clone ID: LIB3061-053-B1_FLI
aaagtggtgtggaattcacatcaaccagggagaagcccgctgctcgctgcaactgcaagccgtcacgggctgagctgaggctgtgtcgaactgtcgatccatccgtattctcagcaaaacaacgccaatcaatccactccagaggaagggcgatggccgccgctaggatcgccgcttgcaccacctccgcccgcaccgccctcgccttggcagacgaccccgcgccgccggacacgctggacgtggtgcgccggcagcgccagctcctacgccgcgccgccgcgctctgcctcgaccccatcgccgaggagtccgacggtggcatcgactctgcctccgacgtccaccccttgggtcggagccggggccagaccgccgccacctccgcactgccggcgcggccctgaggatctgaaccgtcaaagacgagacctttttctccttgccctaggagtggagttttttcccgtgggttttaagaaatactccgtaccatgtatatgttgatactatagtagtattgtagaatatagaccaaaagctgtttcagacaccattgcaaaatagagctttcaatatcatggtttaatccgaactgtggtaattttcgagt

SEQ ID NO: 16065 - DNA, 1737 bp, Zea mays
  Clone ID: LIB3061-053-B4_FLI
cttctcttgttgttgctgtgctctcctgttaccgggacccggaggaaggcaggaaggaaggaaggaaggaaggcggggatggcggaggagacggtgcgggagctgcgcgcgagcttcgcggcggggcagacgcgcccggccgagtggcgggcggcgcagctcaaggggctcatccggatgatcgacgagaaggaagccgagatcagcgccgcgctccacgaggacctcgccaagccgcatatggagtccttcctccacgagatatcacttacaaagtcgtcgtgcaagtttgcgctcaaggggctcaagaactggatgaagcccgagaaggtacctgcggccataactacattcccgtcctccgcccaaatcgtgccggagcccctcggcgtcgtgctcatcatctcagcctggaactaccctttcatactctctatcgacccagtcattggagcaatcgctgctggaaatgctgttgttctgaagccatcagaaatagcgccagctacctcgtcactgttagcaaagctgctacccgagtatgttgacaactcctgtattaaagttgtggagggaagcgttccagaaacaaccgcactcttggaacagagatgggataagatcttctacacaggtaatggaactgtaggacgtatagtgatggcagcagccgcaaagcatctgaccccggtagctctggagcttggtgggaaatcccctgttatcgtggattcaaatgttgatctccatgttgctgctaagaggattgttgttggcaaatggggatgcaacaacggccaagcatgcattgctccagattacatcataacgacaaaatcatttgcaccggagctggtggcctctttcaaaagagttttggaaaggttctatggggaggatcctctggaatcagcagacttgtctcgtattgtgaattcgaagcagttcaaaagattgacaaatttgatagaagaaaaaagagttgctgacaagattgtgtacggcggcaaggctgatgagaagcaactaaaaatttctcctacactattgttagatgttcctgaagattcagaaattatgacaggcgaaatatttgggcccttgcttcctattgtgacggtcgaaaagattgaggaaagcttcgacttgatcaatgccaagcctaagccactagccgcctaccttttcaccaagaataggaagctgcaagaggagtttgtggcaagcgtccctgcaggagggatgcttgtaaacgacactgcgctacatctcaccaacccgtacatgcccttcggcggcgtcggcgacagcgggatggggtgctaccacggcaagttcggcttcgactgcttcagccacaagaagggagtcctgatccgcggctttggcggggaggcgaacgccaggtacccgccctacacgacggagaagcagaagatcctgaggggcctcatcaacggcagcttcatcgccctcatccttgccctcctgggcttccccagggagaagcgttagatgctccggcctcttgtcggtttcggtacagcctttttagtccctgttcgtcgtcaggtgcacagtatacaccgtcatattctgtcaaatagatgcaatgcaacgactgcgcgccgtgcttgtgttgcaagcgtggataatgcatatatattgtagcattgacatgatgtgcgttattgcattacgtaagggagttggataaataagtgtgatttgtttgtc

SEQ ID NO: 16066 - DNA, 737 bp, Zea mays
  Clone ID: LIB3061-054-A1_FLI
gcaagccaacatgcaacaacaagcgctcgcggcgagcgtcttacaacaaccaattgcccaattgcaacaacaatccttgccacatctaacaatacaagccatcacaacgcaacagcaacaacagttcctaccagcactgagccacctagccatggtgaaccctgccgcctacttgcaagagcagctgcttgcatccaacccacttgctctggcgaacgtagttgcaaaccagcaacaacaacagctacaacagtttctgccaacgctcagtcaactagccatggtgaaccctgccgcctacgtacaacaacaacaactgctttcatctagcccgctcgctgtgggcaatgcacctacatacctgcaacaacaattgttgcaacagattgtaccagctctgactcaactagctgtggcaaaccctgttgcctacttgcaacagctgcttccattcaaccaactgactctgtcgaactctgctgcgtacctacaacagcgacaacagttacttaatccattggtagtggctaacccattggtcgccgccttcctacagcagcaacaattgctgccatacaaccagttctctttgatgaatcctgtcttgtcgaggcagcaacccatcgttggaggtgccatcttttagattacatatgagatgtactcgataatggtgccctcataccgacgtgtgtttcctagaaataatcaatatattgattgagatttatctcgat

SEQ ID NO: 16067 - DNA, 1308 bp, Zea mays
  Clone ID: LIB3061-054-F9_FLI
gtcattcttggtcaaatcaaaaactgaagattctgtgaaatgtgaagttattgacggtggtgaattgaaatctaggcgccatctgaatgttcgtggaaagagtgcaaccttgccatcaataactgacaaggactgggacgacattaagtttggtgtggataatcaagttgattactatgctgtttcttttgtgaaggatgctcaagttgtccacgaactcaaggattatctaaaaagttgcaatgctgacatacatgttatcgtaaaaatagaaagtgcagactccatccccaacttacattcaatcatcacagcatctgatggggctatggttgccaggggtgaccttggagctgagctgcccattgaggaggtgccgctgttgcaggaagaaattattagaatgtgcaggagcatggggaaggctgttattgttgctacaaatatgctcgaaagtatgattgttcatccaactccaacccgagcagaagtttcagacattgctatagctgtccgagagggtgctgatgcagttatgctttcaggagaaactgcacatgggaaatttcccttgaaagctgttaaggtcatgcacactgttgccctgagaaccgaggcaactattcctggtggggaaacacctgcagaccttggtcaggctttcaagaaccacatgagcgaaatgttcgcataccatgcgacaatgatgtcaaatacccttcgaacatcaatagtggttttcactaggacgggatttatggctatactgcttagtcactaccgtccatctggcactatttttgccttcacagacgaggagagagttaggcaacgattggctttgtaccaaggtgtatgtccggttcaaatggaattttctgatgatgctgagaagacatttggcaatgctttgtcttatttgctgaaacatggtatggttaaggacggtaaggaggttgcacttgttcaaagtggtaaacatcccatctggagatcacaatcaacacacaacattcaggtgaggaagatctgatgcggaacgcacatagtattctgattgttggaggacatcgtttcttctagcaaaccgcaaggtcttgttacaatgaaactacactggtagtaagtactggtattggtgagatagttggtgctgagctagtgttgtgattctttttcttacttgtgcactagtgctgttttccttccgtgtaaaaaggccaatccaattgccgcttggttttagctgtagctttggaacactgtaggcttgttgttgtaatacagttcgttccatttgtcaatgtt

SEQ ID NO: 16068 - DNA, 586 bp, Zea mays
  Clone ID: LIB3061-054-G10_FLI
gcaaccaaaccatctcgactcgtggggaagtttcgctctcgcccgcgtcgacttcctagggttcgaggaacgtccgtccgtccgtccggggaaggagcaggagggaggcggagatgatcgaggtggtgctcaacgaccgcctggggaagaaggtgcgggtcaagtgcaacgaggacgacaccatcggcgacctcaagaagctggtggcggcgcagacggggacgcgccccgagaagatccgcatccagaagtggtacaacatctacaaggaccacatcaccctcaaggactacgaggtccacgacggcatgggcctcgagctctactacaactgagccgccgcccctctctccctctcgtcaggttggtctgaattctgaagtcatgggtgcaattcgcttcgcggtgatctcttaagctcatcacatatataaaagcaacctcagttggctatgtaagacatggcgtgccaaactatcagtgaccactgccagctttgcaatacgttgttgtatggtcaacctgcaaacttggtgtactgctactcgtactataaataacatagggttttaaccttggttgtgct

SEQ ID NO: 16069 - DNA, 1021 bp, Zea mays
  Clone ID: LIB3061-054-H2_FLI
cccgaggcggcgccggcgggcaacgcgggggccgaccgccccgacggcaacggggcccccgcggaggagcccgaggaccacgacatgccgcagctggtggaggcggacgtggagaaggcgctctgggcccagatcggcatcttgcatggcggcggcggcctgttcggggacagcaggtacggggcgcaggaggaacttgacgaggaagaggtcaaggagatcgacagcgcccgcgcgcggcgccggaaggcggcctacgagatggccatcgcctcaggcggcgccagctcgctcatcctgtccaactacgcgcagctcctgtacgagttcgacaaggacatcgagagggcggagatgtacttcaagcaggcggtggccgccgagccggcggacggcgaagcgatgcggaggtacggcatgttcctgtggcacgcccgcggcgacacgggcggcgcggaggacatgttcaccggcgccattgacgcggagcccgagagcagccaccaccggagcagctacgcgtggttcctatggatgaccggcggcgtcgagacctgcctcatggacaccggcaggcagagcgacggcaacgacgcggattgaaccgcgcagctagcgcccttgggatcggagacacaatccaaaagcagacaagaaaaagacgacgacgcgacgaccttacctttaccaccggcaagtgccccggccggccggcgggccggccatttagatggcgcgtctaggtatcgccgtacgtcgtgccgcatgcatgcatgcccggcggcgcaagatggctatgcagcaagcgtagtatatatcatccatgagcagcgccggccgttgtagataggtgcaagttttccagtgtgctagatgcatgtgcgcgtcaaggaggcagccagcccatgcagggccaggaagcgaacaataataatgttggcaaagctgctagcgcatgttagagcgtgtgatgcatagtactatagtagtatgtggaataaagcatgcgtcgtgagatagt

SEQ ID NO: 16070 - DNA, 856 bp, Zea mays
  Clone ID: LIB3061-054-H4_FLI
accaacaagcaacatagaaagtggaatacagtagcaaaaatagagcaacaatggcggccaagatattttccatccttatgctccttgctctttctgcatgtgttgctaacgcgaccatttttcctcaatactcacaagctcctatagctgcccttcttcccccataccttccatcaatgaccgctttagtatgtgaaaacccagcccttcaaccctacaggatccagcaagcaatcgcaacaagcaacttacctttatcacacctgttctttcaacaatcgccagccctatctttggtgcagtcattggtacaaaccatcagggcagaacagttgcagcaactcgtgctaccagtgatcagccaagtagctctggcaaacctttccccctactctcagcaacaacaatttcttccattcaaccaactgtctatactgaaccctgctgcttatttgcagcaacaacaactactaccattcagccagctagctactgcctactctcagcagcaacaatttcttccatttaaccaattggccgcactgaacccctctgcttatttccagcagcaaatactactaccatttggccagctagctacaacaagccccgcttccttcttgacacaacaacaagtgcttccgttctaccagcagtttgtggctaaccccgcaaccctcttacaactgcaacagttgctgccctttgtccaacttgctttgacaaacccagcagccttctaccaacaacacatcattggcggtgccctcttttagattgcttattagttgtaattcaataatgaagttttttggctgatgtatgtggcctcctagaaataagaagttatatttcc

SEQ ID NO: 16071 - DNA, 1646 bp, Zea mays
  Clone ID: LIB3061-054-H6_FLI
tctgggaggtaacgacctggttgtgaggcgagacgtgagggagaaaaacatatttactctacgcgctgtcacgcttcgcgcgtgacgcacgacacacgaaactcgtgctttaaaggagtagagatatacagtttttgtgtataacataaaccaacatgagctgcagcggttagagactagtgctttgttcctagagaccatagttcgaatcccagtgggggtgcctttttgatatttcgtgatattttgctgagcgtgtgagaaactttggcaacgcgcgtggaggagggcgcgtggaggaggggagcggttgcatcgagcgggcgtaccaagggagaaacttccgttttatattagtagagatgtttatgaagcaagcattgattttttccttcctgatcccagaataacttcagcttatgctctgcaggtacaactacatgcggatgaggaaacttaccgatcaatgggtaaagagcatgcactcgtcatatcaaatcatcgaagtgatattgattggcttattggatggatattggcccagcgctcagggtgccttggaagtacgctcgctgtcatgaagaagtcatccaagttccttccagtcattggctggtcaatgtggtttgcagagtacctctttttggagaggagctgggccaaggatgaaaagacactaaagtggggtctccaaaggttgaaagacttccctagaccattttggctagctctttttgttgagggtactcgctttactccagcaaagcttctcgcagctcaggagtatgcggcttcccagggcttaccagctcctagaaatgtacttattccacgtaccaagggatttgtatctgccgtaagtattatgcgagattttgttccagccatttacgatacaactgtaatagttcctaaagattcccctcaaccaacaatgctgcggattttgaaagggcaatcatcagtgatacatgtccgcatgaaacgtcatgcaatgagtgagatgccaaaatcagatgatacgtttcaaaatggtgtaaagacatttttgtgacaaaggatgccttactggacaaacatttggcaacaggcactttcgatgaggagattagacctatcggccgcccagtgaaatcattgctggtgaccctgttttggtcgtgcctgctgttgtttggtgccatcgagttcttcaagtggacgcagctcctatcgacatggagaggagtggcattcactgccgcagggatggcgctcgtgacaggggtcatgcacgtcttcgtcatgttctcccaggctgagcgatcgagctcagccaaggcggcacggaaccgggtcaagaaggaatgaaaacggagggtggagatgtgattctgggctctatttatgggcagctttcaaaatgactcgattcatattaatgtatacagcaccaaattccagacattgatatgctctgaaacaggatgctctgctcctcttgtatttgtgtgcaggaaagaattttagggagttcatttttgcccccctcttttgggcagaggaactgtaggacatgaacttgatgttggtacatttgccctgtagacattctggaagcctttcagtagttcatttatttatcagtaaagcttgcatctttcttc

SEQ ID NO: 16072 - DNA, 725 bp, Zea mays
  Clone ID: LIB3061-054-H7_FLI
aaaaaaaaagaccagactgagggctcctctcccgttccgatcgccaattcgccttccaccgcctgcaaccctttcttcccttctcggtcatcgtgacggcatcacgcgcgcgctctcctcttccacgagtccgtcagcctgctaagtcttaagatggcgtcaagcaatggtcagacagaagctccagcaccatctgtccccaaaaatcctgctatggcatcatgccggaagaagaaaacagatgatgctaccttccttgaagatctgaaagaccacatggatgagttcattcacgcctccatggatgagcacaagagctgctttaagaagacaattcagaagatgtttgggatgtcgaaggctgttgcagagagatccgcggcggaagcaaacaaagctgaagttgaaagtgctttgccacttcagaccagtgtctcgcagtagaatttcatgcagtagaatttcatgttggtagtttcttgctcgtgccaatagttttatataagggtttttgttgctgtgttttctgaaacgcataagcgtgtcagtagcatgttttcataaccggattgtagtgcttcattatctatagttttctgtacgtgtaaaatagaccagcgtaacagcgtagtttgcttcattctccgaagtattgtatggctgtacacccaggcatctgggcatcatgaacccaactgattggctaaatgaaataaatctcctcc

SEQ ID NO: 16073 - DNA, 727 bp, Zea mays
  Clone ID: LIB3061-055-B7_FLI
ggtgggctggcttctcctccccctcttatcaagtcctcctcgggttagggttccttagggttttgtggaggggcgatggcggcggctgatgtggagtaccgttgcttcgtcggcggacttgcctgggccaccagcaacgagtcgctggagaatgccttcgcctcctacggcgagatcctcgactccaaggtcatcaccgaccgggagacggggaggtcccgcggcttcggcttcgttaccttctcctccgagaactccatgctcgacgctatcgagaacatgaacggcaaggagctcgacggccgtaacatcaccgttaaccaggcccagtcccgtggcggcggcggcggcggcggcggcggtggctacggcggcggtcgcggcggcggcggctatggtggcgggcgccgtgacggcggttatggcggcggtggcggctacggcggtcggcgcgagggtggtggcggcggctacggaggcggtggcggctacggcggtcggcgcgagggtggtggtggcggctacggcggcggcggcggcggctggagggactgatgtgtggccccatcctggcttcggccgagttatcttatctatctatagtatcgtgttaccgttcgcttctgtcaccgtgttagtgtccgttctacctttggattaggtgttggtaccccttttgttcgctttggttgctcccgctatgaaacgagacgagagaagaatgagc

SEQ ID NO: 16074 - DNA, 811 bp, Zea mays
  Clone ID: LIB3061-055-F9_FLI
tgtaatttttgtggacgaggttgatggcatgttgggaaggcgggagaaccctggagaacatgaagccatgcggaagatgaaaaatgagtttatggtgaactgggatggtctgagaacaagggagaaagaacgtgtattagtacttgctgcaactaacaggccatttgatcttgatgaggctgttgttaggcggcttccaaggaggttgatggtgaatttgccagatgcatcaaataggagaaaaattcttagtgtaatactagccaaggaagatttggcagacgacgttgatctagaaactatagctaacctgacagaagggtactcaggcagtgatctcaagaatctgtgtgttactgctgcacaccgtcctattagggagattcttgaaaaggaaaagaaggagagagcttcagcagaagcagaaaatagatcattgcctccgtcacacactagcaatgatgtccgtgcattaagaacaagtgatttcatacatgcttatcaagttggcttatatagccaacaatactttgtgcagttctgcatcctctgcctgcttatgcgcgatctcattggctgagcggtacgaagataaaacggtagctaatccgaagcgatggcttctctttttctttctacggtattttgtctctatgaattacagttacagcagtcagaacagctgatttaaaaccgcagcgaaaaggctgattgccttgcccatttttgggtgggtggaggttaatacagatttctgtaatttttttactttaatattgtttgacatattgtgcaaggcaaatgatttcct

SEQ ID NO: 16075 - DNA, 1227 bp, Zea mays
  Clone ID: LIB3061-056-B6_FLI
aggtggtctcatgggacactttgccgtctacaagacgtacgaggtgctggccgcacacttcttttggccccagatgcgccgtgatgtcgagcgccttgttgcacgctgcactacttgtcagaaagccaagtcacgattgagcaaccatggtttgtatatgcctttgcctatccctacgttcccttggcttgatatttctatggacttcgttttgggtttgcctagaactaagaaggggagagatagcatttttgtggttgttgatagattctccaaaatggctcattttataccctgtcataaaactgatgatgctagcaaggttgctgaattgttctttcgagagattattcgtttgcatggtattccgaatacaatagtctctgatcgtgatgctaagtttctcagtcatttttggagatctctttggaataaattgggaactaaattgctgtttagtacaacttgtcaccctcaaactgataggcaaactgatgtggtgaatagaactttatcaaccatgcttagggctgttttagacaaaaatttgagacgtggggaggactgcttgcttcatattgaatttgcttataatcgtgcaacacattcttctacaaagatgtgcccctttcagattgtttatggttacattcctcggacacctattgatttgttttctattgatgctgaggatgccccacatatcgaggctgttgcacatgttgaacaaatgagtgacctccatgaacaaacacaccaaaacattgctgctgctaatgctaagtatcaggttgctggtagtaaaggaagaaaacatgttactttgtgttggagcgaaggcagaaacgccacccttcgctcgaagtctccgctgcttagccgctgctctgacagagacaaagcaggcagggacacccttcgcttgatcggcaccagacgaagaccggcgacgaaggcatcccacagtgcggcctcgtccagctcagaggcccacgtgcgatccggcccattgtaacgggccctgtgtggccgccgcttgttacgggcctaatttgtaaaagcatccctgtaattacagtctgtaaccctgctttatgggaatattctggggataaccaaggtagctgagggcacatgcgtccttaacacaaggcgctgggcgttcaggtacctataaatacccccgcacagtgcccgtgagaggcctggttgatagagctatttgcc

SEQ ID NO: 16076 - DNA, 1577 bp, Zea mays
  Clone ID: LIB3061-056-C3_FLI
ctaaccctgactgggttgttgtattaatatatacttaagtacatgggctgggccaaggcccattataacacatgatctaacatatatgacagtgctagcttattccattttttcatacaagcatcacatgccaataagctataggcctatagccttggaggttgtcgaaatgtcattttttggcattcatagaaggcgttagagtctaggctttgaaagtttcttgtggacttgcaactcgattacataccttacagtggtagagagtggaggtcaaaatagcacatagtgtcttcagcaaatggtgtgtgtaccatggaggtaaaataatgacaagggggagaatctagatggacatctggattgtgtccttttgactactataagccattggatgtgtcccacactattaatgtaaactcatggaatctgaagttacctttctgctcgggtaggttgttttgaaagcataacattttttctttatgttttgaattttttttatgtccctgactcagtttcagtgtcctcattctaaaaagtgcatttcaacttgtttttccttcaggagagatgtgcagctgctgaaacattatcattggttgctcgaattttgaaccgatctagagcccatctaaactcagtattgtctaaaaataacagttctgttgttgaggagttctttaggacactggtgtgtttctctactttgggaggtttttattgcttatttggtagtacaaagaaaaaaatgctatgcagtattgtaattccagagttcaccttctgtgtcataggtggactctgttccagatttgacagagcacattcacagaacgagtgcgcgtatgcttttgcatattgatgggtatccagataagattgcgaatgctaaatgggaggtaaaggagcttggaatagagcacaatggatatgttgatttgttactgggcgagttcaaacactacaaaacaagattggaccatggaggaatttctagggagctccaacaccttctgctagagtacggcgtagagagcatatcggaagttctagtcgaaggtctctctagagtgaagaggtgcaccgatgaagggcgtgctctgatgtcactcgacctccaggtactaattaatgggctgcagcacatcgtggcatcaaatgtgaggccgaagctgcagaccgtggacactttcataaaggcttactatctaccggagaccgagtacgtccactgggcgcggtctcatccagaattcagtacaagtcaggtagtcgggttggttaacctggtggccaccatgaaagggtggagacggaagacgagactagaaaccgtggagaagatcgaggcggggccatagactcggtgtcaggtttttttttgctgtgttgtttgcttcagctgcacatagagctgtaatttcccccctcactttcttgactagggaattggagggaatccatgggagaggaaaccccttcctatccaattttgaatagcaaggtgttttctcccccatagatctactccatttatctgatcatcaaatcagcccttaaaaccattttttgtc

SEQ ID NO: 16077 - DNA, 923 bp, Zea mays
  Clone ID: LIB3061-056-E9_FLI
accaacaagcaacatagaaagtggaatccagtagcaacaatagagcaacaatggcgaccaagatactttccctccttatgctccttgctctttctgcatgtgttgctaacgcgacaattttccctcaatgctcacaagctcctatagcttcccttcttcccccataccttccatcaatgatagcttcagtatgtgaaaacccagctcttcaaccctataggctccaacaagcaatcgcagcaagcaacatacctttatcacccttgtttcaacaatcgccagccctatctttggtgcagtcattggtacaaaccatcaaggcacagcagctgcagcaactcgtgctacctgtgatcaaccaagtagctctggcaaacctttctccctactatcagcaacaacaatttcttccattcaaccaactatctacactgaaccctgctgcttatttgcagcaacaactattaccattcagccagctagctactgcctactctcatcaacaacaacttcttccatttaaccaattggccgcactgaacctcgctgcttatttgcagcagcaaatattactaccatttagccagctagctgcagcaagccgtgcttccttcttgacacagcaacagttgctgcctttctaccagcagtttgcggctaaccccgcaaccctcttacaactacaacaattgttgccctttgtccaacttgctttgacaaacccagcagcctcctaccaacaacacatcattggtggtgccctcttttagattgcttattagttgtaattcaataataaagttttttggatgatgtatgtggccaaccagaaataagaagttacatttccagattctaatgtgatattggtctccaagggtgttcgataattacttttgctaagattgggagtaacaagcttt

SEQ ID NO: 16078 - DNA, 1505 bp, Zea mays
  Clone ID: LIB3061-056-F8_FLI
gcgaggctcggcccattccttgcccacgtcatctctctgtctctccctctcatcgccgcgtcacgcacagccgccgccgtcgtgcgcgtgtgccggaacggccgcgtggatcctccgccccgtcccagcggcgacttgtccgtgcgaagatgctggggttctcgaccggacagctgctggtcatcctcggggcctgctccgtcatgatgaagcccagtgatatggtgaagattgcgaggacggccgggcggatgactggaagagcggttgggcggctcatagtggctcgccggcagctggacgagattctgggccagtctgcagccacccaggttcataaggagcttaaagacgctatgacacaattagactcgatccgttatgaagtccagaacttatcaagattatctcctgggcagtttatgttgaagcaacataacgctggcatggctgaagcagggaaatctgactcctctgatggtcctacaaccaaccaagaagaatttcgtcaggaaattcgcagtataattcacgatgaatttgaaaaatactgtagaacacagcccattcaaaactctgtgagcacaactgaagacagaaaacttcatgtggctgatgaaccaacggcactgaaatccaaggacatgaagatggctaattcaggattgacaaatctgcacagccaagcaatgacgtatgcaaggctatctgaagccccaggacttaagatgggttcttccttgagtgggaactaccaagatcaatctaaggagatggatgggctgctaactgtactgccaatatcagctgaaagtgctggattacttccaagccgcccagatggaccaacaggctcagatctagtccttgaggctgtgcttgaagcggaagttgcggagaacgctaaactgtttgtctcgcagcctcatgatcaactacctaaggaatgaagacgaagatgatgtgcttgaagacgttgcaaacatgaccaaactgttcagctgacagccgcatggtcagttgcctacggagcgatgatggtagtttttgatccttaacaggatttggcatactaggcctgtttggtagatctctagaagttgatataccgatctggcgtccagcaccagcggtgtagcttgtaccctcaggcctcaactagccagctaggattcggatgccatggtagaaactggcgacgtagcttttagcctcaactagccagctaggtttggctgccatagttgaggtaaagctgtggcccgtggacacgtagcttgtggcctcaaaaggagcaagaatgaaaaattagagtaaattagttgtggttttcaatgtgggtgatgattttgaagcttttaagacctttttggttcgttttacctaacttttacctaaccttatgactaaccttaggcaaagtgtgacgtagttagccatgaaccaaacatacatctatatggaactaaactttttgtctaagactatcatgcatatatttatgt

SEQ ID NO: 16079 - DNA, 802 bp, Zea mays
  Clone ID: LIB3061-056-H5_FLI
acgtcagcctagcaattagctcatcgactccagattggagaactcgacaccatgaaggtgctgatcgttgcccttgctctcctggcgctcgctgcgagcgccgcctccagtacaagcggcggctgtggctgccagacaccaccgtttcatctaccgcctccgttctatatgccgcctccgttctatctgccgccgcagcagcagccgcagccatggcaataccccactcaaccaccgcagctaagcccgtgccagcagttcggatcctgcggcgtcggcagcgtcggcagcccgttcctgggccagtgcgtcgagttcctgaggcaccagtgcagcccggcggcgacgccctacggctcgccacagtgccaggcgctgcagcagcagtgctgccaccagatcaggcaggtggagccgctgcaccggtaccaggcgacatacggtgtggtcctgcagtccttcctgcagcagcagccgcagggcgagctcgcggcgctgatggcggcccaggtagcgcagcagctgacggcgatgtgcggtctgcagctgcagcagccaggtccctgcccttgcaacgcagctgccggcggtgtctactactgaggaaactatgtactgtagtaataatgtaatggagccgctgactagctacctatagggctatagctagttcactcgtttagcggcgatgagtaacggagtgtcacccatcaccatgggtggcagtgtgagcaatgacctgaatgaaccattgaaatggaaaggaataatatatagggaaaaaggatgtttggaaacctgt

SEQ ID NO: 16080 - DNA, 920 bp, Zea mays
  Clone ID: LIB3061-057-A1_FLI
agaaagtagtgtgtatgatgagaggcaacctaagagaaggaagcggaacattatgaatagtgagcaaatagatgaattagagaaggctctagtagatgagcctgagatgcacaggaaccctgttctattgcagggttggtcagagaagctaagtctgcagggcccagagatcacatcatcacaacttaaaaactggctgaacaatcggaaagctaagcttgctcgcattgcaaaagaaagagggacatttgagggagataatgctgataagccatctacccctcatcccggcgagtcttccgaaagtgctggggaggacaactatataccccctgcaagggtgatgactgctccatccaaaggcagactggtgagcccggacggcaatgagaaaacatcgcaggcagagctatcccccaacacgatgctgatccgcccattcacgagatccttctcactggagcccggtcggctcgtttcactagttgacagcgacgggaaggaggttggcaggggcaagatattccaagcgccagggaagagcccagccccagtggagagccgcatctgcacggttgatgtcaccgagctcaggaccgagaagtggagggagctcccacacccttctgaggcatctgggaggaccttccaggaggcggaggcgaggaatggtggaatcatgagggtctcttgggactccggcaggctgttgcctgtagtgtagcaaggcagaaacttttcgtcaggttgctgtataccgctaggcacaaggtgagcagagggagcctttggtttagggcgagagactggatcatgggattcttgggggcctaagtaacactgttaaaacctgtggttaactgtggtgtatccatcaactaattgtctcaagcaatgcaggtagagtagttactaatttt

SEQ ID NO: 16081 - DNA, 883 bp, Zea mays
  Clone ID: LIB3061-057-B3_FLI
gccggcgctccatcttccgctccctcccccaccttcgatcggcacgcaggctcggcgtcgtcgtcagcggttcctcctcccgcctctcgccagtagcctcgcgccctcgccgactggcgaccctgccttgaaggggctggcaagatgatcggcgtagggaaggcgaagcagtacgccaacgtccttgacaagcccctcagccgtggcaggcaggaggtcagtttgagtgcatttgcattcttgttctctgagttggttcagtacaaccagactcaagttgacaacattactgagctggaacggaggctggaggatgctggttatgctgttggtgcaagggtgcttgaactactctgtcacagggagaagggaaatagacgagagacacgacttctgggcattttatcattcatccacagtactgtttggaaagtgttgtttggaaaggtggctgactcacttgaaaagggaacagaacacgaggatgaatacatgatcagtgaaaaggagcttcttgttaaccgtttcatttctgtgccaaaagacatgggagcattcaactgtggagcttttgttgcgggcattgtaaagggtgtattagataatgccggctttcctgccgtagttactgcacattttgtgccaattgaaggccagcaaaggccaagaacgacaatcctgataaagtttgctgaagaggtattacacagagaagcaagactgggctgagtttttatgtatgtacacaaaacctttgactagcctatttgtaaggtgaatcgttactggagtttggtgatttcttgtatttgagtagttcggtgatttcttgtatttgagttatgtaatagcagtgtgactgagaataaaagttatgtaggtg

SEQ ID NO: 16082 - DNA, 579 bp, Zea mays
  Clone ID: LIB3061-057-B4_FLI
cgaaagtaaacagaggtgaagacaaagtggctgtacccgttccaggttcaaggaaatgcgcgagcgcaattccagcctgccgtcgaggttttgtaccgtacaagaagtgcacagctcggagcaaggtgctggcgctgcagcctgtggcacctggcgaggaggcagatagagagctcacaaggctgtgcctgtagaattctgggcccttgccacccacctctactctgtggataatttttgctgctactcgaacacatatgactagtacagtacagcagtgcagtactgatgttttgcaggaagaccattctggttctctgctgctacttatgagaggcggattggaactgaagcagccttccacaaatggaggtgactgtgggttccggtctgccattgtatagttcgggactagtgtttccattttcatctcgagtgttgtaattttcccctagctgtgcaggttcagaggtcaatggttgtcatgtgctgtagcaagtaatgtaatagttgtagtagaagaccaccttgtatgagctatatataattatatatgtaaattatgaatgttgttttgtg

SEQ ID NO: 16083 - DNA, 1348 bp, Zea mays
  Clone ID: LIB3061-057-C6_FLI
ctcgcgccggctcaaggtacattgcgtgtcctagccaagacacgcagctcatctcagcctcacacgcacagcaagagcgaggcgtgattcgccatgggcggcctcactatggaccaggctttcgtgcaggcccccgagcaccgccccaagcccatcgtcaccgaggccaccggcattcctctcatcgacctctcgcctctggccgccagcggcggcgccgtggacgcgctggccgccgaggtgggcgcggcgagccgggactggggcttcttcgtggtcgtgggccacggcgtgcccgcagagaccgtggcgcgcgcgacggaggcgcagcgcgcgttcttcgcgctgccggcagagcggaaggccgccgtgcggaggaacgaggcggagccgctcgggtactacgagtcggagcacaccaagaacgtgagggactggaaggaggtgtacgacctcgcgccgcgcgagccgccgccgccggcagccgtggccgacggcgagctcgtgttcgagaacaagtggccccaggatctgccgggcttcagagaggcgctggaggagtacgcgaaagcgatggaagagctggcgttcaagctgctggagctgatcgcccggagcctgaagctgaggcccgaccggctgcacggcttcttcaaggaccagacgaccttcatccggctgaaccactaccctccatgcccgagccccgacctggccctcggcgtgggacggcacaaggacgccggcgccctgaccatcctgtaccaggacgacgtcggcgggctcgacgtccggcggcgctccgacggcgagtgggtccgcgtcaggcccgtgcccgactctttcatcatcaacgtcggcgacctcatccaggtgtggagcaacgacaggtacgagagcgcggagcaccgggtgtcagtgaactcggcgagagagaggttctccatgccctacttcttcaacccggcgacctacaccatggtggagccggtggaggagctggtgagcgaggacgatctgcccaggtacgacgcctacaactggggcgacttcttcagcaccaggaagaacagcaacttcaagaagctcaacgtggagaacattcagatcgcgcatttcaagaagagcctcgtcctcgcctaactacgtactgctagtactggcctactgctaggatccataccattgccatgtcgtcttcagattcagagcacgccatgtcgtcgctagcttcgtggtagaacaaataatgatgtgcgtgctgtgtgtaagcatggatgtgaatatgtgatatgatgagcactcctactttggtagtatgtctgggaataacaagttcacaattatc

SEQ ID NO: 16084 - DNA, 1543 bp, Zea mays
  Clone ID: LIB3061-057-C7_FLI
ccacttgctgccccacgagcccattcccctcagcccttcaccatctccggcggtcgcagtggcatcagcagctccggctcacgcgcagcaaaggaacgacaatatggcgaccatcgtaaacacgacggaggaggagccgatgctggccgtggtccgcttcaccgctgagctcgcctgggccgacgcgggcccggaagtcgccgaccccgaggtcgcccgcctatgtctcgaggcgcaggagcatatcctcgcggggcggtggctcgacatggcctcccttatgctcgcctccgccgacctcctcctcacctccccgtcgcgcgtctcggacaaagacctggagtgcgttctctccgtcatctgcagcctcgtcaccaaggccggatccgaggaccaggcgctgcagatcaccgaactcatctgcgctaagctcacccagcaacacggtgacaagccagcgctgcgcctcaaagttcttttcagcttgtacaatctgctcccgagcccgtacggcaaggcatttgtttacaagaaggctcttgagctcgccacggctggaaaggctgctgagtacatcatcccatctttcaagaacattgacagttttgtcagtgagtggggaattgacaatttggagaagagggagctataccttgctatcactaccatcctcaaagaccacaagggcatggctaaggagtactttaactttctcaataagtaccttgccacattcaaagggtcagatgatgaatcaggtataattggtgatgcgaaggaagaggctgttgcggcaatcatcgagtttgttaaatcgcctaatctctttcagtgtgatttgctcaacatgccagctgtttcacagcttgagaaggacggaaagtatcagttggtgtatgaactactaaagatattccttactaagaagcttgattcctacttggagtttcaaagtgcaaactctgacttgctgaaagattatggtctcgttcatgaggaatgtgtaaccaaaatgcgcctcatgtctttgctcgatctgagcagccgatgctctggtgaaatcccttattctgcaatcactgttgaactcaggatcaatgatgacgaggtggagcaatggattgtgaaggcaattgcatccaagatattggattgcaaggttgaccagcttaaccagactgtcattgtcagtcggcacacagagaggatctttgggatggaacattggcatgctctgcgcacaaagctcggagcttggaggggaaacattgccagagctatcaacacaatacaagctaacaaagtcaccgaagagggggcacaagggatgcaaggcttggcgatccactgattcggggcgggtcagcgggttcgtgaattgagattatagcgtgggagattagaagggcaaccttttttgtatgagacaagttgtaatggtttatttacttagatcccgtaaccatgcctggttattccttgtatttggtcagacacgccgcgcagtgcaaggcagttgttacacatcccaagttttcactct

SEQ ID NO: 16085 - DNA, 502 bp, Zea mays
  Clone ID: LIB3061-057-F9_FLI
tttattggcacaaaacatcagggcacaacaactacaacaacttgtgctagcaaaccttgctgcctactctcagcaacagcagtttcttccattcaaccaactaggttcattgaactctgcttcttatttgcaacaacaacaactaccattcagccagctacctgctgcctacccccagcaatttcttccattcaaccaactagcagcattgaactctcctgcttatttacagcagcaacaactactaccattcagccagctagctggtgtgagccctgctaccttcttgacacaaccacagttgttgccgttctaccagcacgttgcgcctaacgctggcaccctcttacaactgcaacaattgctgccattcaaccaacttgctttgacaaacccagcagtgttctaccaacaacccatcattggtggtgccctcttttagatttcttatgagttatagttcaataataaagttttttatctgatgtttgtggcttcccag

SEQ ID NO: 16086 - DNA, 556 bp, Zea mays
  Clone ID: LIB3061-057-H5_FLI
attaacttgtcagcgaactagtagctagcttgcttgaaatataatgatttttagggtgggaaataaggcagattggtatcctactacgtgatgcagatgacctgacgtatcccactgacgacctagctggaggtgcgtgggcattcggccctctttccgcgtggcgtttcttcgtgcctgaggcgacgacggtttggcaccggctctctgccgtcgagagaatggcaccagctcgtatcaccactgctggcataggtggtctgttcctcttcagctcgctgcttatttaagaaaccgtgacagagaatgcctgaccttaaatctgttgaaccaatgtaccgggggaggtaaccagtgcatcagtactccctgtacacgcctactccggcccctcagctccacttcagatcagatctcctgaattgcacgtttgagatcgagatctatcaggccatgctaagagagtaagaggtgatcaaatgacagtactgaaaagtgtagcaacaaccacgcttgcttgtgtgtgatggagtgagagacaaggagagctggatcc

SEQ ID NO: 16087 - DNA, 1015 bp, Zea mays
  Clone ID: LIB3061-058-C2_FLI
gcttctgcttgctctggggggaaggagagagagagagcgagagagatctagtagagaggctagctaggtggtcctcgaacgaagatgttggcggtgttcagcgggcaggtggtggaggtgccggcggagctggtggcggcgggcagccggacgccgtcgcccaagacgaaggcgtcgcagctggtggggcgcttcctggccgcctccgagccggccgtgtccgtgcagctcggcgaccacggccacctcgcctactcccacaccaaccaggcgctcctccgccccaggtcgttcgcggcgaaggacgaggtgttctgcctgttcgagggggtgctggacaacctgggtcgtctgagccagcagcacgggctgtcaagcaagggcgccaacgaggtgctcctcgtcatcgaggcctacaagacgctgcgcgaccgcgcgccctacccggccagcttcatgctcgcccagctcaccggctcctacgccttcgtcctcttcgacaagtccaccaactccctgctcgtcgcatccgaccccgagggcagggtgccgctcttctgggggatcaccgccgacggctgcgtcgccttctccgacgacatcgacatgctcaaaggctcatgcggcaagtcgctcgcgccgttcccgcaaggctgcttctactccaacgccctcggagggctcaagtgctacgagaaccccaagcacaaggtcaccgctgtccccgccgacgaagaagagatctgcggtgccactttcaaggtggtggaagggtctactgtcctgacggcgctgcactgatctatcatcatcaggcggaggcgatgcgatgatgatgcagaactttgtacatgcgttggtggatggtggtgtaacatagtggctgccaacaagtcatgctcatgcaaaccgatgaatctatctctgtatcatcgatctcggttgcttgctagtccagactccagacatggctatatatatatagctggtgctaataaataggagtataatcgtc

SEQ ID NO: 16088 - DNA, 1068 bp, Zea mays
  Clone ID: LIB3061-058-D3_FLI
gaaaaggggcaggaagaaatcgagcctcactcgatccatcgcctcgccgcagcacacacgaggccggcggcgccatggccatgaagctggacatgtccgcgctcgagaccaacttcgccaacctgaccgcctccgccggcgacgacacgtacttctccgccgaggcccccgacgtgccgtccatggtgctccccatctgcgacgacttcgacggcttccaggcggccaccaaggatatggtgaagaataagaaggggacgaccacgcttgccttcatcttcgacaagggcgtcatcgtcgccgctgattccagggccagcatgggcggttatatatcctcacaaaccgtgaggaaaattattgaaataaatccttacatgctggggacaatggctggaggtgctgctgattgccaattttggcataggaacctaggaaccaagtgtcgtctccatgagctttcaaacaagcgaaggatctctattgctggtgcttccaaactgttggctaacatcctttattcatatcgtgggatgggactgtcgattggtacaatgatcgctggatgggatgagaagggtcctggcttgtactatgttgacagtgagggtgcgcggctcgtggggaacaggttctctgttggctctggttcactgtatgcttatggtatcttggatgatggttaccgcttcagcatgtcagttgaggaagccgccgaattagcgcgacgggctatttatggggcaacattccgtgatgcagcaagtggtggttgtgttagtgtttaccacgttggccctgatggttggacgaagctttctggggatgatgtcggggagctgcactaccactactacccggttcagaaaactccggttgaacaggagatggccgatgcgcctactgcttctgcttaaacctgttgctgagaagaccttgagcggagccgcatgtatccatgaaccatgaattgtagaagcgccatgtttatgaacgaacttggacatgtttgtctcacatcgttagatcactctttgtgttctgttgattgatatcttaaatttgcgc

SEQ ID NO: 16089 - DNA, 779 bp, Zea mays
  Clone ID: LIB3061-058-F7_FLI
ttagctcatcgactccagattggagaactcgacaccatgaaggtgctgatcgttgcccttgctctcctggcgctcgctgcgagcgccgcctccagtacaagcggcggctgtggctgccagacaccaccgtttcatctaccgcctccgttctatatgccgcctccgttctatctgccgccgcagcagcagccgcagccatggcaataccccactcaaccaccgcagctaagcccgtgccagcagttcggatcctgcggcgtcggcagcgtcggcagcccgttcctgggccagtgcgtcgagttcctgaggcaccagtgcagcccggcggcgacgccctacggctcgccacagtgccaggcgctgcagcagcagtgctgccaccagatcaggcaggtggagccgctgcaccggtaccaggcgacatacggtgtggtcctgcagtccttcctgcagcagcagccgcagggcgagctcgcggcgctgatggcggcccaggtagcgcagcagctgacggcgatgtgcggtctgcagctgcagcagccaggtccctgcccttgcaacgcagctgccggcggtgtctactactgaggaaactatgtactgtagtaataatgtaatggagccgctgactagctacctatagggctatagctagttcactcgtttagcggcgatgagtaacggagtgtcacccatcaccatgggtggcagtgtgagcaatgacctgaatgaaccattgaaatggaaaggaataatatatagggaaaaaggatgtttgg

SEQ ID NO: 16090 - DNA, 712 bp, Zea mays
  Clone ID: LIB3061-058-G12_FLI
gttacgcgggcgagtacttcggggacaagatccacggcttcggcgtctacagcttcgccaacggccactgctacgaaggctcgtggcacgaaggcaagaagcagggattcgggatgtacacgttccggaacggcgacaagcgatcgggggactgggattctgggacgctcaagacccccttgcccccggccgatccttctgtccagcgagccgtacaggctgcacagcgagctgcagagaacgcgtttcgcttgcctagagttgatgagcaggtccacagggcggtaatggccgcgaacagggcggccacggccgctcgagtggcggcgatcaaggcagtccagaacaggatggatgggaagttttgtgagacctatgtgtgaattgctgtgtgcgagaccatgtttcgctctctctctctctttctaactgtacattagggtagtgaaggacaataactaatcagtgaggtgagacgacgaccggggcagcacaaccgcgcgcttccgagtcagggttcagcaacgagacgacgggagcctgtctgacgaagagcggagctggcagaaaccatttgcgagaaacggccatatcgccatggctgtcggaggggttccctcgcacctttccttgcaacaagctgtaactgtacatagatccaggcggtgtatcaatggtggagagcgagttttttcttcttctttccagtgcc

SEQ ID NO: 16091 - DNA, 1319 bp, Zea mays
  Clone ID: LIB3061-059-D7_FLI
cctcctcctcctcctcctcctcctcggctgcaaccctcactcgccagagccgccgccgccgccatgtcggggctctacagccagggcttctcccctgcgcgaaacctctcccctcagattagaagcaacccggatgtcgatagccagtacttggcggagctgctggcggaacaccagaagctggggccgttcatgcaggtgctgcccatatgcaacaagctgctgagccaagagattatgcgggtgtcaagcattgtccacaaccatggatttggcgatcatgacaggcatcggtttagaagtcctagtccgatgtcttctccgaaccctagagctaatctccctggcaatgggttcagtacttggagcggactacaagagagattaggttttcctcaacgagctagcatggactggcaaggagcaccaccaagtcctagcacccaagttgtgaagaagattcttcgtctggaggttccggttgattcttatccgaatttcaattttgtggggcgcattttaggacctagaggtaattctctaaagcgtgtagaagcatccactgggtgccgtgttttcattagaggaaatggttccattaaagatccagggaaggaggacaaactacggggaaaaccaggctatgagcacctgagtgatcctctgcatatcttgatagaggccgagttccctgccagtatcatcgatgcaaggttgagacatgcgcaggagattatagaagaattgcttaaaccagtggacgagtcccaagatttctacaagaggcaacagctcagggagctggcgctgctgaactcaaccctgagagaggacagccctcaccctgggagcgtttctccattcagcaacggcggtatgaaacgcgcgaaaacaggccagtagagaaacacccgtggtctcctacctggctctgtccaggtgtgttacgcggtcgtcgtcgcgagagacgccatgcctgtcttggggagggcaatgttttgccatgggcatgcgtgaaggaagcaatgcgccttcactgtcggagtccgtcgtccggtgccagctaggtttcacctccatacaggggaaactgctgctgggaaagatgagatagatagttgcggtcgcggatcgttggttggttgttgtatggtgtagaacattccttctatttgttattgacggtttgaccctagtatgtggtggtacactgcgaagttgctaaactagatgcctgagctttatttaggtggtgcattgaccttgtatcataaccttttgacattatcgagttgcaaaataaggaccatcagctttgt

SEQ ID NO: 16092 - DNA, 714 bp, Zea mays
  Clone ID: LIB3061-063-C11_FLI
cagcaaagcggcagtgcgtagagaggatcgtcgaacagaacagcatgaagatggtcatcgttctcgtcgtgtgcctggctctgtcagctgccagcgcctctgcaatgcagatgccctgcccctgcgcggggctgcagggcttgtacggcgctggcgccggcctgacgacgatgatgggcgccggcgggctgtacccctacgcggagtacctgaggcagccgcagtgcagcccgctggcggcggcgccctactacgccgggtgtgggcagccgagcgccatgttccagccgctccggcaacagtgctgccagcagcagatgaggatgatggacgtgcagtccgtcgcgcagcagctgcagatgatgatgcagcttgagcgtgccgctgccgccagcagcagcctgtacgagccagctctgatgcagcagcagcagcagctgctggcagcccagggtctcaaccccatggccatgatgatggcgcagaacatgccggccatgggtggactctaccagtaccagctgcccagctaccgcaccaacccctgtggcgtctccgctgccattccgccctactactgattcatgatatttgggaaatctcctctatccatctctctctatctatatatgtaataatgcagtaagacgacacacattatcatgtgtggtatgaccaataatatatgcatggtcataataaagttttggtttt

SEQ ID NO: 16093 - DNA, 1556 bp, Zea mays
  Clone ID: LIB3061-063-D12_FLI
ctgccgctcgccgcatcaggtagtagggcgctagctagccatggctcgcgtcgccgccatggtggtggtgatggtgctcctccagcagttggcctcctcgtactcgtacaccgtcgcggcccacgccgatgctgctggcgtgcttggccgcaaggcgggcgtcgtcgtcgacgagactccggtggagaaatcgccggctgggccggggaggtacgcagtcatcttcgacgccggcagtacggggagtcgggtgtacatcttccggttcggcaggcagatggacctcctccgcatcggcgacgagatcgaattttttgccaagttgaagccaggtctgagctcgtatgctgggcgaccccaggaggccgcaaagtccattctgcctcttctcgagaaggccaagagcattgtcccctcatggcttatgaaaagaacccctgttaagcttggagcgactgctggattacgccttatcggaaaccaacaagcagacgaaatcctcgatgcggtcagagacctggtccacaagaagagcaaattccagtacaagcccaactggatcaatgttcttgaggggtctcaggaagcatcctacctatgggtcgctctgaattacttgctggataaactgggaggggagtattcccagacggtaggcgtgattgatttgggtggcgggtcggtgcaaatggcgtacgctgtctccgcaaacgctgctgcgagagctcccgcggtgcctgacggcgaggatccctacattaccaaggagtattttaaagggaaacagtacaatgtatacgttcacagctacttgcggtatggttcctttgcatcgcgagcggagattctgaagtccaagaacggaccattcagctcctgcatgctgcgcggatttagtggtaaatatacctacaacggacagcagttcgatgcgactgctagaccagaaggagcattgtatgacaaatgcaggggagagattgccaaggcgatgaatctcaaggcaccgtgcaaggcaaagaactgcaccttcggtggtgtgtggaatgggggaggtggagctggccaaaacgacatctacgtcgcgtcaggtttctactaccttgcctcacatgttggattcatagatagcaaagctccgagcgctaaggccgctcctgccgcattcagggtcgcggctaagaaggcctgcaaattcgatgtcaacagagcaaaagtggcctacccagatgtttctgacagtgatgtgccctacttgtgtatggatcttacttacacgtacacattgctagttgacggcttcggtctgcagccaatgaaaaagattacatttgtatccaaggtgaagcatggcgaatactacatcgaagccacatggcctttgggtacggctattgaggccgtgtcaccgacaaagcagatcggaaactaatgggctgctgctcgcactgaactgaactctggatttagcgcatgttatcatggtttcagttagcgctcctgacctataatatttgactctcaaataatttctgtactgctgctcggcagcgtgc

SEQ ID NO: 16094 - DNA, 1272 bp, Zea mays
  Clone ID: LIB3061-064-A11_FLI
atttgctggaacagttatatgaagagccatattgcatctagtgattttgagggtatagtacaggtttgggatgttactaggagtcaagtttttgttgggatgagggagcatgagcgacgcgtgtggtcggtggacttctcaattgtggacccaacaaaattggtcagtgggagtgatgatggatctgtgaaactgtgggatatgaatcaggctgggagtattggcactattagaacaagagcaaatgtgtgttctgtacaatttcaacctgatactgctcgctccattgccatcggctctgcagaccacaaaatttactgctatgatctacgtaacatacgagctccttattgtacactagttggccacacaaagactgtaagctatgttaagtatctggatgcatcaacaatactatccgcatctactgacaactcattgaagctttgggacttatcgatgaatccaggaaggataattgacagtccagttcaaacatttacagggcatacaaatacaaagaacttcgttggtctttccatatctgatggttacattgctactggctctgaaacaaatgaggtttttgtctaccacaaagaatttcccatgccagtgttggcttataagttcagcgtgacggaccctatatcgggacaggagattgatgatcagtcacagttcatttcatgcgtctgctggagagggcagtcttcaactctactttctgcaaattccagcggcaacattaagatcttagaaatggactgaggagtttgcatctgtttgagtctcagctataaatagaccgacttcttaggccgtgctcaacaaatcatgcatatagccgtggtagatgtcactgtctagggagttgagtttaaaatgagagattggatgagtaatgctgctagagatagcttaccaagttgtgcgcgtgcgtggcttcaaaatttgtggcgattaaatccagagttgccaacggtgcagcttaatccgagttgcagagttgggaaaggtagtagctgtagcagatttagcgtggttttataggattacagattagcgtggtagcaaaagtagcataaataggaaacagaattggggcgtgggatagtaccacggggaaaggttttgtacatcattggtttgaggtatacttgtacaggcaatcaatccagtttctacctaccagtaccagcatcagacttgctcttgtcatagtgttacttgaaaggtgaaaggtataaatcgctgtacatctgttgaatc

SEQ ID NO: 16095 - DNA, 561 bp, Zea mays
  Clone ID: LIB3061-068-A3_FLI
gcggccagtgctctcctatctcctccattcccctcgtctcttcgccatggtcgccatctccgctcacctcatcgccactcttccgtctctcccgacactccggccctgtcctcgccggcttcagccgagcgccttcgctgcatccgaggcctcgcaccgagcccccgcccccggcgtcgccctccgtggctgcagcaggcgttgcagcccttccgtaagaagatttcatgggtttcagaatgcaataagctttgggaaggagcacaacaggcaagccctattcgcttcaggcagaggttctcctagctccagtgacgatggctcgagttctcctgatggcccacctgtcctgaccattctggcaggtgtcaccgtgttccttcttgtcctctgggtcgttggatcggtcgttacctggattgtgggcttggtctttggcgctgcgaaatcttagaaggtaggatggtaggctaccaatcagttgtatatactttatttgtgctactgtgttggaatcgttacattgaatagctgcatttgctgctctcttttttctgacgg

SEQ ID NO: 16096 - DNA, 805 bp, Zea mays
  Clone ID: LIB3061-068-C8_FLI
gcagcttctgcttgctctggggggaaggagagagagagagcgagagagagagagagatctagtagagaggctagtaggtggtcctcgaacgaagatgttggcggtgttcagcgggcaggtggtggaggtgccggcggagctggtggcggcgggcagccggacgccgtcgcccaagacgaaggcgtcgcagctcgtggggcgcttcctggccgcgtccgagccggccgtgtccgtgcagctcggcgaccacggccacctcgcctactcccacaccaaccaggcgctcctccgccccaggaccccgagggcagggtgccgctcttctgggggatcaccgccgacggctgcgtcgccttctccgacgacatcgacatgctcaaaggctcatgcggcaagtcgctcgcgccgttcccgcaaggctgcttctactccaacgccctcggagggctcaagtgctacgagaaccccaagcacaaggtcaccgctgtccccgccgacgaagaagagatctgcggtgccactttcaaggtggtggaagggtctactgtcctgacggcgctgcactgatcgatcatcatcaggcggaggcgatgcgacgatacagaactttgtacatgcgtggtgggtgtaacatagtggctggcaacaagccatgctcatgcaaaccgatgaatctatctctgtatcatgcatcgatctcggttgcttgctagtccagactccagactccagacatggctatatatagctggtgctaataaataggagtataatcgtcatatcgatcggttgcgtgtggaatgcc

SEQ ID NO: 16097 - DNA, 1969 bp, Zea mays
  Clone ID: LIB3061-070-C12_FLI
gatgatttgagcttttgttttgggtagattacggtggcttgatgtaggttttttgagaccctgggttaacaaactgttttgccagtagtgttggttcctcgatgccttgcaataagatctctcgaagctcatttccttttgctgacagtttgttgttttttacatcgatccgatgaagtgcatgatcttctaattttgcatggtttactggtctgctaataaaatgcaattcaatcttgaagaattggttaaaaagtggatgccattgaatatcattcaatttcttccaaaggatttggaatgttgagttgagagtatcatgtggcagtttgatgttacagattttcttcagtgtggtacaggaaaataaaaaagtttgttaaaacgcgatttgtaatgaactcatttgttagtcttataagtcgacaaacgaactgaattagttttgataacagtagcatatagttgtcattatttattagtaaaccgagttttctttttaggaggctgtccatggtatgtgttttaacttctattctcttgtttcctgtgcagctcgaaggagaagcccactcttggaggcacgcggattaagacccgcaagcggaacattgcagctcctttggaccctgcatcattctctgatgcaattgtccagatttatctggataatggtggagatctggaactcgtcgccaaaagtattgagtcttccgacctcaacttctcacgttacggtgacaccttttttgaggtggtttttgttggaggacgcactcagcctggcactgtaaaacctgaagaaggagaccgccacccttattctatgttagattgtgtggcacagcgtgaaacaattttgcctttcgtactctatatccagaaaacattgcgcaggaggcctttcttaataaaaaatcttgaaaatgttatgcgcaaattcctccaatccttggagttctttgaggaaaatgagaggaagaaactcgccatattcacagcccttgcattttctcaaaagctgtcagggcttcctccggagacagtgttccagccattgctcaaggataatctggttgccaaagggatagtactttcattcataactgagtttttcaaggagtacctgaaggaaaacaccttggatgatttgattgcgcttttgaagaaaggaaaaatggaggacaatctgttggacttttttccatcagctaagagatcctctgaggctttatctgagcatttcatcaaagaaggtctgactagccttgttgagtacaatgaaaagaagatgtttgaagttaaacttaaagagataaagtcaacactgaccactatgatcaatgatgaggctgcaatacctgaagtgattgagactgtcaaacagcaagttaaggatgctaaatttcctgatctagaggtcattcgcatgttgtgggatgtgctcatggaggctgttcagtggtctgggaagaaccagcaacagaattctaatgcagcacttcggcaggtgaaagcatgggctgagcttttgaatgctttttgcacgagtggcagactcgaactggaacttatatacaaagtacagacacagtgctatgaggatgctaagctgatgaagctgtttcctgaaatcataagaacactgtatgaccaagatgtcctagctgaagatactgtcctgctttggttccgtaaaggttcaaaccagaagggcaggcaatctttcgtgaaagctctggagccgtttgtcaaatggctcgaggaggctgaggaggaagaataagtttttgatttggagaacggccgaatgctggcctaagtgttactttatatttctgaagttagaagtttgtggaggaattattgctgctgcctcttactgccgagaactttatgttatgatgtttagccacatggatcccggctgcagagtgctataatatgttgctgttaaaactttgtgtcg

SEQ ID NO: 16098 - DNA, 1491 bp, Zea mays
  Clone ID: LIB3061-070-D1_FLI
caaaaaatgtataaaataggaaatgggaaaaccccatcacagctccacgcctccactgctatccctctcttcctctctgctttccccttccaatggaatcctgtagcttccgtgccgcaaccgcgccttctccctttccctccgctccttcttcatcttcatccccgcgcgccccatgccccatactccgatttcccaggccaagaaaagggaggcagattggggtgcggaggagggcgtccggatttgatgccttcgcgtctttcgccggcaaggtcttcgtggatgaggcgattggagcggaatatggggagggcttcgaaacatttcgaatggatggaccactcaaggttgatgtggattatctgaatgaaaaattgcaagagtgcttccttcaaaggataaggcatgctatgaagccggatgaggcgtttggtctaattttttcgtgggacaatgttattgctgatacagactcgctaaagttgaatgcttggagacaacttgctttggaggaaggtaaggatatcccaagtggtgctcatgtccggaagagcattattcatggtgctgctgaccatgttcttagaaaggttttgtactgggcaaaagaggaagataaaatggaaaaattgaaggcacgccttatagagttgtactacgagaacctgttcaaactcgatacacctgtagaaggattgagagaatggctggatgctgttcagacagcagggataccttgtgctgtcgcatcaccccttgacaggagatgcatgatcgaagctttggatcggatggcgctaagcaaatatttcaaggcgatcgtgactgacgaagatgatatggagtcgatagcaaatcgatttctgtcagctgctatgaaggcatgctcctgccccacttctaatcgttgtacatcatgttaatatatataggtcacacatttgcggtttttcttttcttcctggcagttggatcgtaaaccctcgaagtgtgtggtgttcgaggatgacccaaggggcgtcacagccgcccacaactgtacaatgatggcagtcgcattgattggtgctcatccagcgtatgagttggtacaggcagaccttgccattgcaaagtacagcgagctctcagtgatcaacctcagaaggctgtttgcgaacaagggaatcagcttcatggacttgcagaagcagataatcgagaagtcacctcccaagaggaggctgacagtagacaccattttctgatagatacacttttatttggtgtctgcctgttgttcttgagtagccaacaaccttcggcattatggcggtggcgttgtatataagatagtgctgatgttaggtgatccgctgtgtacctccttgtgaatgcaatgcggtagttccatcaaggtaccatgaggaagactgctgcaacaatgttgttgctgatgtaagctgatattattcaaatttattcatatttcatggtcgatatctagct

SEQ ID NO: 16099 - DNA, 1262 bp, Zea mays
  Clone ID: LIB3061-071-B3_FLI
ggccaaaacccttacgcgcgacgcggccccctcctcttcttctctctcccaccaccgccctccccttgccatttttgccgcaggagccgccgccatccgatccggaagagggaggaggggggagggaggaggatctgtgtcccgattcgattggagctctcgtccccggcggtccaggatggtgcggggcaagacgcagatgaagcggatagagaacccggccagtcgccaggtcaccttctccaagcgccgcaacggcctgctcaagaaggcgttcgagctctccgtcctctgcgacgccgaggtcgcgctcgtcgtcttctccccgcgcggcaagctctacgaattcgccagcggaagtgcccagaaaacaattgaacgttatagaacgtacacaaaggataatgtcagcaacaagacagcacatcaggacattgagcaagtaaaagctgatgctgagggcctggcaaagaaactggaagcacttgaagcttacaaaagaaaacttttgggtgagaggttggaagaatgctcctttgaagaactgcacagtttggaagtgaaactcgaaaagagccttcattgcatcaggggaagaaagactcagctgctggaggagcaactccataagctgaaggagaaggagatgaatctgcgcaagagcaacgaagatttacgtgaaaaggtaatgggggcgaaaacattttgcagacgctgcactgcggcaagcggcatgccaacaacccaagaaaacaggctttgattctaccgcttacctcgacttcctgtgctgtgatatcttattgcaagaagcagccgccgccgccgccgcctatgctgatggctcctccgccgcctccagcgccggcagccatcgatcacacggggccgaaggatgtcgggatggacgtggagacggagctgtacataggattgcccggcagagattaccgctcaaacaacaaagacatgactgcacagtagctgtcaggtcaggtcaggtcaggctagccagcagtgcagagaataatcttagatctgtggtgcggagaactggagatgcaagccaagcccaagccaatcaacatgataaggatcatgagtgtcgcgtcgtgttttacaaacctgtccaccgtccgtcaaaggcacatgcgccagaacgtccgtcagagaacacttaccccctcatctccctctattagctagctgctccggcctgctcatgtcgaaaccttctgttcaagtatgttctcctcctgatg

SEQ ID NO: 16100 - DNA, 574 bp, Zea mays
  Clone ID: LIB3061-071-B6_FLI
gccagcaccgagttccggacctccgccgcctcgtctccgctccctcgcactcgcagctccggctgctattctgcagaagtcggtagattggttttcctcatgggtcgcaccatcaagaaggccaagaaggctcaatccaagaagtccaagaagaaaactgaatcgtcctcgtcgtccaaccctgcgattgcctctggtccggctaaggtctggcaaccgggtgtagatacactggaagatggggaggagctgcagtttgatcctcaggcttacaattatctccgaggttttggcattggctggtcttgcttgagttttgatgttgtgcgtgatcaacttggactcgtccgttcagagttccctcatacattctatggtgttgctggaacgcaggtcgtgttaatctttatgccttgaaaacctaagcattgacaaaagtagccattgttactatcaaatcttgaaatgcttttgatgtctatcacatagtgctcttttgttatctataaataaactataacttgtacaagaattaattttgtactgttgttcctgctaagatatttttgaattg

SEQ ID NO: 16101 - DNA, 1495 bp, Zea mays
  Clone ID: LIB3061-073-D3_FLI
ggacaatggactagttgctgcactgtttctgtgattcaccatgggaagcagtggagcagatacaccgtctaaggagcagcagccacctgctacctcaggtgctgcaataccacctgtttatccagattggtctagcttccaggcatatcccccaatcccaccacatggattcttcccctcacctgtggcatcaagtccacagggtcatcctttcatgtggggagctcaagctatgattccaccttatggaacaccgccaccatatgtcatgtacccccctggagtatatgcccacccatctatgcccccgggtgcacatccatttactccttatgccattacttctccaaatggcaatgctgatgctactctggtaatactgatggcaagccctctgaaggcaaagataaaagtccaacaaagcgatccaaaggaagtttgggcagcttgaacatgcttactggaaagaatcccagtgaacatggtaagtcctcaggtgcatcgggtaatggagtcacttctcaaagtggcgaaagtggcagtgacagttcaagcgaagggagtgaaggaaattctcacaatgattcacatcacaaggaaagtggacaggaacacgatggggatgttcgaagttcccggaatggtgtatcacgtttgcaatctgagggaaaattgaaccaagctatggcaatcttgcccataccatcaagtggcccagcaactgatccaactacaaacctaaatattgggatggactattgggccaacacagcaagctctgctcctgcaattcatggcaaagcgacgtcaacaacagttccaggggctgtggtcccagcagagcagtggacacaggatgaacatgaactcaaaaagcaaagaagaaagcagtccaatagggagtctgcacgtagatctaggttacgtaaacaggctgaatgtgaggaattggctcaacgtgctgatgttttaaagcaggaaaatgcttcacttagagatgaagtaaaccgtatcagaaaagagtacgaggaacttctatcaaggaataactcactaaaggaaaaacttgaaggcaaacaacacaaaactgatgaggcaggacttaacaacaagctgcaacattctggtgatgacagccagaaaaaaggaaactaatgctatcatgcaatgcttgcctacattggtcctaactagattattgggaggtgcaattgtagtatgcacattaactccttactttattgcagttaattgttaccaggttgtgataatgttgatgccaaccttttgtgtgggtgtttcctgtttcagatctatcttggcttatcttttagaagccaagatgtgactgaagctataggctgtgacccaattcactatatctgttagaaatagtggataaagtcaaactttcaaatttgaagtgctgactaatattgttatgtatacctggcaaaagactggtttccttttaattcagtctggttgaacattt

SEQ ID NO: 16102 - DNA, 919 bp, Zea mays
  Clone ID: LIB3061-074-G12_FLI
gcagcggcaactgcgctcgaaaatacagaggcagggtggcctatctcgaagattttcaaaagttgtgtcctattacggtctcacaaccccgccatataaactggatgctctggaaccttatatgagcaagaggacagttgaacttcactggggtaagcaccatcaagattacgtggatggcttgaataatcagctggctaccagccctctgtatggatacactctggaggatctgataaaagaagcttataacaatggcaatccattaccagagtataacaacgcagcacagccaatcatcagcctagacttgtgggagcacgcttactacttagactacaaggatgataagctaacatatgtcacaaactttatggaccatcttgtctcttggcatactgtcactctacgcatgatgcgtgcagagtcttttgtgaaccttggtgagccaaatatcccagaggcttgagctacaaatacaccctagttatcatcatgaggcatttttcggatacatcggatcaaatcctgctggaggaaccagagagttggaaaatctcatgtctcacaagaaatgcttatcaccccaatgtcatacacgccaagataagctgctaggatttcaccattgcccttggatattgctacaaggaaatcactagtcagcatccagtttgaagacatgcaacaaaacagctctagaagctatggagctggtagattctggagttggcagtgaggcagtgatccaacttgggctttgaagccatggtgctttctctagacggctattatgtccgtagtgttgacgtgttgttagaataatcctggttctgtgttttcataacttcatcatgctagtgttctgttgtagcggaacacagaatggaacggaacgatattcttgttttactggttg

SEQ ID NO: 16103 - DNA, 711 bp, Zea mays
  Clone ID: LIB3061-075-G3_FLI
cacacattgaagacaccgctggtgagaggtatgggggaagaagggaagctataggagcttgtgagcattgtgggaaaacccaattgttcaaccctacaggatccaacaggcaatcgcaacaggcatcttaccattatcacccttgttcctccaacaaccgtcagccctattacagcagttacctttggtccatttggtggcacaaaacatcagggcacaacaactacaacaacttgtgctagcaaaccttgctgcatactctcagcaacatcagtttcttccattcaaccaactggctgcattgaactctgctgcttatttgcaacaacaattaccattcagccagctagttgctgcctacccccagcaatttcttccattcaaccaactagcagcattgaactctgctgcttatttacagcagcaacaactactaccattcagccagctagctgatgtgagccctgctgccttcttgacacaacaacagttgttgccgttctacctgcacgctatgcctaacgctggcaccctcttacaactgcaacaattgctgccattcaaccaacttgctttgacaaactcaacagtgttctaccaacaacccatcattggtggtgccctcttttagattgcttatgagttatagttcaataatgaagttttttggatgatgtttgtggcgtcccagaaataagaaagtacatttct

SEQ ID NO: 16104 - DNA, 986 bp, Zea mays
  Clone ID: LIB3061-076-C11_FLI
ccagccgccaccaggtgcagagtctttcgtcatctcttctccggcgaagaacccccagtcgcccaccagatcacttgttaaactttgttgaggggtgatggcggtttctttcgcaaacctcaactccgaggcagggcttaaaaagcttgatgagtaccttctcactcgcagctacatcactggctaccaagcttccaaggatgacttggctgtctacacttcgttttcggctgctccctcgtccaagtatatcaacgtagcaaggtggtttaaccacattgatgcgctcgtgaggctgagcggaattactgcagagggccaaggtgtgaaggttgaatcctcagcagttccttcagccccaactccagatgttgctgaagcacaggccccagttgctgaggaggacgacgacgatgatgttgacctttttggtgaggagaccgaagatgagaagaaggctgctgaagagcgtgctgcagctgccaaggcttctggcaagaagaaagaatctgggaagtcatcagttttacttgatgtgaagccatgggacgatgagactgacatggccaagctcgaggaagctgttaggagtgtccagatggaagggctgctctggggcgcatccaagcttgtcccagttggatatggtatcaagaagctgcaaatcatgatgaccatcgtcgacgaccttgtctctgtcgacactctcattgaggactatctgtgcgctgagccagtgaacgagtacgtgcagagctgcgacatagttgccttcaacaagatctaggcgtgacttccgatcagtccttctcctggggtgctggcgatggtggtggctgggcaatgcaccagcctaatttatccatagctatatgtctgctttgtgtggccagtgatattgccgtgagtatttttggatcctattcgagtcgaatgtaccagtaccagagttaatttgctttaattcgaaacaccgttccagttgg

SEQ ID NO: 16105 - DNA, 1984 bp, Zea mays
  Clone ID: LIB3061-076-D1_FLI
caaatcccccgatcccaccacgtacgttttttaagagcaccacttacgatctccttcgccaaccgcgccgctctctctctctctctcgcacgagccgcgccggcgccgccaccacgcgcgcgggagacagagaccacagccgcagccaccggcgggcggaataggaatggtggcgccggggggaggagcaggaggaggtccgtcgcggtggccggcggcggaggagcttgacactgtacggaagaaggtggtggagattagtggaagggatgaacaagaggttatggttgctgcttgcccctacagaatttgccctttgggggctcatattgatcatcagggtggagtagtcacagctatgaccataaattatggagtactccttggtttcgttccctctaatggttctgaggttttacttcattctggtcagtttgaaggtgctataagattcagagttgatgacttgcaaaagcctattgataaacctgagaacataaactggggaagttatgcaaaaggtgctgttagtgcactgcagaatagtggatatgatctaaggaagggtatcataggatatatttctggtgtgaaaggtcttgatagttcagggctcagttcttctgcggcggttggcatcgcctacttgctggctttagaacatgtaaatgatctggttatatcaccagtagataacattcagttagacaagtacattgaaaataaatacttgggtctcgaaaatggcattctagatccatctgccattttgctttcacgactgcttcaccttcctacgtctgcttctcggagctgaataaaagccaacagcctcagggacagctaccattcaagattttgttggcattttcaggactccaacataatctgccaaagaagcgtggatataatacacgagtttctgagtgcaaagaggctgcccgtgctcttttgcagtgagttccctgttaataacctgtatagctgtatttaatcatgcggacaaatatactcttatgtttcccatctttatatgggtccacatttgtagttcttctacagtatttgttattcatttgtcatatccaatatgtagtctgatactctgattcattgattatgtttttgtttgaacccttagtgcttcaggctgtgaagatacaccaaatatactttgcaatggtacatgttctatgtaatatttcttgtcgtgactcaatgtaaaagtataatttgtctgacattttctttgttattatagttgacccagttgtatatgagacccagaaggtaattatcacatttaggtccatttttttatcgttttcatgtcattctaacacaatttattcctgcagtgtgtattggaagaaaatctttccaggagagctgaacactacttttttgaaatgaagcgggttacaaagggcagggatgcatgggctcatgggaacctacaagaacttggacagctgatctctgaatctggtcgcagctccatactcaactacgaatgtgggagcaaagagatgatccagctgtacgagatcctgctgaaggcccccggcgccctcggcgcccggttcagcggcgccggcttcaggggctgctgcctggccatcgtggagagcgaccgcgcggaggatgcggctgcatacgtccgtgccgagtacgaaaaggcccagcccgagctggtctccaggatccccgcggatcgccgtgttctggtctgcgagcccggggactccgcgcgcgtcatattgcctgatcctcacctgagctcctgatgccatttcgtggcccggacagacggaatgatgactctactagtccattcgctgcgtttggattcgtttttagttaagccccttttgagcatcggatattttcctttcctttattgtttctaataaaaataaattaatttctgtaaactttatataaggttctagcttttttagataaaagtatataatatctatct

SEQ ID NO: 16106 - DNA, 1610 bp, Zea mays
  Clone ID: LIB3061-077-F3_FLI
cgagacatcgagtagacgcccacggacggacgacggaggacgtacggaccaagtagaagcaagtagtaggcatggcggaggcagaggcccatggcatcgtcatcgtcggcggtggcatctgcggcctagccaccgctcttgctcttcaccggaaagggattcctagccttgtgttggagaagtccaggagcctgcgagcggacggcgcgggcatcggcgtgcacgccaacggatggcgagctttggagcagcttggcgtcgccgcggagcttagagagactgcacagcttatcaccgtgtaccatgacgtgtggcagcagggagacaaaacgagccgggaaaaggttccagtaaggatggagctccgatgcttaaacagaaaggacctgatcgaggcactggccaaggacatccctgcaggcgcgatccgattcggctgccgcgtcgctgccgtcgctgcggaccccggcggcggtcacggcgccgtcctgacaatggcggacggtactgccatgaaggccaaggtcctgatcgggtgcgagggcacatactccgcggtggccaggtaccttgggctgtctccggtgaggacgatcccgcgcccggtgctacggggcttcacctggtatccgcacggccactccttcgacacggagttcctgcgcctgcgcgttggaggcttcttcatcggcaggctgaccatcacggacaatctggtccatttcttcgtgacgatgcccaaacagcccacagcggatgtcatcaaggacctgaagcgagtgagagatctcgcgctgaaggatctgcaggacgtagaatgccccgccgagatcatcgagatcgtccgcgggtcggacccggagtccctcaacttggtcacggatttctggtaccggccgccgtgggaggtcgtcctgggcagcttccagaggggcgccgtgacggtcgccggcgacgccatgcacgccatgggcccgttcatcggccagggcggctcggcggggctggaggacgccgtcgtgctcgcgcggtctctggcgcgggcggcggccgtggacgacgccgacgacgacgacaacgcgcgcgagaagaaggtggtcggcgaggcgatcgcggagtacgtcagggagaggaggccgcggctggcgctgctgtccctcgagtccttcgtcatgggggcgctgctcgtgcgctcgccgtctccggtcaccaagctggtctgcgtcgccgtgctcattctcttgggcagcaagtcgttaaggcatgccaactatgactgcggtcgcctctaggctccagctgtagtggcccgggtactgcagcctgctggagtccaggcaccaccgtctgctgggagattatcataacgaggcggacttctccctaagcttgggctcaaaggcccataatcgtgggaatggtacctcgatgaataatgatcagcgccaggaggtcctctatctcgaatctgatgagtggtggcggcctgaggactggggcggggtgctaccccacagccactggtcaccatttctctggaataggagcgtttattctagggaattccactgtcatcctttttttaggttgtgacgctttgccttgctctg

SEQ ID NO: 16107 - DNA, 928 bp, Zea mays
  Clone ID: LIB3061-079-C7_FLI
caccaagcgaagcgcactagcaacgacctaacaacaatggctaccaagatattagccctccttgcgcttcttgccctttttgtgagcgcaacaaatgcgttcattattccacaatgctcacttgctcctagtgccattattccacagttcctcccaccagttacttcaatgggcttcgaacacctagctgtgcaagccaacatgcaacaacaagcgcttgcggcgagcgtcttacaacaaccaattgcccaattgcaacaacaatccttgccacatctaacaatacaagccatcacaacgcaacagcaacaacagttcctaccagcactgagccacctagccatggtgaaccctgccgcctacttgcaagagcagctgcttgcatccaacccacttgctctggcgaacgtagttgcaaaccagcaacaacaacagctacaacagtttctgccaacgctcagtcaactagccatggtgaaccctgccgcctacgtacaacaacaacaactgctttcatctagcccgctcgctgtgggcaatgcacctacatacctgcaacaacaattgttgcaacagattgtaccagctctgactcaactagctgtggcaaaccctgttgcctacttgcaacagctgcttccattcaaccaactgactctgtcgaactctgctgcgtacctacaacagcgacaacagttacttaatccattggtagtggctaacccattggtcgccgccttcctacagcagcaacaattgctgccatacaaccagttctctttgatgaatcctgtcttgtcgaggcagcaacccatcgttggaggtgccatcttttagattacatatgagatgtactcgataatggtgccctcataccgacgtgtgtttcctagaaataatcaatatattgattgagatttatctcgat

SEQ ID NO: 16108 - DNA, 1649 bp, Zea mays
  Clone ID: LIB3061-079-E3_FLI
taaaaatcaatgaccatagcagcagaagcggcgaaacttccaccccaccttcacctccttgcttatatatactcgccccgccgccccggggccggctcccacctcgctccagtctagacggcggtttgactttccgaccggggaatcggcgctgcgtttgatttgaggaggcgacacgagacgggacgggagggatctcttcgctggagcgttgcccgattcgtcgcggttctcggacaagggagggagggcacacctcgggctccgatcgaagagctttgttaacattagagattaaaaggtagcgccgtagcaaaatgaaggcaccatcactactggttcagtgtttccctggcttgcttcccagcaaggccactagttgcgtgccaattgtatctgagaaggatctgcagctaccatcaccagctgttgaaataatcccctcaaagagtgttcatccatacaaatatgctggagagaaggttgatgtgcaaggtcttaatattttcaagggtaaagtcagtgtagcagatatgatagttatctcgccttctgaagtagcatcatcaaaatatgatggaactctgaaatactgggagagttccattacccttgtcgacattcttaaaaatgagatccgtgatgggcagttgagcttcaggggcaagcgggttctagagcttggatgtggatatggcctctctgggatttttgcctgcttgaagggtgcatccacagttcactttcaggacataaatgcagaaacgatacggtgcagaacaatacccaatgttcttgcaaatcttgagcaggctcaggaccgacagaacagaccatcagagagccctgttacaccatctaggcagctcttggctcctaatgtacatttctatgctggagagtgggatgaactcccaacaattctctcagttgtgcagccacctgcagcaccaacaaacctcagcttctctgaggatgattttatggatggctgcagtagccatgatggaagcagtgtagttggtcatgactactgccccaggagatctaggaagctttctggtagccgtgcatgggagagagctagtgagaccgaccaggcagatagtggctatgatgtgatcttgatttctgatgtcccctacgcagctaactctctgaagaagctctatgcgcttatttcaaagtgcctacgtcctccttatggagtcctgtacgtggcttccaagaagaacttggttggttccaatggtggcgccaggcagcttcgagctctcatggaagaggaaggtgtccttggtggccacttcttgactgaggtgtgtgacagggagatatggaagttctttttcaagtgagcaaatataggaagtgggaagagaaggaaatgagttctgacgttgaaacccagtttttatggtttctatctgcagcgatgtacataccgcgaggcatagttccattaattctttggtagtaggttgaaacttcaagaaatatctgcagttgagcttgcacaagtgttggagtcctttaccgctttgtagatctgctatgtgctaatgtcgctctattaagtacagaaagcaaattgtggtaacgttttatatatcgaatatatggtgatggcacttaagccggtgcatggt

SEQ ID NO: 16109 - DNA, 1379 bp, Zea mays
  Clone ID: LIB3061-080-F7_FLI
ggaaaaaggggggttagttttattcgactggcttcgcgtgcgccgatcttctatttagcacgcgacaggagcatctcgttgctcgattcggttttcttcgtgaattcgcccccagcgagccgagctagaattggaattggaactggacttgcggctgctgcgttcggcgggggctggaattctcgccgcatccccgtgtggtggtgagaggccgtggctcgtgttgcggtcgacgcgcgaggagggtcgacggcctcgcgccattggggtacgaagccggccgagactgagcgatatgctcgtgaacctagtatcatgaggtacattaagatagcagctatgcttcctaacagaaccatcagggatgttgcgctgcgatgctgctgggctacaggtaaagagagaaggaagaaacctgatggattctacacagggaaaaaaatgagagacgtgaagccaatccaggacaaaatggttgcatcagtcccaatagctaattttcacatgacacctacaaccaatgtaatccccttttcggtatcaacgcagcatccaaatcaacaaagtcaggttcccaaagaagctcctgttgtcgacagtgcaacccagcgtctcctggaggaaaataatcagttgcttaaccagatttctgcaaataatgaaacattcaagacagtggagaacacagatctttttctccgcacgagtaacaacatcaaaacaattttaagcagaatgagcgaaacgcctggtatcatgagtcagatgcccccattgcctttatccataaacgaagaccatataaattctcttattcaactgaacagactggttgcatcatatggcacaacaagcatttcccatcatacgaagcaagagccatgaagctagtctactaaacccagggaaaaatgagaggaccagatggccggacccctcctgcaattctgtaaacgtgctgctgaggaagtcttgcatgttatactctaaccaagtgccaggaacagtcactgctttccagataatgttttcgcagtgacctgattgtttccaacccgtctgccagcctgcctgcccaccaattcttgaagcatttggaagaagtctgcagttgtggttcgagagccgcaagctatttgctgctgtttctgtttccgttatccagcatgtagaccagagtatcagacagtggatcctggtctctgcaaatgacctgtaaatatcggacggctgctggcgttccatgttttgtttctctgatcgctcatgaatgtatttcttcttttctcccccacccccggtcaccggacagggttgcattgctcccaatatgtaactgtatacagtagcgactccattttctgactaattggacacgg

SEQ ID NO: 16110 - DNA, 1205 bp, Zea mays
  Clone ID: LIB3061-082-A12_FLI
gagggcaggcgggccgacgaatgcacagtcccggagaatattggtgaagcaataacttgatatagggttctagaccaaagaagcaatggaaaaggaatcatctgccacatacgagccaaaaaggaacagtgaaataagggtttttgagagttcagatgagatttcaacggatcttgctgagtatatctcacaagtttcagaaatttctgtcaaagaaaggggatactttgccatcgccttatctggaggtcccctagtcagttttttggggaaactttgtgaagctccatacaacaagacactggattggtccaaatggtacatcttctggtctgatgaacgtgctgtggcaaaaaaccatgcagagagtaactataggttaacaaaagaaggattcctcgccaaggtacctattctgaatggccatgtctactccataaatgacaatgccacagtggaggatgcagcaacagactatgaattcatgatcaggcagctggttaaggtccgcacaataggagtctcagagagaaacgactgtcccaagttcgatctcatccttctcaccatgggctccgatgggcatgtggcctcgcttttcccgaaccaccctgccatggagctgaaagacgactgggtcacctacatcaccgactctccgcagcctcctcctgagaggatcaccttcactctcccagtgatcaactcagcatccaacatcgcaatagtgtccaccggtgatgacaaagcaaaggctgttcacatagcagtttctgacatggccgaaggtcttgatgctcctacatcgctgcctgctagaatggtccagccaacggacgggaagctggtatggtttctggacaaggcggcggcatcattccttgactccaagaacgacgatgacgacgcttgctacgagcgtcatgagtgactaactccgaggatccttggtcgttttgaagcgaatgaacggaggtgtgtgtaagtaggtggttgcgtatgatggaagacgcgctgttccccttttagctcgatgcatgggttaattttgttctgagggtttttagctccggaaatctgaaattgctcttggtccttttgcagtgaggtgatttaaagcgatgaaatgtgtatgcgatgttgagtcgtcaaagaacaccggaatttaactgtggtcgtataatattatgtgctacattctatgc

SEQ ID NO: 16111 - DNA, 776 bp, Zea mays
  Clone ID: LIB3061-084-G9_FLI
cgctgaggccctgcaggcctacctcctcgtctcctccctcttcgtcgcccccgcccccgcccccgcccccgccccactttccaagccgccccagcagcagcgcgagggggagaaggcacaggaggaggaggaggaagaaccgatgcctttcgtgtatccggaccccgtggaggtgggcgagctcacgctcgagcagctcagtgcgtatgacggcaaggacccagccaagcagatcctcattgccatccggggccaggtctacgacgtctcccgcgggaggctcttttatggccctcagggaccatattccttgtttgccgggagggatgcaacccgggccctggcattgatgtcatttgacccaaacgacctcaccggggatctggacggcctaagcgccgatgagctggaggtgttgcaagattgggaggaaaaattcaaggagaggtatccgagggtgggccaccttgcctgtcaagacgcgacagacagtggtcagaccaccgctgggcttcatcacgaggaaggggacgcctaaaactccactggtttgcctcgtcgtcctctcctctgtgttttttttttttacttgctggatttcaccctgtagatctgatgtgcgcacttgtgggtgacgctgctgtcgtcgtcgtttgctgtatatgtatgtacgtgtgcctactgactaatgcacgcacctgctgtcccatttcttttggatctgtagcggctataaggaaattttgagcctaaaaaaaactggaggctttaggaac

SEQ ID NO: 16112 - DNA, 663 bp, Zea mays
  Clone ID: LIB3061-085-C12_FLI
gcacagacgagacgacagagatgaaggacggaacgtcgtcggggggaggggcgttcgctgcgggcagcgatccaaggcagccgtcgacggcgaagccatacgcgccgccgaagctgtcgccccaggacctacccatcgactatgcaggcttcctcgccgtcgccttcggcgtcctcggcgtcatgctccgctacaaggtgtgctcgtggatcgcaatcatcttctgcgctcagtcgttggcaaacatgaagaactttgagaacgatctgaagcagctttctatggccttcatgtttgctgttatgggtctggtgacgaactattttggccccgctcgtccaggcagtacaaagcgctaaactgcggaagaacatgtgctacattcttcataggactttttggtgcttccgatagctttgccatcggtgctgacattatgtatgtccaatttgagcaaacgtcataggtatgggcatcaaattaatggaccggtacatgtatgatgctcaataatttatttgtgcaatactagtaaacgcatagactgtttgaacgagtacttggtttctccggatatgttgatcaatgttttctggacttgatgcttcggtcttatcagtttaccccaaaatgccggtagatggactgacgttttggcttttt

SEQ ID NO: 16113 - DNA, 647 bp, Zea mays
  Clone ID: LIB3061-088-B5_FLI
aaagatctcacccctccagagtcccgggataattcgctttcgatccccacagaggcacagacgagacgacagagatgaaggacggaacgtcgtcggggggaggggcgttcgctgcgggcagcgatccaaggcagccgtcgacggcgaagccatacgcgccgccgaagctgtcgccccaggacctacccatcgactatgcaggcttcctcgccgtcgtcttcggcgtcctcggcgtcatgctccgctacaaggtgtgctcgtggatcgcaatcatcttctgcgctcagtcgttggcaaacatgaagaactttgagaacgatctgaagcagctttctatggccttcatgtttgctgttatgggtctggtgacgaactattttggccccgctcgtccaggcagtacaaagcgctaagctgtggaagaacaccatgcgcttcattcttcataggatatctagccgatctttttggtgcttccgatagctttggtgctgacattatgtatgtccgatttgagcaaacgtcataggtatggacatcaaattaatggaccggtacatgtatgatgctcaataatttatttgtgcaatactagtaaacgcaaagactgtttgaacgagtacttggtttctccggatatgttgatc

SEQ ID NO: 16114 - DNA, 427 bp, Zea mays
  Clone ID: LIB3061-091-E10_FLI
cgaaacccaatcctgcttcgatcccgtcggccggcgatggagggccggcggccgggcgcgcccgtggcgggcctgcccatcggcttccgcttccgccccaccgacgaggagctgctgctgcactacctccgccgcaaggcgctggcctgcccgctccccgccggcgtcatccccgacgccgacctcgcgcgcctccacccgtgggacctcctccccgccgccgcaccagggggatccggagccgacgccgacggggagcgcttcttcttccaccgcccggcgacgcagtgctggcgcaagggcggcggcgcggccagggcggccggcaccggcgtctggaggccgtccggcaaggagaccctcgtcctgtccccgcgctgcaagcgccccgtcggcaccaagcggacgctcgtattctgcccccgcc

SEQ ID NO: 16115 - DNA, 964 bp, Zea mays
  Clone ID: LIB3061-094-D3_FLI
ccgaccggctcgtgatcagctcggtcggatccgacggtcgctcgctgctgcagcgggcgcttgctgtgcgtcgcgtgggctcggccggagcccggagggaggcggagccttccccgggtctcgaagatggcggcgccgccggcgagggcccgggccgactacgactacctcatcaagctgctcctcatcggcgatagcggtgttgggaaaagttgtctccttttgcggttctcagatggctctttcaccactagctttatcaccaccattgggattgacttcaaaataagaacagttgagcttgatggtaagcgcgtaaagttacagatatgggatactgctggtcaagagcggtttcgaactattacaaccgcctactacaggggtgcaatgggaattttgcttgtctatgatgttactgatgagtcatctttcaataatataagaaactggattaggaacatagagcaacatgcttccgacaatgtgaataaaattttggtaggcaacaaagctgacatggatgaaagcaaacgggctgtgccaacttcaagagggcaggctcttgctgatgagtatggcatcaaattttttgaaacgagtgcgaagacgaacctgaatgtggagcaggttttcttctccatagcaagagatatcaagcaaaggcttgctgaatctgattcaaagccagaggatcgcacgatcagtatcaacagacctgagggtggtgaggcttcagcgtcacaaaaatcagcttgctgcggatcgtgacggggttacattgtcacaaggaagataaatagtgcgataccatactttgtaatttacccttctacgtaccttttatctggctgtcatcgttctcgtctagcttttaaatgcaattgcttggattcaggtttctgtgttgtaatgtgaacaattttagttgtacccctggtagaaatgcatgtgctcataagtc

SEQ ID NO: 16116 - DNA, 584 bp, Zea mays
  Clone ID: LIB3061-095-F2_FLI
ctctcctgtctctcttctctctctctctctgtctgtctgtctggcaaagggcactgacggccgcggcggtgtcgatggagtggtggcagaaggcggtggtggtgccggtgaagcgcgcgtggatcgccgccgccgcccggctgacgacgcgacataagaaagaagacggcggccacggcgtcctggtgaagctccacgacgacgtccagacgtgcgcgtacgaggacgtgcaggtgatgtgggagatgctgcagcgggccgagacggagaggctggcgcgcgagccctcgccaaagggcgcgcgcgcgctcgtctggctgcgccgccaccacaagatggacccgcgccggcgctgctgaggaggaggacgacgacgacaccctgatgcttttccttcctcctgctgccccttcggctttgcttgccagctgccgtgccaccctgtgcagccttgccctgtgatgcgagagccgctcatctgcggctgtgtgtacatattacatgctacatacagggtacagtacagccctgctgctgtgcctttggtttccttcgcccggatgtaaatattcacagtttcatct

SEQ ID NO: 16117 - DNA, 946 bp, Zea mays
  Clone ID: LIB3061-096-E8_FLI
ccagaaaccccggccctaaccgcgcccgcaccctcgcccttggctcgccggagattaacgctacagccgtaatcacgtaaattccttttcatggagggtgtgggcgcgcggctagggcgcacttcggcgcgctacgggccggcgacgacgttcacgggccatgtcaggaagtggcgcaaggagtgggtaccagtggtcgccgccgccgccgccgccgccgccaacgccaacaccagcgccaacggtggcacgacgtcctccacggggatgggatctggcggaggatcccgcgggaataatcttctcctgtttaagtggaccccggtgaacggggctaacgggggaggaggggatggggagcagcagcagcaggctgagacggccacgagacgccggcggtatgtgccggtttctttaatggaagagcaaaggcaagaatctaccaaatctgatgatgagaacaaggctaatgatggagatccatcttcgaatgaaactgagccatcaaatggaaagactgatatcaatgatacacctatggatgaatctcaggcaacagatgaggatggtcgagattctggtaaaaacggcggtggaacagacctaaatttgaatttaggtttgaaagacccggatggtgataatgaagttgagacatcagagaaacatgtagcggcaaacaatccgcagacagagaatagatccaagaggaaatccgtaacccctgaccttgagatgacaatgtaacccagaaatttcatttgtcttaattttactatttgccatgagcccatgaggtgtgtaacttgggtacgttctcatcgtagaaacatttaagtaaaatcgattacaggacatacaatagtgtgaactgaagaaacctttttttactcgaacatggagaattgtctaaagtcattgtcaaatataatttaattttccagag

SEQ ID NO: 16118 - DNA, 852 bp, Zea mays
  Clone ID: LIB3061-098-B10_FLI
tacatagtgaagtacactagcaacatcttagcaccaatgggagccaagatttttgccctccttgccctccttgctctttcagcaagcgctgctacctcgacttttattccacaatgctcacaacaatacctctctccggtgacagccgcgggatttcaatacccaactatacaatcctacatggtacaagaggccatccaagcaagcatcttacggtcattagcattaaccctccaacaaccatatgctctattgcaacagccatccttagtgcatctgtatctccaaagaatcgcggcacaacaactacaacaacagttgctaccaacaatcaatcaagtagttgcagcgaaccttgctgcttacctccagcaacaacagtttcttccattcaatcaactagctggggtgaaccctgctatctacttgcaggcacaacagctactaccatttaaccaacttgtcgggagcccttatgccttcttactgcaacaacagcttctgccattccatctgcaagctgtggcaaacattgttgctttcttgagacaacaacatttgttgccattttacccacaagttgtgggaaacattaatgccttcttgcaacagcaacaattgctaccattctacccacagaatgtggcaaacattgttgccttcttacaacaacaacaattgctaccatttagccaacatgctttgacgaatcctaccaccttattgcaaccgcccaccattggtggtgccatcttctagattttttatgatttatactgtaataataaagttctcatgctgatatgtgcgacctctcagtaataaagtattagagatctatattttaaattc

SEQ ID NO: 16119 - DNA, 950 bp, Zea mays
  Clone ID: LIB3061-099-H1_FLI
gtctctctcgagtgatccccctgtagtccccggccccgtctttccgccgcctcctgcaaccgcttcacgtgcccctcgcaggtcccctttccgaccccaaatggagccgaagaagtcctccgcccagcgccagccccacgccatggagcccaacaagtcctctctatgcggcgccaccgctcctgccgccaccgccgaagccgagtccccgttgtgcagcttgttctacccgccggcgccgaccgcggcaaatgggaaagattcggacttgtacagcattctttacaaagggcagagcgggagcgcacaagctggcgtcacagatggtaaaccgcaatgggctccttcttccagaagtcgtgccgcgaatgcaaaggatggtaaacattcaccgccttatgattcagttgatacgtcgtgttttggatcgtctgtggattatggtggtcgagattatttctacggcagctctacacccaagaaagtgacagaatcctccactgactacaaagggaacaagaaagatccagccgcagattctcatggcgactggtggcaaggctcattttattactaagagaacccggtggcctctccttggacaacaaggaacagaaggagatcctattgacagttcttctggaacagaaatgggaaatagtattgtctgtgtcatagtggacccgctttcgttcagtggtggtgccattatttagaagcatcatctcagatgtgcaagcaatgaagctgtaggacagtatgaattaggtcgcataggggtccttgtccattgtacgccagtaatatgaaccataaaatgtctaattactagtcaaatgtctgtacaattggatcgtcactccaaagcaaaaaaaaaagtgctggagaagcggcggtggcttcacattgtacacttttatcggatgggatttgttggaagtttggagact

SEQ ID NO: 16120 - DNA, 882 bp, Zea mays
  Clone ID: LIB3061-100-D1_FLI
gcggcgcgggcggacaaggagcaggcggaggaggagttgtgccaagccacaatgggtatctcgcgtgactcgatgcacaagcgccgagccaccggtggaaagcagaaggcctggaggaagaagcgaaagtatgagcttggtcgccagccagccaacaccaagttgtcaagcaataagacagtgaggagggtccgtgttcgtggaggtaatgtgaaatggagggctcttcgccttgatactggtaactactcatggggaagtgaagctgttacccgcaagacccgtatcctcgacgtggtctacaatgcatcaaacaatgagcttgtgaggacacaaacccttgtgaagagtgccattgtgcaagttgatgctgccccattcaagcagtggtacctcactcactatggagttgacattggtaggaagaagaaaacccctgctgcaaagaaggataatgctgagggacaagaggttgaggcagcagctgaggaaacgaaaaagagcaaccatgtcacgaggaagcttgagaagcgcaaggagggacgtacccttgacccacacattgaggagcaatttggcagtggacggttgctggcatgcatttcttcccgccctggacagtgtggccgagctgatgggtacatccttgagggtaaagagcttgagttctacatgaagaagctacagaggaagaagggcaagagcgctgtagcttagagcattctcatggattgtcttgcaccgaaatgtgtgtcctgatgagtacactttttttggttagtcgtctcaagttcagagcgttatgccatgttttcagtcctgattagtacactgttttctaaaagcgattgagctctagtccaatgtattgataatttctgc

SEQ ID NO: 16121 - DNA, 1151 bp, Zea mays
  Clone ID: LIB3061-100-E10_FLI
gagtgccccagttcctaactccggtgggcgcgctcccaccgccgcgcggctcaaaacccgccctcagcctcccgcgctccagtccacacgggagcgggtggtgtcgtctgaagcggcgcgatcaaggagtcttcgggcgctccggacgtaacgtgctggcggttgcttatctccggatgtatatataagcggaaatgttctccttgttctatggcctgtggaagtatgtgttcgccaaggacgagttccgtgttctgattcttggtgttgacagagctggcaagacgactttgctggagaagttgaaatcgatatatctcaagggggaaggacttccgcctgaccgtgtcgttccaacagttgggctcaacattggccgcatcgaagacgcaaaggcaaaacttgttttctgggatctaggtggtcaggttagcctacgaacaatctgggagaaatactatgaagaggcccatgccataatgtacgttattgacgctgccacagcatcgtcatttgaagattccaaatctgctctggagaaggttattcgccatgaacatctgagaggagcaccactcttgatagttgcaaacaaacaggatttacctggagccattgatgaggaagaattggctaaatttctgcataaagaactggatgagaggccatatacatttcaggctgtatctgcatatgatggcagggggatcaaatctggcatagactggctggtggaacaaatggaaaaaagcaaacgtaccgagacactgcaggctcgtgctggcgtagctggacaaatttagaatggggtgaatttgttaaagaacaaagcattggataggacggcttccttcgtatcgcgtaagcagccatttgctgcattccgggattatcgttccaggtcgcccagagtgctgcaagaaatgtttggctggttgctcctgtggtggtggtgattggtgaggcgattcgtttggtattattgaggttgcattcatatgtacctaaaggtcgcaagcatacatgtctatatgatgcttttcaattttcgtagcaaactagtagcttcaatacagaggatcaaagagagccgtgttctttaacttgtttgtgataaaaaaaaaggaagaaaggaaagcgaagaaggaatt

SEQ ID NO: 16122 - DNA, 510 bp, Zea mays
  Clone ID: LIB3061-101-E10_FLI
cgaaccagagattcatcagagtggcgatggccccgagcgcgtcgatgctgttcctgagctaccaccagctccacaggccgacggaggtggggacgccgccgccgccgccgcgcagggaggcggctgcccccggcggcttctggaggaggatgagcgtgagcagcgtgctctcacccgctttgttgcagtggcggccggagggggaggcgacactgcacgagcgcgacgccggcgaggagatcaagtcatcggcgccggccgacgctgataaggagctggaaagcaagttcgaggaggcgttgcgcctcagctgctggtcttcatgagcatccatccatcatggggaacggagagacgcgagcgtgccgccgaatcgaagcgacctctcctctaaacagccgtcctgtatatcttctccgtgtatcaaaatccacccttttgctttagatttttgtacatttgtaatcgtcacatccgctcaaatatgttatatatattttagtttggagc

SEQ ID NO: 16123 - DNA, 2000 bp, Zea mays
  Clone ID: LIB3061-101-H7_FLI
gggctttcttctagacgagctcttctggttccttaagtttgtgggccgtggctatttaatctccaactgcatccccagatattcaccaaattctgtgagactgggaactccgggattggtttggataaggtgttctgggaatggggaaccaatgcccaaacgggacccttgggagtgactactacaaccgccccgcttccaggttcgctgatggttgccttgaggacgatcgctactctgacttgaagaagtttgacaagccatggcctgaggtgaactcgtttaagcccactgctgttggtattttgaagaggggattggatccaacgtcaatcactgtccttgaaaggaagacggccgacgtaagggaacattatatcatcggtcggaggcttggtcaaggccagtttggcacaacattcctctgcaccgagatcagtacagggtgtgagtatgcatgcaagacaatcccaaagcgaaagctcatcaccaaggaggatgttgaggatgtgcgccgtgagatccagataatgcaccatttgtcaggccacaagaatgttgtttccatcaaggatgtatacgaggatgggcaggcggtgtatattgtgatggagctctgcgccggtggggagctctttgatcgaattcaggagaaagggcattacagcgaacagaaggctgcagatctcataagaatcattattagccttgtggctatgtgccattcacttggggttatgcaccgtgatctaaagccagaaaacttcctcctttgggataaagaagatgacctgtcaataaaagcaatcgattttggtctatctgtgttcttcaaaccaggtcaggttttcactgagctggttggaagtccatactacgttgctcctgaggtactacacaaacggtacggaccagaagcggatgtgtggtcagctggagtgatactgtatgttttgcttagcggggtgccacctttttgggcagagacgcaacaaggtatatttgatgctgtcttgaaggggcacattgattttgactcggacccatggcctaagatatctgaaagtgcaaagaatctcataaggaagatgctctgcccttgtccttcagagcgtctgaaagcccatgaagtactacgccatccttggatctgtgaaaatggagtggctactgatcaggctcttgatcccggtgttctctctcgtctcaaacaattctccgcaatgaacaaattaaagaagttggctctgagagtgatagctgaacgactttctgaggaggagattgctgggttaagacaaatgttcaaggcagttgacgttcaaaatagaggcgtaattacttttggtgaacttagacaaggtttaaaaagatatggtagcgaattggagaatagagaaattagtgatataatggaagtggctgataatgacaataatgtgaccatcaattatgaagaatttatcgctgcaactgtgcctcttaacaaaatagaacgtgaggagcacctgatggcagcttttacctacttcgacaaagatggaagtggttatatcacagtcgacaagctgcaacgagcttgtggagaacatgacatggatgacactttccttgaagagataattttagaagttgaccaaaacaatgacggtcagattgactacgccgaattcgtagcgatgatgcaaggcaacaaagttggacttgggtggcaacaaatggaaaccactttgaatgtaaccttgagagatgcacctcaagtacactgtcactgacgcgctcgccatgtacagattttgttctcttctcgtgttcatcgtttctccacacgacctgagagttccggtcgacatgacatgtatcacgaggagagagcaaatcaatcgattcatttagtggtatttatcccaaataaagtgtgggctggcaggcagaatatggtttgtcatgagagacactagtatgggtttatatgtataaatatatagtagtggtggtat

SEQ ID NO: 16124 - DNA, 1245 bp, Zea mays
  Clone ID: LIB3061-103-A5_FLI
gccgaattcgtcttccaccgatccgccccgcccgtttcccattgcttagcttgctatggcgcagcagcagccggtgcggcggattctgaaggtggcaccgccggggaaggggggcggggaatccttccccacggtgcaggcggcggtcgacgcggtgccgctgggcaaccgggcgcgcgtcgtcatccgcctcgcgccgggggtctacagggagcctgtctacgtcgccaagaccaagaacttcatcaccgtcgtgtcatgggacaacaccgccacgcgcatcaggcactcgcagtcatccagggttataggaactggaacattcggctgtggtacgttcatcgttgagggggaagatttcattgcagagaatatcacgtttgagaactcagctccccagggctctgggcaggccgttgcagtccgggtaaccgcagataggtgtgctttctacaactgccggttcctcggttggcaagacacattatacttacactacgggaaacagtacttaagagactgttatattgaaggccattgtgacttcatcttcggtaactctgtcgcccttatggagcattgccatatccattgcaaagcagcgggatacatcactgctcatagccggaagtccacatcagaatctactggctatgtgttcttgaggtgtactattactggacatggagaagctggatacatgttcctaggtcggccatgggggccctttggaagggttgtctttgcgtacactttcatggatcgatgcatcaagccttctgggtggcacaactgggacaaatccgagaacgaacgaactgcttgcttttatgagtacaggtgctcagggccaggcgccctcccatcgaaccgggtcacatggtgtagacagttgctggatgttgaagcagagcagttccttgcgcacacttttatcgacccagacgtcgataggccatggctcctccagatgatggcgataagaataccagcctcggcatagtttgatcccggcagccgcaggtcctgcatggttcatgcctcctttctagcctatttaaataaattaagttggaggatgcattatatttgtataagtttgtaacgtttggtgaattagtatccactttcatctcactgtgggcggtggggatagggaatgagagagcttctcttgtaacgaaacccagcactaggctggaatatatgcagattttattttgcatgaacttttttgtttcattc

SEQ ID NO: 16125 - DNA, 892 bp, Zea mays
  Clone ID: LIB3061-103-F4_FLI
ttgagaccaactagcaacatagaaagcacaatattgtaccaataatggcagccaaaatattttgcctcattatgctccttggtctttctgcaagtgctgctacggcgagcattttcccgcaatgctcacaagctcctatagcttcccttcttcccccatacctctcaccagcgatgtcttcagtatgtgaaaatccaattcttctaccctacaggatccaacaggcaatcgcagcaggcatcttacctttatcacccttgttcctccaacaatcatcagccctattacagcagttacctttggtgcatttattggcacaaaacatcagggcacaacaactacaacaactcgtgctagcaaaccttgctgcctactctcagcaacagcagttacctttggtgcatttgttggcacaaaacatcagggcacaacaactacaacaactcgtgctagcaaaccttgctgcctactctcagcaacaacagtttctgccattcaaccaactagctgcattgaactctgctgcttatttgcagcaacaacaactactaccattcagccagctagctgctgcctacccccggcaatttcttccattcaaccaactggcagcattgaactctcatgcttatgtacaacaacaacaactactaccattcagccagctagctgctgtgagccctgctgccttcttgacacagcaacatttgttgccgttctacctgcacactgcgcctaacgttggcaccctcttacaactgcaacaattgctgccattcgaccaacttgctttgacaaacccagcagtgttctaccaacaacccatcattggtggtgccctcttttagattgcttatgagttatagttcaataataaagtttttttgctgat

SEQ ID NO: 16126 - DNA, 1294 bp, Zea mays
  Clone ID: LIB3061-107-E1_FLI
gcgaaaagaaaagaggaaagtgggatagctcaatctctccttccaccgtctctcagttctcactctagcgctctctctccctcgctctctctctacacatatatatcagtataggatggatgtgcaaacctagcttgctgctgcctttctagctgagaactgagctgtagctgttggtacggttttcctcctcgctcttcttctcctccttcttgctgctggttgccgggagctgagatcgatcgagagcactgctgttgttcgtgcggccggcggcggcggcgcgcggcagtgggcggagacgacgaccgatcggtcagaaggaatgtcgtcggcccaaatcgtgccggcggaccatgtgtgctatgtgcactgcaacttctgcaacacagttctcgcggtgagtgtcccggggaacagcatgctcagcatggtgacagttcggtgtgggcactgcacaaatctactgtcagtgaatctgagagcactcatgcactcaatcccagaacaagatcagctccagcagcaggagaacatcagggtccatggcacgttgcgtgagcatcatcagtgcggcggcggccaccatctggagctgggctcttcgtcgtcctcaaggttccggttgccgatgatgatgtcgtacgcgccgcagaacgagcacttgctgcaggaacagacactgaacaacgctcgtccggctcctgagaagaggcagcgggttccgtcggcgtataacagattcatcaaggaagagattcgcaggatcaaggcgaacaaccccgacattagccacagggaagccttcagcacagcagccaagaactgggcacattatccgaacatccatttcggcttaaactccggccgagagggtggcaagaataagctcgtggacgaggctgtcgcggcggtggcggtggctccgaagaagatccaaggtttctactgatcgatgccggtcgatcgagagatcagcgctcgtcgtcatcaactggccggccgggtgtggaagaattaataataccacacaaattataaatgtactgtgatgagtaaattaaagagttaaagtggggaatgaagggagagagagatatatagcaatacgtatattaccttaccttattaatgagtgcaaaaaaaaaacacttgtgaaggtttctactgatgcatgagtgggaagtgaagcatcatacaatcacatgaattatattgctactggcatggtgggcgccatgcatggtttaaattaaccgagaagacgacttaataaatcattatttgacctacc

SEQ ID NO: 16127 - DNA, 1578 bp, Zea mays
  Clone ID: LIB3061-107-H7_FLI
gccattccctcttcaagaggggatcatcagattgggcttattattccttattactccaggcaaggatcggagttgctctgaattgactgaaccatggcggcgacaatggcagtgacgacgatggtgacgaggagcaaggagagctggtcgtcattgcaggtcccggcggtggcattcccttggaagccacgaggtggcaagaccggcggcctcgagttccctcgccgggcgatgttcgccagcgtcggcctcaacgtgtgcccgggcgtcccagcggggcgcgacccgcgggagcccgatcccaaggtcgtccgggcggccgacaactgcgacatcgcgcgccagcttggcgccgccgttcccgggcagcaggccgcctgggaggcggaggaagaggcagcgaagaggaggaagcagaagggcggcggcagcaagaagcagcagcagctgggcgatctgagcctgaggaaggtcagggtcaagatcgccaacccgcacctgcggcgcctggttagcggcgccatcgccggcgccgtgtccaggacgtttgtggcgccgctggagacgatccggacgcacttgatggtcggcagcatcggcgtcgactccatggccggggtgttccagtggatcatgcagaacgaagggtggaccggcctgttccgcggcaacgccgtcaacgtcctgcgcgtcgctccgagcaaggctatcgagcatttcacctatgacacggccaagaagttcctaacccccaagggcgacgagccgcccaagatcccgatccccactccgctggttgccggagctctagccggattcgcctcaaccttgtgcacctaccccatggagctgatcaagaccagggtcaccatcgagaaggacgtatacgacaacgtcgcgcacgcgttcgtgaagatcctacgcgacgagggcccgtcggagctgtaccgtgggctgacacccagcctgatcggcgtggtgccgtacgcggcctgtaacttctacgcctacgagacgctgaagcggctctaccgtcgcgcgaccgggcggcgtcccggcgcggacgtgggccccgtggcgacgctgctcatcgggtccgcggcgggcgccatcgccagctcggccacgttcccgctagaggtggcccgcaagcagatgcaggtgggcgctgtgggcgggaggcaggtgtaccagaacgtcctccacgctatctactgcatcctcaagaaggagggcgccggcggcctgtaccgaggtctcggccctagctgcatcaagctcatgcccgccgccggcatcgccttcatgtgctacgaggcgtgcaagaagatcctcgtcgacaaggaggaggatgaggaggaggaggacgaagccggcggcggagaggatgacaagaaaaaggttgaatgatcaaagttcttggccaagaaggtagcaatgtcgtgaagcgtacgtgaactggaaacggatggacaagtatatttggagtttgatgtggtgtttccggatcgtgtgtttgtctcagatgaaaaaaaatacaatattttgagtccaagttaatcaatgttccatttgcct

SEQ ID NO: 16128 - DNA, 1667 bp, Zea mays
  Clone ID: LIB3061-108-B12_FLI
ctccttttgctcggaacgcacacaccgcccgtccccgatctccgatcccctcgtcgatccaaagatgcagatcttcgtcaagaccctcactggaaagactatcaccctcgaggtggagtcttctgacaccattgacaacgtcaaggccaagatccaggacaaggagggcatccccccggaccagcagcggctcatctttgctggcaagcagctcgaggacgggcgcacacttgccgactacaacatccagaaggagagcaccctccaccttgttctccgcctcaggggaggcatgcagatcttcgtcaagaccctcactggaaagactatcaccctcgaggtggagtcttctgacaccatcgacaacgtcaaggccaagatccaggacaaggagggcatccctccagaccagcagcggctcatttttgccggcaagcagctcgaggacgggcgcacgctggccgactacaacattcagaaggagagcaccctccacttggtgctgcgtctcaggggcggcatgcagatcttcgtgaagactctgaccggcaagactatcacccttgaggtcgagtcttctgataccattgataatgtcaaggccaagatccaggacaaggagggcatccctccggaccagcagcggctcatttttgccggcaagcagctcgaggacgggcgcacgctggccgactacaacattcagaaggagagcaccctccacttggtgctgcgtctcagaggtggcatgcagatcttcgtgaagacacttactggcaagacgatcacccttgaggtggagtcctcagacaccattgacaacgtcaaggccaagatccaggacaaggagggcattccaccggaccagcagcggctgatcttcgccggcaagcagctggaggatggtcgcaccttggctgactacaacatccagaaggagagcaccctccacctggtgctccgcctcaggggtggtatgcagatttttgtgaagacattgactggcaagaccatcaccttggaggtggagtcgtctgacacaatcgataatgtcaaagccaagatccaggacaaggagggcattccaccggaccagcagcgcctgatctttgctggcaagcagctggaggatggccgtaccctcgccgactacaacatccagaaggagagcaccctccacctggtgctccgcttgcgaggtggtatgcagatctttgtgaagaccttgactggcaagaccataaccctggaggttgagagctccgacaccatcgacaacgtgaaggcaaagatccaggacaaagagggcatccccccagaccagcagcgtctgatcttcgctggcaagcagctggaggatggccgcaccctagcagactacaacatccagaaggagagcactctccacctggtgctccgcctccgtggtggtcagtaagccatggttcatttaagctgctgctgtacctgggtatctgcgtcgtctggtgccctctggtgtacctctatatggatgtcgtcgtctaataaacatctgtggtttgtgtgtcatgaatcgtggttgtggcttcgttggtttaatggacctgttgtgtcctctgtgttgtacccaaaactcttctgcagcagtatggcttgaatccttatgaagtttgatgtttgaactt

SEQ ID NO: 16129 - DNA, 519 bp, Zea mays
  Clone ID: LIB3061-109-A1_FLI
caacaagcaacatagaaagtggaatacagtagcaaaaatagagcaacaatggcggccaagatattttccatccttatgctccttgctctttctgcatgtgttgctaacgcgaccatttttcctcaatactcacaagctcctatagctgcccttcttcccccataccttccatcaatgaccgctttagtatgtgaaaacccagcccttcaaccctacaggatccagcaagcaatcgcaacaagcaacttacctttatcacacctgttctttcaacaatcgccagccctatctttggtgcagtcattggtacaaaccatcagggcagaacagttgcagcaactcgtgctaccagtgatcagccaagtagctctggcaaacctttccccctactctcagcaacaacaattgctgccattcaaccaacttgctttgacaaacccaacagcattctaccaacaacccatcattggtggtgccctcttttagatttcttatgagttatagttcaataataaatct

SEQ ID NO: 16130 - DNA, 1490 bp, Zea mays
  Clone ID: LIB3061-109-F3_FLI
catgtacaaagatctgaataataatgggttcgctccgtgatggcaagaccaacagcagcagtggccggcggtggtgcgcggtgaccggcggccggggcttcatggcgaggcacctggtggccgcgctgctgcgctccggcgagtggcttgtgcgggtcaccgacctcgccccggatgtcgtgctcggcctcggcgacaccgaggacgtcctcgatgacgccctccgtgatggccgcgccgtctatgcctcagcggatgtctgcaacctagaccagcttattcaagcttttgaaggggttgaggttgttttccacacagctgctgcggatccaagcaagaacgaccagcaacttcactataaggtcaacgttgaggggacaaagaacgtggttgatgcgtgcatgatttgcaaggtgaaaaggcttatccacaccagctctattgctgttgtgttcgacggagttaatgggcttctcgatgcaaatgaatcattgccatacccagacaagtttcctgatgcgtatggacaaacaaaggcagaagcagaaaagatagtcatgaaggctaatggcattagtggccttctaacttgttgcatacgtcctggtagcatttttggccctggtgacatagttatactaccaactctggaccaatgtggaaaaacacactttgtttttggtgatgggaagaattgtgatgattttgtatatgttgaaaatgtggtacatggccacatttgtgctgaaaaaactctttctacaatggaaggcgcaaaaaccagtggtggaaaagcctactttataaccaatacggaaccaatgaacatgtgggactttctatatctgcttcaagaagaacttggatacaaaaggttgttcaagataagaatacctttgattgtcatccaggcagtaagctatttggtagagtggggatacaaggttctacaccattatggaatgtgccagcctcaagtgctaacaccagcaaggatcaagtatctgacagttcatagaacattcagttgtaacaaagctgctgaagaacttggctacaaaccaattgtgacacttatggtttcatagattcaactctctttgtgttgcattcgttgttgtttttttctgttagtgcagctcgtttttgtattattgaaatgctcatgtgctttcctaatttgctgtctaggatggtatgaagctagcagtcaaatcatatattcggttgagaaatcatgcagatttatcttacaaacatatataaaagattatcattatggcataggatgcctcatgctgacgatatacaacagcttttgagaattgtcataagcgaaggtctgccgtgattatgtttccaataaataaaaaattcggtgtttacaactcgcatcaatgtcctgatcaaaaacccagcatgttgtattctgatttagtagcaaagatagattgtaactccttaacaatgatcaggcatgtatttcagat

SEQ ID NO: 16131 - DNA, 1305 bp, Zea mays
  Clone ID: LIB3061-110-H8_FLI
gtctgcaactactggcgtgccggtcggtgcaaccgctttccgtgccccttcctccacagcgagctccccgaggctgcgccgcccaagcgccccactggacccggggggaacgtatggcgcaaccccaacaccggaggacgaggaggtggccatcacaatagatgggggaagggcccaggagggggcagcgggattgcgagccacaagccgcctgagaggccctgcaagtactttctcgccggtaccgaatgtagctatggcgagaggtgccgctatccgcacagctactgcataagcgatagtatcgcgatgcttaccttgctcaagggacacgagcagggtgtcacgggcattgcactgcccgctgggtcagacaagctttattccgggagtaaggatggaactgttcgcatgtgggattgccaaactgggcagtgtgctggtgtcatcaccatgggtcgtgaggttgggtgtatgatcattgaaggtccgtggttatttgttggaatacctgatgcagtgaaggtacgtaatacttcaaaattgtgcatttctcattgtttcagatttcagaagttgaggcaacttagcactagctcatcaatgttataggctcaaggcacgtctctcctgcctatcatctgattggacattaggcatcgccgctgctcccttagctctttttaaattctgatgaagtttatcaccattggtgttctgcatgcatgaatatatagtcttttacttcaggtttggaatatgcaaacagcagcggaaatgagccttactggaccaactgggcaagtctatgcactcgccgttgccagtgagttactctttgctgcaacacaagctgggaggattttagcatggagatttagtgccgcaactaactgttttgagccagctgcttctctagatggccataagcttgctgttgtttcattgatagtaggaggcatgaggctttattctgcttcaatggataaaactatcagattatgggatttggcaactttgcagtgcatacagactctttctgatcataccgatgttgttatgtccgtgctttgctgggatcaatttctattatcttgctctttggatcaaacaataaaagtttgggccgctacagagagtggaaacttagaagtaacatatacacacaaagaggatcagggtgcacttgccctcagtggtatgcctgacgcacagtcaaaacctgtgctactgtgttcattaaatgacaacactgtccgcttatatgatctgccatcgttcagtgacagaggcagattattctcc

SEQ ID NO: 16132 - DNA, 1164 bp, Zea mays
  Clone ID: LIB3061-111-A8_FLI
ccatcgtcagctgccggtttttccatacgcgcaagcgcaacacggcaacagtgccgaccgccgacgaccaaccaaaccatgcgaagaggaaagagccgtcgctttcgctacgctcggcagtggaggacacatcttcctcgccgcttctggctttgatccggtcgcatccaacgcacgacctgttgaaccagggcgtgccctcccagggttcctttcttctccgtctccgcgtaggcgtagcgaagaagctaacctagaatcaaagatatcgcacgcaagagggagcaccggagcagcgagccagcgacagcagcagagagaacgccggggccgctcgcctgtctggagagaggaaggaaacaaagagatggacgagatcatgaacaaggtgggcgcttactggctgggacagagggccaacaaggagatctcctcggcaggcgacgacctcgattcgctctcgaccagcgtcggggatggagcgaaatggctggtgaacaagctgaagggcaagatgcagaagccgctggcggacctgctcaaggagcacaacctccccgtgggcctgttcccgcgcgaggcgaccaactacgagttcgtgccagagacgcggcgcctgacggtgtacatcccgtccccctgcgaggtcggctaccgcgacggctccgagctgcggttcgacgccacggtgtcgggcacgctgggcgaggaccgcctcacggaggtggaagggatcaagaccaaggtgctcgtctgggccagggtcaccgccgtcaaggccgacgccgccaaggtccacttcaccgctgggatcaagaggtcgcgcagccgggacgcctacgaggtcgtcaggggcggcatcaccgtcgacgagttctagcttagttttgctttcgcggctcacatggatggacaggcttcgtcttgctcgctgcacgctgagaaggacagattgttgctttcagttgcaggaataaattctacacccattagctatgtgggagatctgcgtgcaccgtatatcgtgtgttttgggttttgctgtgagaatctaacacttgaaggattcagaaggtgtgctcgttgcttatgatatatgttgttcacttgtttttaatatcttcgggtattagaaaacaagacaatataatgagattaaggtcc

SEQ ID NO: 16133 - DNA, 575 bp, Zea mays
  Clone ID: LIB3061-112-G3_FLI
aattgctcttgccgctttatgtatttgccgcgcgcggcgacagagaatatacacgagtatatacagtagccgccgccggtggagtctctatctggcagccggccggtcggtcggtactctgctctagaagctagagagatactactctgcaggctagctagctagctagctagaggtagaagaggccggcccggcccggcccgattgaagaataacatagagctgtctgctgctgagcgacgacggcgatggtgctctacttcaaggcgcgtccggacgccggcgactacaccatctacatgggcgccgacaagaacgagaacgaggagctcatcaaatacggcctccccgaggacgtctggtacgtacgtacgtcgtcgctagctgctgctacctcttacttcctcgcgacgacgacgacgacgacgacatgccgcatgcgattcagtggtgaattgaatcatggcgaggcgattcgatggtgggttgggttccgatcgaccgcgacatgcgcgcgtctcggtctgccgctacacgtagaggcagcttagcattgcacgcatagaggacggcag

SEQ ID NO: 16134 - DNA, 1626 bp, Zea mays
  Clone ID: LIB3061-113-C3_FLI
acaagccgctcttgttgattattccgttcgttagttccgtcgcggagctacgctaagcctacgcccatcggcccctgttttcctaatccgcttctcctgcttccggggaaatttcgtgtccagtatcttgatcttccgccgccgcgcttcacgccagggctccttccaccggcgtcctccttaccgtcgtcctctactggtgctggactgctgcgggggtggagatcggcttagatcaactcttaattttgccgggactctttagagggcgcgtgcgctggtacagcaaaaaatgagtgataacctgatggaaaaggttagcgcctttggtgagcgcctgaagatcaccgggacggaggtcagcaagaagatgacggccggaatgagctccatgagcttcaagatgaaggagttgttccaggggcagactcccgctgataagattgttgaggacgccacctcggagaatctggacgggcctgattggaactcaaacttggagatttgcgacttgatcaacacagagaaagttaacagtgtggaacttatacatgggatcaagaagaggatcatgatgaaggatgcgagagttcagtacctctcattggtcctgcttgagactattgttaagaactgtgagaaggccttctcagaagttgcggccgaacgggttcttgatgagatggtcaggttgattgatgatcctcagaccgtggtgaataacaggaacaaggcccttatgctgattgaagcatggggagagtccggtgatgaactccgctatctgccagtctatgaggaaacgtacaagagcttgaaatcaagagtgcggtttcctggacgtgacaatgagagcttggctcccatatttactcccccacgatcagttgctgaagctgatgttgaaaccagcttgccccagcaggcgttcgaagacgtccatgttcatacatatactgctgaagaaacaaaagaagcgtttgatgtagctcgtaacagcatagaacttctttcgactgttctttcctcttcccctgagcaggatgcttcgcaggatgacttgacggccacactcgtgcaacaatgctaccaatctcagcacactatccagaggattattgagaccgtcggagacaacgaagctgtgctcttcgaggccttgagcgtgaacgacgagatccagaaagtgttgtcaaagtacgaggagatgaagcagcccagggcctcggagcatgcagaacagagagcagttgtcataccggttgccacagaacatgaagatctgactgctgccgtcaatgaagacgcccttgtcagaaaaccagctgccgcgagaacaaggtcaggtggggatgatgatatccttgatgatctggacgagatgatattcggcaagaagggaggtagcagctcccaggaagggccgaagaagccagatccaaagaaggatgacctgataactttttaagcgtacccttctataattgcagcctttgcttgctattttctggtgatgtacccactcggtagattgaagattccttaggatttggatcgattgtctattcgcatacgattcgtatctgccccctttcggtttgttcagtaaagtcgctgcactttctc

SEQ ID NO: 16135 - DNA, 1383 bp, Zea mays
  Clone ID: LIB3061-113-F12_FLI
gatgaagcagtgcgccaaagccttggatgcgatgcttatcctgctggtacagtaagcacttcaaatgggacagaagtgtatgggactggacttaaaaatgctgctggtgaatacaattgttttttgaatgtgattattcagtcattgtggcatataaggcggtttcgggacgagtttcttaaaacatcattactgcacaagcatgttgaagatccttgtgctgtctgcgctttatatggtatcttcattgacctgagcaaagcatccaagggacaaagagaagctgttgcacctacttcgttgaggattgctttgagcaaatcctacccaaacagcaaattctttcaggagggacagatgaatgatgcatctgaggtactgggtgtaatctttgagtgtttgcataagtcatacacttctcgtactgtctaccatggtgtatcccacgagaaaaattctattggatcatgggattgtgcaaatatttcttgcataacacataatctttttgggatggacgtatatgaacggatgaactgtcacaattgtaagatggagtctaggcagctcaagtatacttcatttttccacaatatcaatgctagttcactccgaactgcgaagatgatgtgtccagattcttcatttgatgaacttttgaaggttgttataatgaatgatcaactagcttgtgatcaagacgttggcggctgtggaacaccgaatcatatagaccacatcctttctaattccccacatgtctttactgttgttttgggatggcagaacaacaaagagagggtggatgacatatctgcaactttggctggtatttcaactgagatagacattagcatattctaccgtggtctagatcaaggaggcaaacacaccctggggtcagtggtttgttactatggccagcattaccattgttttgccttcaaggatggacggtgggtcatgtatgatgaccagacagtcaaggttattggtagttggggtgatgtgctcgtgatgtgtgaaaagggccatttgcaaccccaagtgcttttctttgaggctgcaaattaattattcttcagagtcgcaaaacgcgctacagcggttaacatgccctcaaatataggttttttccctgcggccatgaagattagaaatagggtagcagattcgttttgagcggggatatatagtactagcattcaacggtgcttttcgttgtgagtccgtaataagcagtcatctgagcattctagagcaaaaaagggagctgtttatcccccccttttttgctttaacctttggtgtaggcgctgaacttctgatctcatctgccaataaatcttcactgccgatcaagcgggtggagcattcgacttg

SEQ ID NO: 16136 - DNA, 563 bp, Zea mays
  Clone ID: LIB3061-116-H12_FLI
cactgccccctcgcagacgagacgcgtgtagctagggttttggtctcgccgcgcacgcctcctgaagcttctagacgttcgaggaggaggaggaggaggggaggctcccgccgccgccgtagccatggcgtccaccaaggtgcagcgtatcatgacccagcccatcaacctcatcttccgtttcctccagagcaaagcgcgcatccagatctggctcttcgagcagaaggacctccggattgagggtcgcatcatcggattcgatgagtacatgaacttggtcctcgaagatgctgaggaaatcaacgtcaagaaaaacactaggaagacactgggccggatactcctcaaaggtgacaacataactttgatgatgaacagtggcaagtgaaagttcttatggcaggaacgatgtttggtgctcgcgttgagtatttctggcacgttgtactccatccattcagacttacatgtatcatgtcattgtggattagtgagagagttgtacctgctgttaatgacctgagtaaaattatgctagatgctggtcacttgtgtgtgcc

SEQ ID NO: 16137 - DNA, 299 bp, Zea mays
  Clone ID: LIB3061-117-E4_FLI
cctaattggattattaatcgtgactaatcgacgactaattggacgaccaggtttctgatcactctgatccatctgagtacctaatcgagtgctaggtaccgatcagcgcgagtaatcgcgacctaataacactgcttcactgttatttaataccgtgcatgaggacatatgttggggtaatttcagaacgtgatatgctttcaatctttttttttctcgaacgcacaggagaactgcgcatcattatattaagagaggaaaggtccaaagtggaccgaaatatagcaccttgagggcag

SEQ ID NO: 16138 - DNA, 936 bp, Zea mays
  Clone ID: LIB3061-118-B7_FLI
gcgacgttcgtccaattcgacccggcaggcagcaggcagcagctgtgctcctgtgggtgggtgggtcatgggtgaccacatgcatcgatggagccagggccgccgtgtgcgcagccaactctacctatccccgcccccgggatgggcgatggcaactatcctatcgcaacaatatcctggggtgggggctataaaacggagcggcccgcgtggggcgcgcctccatcagccgcagtcgcgtcgcgtcgcgtcgcgtccagtccaatcctcggagcctcacacgggcggacgagcgggagcttctcccaatctcccctgccctgccctgccctgccgccgcgcttagcttcgcatcttcccctcctcctcctcctccttcctcggccaagcgaggagcgaggcgcgggcgcgagcgcgtcgttgagatggattcggaggcggtgcagcacggctgcgcgcattacagccgtgggtgcagcgtcgtggcgccctgctgcggccaggccttcggctgccgccattgccacaacgacgccaaggttcggtggtttccctccttccgttttcgcttcggctccggttcagcagatgttctgaaacaaccctgtcccgtgccccggcagaactcgctggaggtcgacccgcgcgaccggcacgagatcccccgccacgaaataaagaaggtgatctgttctctctgctccaaggaacaggacgtaagttgtctaccaaaacgtactcctacaacagtttttcaggagcacgcatcttttggctgtactactactgctaactgcatggaaactgctcattcccatcggcaggtgcaacagaactgctccagctgtggggcctgcatgggcaagtacttctgtaaagtatgcaagttcttcgatgatgatgtaagcgtactcgaatcccagacgatgaacaaag

SEQ ID NO: 16139 - DNA, 1867 bp, Zea mays
  Clone ID: LIB3062-002-D11_FLI
catcaccatagagcaatgggttcattaagaaacaatagtataggaagttttgacaagaccataagcgtaaataagtatgaaagaagaataatttctgatacgttgtcagagtttaatccatgggatgattcatattcgactgctaacaattttgctaggatgcttagggaatctaaaaataatgatgtccattgcattgcgccttcatggaaatcaggaaccgggatcaaagagtccagattttcatttgctagacaggataaccaaggaaacttgtttgattcatctctcagaaactgtggtactggtactgagcagaatttcagtttgctaccccagaattctcgaggaaatatttaccagaatggccttgcattccaatctctagagaatgaattttcaaacaataactctcctggtgtattagatatggcaactactggtacatcgatgtctaaaatatctgcccccccaggattttcggcaccaacaagagtaccccctcctggattttctactgcatttccatcccaggatagtttgaaccccactcctgtgtttccttctggaattttgtgccatggcgggtctatcccccctcctagattctcttcattttcttctggaatttcaactcaggaagtgtctaagcctcctactagaccgccttctccattttcttctagattttcatcacaggacggtcttgacccctcttctagattccctttttcttctggattttcatcacatgatgggtctaatcagtcgtatggctcaacgaacccagaaaatcttctccggggtactgttcagggtggcaacagtaatcattatcaatctcagtttggaaggcactcaagtgacatggagtttgatgatcctgctatattagccatgggcaaagggctgatgcctggaattggcgattcagggctggagatgaaaaatactcctgcttttcaagcacagttgcaaccagcaagtagtgatccaagatttcagttacatgtacagccaaatgtgcagtctcgtcaaaacatgagattcacagaccctatgcaagatggtttgaaccatatgaacgataattacctggcatccagatttttagctcagaaccagggtcctctatctccttatgtgcagattccgcaacaacccagaaactcgcaggttataaatggtcactgggacgggtggagtgatttgagacaagggaataacgctcctatgtcagacatgtccaggatattatatccaagtgaagtgaacaagttgcatatgctgggttcaaatgatgtccataacagagcctttggaatgtgatcgtctcctgggataatgtgcgactttgagctgacatgttcaacttggggcgttttgtgcaagtaactggttgcacaacacatagtatacctgaggtggttaatggtgttgtgctcatgagctggcacacgactatttattgctgttggagttgaccaaaatgaaccttagttttggtccatccatttggaattaccaggttcattctcgtctatgatttgtgaagcttgaatgaaaagaaagattacgtgcctgagaagaacaaggcagctgaagttgaaatagatagagatatgtctattatgggatgtggtgtgacttgcgagcgaaagagatgaagaagattaggtgggcttggcttgatggcagcttgttttttcttgtgtcttgtacatgatgatattggtcggtggttgtatatgacttgtgatcgacggtggctgcattaacctgtagtggttgcccttgctccttcctgcctgttttgtttgcagctcctcctgttttgcatagtttatgctgattaagggaattggtg

SEQ ID NO: 16140 - DNA, 978 bp, Zea mays
  Clone ID: LIB3062-002-D3_FLI
tagaggtgatccagaagaagagggctgagaagcccgaggtccgcgatgctgctagagaagctgctcttcgtgagatcaaggagcgcatcaagaagtccaaggatgagatccatctgaaggtcaaaagcaagggcgaggcgtccggcgaggaagacggcaaggaggaggaggtcgaggtagagattgaggccaagtttgttgagaaggaagaggtcaaagacacgggtgacggtgcggcaggaaagggtaccaagaagaaggatacaaaggagaaagacaagaaaaagaaggaaggtggtgacgattcagggaaggcagaggaagacaagaagggtaaagcgaaggattcggagggcaagggccaagtgaagaaggaaaagaaggatggtgctggggacgacggaggcgaggagaagggcaaagaaaagaaagataagaaggacaagggtgagaagaatgacaaggagaagaaagagaagaagaaagacaagggtggagagaagaagaaagacaagggcgccaaggagaagacgaccgatcctgtgaagctcagagcaaagctggagaaggtggacaccaaactgcaagacctacatgccaagagagaagatatcctgaggcagctgaaagagctggaactggaagaagaaggcaaggggaaggccaacgaagaggagcctgcacatgtacagaatctggaacagggtggagagagcgtggtcaaggaacagagtcatgtcgccgcagcctgatccggttacacatgcacatgcatcacactgtaaatgaaggaacatacatcagctgagttgtgaaaatggtacgcatgcagtgtgaggatctccgtctctcactgtccagtgagaagaacggaacatataggtatagctgctgagaggagtgcgtccttctcctgatacgtgacaatgtaatacttggctggcttttgtgaataaaaggagtgtgcctgctgttgtc

SEQ ID NO: 16141 - DNA, 717 bp, Zea mays
  Clone ID: LIB3062-002-D7_FLI
cgcggagctcgctcgtgcggtcggatccacgggcatggcggccggtcagttcctcgatctggccggcgctaccgcccttggtgaggccgaggtcatgcaggtcctgacgaagaagttcggcgagatggccgagtgctccgccgcctgcggcgccatgctcggtggggccgggcccgacgaggaggccgcgttgcggcgctacggccgcaccatcggcgtcctgtacgagctcgtggacgacatccggagcgcatcgggaaacggcaagatgaggagcaacgccagcgtcctgcgctcgctggggatggaccgcgcgctcggcattgtggaagagctcaaggctcaggccaagacagaggctgacaggttctcggataagtacggcgatcgggtgctgcctttatacagcttcgtggactacgcggtggagagagggtttgagctccaggatgcagcggcaactctgtagagtggacgatcgctgttgctactaaacattggaggcttcgagctagtgagatgtacatggcccaggaatttggtgagagctttatctggcatagatctaatccctattttatctagatgttctgaagctcgtaattcgggggatggttcataatggagaattgttatcccggcattagatgtttagaacttgaaattgggtttgatactcgtagtaagctaataaaagtaagtggtaaatgttcatgc

SEQ ID NO: 16142 - DNA, 774 bp, Zea mays
  Clone ID: LIB3062-002-D9_FLI
ctaactgagcagcaaatgctgggtttgaccaacctccagcaatcttcccaacaagcagaggatgcgttgtcacagggcatggaagcactgcagcaatctttggcagagactttggctggatctctcggtccagcaggttcttcaggaaatgtggcaaactacatgggtcagatggccatggccatgggcaaactcgggacgctagagaattttcttcgccgagccgacaacctgcgacagcagacgttgcatcaaatgcaacgtatcctaacgatccgacaggcttctcgtgctcttcttgcaatccacgactatttttcacgattgcgcgctttaagttctctgtggcttgctaggccacgtgaataacgaagggccgtcagtattttgagttccctctgccttacggtgctgctgcgtcgttcgcagcgatgcatcacagatctttggtggtactgtttttgttgtacaattacttttggccgctgcttggtccaaattgtactcaggtgggtgtacaagtaggtcaatataatcctgtaagttatggtgatttatgggtgtgttagcaatgcaataataattagagagggcaggatcagggtttctgttgtttgtactggttagagatttagtcctaatgtaacttcctgggacatggggggcggaatgggaagagagtaacaagaatcttcctttggttactgtagtatatgttggtattgttgcatcccatttgctcattttgctgttaggagaatgattattctgtcc

SEQ ID NO: 16143 - DNA, 1478 bp, Zea mays
  Clone ID: LIB3062-002-E5_FLI
gccacctccttccccttcgatatttttttttggttggatctagcgtgacggcaaagacggtgtatcgaagggtcgacaatggttacgacgatcggtagtccatagcagcggcgggcgcaacttcgacccggttttcttcccatatatctgtcaaatccttctccggtcgccctccatcggcagcaatttccgccatagataccggcgatcgagggcctcggacaacccaatcgacggagcagcgcggcggcaggagagggcaaacccttttcttctcagtactctacttgtctgcgcctggatcccctctggaggaagataagacatgggtcaagcactcggcttgattcaagtggatcaatcgacagtagccatcaaggaaacttttgggaagtttgacgaggtcctagagcctggatgccacttcttgccatggtgcatagggaagcaaattgctgggtatctgtcactgcgtgtgcagcagcttgatgtccgctgcgaaacaaagacaaaggataatgtcttcgtcaatgttgtggcatctgtgcaatatcgtgcccttgccgataaggcatctgatgcattttacaggcttagtaacaccagggagcaaatccagtcatatgtttttgatgtcatcagggcaagtgttccaaagatgaacttggatgatgcctttgagcagaagaatgaaatcgccaaagctgtagaaaatgaacttgaaaaggcaatgtctatgtatggatacgagattgtgcagactctgattgttgatattgagcctgatgagcatgtgaagagagctatgaatgagatcaatgcagctgctaggctgaggttggctgccagcgagaaagctgaggcagagaagatactgcagatcaagagagccgaaggtgacgcagaatccaagtacttggcgggtctgggtatcgcaagacagcgccaggctatagtggatgggctcagagacagtgttcttgctttctctgagaatgtgcctgggacctctgcaaaggatgtcatggacatggttctggttacgcagtacttcgacacaataaaggagatcggggcctcgtccaagtcctcgtcggttttcatccctcatggaccaggtgctgtcagagacatcgcagcgcagataagggatggtcagctccaggccagtctgctgtgagcacgttggaaaatgcatgcttttgacattcccatcagtaaagaagtacatatacattatgaggagtaaaaaaaacttactagggataatgtgagtacttggacatcagtacagcttgttcgttctatctatatggtgcatgtgattattattatggagattaatgttaaataggtttgcatgtattgtgccagaacaaggctaaggaccagtttgcgtaaaaaaatgtatgtttggaacttatctaagttttggagcctgaggaaacccctccatcctgtgcaaactattttgtggt

SEQ ID NO: 16144 - DNA, 140 bp, Zea mays
  Clone ID: LIB3062-003-B7_FLI
tccgagattcgttttgtggaacttatctcatttgagaggtaaatgtattgtttctcgcttgtctggcatttctttgcaagggaactgtaagatgaagaaatattgatttgaattactgtttatcaaaacccattatcagc

SEQ ID NO: 16145 - DNA, 1264 bp, Zea mays
  Clone ID: LIB3062-003-E2_FLI
gaatcccggcaggcaaagcgaaagcatccgcgcgagaggcgtcgcgtgttccttgcttcgtcctcacgtgccgtggcccttccgcttcccccgtatccgcccgtcctgttcccgccccgagcgaaccggcggcggcggaggcgatgcagcacgagccgtggcggcctggcgctgagcccgccgccggggctggggcgggccctgctcccaccaccgtcgacgaggcatccatggagcggagcatgagcttcgtcaaggcgcttcaggagctcaagaacctgcgcccgcagctctactcggcctccgagtactgcgagaagtcctacctccgcagcgaacagaagcaagtggtgctggacaacatgaaagattacgctgtcagggccctggtcaacgctgtcgaccatcttggcacagtggcctacaagctgacggacctatacgaagagcaggcttcagaaataacaaccctcgagttgaaagtagcatgcttgaaccagcaagtccgtacctgccagacatacacggacaaagaaggcctcaggcaacagcagatgatgggggctgccagaagacaccataaccattacatcgtaccatatgcgggaaacaaaagaatgcaggccttctctgttacgcaagccgatgctgatttggacccaacgccaaggcctttctcttcagcaaggacccttgagtggcatttggtttccgagaagaattccaaaaccagtagaccagatcagtctgaaattgccttaggagaaacaaaaactactaaggcttcgtcaagtggtttccgccttctcggtaaggaatcatctgcatctcccttgtccaggaatgtgcattccaacataaccagtttggatattgtcagtgccggcatgaaggatcagcccacgaccaggcacttgtcatcattcagttctttggacaaccccagggggcgccaaatccagaaggctccgcttcgcacaaaaagtatgctagccgctttctttgtcaaacacagatcagcaaagatgaaaaacgtctctgtgcgttgatcaactgcaagccaagcctgtagtttgctccagccaaaccgacgtggaagtgttaagggcatgagatgtatacatgtttgtatatggtatttgggtcttgtatgctagtgctctagagataaacctttacggatgcgctttcaatctagagtctttggcatcttgctcatgaccttaatgtaatgatttatatggatatatattactagttttat

SEQ ID NO: 16146 - DNA, 786 bp, Zea mays
  Clone ID: LIB3062-003-E3_FLI
ctggactacgcgagaacaaggttggctaatgacgcgaaggctgccaagggaggaggtgaaaggcagttcaatgggcttgtcgatgtctaccgcaagacactcaagtctgatggtattgctgggctttaccgtggatttaacatctcctgtgttggaatcattgtttatcgtggtctgtactttgggctctatgattccatcaagccagttgtccttactggcaacctccaggacaatttctttgccagtttcgctctgggttggctgatcactaatggtgctggtcttgcatcttaccccatcgataccgtccgcagaaggatgatgatgacatctggtgaggctgtcaagtacaagagctccttggacgcgttccagcagattcttaagaaggaagggcccaagtccctgttcaagggtgctggtgctaacattcttcgtgccattgctggtgctggtgtgctttctggctatgaccagctccagatcctcttcttcggaaagaagtacggctccggcggtgcttaaatggagaaatatgatgacgaacaagagcagtgtgtgttcccggtcctttccaatcaggatctggtgaagtttttgcctttcatatcgaagaaattaataattcatgtagagggaggattcttccaacaatttgttttggatggagacttagatctccaaacactcgtaactatcctactaggtggtgacatcggtccccaaaaacatttatggtcatagagtctgcccttcgtttgtcagtcgggcaatttttcttgc

SEQ ID NO: 16147 - DNA, 838 bp, Zea mays
  Clone ID: LIB3062-003-G7_FLI
cagacgccatcctcgaaatttatcagaggagattggtcgtctatctggagcactccgcggccatcaacccccacgcttaaggtcagggtttctgttggagcgtcagggcgatggtgtttggggcgttcctttatcaacaaggggtagagaaggaagaaggttaatggagattcggaatgcacttgaaatgattcaaaggggggaaaatgtaaggctcgagtctatcttctatggcggcctcgacattcatgacagacacagggacatgcgccttgacattgacaatatgtcctatgaggaactattagcacttgaggaaaggatcggaaatgttagcactggcctcagcgaggaagctgtgataaagttgctcaaacaaaggaaattttcatcgtggagactaaaagcatctttggacccagaaccatgctgtatttgccaggaggagtacgttgatggagacgatctcgggaggctggactgcgggcacgacttccatgctggctgcatcaagcaatggctggtggtgaagaacgtgtgccccatctgcaagaacaccgcattgaaagcctgaaaccgaacaaaggcgacacacccatgttccatgtccattcgatcggtcgcaagatcatttacccgattggtttttactatgcgttttttggttgggaaaattttgccatttcacctgggaaagtggtgggggggtgttggaggtggaagagaagatggcggtccctgtaaactgctgctgcagtaaataatccctggaatttgtctccctgcatttaaacaaaatatttatggctgttataatggacgccgtcgtagggtttat

SEQ ID NO: 16148 - DNA, 1033 bp, Zea mays
  Clone ID: LIB3062-004-E12_FLI
cctctcgtcgccgtcctctcccgttcgcaacgccacgctccccaccgccgaaatggccccgaagcgaggtggcagggcaccggtgccggccaagaagaagacggataaagtgacgaaccctctgttcgagaaaaggccgaagcagttcggcatcggcggcgcgttgcctcccaagaaggacctgcaccgattcgtcaagtggcccaaggtcgtgcgcatccagcgccagcgtcgcatcctcaagcagcgcctcaaggtgcctccggcgctcaaccagttcacccgcaccctcgacaagaacctcgctaccaacctgttcaagatgcttcttaagtaccggcccgaagacaaggctgccaagaaggagaggcttctgaagagggcccaggctgagaatgaaggaaaaactgttgaatccaagaaaccaattgttgtgaagtatggccttaaccatgtgacttacctcattgagcagaacaaggctcagctcgttgtcatcgctcatgatgtggatccgattgaactggttgtttggcttccagccctgtgcaggaagatggaggtcccatactgcattgttaaaggaaaggctcgccttggatcgatcgttcacaagaagactgcatcagtcttgtgtctgaccactgtcaagaacgaggacaagcttgagttcagcaagatcttggaggctattaaggcgaacttcaatgacaagtttgatgaagtcaggaagaagtggggaggtggcatcatgggctccaagtcgcaggccaagaccaaggccagggaaaagttgctggccaaggaggccgcccagcggatgacgtagattatccactgttgagtttgcccctgtagtttgacgtggaagaaccgatgagcattgtgcactcgtattgtgtttttttgaatctactttcatatgtttctgtccatcagaccgtgtttagaaactttggaagacagttctacagtgtttgtgcaatgtcttatatcgaagtatatcatttgcgcctcaggcagttttgctttt

SEQ ID NO: 16149 - DNA, 2247 bp, Zea mays
  Clone ID: LIB3062-021-A10_FLI
ccattctcagccgccgccaatcccttcccgtgctccgcaaccgctgagtgagaagaagagatggccggcaagggcgatggcccggctatcggcatcgatctcggcacgacgtactcttgcgtcggcgtgtggcagcacgaccgcgtcgagatcattgccaacgaccagggtaaccgcaccacgccctcgtacgtcgccttcaccgactccgagcgcctcatcggagatgcggccaagaaccaggtcgccatgaaccccatcaacaccgtctttgatgccaagcgtctcatcggcaggaggttcagtgatgcgtctgtccagagtgatatcaagctgtggcccttcaaggtcatttctgggcctggtgagaagccaatgattgttgtccagcacaagggtgaggagaagcagtttgcagctgaagagatctcctctatggttcttatcaagatgcgtgagattgctgaagcttaccttggtagcacgatcaagaatgctgtggtcacagtccctgcctacttcaatgactcacagaggcaggccacaaaggatgctggggtgattgctggccttaatgtgctgcgtatcatcaacgagccaacagctgcagctatcgcctatggtcttgacaagaaggctaccagtgtcggtgagaagaatgtcctcatctttgatcttggaggtggtacctttgatgtctccctcctcaccattgaggaaggaatctttgaggtcaaggccacagctggtgacacccatcttggtggtgaggactttgacaacaggatggtcaaccacttcgtccaggagttcaagaggaagaacaagaaggatatcactggcaaccccagggctctccggaggctgaggaccgcttgtgagagggcgaagaggactctgtcttccactgcccagaccacgattgagattgactcgctgtatgagggcatcgacttctactccaccatcacccgtgccaggtttgaggagctcaacatggacctgttcaggaagtgcatggagcctgttgagaagtgcctgagggatgccaagatggacaagagcaccgtccatgacgttgtacttgttggtggctccactaggatccccagggtgcagcaactgctccaggacttcttcaacggcaaggagctgtgcaagaacatcaaccccgatgaggctgtcgcctatggtgctgctgtccaggctgccatcctgagcggtgagggcaatgagaaggtgcaggacctgcttctgctggacgtcacccctctgtccctgggtctggagactgctggaggagttatgacagtgctgatcccgaggaacaccaccatccccaccaagaaggagcaggtattctccacctactcggacaaccagcccggtgtcctgatccaggtctacgagggtgagaggacccggacacgcgacaacaacctgctgggcaagttcgagctctccggcatcccccctgcaccccgtggtgtgccacagatcaccgtgtgctttgacatcgacgccaacggcatcctgaacgtgtctgccgaggacaagacaacggggcagaagaacaagatcacaatcaccaacgacaagggccgtctctccaaggaggagatcgagaagatggttcaggacgctgagaagtacaagtctgaggatgaggagcacaagaagaaggtggaggccaagaactcgctggagaactactcctacaacatgcgcaacacgatcaaggacgagaagattgcgtccaagctgccggccgatgacaagaagaagatcgaggacgccatcgacgcggccatcagctggctggacgccaaccagctcgccgaggcggacgagttcgaggacaagatgaaggagctggagagcctctgcaaccccatcatcgccaagatgtaccagggcgcgggtgaagacatgggcggcgctggcggcatggacgaggacgcccccgctggcagcggcggccctggccccaagatcgaggaggtggactaagcggtttgttgtcagtcttgagcgtgctgcagttgctggctggcccagtcgctgccgcgagttatcgtcgtcggtcggtgcggtgtgtccgcttaaactttatttgtggtgggctggtacttttgtggtggttattttttttggacctcgtgatagtcggtcggttccatgttatcgcggctactggcaaaccttaagtgatacggtaattcttcttttcggtatttgtttctgcat

SEQ ID NO: 16150 - DNA, 1256 bp, Zea mays
  Clone ID: LIB3062-030-F8_FLI
ctccacctacctcccggctcccggatccggcgatggagaagatgctccactcagccccagcccacggcaggctcccggagtgcttcatcttcccggccgacaagctcccgcaggccaaggccacctcagcgacggtctccctgcccatcgtggacctctccctcggccgcgacgaggtgcggcgcgccatcctcgaggccggcaaggagatcggcttcttccaggtggtgaaccacggcgtctccctggaggcgatgcaggacatggagacggtgtgccaggagttcttccggctgccggcggaggacaaggccgggctgtactcggaggacacggggagggcgacccggatctactccagcaccatgttcgacacgggcgccgagaagtactggcgcgactgcctccgcctggcctgctccttccccgccgtcggcgacagcgccgcggcctggcccgacaagccccggaggctccgggaggtggtggagaggttcacggtgcagacgcggggcctggggatggagatcctgcgcctgctgtgcgagggcctcggcctccgccccgactacctggaaggggacatcagcggcggcgacgtcgtcctccacgtcaaccactacccgccctgccccgaccccaacgccacgctcggcctgccgccgcactgtgaccgcaacctcctcaccttgctcctccccagcatggtccctggcctcgaggtcgcctacaggggcgactggatcagggtggagcctgtgcccggcgccttcgtcgtcaacttcggatgccagcttgaggttgtgacgaacgggatcttgaagagcatcgagcaccgggtgatgaccaacctgggagtggcgcggacaacggtggccacgttcatcatgcccaccacggactgcctcatcggccccgccgccgagttcctcagcgacgacaacccgccgtgctaccgcaccctcaccttcggcgacttcaagcgcatctacagcgttgtcaagctgggctcgtcgctcaacctcaccacaaatctcaagaacgttcagaaggagctctgatcatccatcaaactttgtagcctccctcgaattagctagctagctggcaagatgtagtctgtgtcatcactgtcatgttcctgcccggacgtcatgctgatgataggaatgacggaataaaaatgaaatgccaaatatgcgtgtatggcgcacgcatattacttacttaataaagtcatatttgtttcggattat

SEQ ID NO: 16151 - DNA, 530 bp, Zea mays
  Clone ID: LIB3062-030-H4_FLI
ccagaagccacccattggcgtacgcgaggcgatcggagcatcccgtcccaagaggagaaactccggccggcgacgcgggggaaaatggggaagacgccggtgcggatgaaggcggtggtgtacgcgctgtcgcccttccagcagaaggtgatgccggggctgtggaaggacatcaccaccaagatccaccacaaggtcaccgagaactggatctccgccacgctcctcctcacccccgtcgtcggcacctaccaatacgccatgtggtacaaagagcaggagaagctttcccacagatactaaatgggatgtcctccaagttgctgcggcttgtcgcagttgaattttccatgatgggttgtataatctgtcaatgtcatttctttgctcagttttagttcaacccattttcacctttccatatgcatatacggtatctgtgcctggcaaacatattttgaggctagctaaatatgaaccttttgtctcttaagttgttaaataaagcaaattatctgacagtttttctt

SEQ ID NO: 16152 - DNA, 878 bp, Zea mays
  Clone ID: LIB3062-030-H7_FLI
cggagaaggtgaagccgcatcctctggtgatcacgctcctgacgcaggtggaggacgtgatccccaggtggaagatcgtgcccaccaagcaggacgtcatcgacgccgccttcaaggaccccgtcaagcgtgaaaagatcaggaggaaccagctgatctaccaggacaagccgcggctcaagactgcgttggagatgctcaggaccagcatgtacatagaagacagcttgtcacaggtgacgctgccgttcttcgtcctgcacggcgaggccgacacggtgacggacccggaggtgagccgcgcgctgtacgagcgttcggccagcgccgacaagaccatcaagctgtacccggggatgtggcacggcctcacagccggggagcccgacgagaacgtggaggccatcttctccgacatcgtgtcctggctcaaccaccgcagccggagctgggccgtggaggaacgccatatgaccaggaagctggcgccagcgccggccaagtccatcgaaggccacggcaccgtcgtcggcaaagtgcacacacaacaaggccgccctcggcggcgccagggcttcctctgcgggcttgccggccggacgcatcaccacgcggagatgtgaaagatagaatcgccgtctcggtcccggatcagatggagcgcctgctttcttcaaccatggcaaataaaggaatgatgacctgcggtttgtaatatagaggtcttattatgcttgtcaaagttatgtatggccaatcattcccgtctggtgcagattcaaactcatgctcagatatatgtaatgtaagattataacgctattagcattctggataacccgttaacaatgacattacaaaatggtacgtcgttacat

SEQ ID NO: 16153 - DNA, 556 bp, Zea mays
  Clone ID: LIB3062-031-A1_FLI
ctttaggtgttcacgagaaatataatttgccatcaggaaaaccaaagttaacaggaagttcaatgttcaggctggggattaaaacgaggaacatgaagatattgcttcgtagcccggaaaggaacttgggggatttatagcaatattagtgtgacattttccacaagactgagaagaatgtggtaaaacagtgcagagaggaagatgccaactgtgacaacacacagacagttgagcaacagcagccctctgacgacagacagacagttgagcatgctcctcttcagaaaactgatctaggcaaagagacacatgtttcagaggctaaaacgctcacagcagatgctgatggaaatttgagctcaagccagcaaactggggagtacaatgaattgctgagacaatactattaaattgttgtttaattttaaattgttcattgtaaactagaacttattgtggctgatcatctctggagcttttgtgaataatctagctagctatctgtaaatgatatagttgtgaatgatattataattgtgatgtttttgtgaat

SEQ ID NO: 16154 - DNA, 1657 bp, Zea mays
  Clone ID: LIB3062-031-A5_FLI
cgcagagataggcgtcttcgtactcgcctacctccgcggctcaaacctttcccccttctcccaattcccgccgccgctccatcccgtaacgcgacaccatgagggagtgcatttcgatccacatcggccaggccggtatccaggtcggaaacgcgtgctgggagctgtactgccttgagcatggcattcaggctgacggtcagatgcccggtgacaagaccattgggggaggtgatgatgctttcaacaccttcttcagtgagactggtgctgggaagcacgtgccccgtgctgtttttgttgaccttgaacccactgtcatcgatgaggtgagaactggcacctaccgccagctcttccaccctgagcagctcatcagtgggaaggaggatgcagccaacaactttgcccgtggtcactacaccattggcaaggagattgttgacctgtgccttgatcgcatcaggaagcttgccgacaactgcactggtctccagggcttcctcgtcttcaacgctgttggtggaggaacgggctctggccttggttccctcctcctagagcgcctgtctgttgactacggcaagaaatccaagcttgggttcactgtgtacccttccccccaagtttctacttcggtagttgagccatacaacagtgtactgtccacccactccctcctcgagcacactgatgtggctatactgctggacaatgaggccatctacgacatctgccgccgatcccttgacattgagcgcccaacctacaccaacctcaacaggcttgtgtcccaggtcatctcatcccttactgcctccctgaggttcgatggtgctctgaacgtggatgttaacgagttccagaccaacctggtaccctacccgaggatccacttcatgctttcttcgtacgctccagtcatctctgctgagaaggcctaccacgagcagctctctgtggctgagatcaccaacagtgccttcgagccatcttccatgatggccaagtgcgacccacgccatggcaagtacatggcctgctgcctcatgtaccgtggtgatgtggtccccaaggatgtgaatgctgctgtggccaccatcaagaccaaacgcaccatccagttcgtggattggtgcccgactggcttcaagtgcggcatcaactaccagcctcctagcgttgtgcctggtggcgacctggccaaggtgcagcgtgccgtgtgcatgatctccaactccaccagtgttgtggaggtgttctcccgcatcgaccacaagttcgacctcatgtacgccaagcgtgccttcgtgcactggtacgtcggtgagggtatggaggaaggtgagttctctgaggcccgtgaggacctggcggcgctcgagaaggactacgaggaggtcggtgctgagttcgatgagggcgaggatggcgacgagggtgacgagtactagagaagtttgctgatgacgcagcatcaggccagtgtgctgcccttatcccgtgatctgccgagagttgctcctgctatcgtgttatgtgtgtctgttctgaagtattgtgtggtttacaacacctgatgttgtaagagttgttaattcccctgcattgctaccgggttattgagaataattatggctgtttacgttgttgcttc

SEQ ID NO: 16155 - DNA, 2068 bp, Zea mays
  Clone ID: LIB3062-031-D12_FLI
gggcggaggcgggggcggaggaaaaggtcgcggaagcggattcggaggaggagaagaaggcggaggaggccgaggaggccgccgcgggggatgaggcggcggtgatcgatggcactgggtcgttcaaggaggagagtaacctggtgtccgagctccccgaccctgagcgcacagcgctcgcgcagctcaaggagctcgtcgccaccgcgctcgctaacggggagttcaacctgccgccgccgccagccaaggaggaggccaagaaggaggagccggcaaaggaagaagctccggcggacaaggaggacgagcccaaggcagaggaggcggctgcccaagagcccgtcaaggaggaggccaagcctgaggagcccaaaacggaggcgccggcggaagcagcgcccgaggaggttaaggacgagacacccgtgccggaagagaccaagactgaggctcccgcgccggaggagcccaaggccgaggagcctgccaaggaggagctcaaggcagaggcggcgacggaagcggtcgccgaggagaccaaaccagctgagccggtgccggaggaggaggagaagacggtcgtggttgccgaggaggaggccaccaaaacggtggaagccatcgaggagacggtcgccgccgccgccgccgcgtccgaggagcccgaggcgggcgagccgaaggaggagctgatctggggcgtgccgctggcgggcgacgacgagcgcacggacacggtgctgctcaagttcctccgcgcgcgcgagttcaaggtgaaggaggcgatggcgatgctcaagtcggcggtgctgtggcgcaagcggttcggcatcgacgagctcctcctggacgccgacctcggcctgcgggagctggagggcgtggtgttctaccgcggcgccgaccgcgagggccacccggtctgctacaacgtgtacggcgagttccaggacaaggagctgtacgagagggccttcggcgacgaggagaagcgggagcgcttcctcaagtggcgcatccagctcctggagcgcggcatccgggagcagctcgacttctcgcccagcggcatctgctccatggtgcaggtcaccgacctcaagaactcgccgcccatgctcggcaagcaccgcgccgtcacgcgccaggctctcgccctgctacaggacaactacccggagttcgtggccaagaaggtgttcatcaacgtgccgtggtggtacctggcggcaaacaaggtgatgagcccattcctgactcagcgcaccaagagcaagatcgtcttctgcagccccggcaagtcggcggagaccctcttcagatacatcgccccggagcaagtccccgtccagttcggcggcctgtacaaggaggacgacaccgagttctccacctccgacgccgtcaccgagctcaccgtgaaaccgtcctccaaggagaccgtcgagatcccagccaccgagaactccaccgtggtgtgggagctccgcgtgctgggctgggaggtgagctacggcgccgagttcacccccgacgcggagggcggctacaccgtcatcgtgcagaagacgcggaaggtccccgcccacgaggagcccatcatgaagggcagcttcaaggccaccgagcccggcaagctggtgctgggcgtgaacaacccggcgtcgaggaagaagaagctgctgtgccggttcaaggtgaggagcgccgccgcctgatgagagggtcgttggtctggtcccagcaggtacagcctgccagctgcttgcccaccagcccgacatatataattcgatcgatcgccaaccaggtccataccgccaccatttgaatgaacatgctgcattgcattgcattacatgataggagagagagagagagagaggacaataaagagtttctgcttcctagctaggcccgttccgtgtcccggtcgttctttgattatttgttggcttgctgttctttttttttctggggaggggggagggtcgcgtttgtatgtgtttattacttgaatgaaaacaaaagtgagcttgttatatgagatagccatggcttgttg

SEQ ID NO: 16156 - DNA, 583 bp, Zea mays
  Clone ID: LIB3062-031-F11_FLI
cgcggaggccgtcgcgctcgggctcggcctctccgacttcccctccgccgggaaggcggtgctggacgacgaggactcgttcgtgtggcccgccgcgtcgttcgacatgggcgcgtgctgggccggcgcagggttcgccgacccggaccccgcctgcatcttcctcaacctcccgtgacagccacacacggtcacggcgccgaggctctgctctgcgcctgatgatgagtgcaaggaaatggagcgctttgattcttctgctcttggttgcatctgctaattgatttagcagtggtggtaaggtacacgcacgacgagctgactgcgtggttcttggtttgggccttagtatatgatgatgatgacgatgatactagttgtatgtgtgacgtgagagacgatcgcgacgacgaccttgaattttagtttctgagatgaaaaaggtcaactagtggcctctgtatgactttagttttactcatgaactcatcagatggctggctgtggctgtggctgtggctaactcatcgtcaagtgtttctaccggctgcctataaactagactgagctcttgttgttggtc

SEQ ID NO: 16157 - DNA, 619 bp, Zea mays
  Clone ID: LIB3062-031-F6_FLI
atacttgtttggatgcatctgctggtcgaaggcagactgcctcagagatcaggcttcctatgttctctgcatgcaggtggcatgcaaaacagatgtgggagttaaatgcgaatggaaatcttgtgagcagctattcaagattatgtgccacagtggaatcaagggacgaaggaggtaccagtggaggtcgggcatggattgcaactggaagtgaaggagaaatctatctcgcgttcttcaatctcgactccatgagcaggaagatgaccgttgaaatatcagaccttggaaaggttctcggaagaaaccttttggagaaaaacccatgtagctacactgaagtttggagcgggaagaatttcggccccgtgaaggaagagatttcagcggtggttcattcgcatggctccatggtgttcgaaatcatatgttgagattgcagtactgggcaagttgttcgagaagtttgcagtgataatttagttgtaagctccattcctgttgatcctttttaacgtgtagtccggagatggaagagatacgttgatgaaccattaactagatgcctgctggatttgacttgaatgaataacaaaacaaaacaaacaaacaggaggtg

SEQ ID NO: 16158 - DNA, 1718 bp, Zea mays
  Clone ID: LIB3062-031-H9_FLI
accatgcgccgcccgtggaggcactcgggcccagggtccgccgtcgcggcgcgccacggcgccgcggacctctgcctccgcgaggtcggggacctcctgccgcgacgcttcgcccgccgcgcggccggttccgaggaccttgtaatgcggctccagattcaccggaagcttgacaggcacacgggctgcgtcaacacagtgggcttcaatgaggtcggtgacaccctcatatcggggtctgatgatcagaaggtgatgctgtgggactgggacactggcaccgtcaaattagagtttcattcaggacatggcggcaatgtgttccaggcacggttcatgccctgctcagacgatcggaccattgtcacttgtgctgctgatggcgaggtgaggcttgccaagatacaggatgctggagacgtgtccacaacattgcttggtgaacatgagggaagggctcacaatttggctatagagcctggtagtccttacattttctacagctgtggtgaggaaggctttgttcaacattttgatctcagaacaaacacagcctcaaaactatttctttgcagaaactccactaaatcagtatactcatctcttgttcacctaaatgcgcttgcaatagatccgaggaacccaaatctttttgttgttggaggaagcgatgcatatgctcgtgtgtatgacattcgcaagtgcaagtgggatggatcatctgattttagtcacgcatctgactgctattgcccaccacatcttgttgacaataagagtgttggaataacagggattgcattctctcacctgagtgagttgcttgtatcttacaatgaagagaatatttacctattctctaaggatggagggctgggacctgaccccaaaaaatctgttaggattggagcaattgaagggtgcaaatcaacaatgctagcatctggacatgatgtttctcaacctgcacctcagacatacgtcggtcatgttaatcgtgaaacggtgaagcgtgtgtctttcattgggccaaatgatgaatatgttgccagtgggtcagactgtggccggatctttatttggagaaagggagatgggaagtttctacgagccatggagggtgatgagtgcattgtgaattgcattgagcctcatcctcatgctatggcaatcgcgagctgtggaattgataatgatgtaaaagtttggactccctctgcgattgagcgggcacctatgatacatgttgatgagttgagacctcgcaagagaagagccaagctctggcgctttggcatacgagacctgttgatccaacagatactggtatcggaaaataggcaacagtcagctgaagaaggctcatcagaggaccatgaggacaacatagaattacttgatctagtgctacaggctgcagttgaaggtgtatcatcatcatcagacgaggaggaggaggacgacgacgacggcgataatgaggaggcggcggcctctgatggctctgaatagtagtcaaccgatctttcagggttgtttcaaattgtaaatatacaataataagccatcactcttctcatgtattatataatagaactatgatttattagcttgtcatttctatgttataaatctgcttttagtatgctactttaatgaaaaaattgggctaaccaaattgtgtgctatgttatgaaaatctgaaatggtgttgcgtc

SEQ ID NO: 16159 - DNA, 946 bp, Zea mays
  Clone ID: LIB3062-032-A6_FLI
tcttcgcttactgatttcaggaggggctccgttgagtaatgagatcgaggagttcatgagagtgaccacctgtgcatacttcatccaaggctatggtttaacagaaacactgggacctagcactgtctgctacatcgacgacatggccctggtcggaagcgctggtgtgcctgccacctacaccgaaattcggctggaagaagtgcccgagatgggctatgatccactcggcgtcccttcgcgtggtgaaatctgcatccgggggaaatccctcttcgctgggtactacaaaagtccagaactcacaaacgaagccatcgttgatggatggtttcatacaggtgacattggagagatgaccccagacgggatcttgaaggtgattgacagaaaaaagaacatatttaagctgtcacaaggggagtatgttgcggttgagtacctggagaaagtgtatggcttccctccactcgttgaagatatctgggtatacggggacagtttcagatcaagtttagttgcagtagtcaatccacaccaagaaaacacaatgaagtgggcagagtccaatggctacaagggttcttttgatgaaatctgcaaacttgaaggactcaaagagtacatcctgaaagagctggcagccgttgcgcagaagaacaagctacgaggcttcgagtacatcaaaggcgtagtgttggatcctgtgccttttgacatcgagagggatttggtgactgcaacaatgaagaagaagagaaagaatatgctgaactattaccagtctgagattgacacaatatacaaaaagctggaggcgcagaagaatgctgccagaactaagtgaagagatgtgccctattcgatcatcagctgaaaacaagggaaacgacaccgttgtaaatttcacattaatattgcgaagtaacaactcagggctatgagt

SEQ ID NO: 16160 - DNA, 1300 bp, Zea mays
  Clone ID: LIB3062-032-B7_FLI
gaatgaaattaaaagatttaacaaggaaagacgccaggatttgttggagatgctgaaaggctttgtatcagatcagcaatggatcgaatcttgcacgagctacagtcgtacaaagtactaaaaagaaagagctggcttctcccgaggcttcgagcgcatctgaaatgccactgctagaatgtggcacgaaagaagtacagaatgtggacgacacagcagtaaccaatcaaatgacttgacatagtcatcgcgcagtggcctaaatttgttgtgtccatacgaaacacagagcagcttcctgccatggtacgccatattgaagcttcgccagcgctttttacaccataaatctgaagagcgcccaggtttgaagattttctgagttatgatcacagccatttttacaccatcatgggggtggataccgtttgtgcattcagagaggagacggtcgaagaattctttgaaacctgcacagcattttacacgtgaagtttgatccaaagcattactggagattgtcatacggtcgggaaggatcaggattgtcgctggtgatacacaccttgtctgcacttgaatccagagtgcattcaagagacggtctgatgtttcctgtggtactgctaccaaacgggctaactgtttgcacctttgcctttccaacgctggtgcagactagaggaatgtgggaagaatccatcgcagagataattgttgtgttagaatcatcaggtcgctatatctatgctcaaaagcctgaaaacaagaaggacaagctcctaacgaacgggcatctatcacctcgtgcacaggttctacctgttccttcaaatacagcgcaggatccatcaggctgtcacgctcgtgcaaccatgggaccgccatgcgggcttctgtggccctgtgccgctgcctcacgaatccagttcccgactctcatcaaccatccgacataaacgtaaagatgctacctcacactttggaccactgaaaaagacatatccaaaagcccaacagtaacaacagatgtgatgtgacagaaccagagatccgggcaccgtgcgctaccgaagtgccagacttatcaaatgaggttatccacagcagcagatcgtataaaatagagaatttatactatatattacattgtttatacagtacaatttgaaatagaggataagatagagaatgtgataagatagataccgaagacaaccttatcactccagcggaaaataggaacaactatacataaggccattcttaataaaagttttattatggctagtttgttgac

SEQ ID NO: 16161 - DNA, 678 bp, Zea mays
  Clone ID: LIB3062-043-G11_FLI
gtgagttcttccgtgatgcccaagagaaggtcctcccgtatgctgactacatcttcggcaacgaaactgaggcaaagatctttgccaaagtcagaggatgggagactgagaatattgaggagattgctttgaagatctctcaacttcctttggcttcaggcaagcaaaagaggattgctgtgattactcaaggtgctgatccagtggttgttgctgaggatgggaaggtgaaaacgttccctgtgatcctattgcccaaggagaagcttgttgacaccaacggcgcaggtgatgctttcgttggaggcttcctctcacagttggttctaggcaagggcattgaagactgcgtgagggcaggttgctatgccgcaaacgttatcatccagcgcccgggctgtacttacccggagaagcctgacttcaactagtgcaaaactgaggcacgtcatgagagggactgttataggcacacttaattgttaaccagtgcgtggttcggtgtctacacaccctgtattcttccgaggcttctcttctgatccggccaatatttttgccgtgaaatttgtgttctgcaactatggacgtctcctttgttgctgtataaggcatgatttgccatcattctgttgcttcggtgatgcttgcaatgcaatgagaatgtgttggaacgag

SEQ ID NO: 16162 - DNA, 985 bp, Zea mays
  Clone ID: LIB3062-043-H2_FLI
gtggagcttactgaaggtggcactttttggttgtcggaatcaccatcggttccaggaagcatttcatggggagcaaaggcaccctgcattgcaacatgggcaacgtttcaactcaaaaggctagaaccacctggattcagtttccagatcgtaaatacaaatcttgatgaagttagccctcgtgctcgacgaagaagtgctttacttacatggcaacatatagcatcgctgccacccaatttgcctgttatctattgtggaggcttcaatacacagaaggaatctatgactgggcggtttttgcttggcagatccagagaacatggtgttgttggtgatatgagagatgcttggccaaatgctcgagtgcgaaaaaatgtttcactaatacacacatatcatggatttaaaggggagaaacaaggtgccctggaatttcttaaattgatatttagagctctttgcctctgctgggatcgacagacacaggacttgcatatcgactggatcttgtttagaggacgcccattggttcctgcactttgtgaggtcattaatgacaatatagatggtgtttatccgtcgtcgcacttccctatctttgccgagtttttgcttccacgctcagtccgcctagctgagacaccttcatagctattgtgtcaattttttgttctatttttcccaatcttattttgattacggctgattgtttctttcgaccacttcaccatgatcttgaggtaacccccctttacaaccattgttgggtttctttctgttatcccattccgcaaaacaagacaatgcacatgtgcatccttgtatgtttcctgtcactagtccctattatgtgttcgccttagctttgttatcttcttaaagttcactttttccttatgtcattgatttttagactgtcatatataccgtgtatatatatggtatgaatatgttgtcatgtataatcggccgatccttgtat

SEQ ID NO: 16163 - DNA, 1043 bp, Zea mays
  Clone ID: LIB3062-043-H9_FLI
agaaatcatcatcttcgacagatgctcaaactcgggctacattcagtttaatcattggctaccttgctgatcattgcaacttgcccacgagggagctgctgtcacgaaggttttgccagaatattaagaagcataggcttaggcagcttatagatgatactattggttctgttcctgcagattcttctctgataaactctgtccttgaagtgtgctttggcccatccctccttccaaaaagcattagcgatgtgaagtacctggttgattttgttgaaacagtcatggaggctcttcctgcaaactatcgcctgggcttggctgttggtggattcgtagctaagcacttcacaggttatggcgcagcctccactgggaccaggttctgggcaagctctgttctgatcaatgccatctttcgagctgtacctgtcgcaccggaatcagtatggctagaaggtgcaggcctcctggagaaactgcatgccacagagattttgaagaggttctatcagcaggcggcatcggtctatcccttctccttcaagctgtggcacgcccatctgaattactgcaaagccagtgggagcaacactgagagcatcctggagagtgcgaggcagcgtggcatcgagctgaatctgacaccaacatagtgtgtcccttggatccaagctgcatgatgttttgccagtcggagatgttggtagtgttgtgttaactggagatggcgtgtagatatatcggtgatcatggtggtgtgagatcatttttgttctttaggtgcaggtttagtgggacatagtcgtcggtatcttacagcatgtgtttctgatggagtgatatggttagtaagcagtggtgaaggatacaggcatacgggcactggggcatataccatacttttggactagacgggctagagactgattttggagtccgttatgtttccattttccgttctcttggttttctctgtcgtcaatgtattataatcatgatgatgaatggatggagaaatgagatgagatttttttgagttc

SEQ ID NO: 16164 - DNA, 1372 bp, Zea mays
  Clone ID: LIB3062-044-C4_FLI
tccaattcgcaagatccattggcgttgagatcgcatcgaccatctagtacaggatcaaacgtgaagagcaacatagaagctgtttggatgggacactctcctcctttgctaaggctcgcaattgtggatttggcattaccaaaaactcctaatgataactctctgtcattgtttgctgatccccttgttccagagagattttattgtgcgcatggtggggggcttgacatggtcacactgcacttcctaccattttcataccctgaaatgtcttcgacaccaccctctgtgcatcctgtcctcactacagggaacagcgaaacaagctcaccttttctttctggatttgttaccatagctgatgcatatggtcatgtacagttagctggcatcacatgcttgggtgagtgctttgtggtggagatgaagggttggaaggaaccggcacctcttcagcttgacttagaaagcaaaatcgtcaaggatgtggagcctcctgcaactggaatgatcagcaaagaacttattgctggtccagacccacccatacttccatcatcttcaagcctgaaatcgttgaccccagactctattgaaggaaaatctacacttcaccactatattaaggtcttccatgagtactatgtggagtacggacacaaggtgttcattgaactcaaggagcatgcggactatttgaagacagaaatggaagataaacagaaacgcttggaagcagtgaagaaatcacttatatccgtagaagccaaagatggagacatcaacaagaggatagatcgggccttcaaggtgtatgaactgttggagaagcgaatagatagcttcaagatgcttcctgctgcaaacaagaaaccattaacccaggcagagcaggagttcaaatcacagcttgatcggttcgcagatgtggagctggatgctttgcgttcctccattgccgccctgagtgctaggatgaaacgttttgctcagcaatccacgggcagtgcggctagcacaggaatggtgccatggcaggcacaaagggctggacggagccatatctcagaatcccagatgtcacttctgaaatcttcgcttgagaagctctccctcctcaacgaagagaacagtctgaagctccggcttattgatcatgaactcaagaaccaggaacgataggttggcaggtccatgtgcgacttattgccatattggtattttgttgttcggacactaagtacaggatccataggagcctgtttgctgtcactttctgtggggggctcgcgaactgcatttgcatgtcagcgtgttgtaagttgtaactagcaatacagaaccaagtgcaaaccgctacaccttttcctcc

SEQ ID NO: 16165 - DNA, 1281 bp, Zea mays
  Clone ID: LIB3062-044-D7_FLI
ttagggatatcctttcaatgcccatgcctatgccaaaaaatccaaagattgcccttatgttcttgacaccaggttcattgccctttgagaaattgtgggagaagtttttacagggacatgagggaagatactccatctatgtgcatgcatcacgtgaaaagcctgttcatactagttctttgtttgctggccgggatattcacagtgatgcggtagtatggggattgatttcaatggttgatgctgagaaaagattgttagcgaatgcactggaagatgttgataatcaagtttttatcttgctttctgacagttgtgttccactgcattcatttgattatgtgtataattacctcatgggaacgaatgttagcttcattgattgtttcaaggatccaggtccacatggcagtggaaggtactctattgagatgtatcctgaaatagacgagagggattttagaaagggtgcccagtggtttgcagttacaaggagacatgctttaatgattctggctgacagcttgtactacaagaagttcaagctatactgcaagccagcagaagggcgcaactgtattgcagatgagcattatttgccaaccctgttcaatatggtagatcctggtgggatctctaattggtctgttacacatgtggattggtctgagggaaaatggcatccaaggtcatatagcgctgatgatgtcacctatgatctcttgaagaacattacagcagttgatgagaacttccatgtaacaagtgatgacaagaaacttgtgatgcagaagccgtgtttgtggaatggatcaaagagaccgtgctatcttttcgctaggaagtttaatcctgaagcacttgacaacctactgaagcaatttaccagttacacatctgtttaagtcctaccggattctttgccttgtgctgtcaaatccgacaagcttttttctcttcctgtttatatgtaaattgtgaagtccgtacttattaggatctgggcctgaagataccggtacaactgcaacagctgtgatggcttggagctgagtcatgggtaaaacggccacagcgatgtttatagaatggcactgccctcatagtaatttatcgtgttcaatgtatgtctccatagtcttccacccaactcccaactcattagttctttattcttggagaacagtttttgtcagagtgttatactgtcatgatatgatccattctttgtagacacagagattacaacagatgtatcacaaatgcagtcttaattttgtc

SEQ ID NO: 16166 - DNA, 764 bp, Zea mays
  Clone ID: LIB3062-052-C4_FLI
aggagatctacctccactcgctccccgtcaaggagcaccagatcgtcgagaccctcgtgccggggctcaaggacgaggtgatgaagatcacgcccgttcagaagcagacccgcgccggacagcgcacccgcttcaaggcctttgtcgtcgtgggcgacggcgacggccacgtcggcctgggagtcaagtgcgccaaggaggtggccaccgccatccgcggcgccatcatcctcgccaagctctccgttgttcccgtcaggagaggctactgggggaacaagatcgggcagccgcacaccgtgccctgcaaggtcaccggcaagtgcgggtccgtcaccgtgcgcatggtgcctgcgcccaggggttctggcatcgtcgccgcgcgcgtgcccaagaaggtgctgcagttcgctggcatcgaggatgtcttcacctcgtcccgtggctccactaagacccttggcaacttcgtcaaggcaaccttcgactgcctcatgaagacctacggcttccttacgcctgaattctggagtcagaccaagttctccatgactccgttccagcaatacacggacctgctggcgaagcccaccaagggtcttgtgcttgaggccccaaccgagacagtagaggcttaggatggtttgtgctgtctaaatgcactttctatgttatagttaagaactgttgtcaactttgggttttgttttgccctggatgatgttctttgttgtcaagttttggatataacagtactctttttt

SEQ ID NO: 16167 - DNA, 292 bp, Zea mays
  Clone ID: LIB3062-052-D6_FLI
ccttttgtagtttgcatacaccatacagcggcgctgctgtagtccatgttgacgttgcagtgcagttctttcaagtaacgcaagtaaagttgttaccacaatttcgaacctctctaccatatcgttgttgtaacttttcattgtttatattgaaaaatggaaatggaacgcctcccatgattcatgtgattgtggacaatctggaagtttgaactcatatcctgtggtgacttatgtatattgtacacgcacgttggatcctcctctgaaattgactggaatagtttcaacc

SEQ ID NO: 16168 - DNA, 630 bp, Zea mays
  Clone ID: LIB3062-052-D9_FLI
tgccgccgcgtgctggtgacgggcacggggcctctggggtgcgcgccggcgatccttgcgcagcgcagccgcaacggcgagtgcgcggcggagctgatgcgcgcggcggcgctcttcaacccgcagctggcgcgcgtcctggaccagctcaacgcgcgctttggcgccggcaccttcatcgcggccaacgcgttccgcgtccacttcgacttcgtcagcgatccggccgccttcggcttcgccacggccaaggacgcgtgctgcggacagggcccccacaacggcctgggcctctgcaccccgctctccaacctgtgcgccgaccgcagcaagtacgtcttctgggacgcctaccaccccacggagcgcgccaaccgggtcatcgtcagccagttcatgtcaggctcgctcgactacgtcagccccatgaacctcagcaccgtcttgcaaatggacgccgcatttcaccagatcgagtactgactcatcgtcccgagagagtagagacccaaccaacaagcctgctgtcgtctacctcgtttcgttttatatctctgtgactgccgtgcgtgtgtctgtgtacgatcacataaacaacatcaacatgtatttatatttatagtgagtttg

SEQ ID NO: 16169 - DNA, 408 bp, Zea mays
  Clone ID: LIB3062-053-A10_FLI
atggtggacgttaagagggccaggacaagagctccacgaaaccagggcgagcagcactcgcagcctcagcaggctgagcaaggccggggtcaggggaaccaagacaatcagtcgcccgctggtaatggtaccgctgacagtggcaacagtgtgagctatgattcaaaaaaggtattcattggcggtttgcgggataatatcaccgagaaggagttccgggcttactttgagacgtttggcacggtaacggacgtcgtggtgatttatgacagcgcgacgagccggtcgagggggttcggtttcgtcacctttgattcggaggaagcagtggggaaggtgatgcggcagagctttcacgacctgaacgggaccaaggtagaggccaagattgctatccccaaggatgag

SEQ ID NO: 16170 - DNA, 1181 bp, Homo sapiens
  Clone ID: LIB3063-051-F6_FLI
accctgacaacaagaacctctgtgtccagatgtttgactggtttgactaccatggccacatgtgtatctcctttgagcttctgggccttagcaccttcgatttcctcaaagacaacaactacctgccctaccccatccaccaagtgcgccacatggccttccagctgtgccaggctgtcaagttcctccatgataacaagctgacacatacagacctcaagcctgaaaatattctgtttgtgaattcagactatgagctcacctacaacctagagaagaagcgagatgagcgcagtgtgaagagcacagctgtgcgggtggtagactttggcagtgccacctttgaccatgagcaccatagcaccattgtctccactcgccattaccgagcaccagaagtcatccttgagttgggctggtcacagccttgtgatgtgtggagtataggctgcatcatctttgaatactatgtgggattcaccctcttccagacccatgacaacagagagcatctagccatgatggaaaggatcttgggtcctatcccttcccggatgatccgaaagacaagaaagcagaaatatttttaccggggtcgcctggattgggatgagaacatcagctgggcgctatgttcgtgagaactgcaaaccgctgcggcggtatctgacctcagaggcagaggaacaccaccagctcttcgatctgattgaaagcatgctagagtatgaaccagctaagcggctgaccttgggtgaagcccttcagcatcctttcttcgcccgccttcgggctgagccgcccaacaagttgtgggactccagtcgggatatcagtcggtgacgatcaggccctgggcccccctgcatcttttatagcagtgggtgtccagtccaggacactggtgcttttttatacaagagaacgagccagagttcactccttcctcctggctctctatatacctgtgaatatgtgaaatagtgtaaatatgaaagaacttgtacctatcacttcaacccctgccttgtacataatactattccatccacacagtttccaccctcacctgccccctcatacggagttggatgggggccgagtgaggtaaccaggtggcatctaccccatgttttataaggaattttgtacagtctttgtgaaataaaataacgtgcttc

SEQ ID NO: 16171 - DNA, 846 bp, Zea mays
  Clone ID: LIB3062-005-B8_FLI
cttcagggagggagagagggaaagatggagcgcaaggcggtggtggtgtgcgcggtggtcggcttcctcggcgtcctcgcggcggcgctcggcttcgcggcggaggccacccgcgtcaaggtttcggacgttcaaacaagcggcagtcctggtgaatgcatatacccaagaaccccagccttggcactgggtttaatatctgccgcctctcttatgctcgcccagtccatcataaacgcagtcgctggttgcatctgttgcaagaagcatcctgttccctcagacactaactggagcatagccctgatttcgttcatcgtatcttggtgcactttcataatctcgttccttctcctactgactggggccgccctgaacgaccagagaggcgaggagaacatgtacttcggtagcttctgctacgtggtgaagccgggggtcttctccgggggagcggtgctggccctcgccagcgtggcgctagccatagtctactacgtcgcgctgtcatcatccaagggccctccgccggcgttcgcagccccgcagaaccagggcatcgcgatgggccagcccgtgatcatcccgcagcagagcagcgagccggtgttcgtccacgaggacacgtacaatcggcggcaacaggtcccgtgacctgaccacacagaggtctatggttggttcggttggttgtgcttggtctgtataggttgcaggttagaacagtagccgtcgccattgctgttatagctagatcctgttctttttgtttttgttctacttgtaccctcgtgtttgtcgagcatggaatgtttggttctgaatgaactgggtaatgttgaagag

SEQ ID NO: 16172 - DNA, 1408 bp, Zea mays
  Clone ID: LIB3062-005-G5_FLI
ctcccccgcacctccctccgatcccccaaatcccgaattgaccaacccaaagccgtcgccccgcatggagtggacggccccgaagcgcgccgcctcgccgccctcgcctccgctcctctgggactggggaggagaccacgccggcgccacgggctcgggctcgggctcctccggcgacgccccggcgcggcgcggcgggagggagcgggaggcgaagcgcgccagggccgacgacggcgaggtgaggtgccaggtggaggggtgcgggctggacctcagcagggtcaaggagtaccaccggaagcaccgcgtctgcgaggcccacaccaagtccccccgcgtcgtcgtcgccggtcaggagcggcgcttctgccagcagtgcagccgatttcatgccctgtcagagtttgatcagaagaagaggagctgcaggaggcgtctgtctgatcacaatgcccgccgccggaagcctcagccagatgcattcgcctttgcctctgcaaggctgccttcgtcgtcgttcgatgataggaggcaaataagttttgtctggaataaagctcctgttagccatcctttcacttctccatgggacagctcatctgagctccctcatgcaaaggaaataagagaggtgtcaacgaaagttgggacaattactggacaagttcatttggataaatcttacgtgtccaatgctgttccatcacttacccatggcaaagatgagccttggccaatgaaaggtccggacatgtctatagctgcttcaaaattcgatggagcaccggatcttcagcgtgctctctctcttctgtcagttggcgcctgcggattgcccgatcctgtacaccaaacatcttgcgtcatccaattcactagtgccagcgagaacagtggcgaccttcatctatcacatggagcgaactctggtctagcgtcatgcggtgatggacagcatatagcttctcagcctcaggctcagctggttcggtttaccatggataccagcaacagtgtctatgagcccagtttcttcagtgtaaaccagataaattaagcgttgaagacacacgccacttggtcatttggataaatagccctgaagatggcctgagcttgtgcaagaagttcttcaaccaaccaccggacataaggatctatctgttaatgttatctgtgtatttattagccatacctgaattaagttgaacccaatctaggccagcttatgtgcaatatgcagttccaacctgtgattgacccattttttctgttgtttctttgcccgtgatgtgactgctctggaacttaagtgtgatactgttgtagttacactttactgccctgacaatcatgtcaaacggctggatatctttgaaactgtccttgatgaatctggacgtgt

SEQ ID NO: 16173 - DNA, 457 bp, Zea mays
  Clone ID: LIB3062-005-H8_FLI
accgtaccaaaagcaaggttccatagcacaagaaaaatacatacgtcaacagcgacggaatgggccacgagggtgggtacgctagcagtagaaagatggcaacaacacgaaagggaacaccgaactcatcgaggtccgcttgccctagggaccacaaggcttcacacgataacagcccccctacatgtttcatctatatcacgaagttgcagatatgtggtaactatcaaaaggatttaccgtacctgggccagtgttttcgccttcaccatacctgcccattgtcagtactatttcctagatttggagtagtcccgtagctaatcctcttccctgcggaggtgatgggattttatgttgtattgatgttgtcaacaatgtcgttcttagccatgaattgctggttccactgtaagcaccgctggatgtttatcgctttggctgtttttctgctgtt

SEQ ID NO: 16174 - DNA, 1128 bp, Zea mays
  Clone ID: LIB3062-006-C7_FLI
taaagccatccccattacctgacagctggaagttggctgaaattttcacaactggagttgtccttggatatagtcatgatggtaccataatgactatatccaaggatcgtgtaaagccatccccattacctgacagctggaagttggctgaaattttcacaactggagttgtccttggtggatatcaggcaatgatgactgtcatcttcttttgggctgcatacaagacaaactttttcccaaaaatatttcatgtggaaagccttgagaagacagctcaagatgatttccaaaagcttgcatctgctgtttacctgcaagttagcaccatcagccaggccctcatcttcgtgacaaggtcccggagctggtcatttgtcgagcgcccagggtttctattggtctttgctttcttggttgcgcagctgattgccacactgattgctgtgtacgccgactgggcgttcacttcgatcaaaggcattgggtggggctgggctggcattgtgtggctgtacaacatcatcttctacttccctctcgatatcatcaagttcctcatcagatatgctcttagtgggaaagcgtgggatcttgtcattgagcagaggattgcgttcacaaggaaaaaggactttggtagggaggagagggagctgaagtgggcacatgcacagaggaccctccatgggctacaggcacctgatgccaagatgttcccagagaaggctgggtacaatgagctgaaccagatggctgaagaggcgaagaggagggccgagattgcaaggctgcgggagcttcacacactcaaggggcatgtggagtctgttgtgaagctgaagggactcgacatcgagaccatccagcagtcctacacagtgtaactttgcctgcccttcccagaggaagtttcttgttctttttacccaccggcgtgtgaatttgatggtggctggcttctctttgttttatttatttatttaaccgagctgcaagcaccgacaagtagctgaaatgagacagacagacccctcgctgtaatccctgatttcttctgtcctctcctcacatggtatgccaaccagtttatgaactttgctcggctatataaataagtgcttgaag

SEQ ID NO: 16175 - DNA, 835 bp, Zea mays
  Clone ID: LIB3062-007-F4_FLI
ccgaaaaggcagtacaatgcttgaacgatatagtgacgaatgcactgattcatgccgaagagtgccttcagtacatgtcagccttgaagaaccatgccatcttccgtttttgcgcaattccccagataatggcaattggaacatgtgctctttgctacaataacgtgcatgtctttagaggagttgtaaagatgagacgtggtctcacggcacgaataattgacgagacaaattcaatgtcagacgtctataccgctttctatgagttttcttcattgatagagtcaaagattgatgacaatgatccaaatgctgctctaacacggagacacgtgaattcaataaagcaaacttgcaagtcatctggtttggtaaagaggagggggtaccatttggacacatcaccttacaggcctatgctgatcatgattgtcctcctgctggtggctatccttttcggggcactgtataccaagtgatgcacttgtagctggcctttttcccctatggagacgagacaaactctgccaatctgatccttttcgtactctgtagtccccaatggctgcaggaagttcgaaattactggctgtagaagtgtagatcatacggcagcatgctactgcttccatgactccgttactgctctcgattcgtttcttcattatgttttctcgcgcgttgtatcgtttgaagctgttttaagcaacggaaaaaaataccatgtgacacgtgtatcctacgaacatgggtttctgtttagttagcagtgggcgcactgtattatgttgtcttgttgacatgtcatgttttcaaagctgacgtgtttgtgttt

SEQ ID NO: 16176 - DNA, 753 bp, Zea mays
  Clone ID: LIB3062-007-F6_FLI
ggaccgaccagagtaccggacacacagcgagggggaggaagaaggaagcaagagggaggaccgagcaggcctaggccctagggtagtcccgtccggtcccctgcggcgcaagtccggccggcgggcgggctgactgcctggcgtcggtagggggcgacggcgatctatatctgtcgatgggctactggtgggaccgcgtcgtgctgccggtgcggcgggcctggctcggcgtcgcgtcccgcttcggggttcgccagaccggtacggcgcgagggcgaggctcggcgttcatcggcggctcccgtacaatctcccgtctgcgctgcgctccgctgactgaccccgtcgctggttgctgcttgttgcagggctgtggaggctgcggcaggaggtgagcacgtgcgagtacgaggacgtgcacgtgatgtgggagatgctgagccgcaccacggcgccggcgcctaggcggcccagccggttcgggccgcagccgcggccgtggggcagcaggttccgtctctgccgaggcttctagtgctgttgctgcggtgcggggtactagtgattccgcttcattttggcttctctctctctctcttgttctttggttttcgctgcttgtatgtaccgtcgtcgtccatccctcctggctctgagatgtacttccattcctcctcgtgtatccgtctccgcccgcctgctgcagatgatataccggggcatgtgaatgaacagagctgatttcggtcgggt

SEQ ID NO: 16177 - DNA, 1046 bp, Zea mays
  Clone ID: LIB3062-007-G7_FLI
gctagtccacacggcagacgccgccgccgggggagaggagaggaggggaggggatcggctccaagggaacaggtgagatggcaatcctgtacgcgctggtggcgcgcggcacggtggtgctggcggagcacagcgcggcagccaccaacgcgggcgctatcgcgcgccaggtcctcgagcgcctccccgacggcggcgccgacagccacgtctcctacacgcaggaccgctacgtcttccacgccaagcgcaccgacggcatcaccgcgctctgcatggccgacgacgccgccggaagacggattcccttcgcatttttggaggatattcatggaaggtttgtcaagacatatggccgggctgcgctaaccgctcttgcatatgcaatgaatgatgaattctcaagggtcttgagccagcaaatggactactattcaaatgaccctagtgcagatagaataaaccgcatgagaggtgaaatcaatcaggtccgtagtgttatgattgataacattgataaggttcttgaaagaggtgatcgtttagaactgctggttgacaagactgcaaatatgcaaggaaatacagttcgattcaagagacaagctcggcggttcagaaacactgtttggtggagaaatgtcaaactcacggccgcattgatacttctcctcctggtaataatatatgtcgttctagtcttcgtgtgccatggtttcaccctaccaacttgcataaggtaaggcatgatgtgcacatagtgttttttgctgtgcatgtttgtgcctgtcaccggggtccggggggcagcagccattgcaattgtttcttgtgtagaggaaagctacatattatgaagtgattgtgagaactcaattaaagatgtgaacttaacataaaaagtgcttcttgtgggtttggctatgaccttgtaggtctatgagaattcggtgtttggattggtgtttatttgtggctattcttgtgtctgtacatgaattcagttacgacgagtattttatggctatgctaatgtaatattcttg

SEQ ID NO: 16178 - DNA, 1112 bp, Zea mays
  Clone ID: LIB3062-008-D8_FLI
agaagcgaaaccgacctttccccctcccccgcattccacctcgcggagatccagtccagccctagggtttcgccagcggcgagccaaactccacgagcgggggaagaggggaaagcagggacgacgagggggcagccatggggcagcagtcgctgatctacgcgttcgtggcccgtggcacggtcatactggccgagtacacggagttcaccggcaacttcaccaccatcgcctcccagtgcctcatgaagctccccgcaagcaacaacaagttcacctacaactgcgacggtcacactttcaattacctcgtggaagacggattcacatactgtgttgttgctgttgaatcggtggggcaacaaattcctattgctttcatggatagggttaaggaggatttcacaaaaaggtatggtggtgggaaagctgctactgctgcagctaacagcctcaatcgagagtttggatcaaaacttaaagaacacatgcagtattgtgtggatcaccctgaagaggttagcaagctggccaaagtgaaggcgcaggtttcagaagtcaagggtgttatgatggaaaacattgaaaaggttctggatcgtggagagaagattgagctgcttgtcgacaagaccgagaatcttcgctcacaggcacaagatttcagacagcagggaacaaatgtcaggagaaagatgtggttacagaacatgaaaatcaagctcatcgtcctgggaataatcatcgcactcattctgatcattatcctctctgtctgtcatggtttcaaatgccattaagcacagaccagaatactgatacattcaactgcacctattatactgctgcttggagcaaaaaaaagtatgatcttttgttgtttcgctagtgtgctgtggcccggtcattatgcataggtgttttacattgtcgtagtgtttgataaatgatggatggtgactgggtttgttgtgtcaactgtcataactattgtgcatttttggacgctatatgtgtagccttgatatgaatagatttactgtacttataagggctggtgtgactcagccgtttgctcctttgggcaatgtgcgcatttgggagcatcttgc

SEQ ID NO: 16179 - DNA, 1030 bp, Zea mays
  Clone ID: LIB3062-008-G10_FLI
gacgacgtctcgccgtgacaccagctgaggtgaagcacgtagatggacctgggatgaagttactagtccattcatggcatccaacagcaaggttaagtccttgttgctgcatcacagcgtcagcatacttaaaatccctgtccctagcccatctgctgacctctctgacggtggcaagcttccactcgaggccatattcgtgtcctgcagctgcaagggtagctcacgcagtccaactgttgtggtccttcacggcggcccacactcggtgtccgtatcaagctactcaaaatcctcggcgttccttgcttcgcttggattcaacctgcttgttgtaaactaccgaggcacgccaggttatggagaggaagccttgcagtcgctccctggaaaagttggatcccaggatgttcaggactgccttgcagcgctagacttcgccgtcgaggaagagctggtagatgcgtctagagtagctgttgtcgggatctcgcatggtgggttcctgacaacacatctcatcggtcaggctccggacaggttcgccgtggcagctgctcggaaccctgtctgcaacctgtcgctgatggccggcaccaccgacatcccggactggtgttacgtagtggcctgcggaacccaagcgaagcgatacgcctctgaagcgccttcgcccgaccatcttcgtctcttctaccagagatcgccgatcgcccatgtctctaaagtcaaagcgccccttcttatgcttcttggcggagctgaccttcgagtgcctgcttctaatggcctacagtacgcaaggagcctaatagaaagaggaggcgatgtcaaaatcatgatgttcccagaggacatacacgaaatcaatttaccgcggtccgatttcgaaagcttcctcaacattggggtatggttcaagaaacatctgaatgcagtggcgtgaagcagatccggcctggtggttcatctaggcgaccatgtacagcattgctactttaagtttgtcaagaattcaaacttttttgtg

SEQ ID NO: 16180 - DNA, 938 bp, Zea mays
  Clone ID: LIB3062-009-G12_FLI
agggattctaacaaaggttgccaaactatgaaattgcaaacctagggctctaaagtactcaaatcatggtccaaagcatctatgagcctgtttgtttcagcttctggcagcttctggccactaaaagctgctacggactgccaaacgctcagcttttcagccagtttctataaaattcgttggggcaaaaaccatctaaaatcaacataaacacataatcggttcagtcgttgtaatagtaggaatccatcactttctagatcctgagccctatgaacaactttatcttcctccacacgtaatcgtaatgatactcagattctccccacagccagattttcaaaaaagctggttagaaaaaagctgaaccaaacaggccctcgtctgccgatgtaagggtgacactgctggaacgagctatgcagggttctcaactacagcaagctcaaaagacagtgtccatgcatggtgcacagaatgagttgctgccacttaaggtcttcatgcagatgctcttctatgagaaagcttgtgtggtgacactatatagtccatcacagcaggctgcagcaagatttggaacctaaatgagagtccccaaactattatagtccatcacaaggtcaagaacctctctagtgagccggacaacaatagtttggagatcaaaatgagagtgacatattagtttatgggccggccgtgtagtttactcttataggagaaactactaacatcaataccaaacaaatgaacgtccaatacatattttaatggtggatgttggtgcctttttctatacacttccaagacaaatataaggttaaatcacgagaaaactaaaatgacttttatttttttggaagaggtagtatttgctaatggttttttgtataaaatagaattcttggatgaatcatttgagagactgtaatttt

SEQ ID NO: 16181 - DNA, 1713 bp, Zea mays
  Clone ID: LIB3062-009-H4_FLI
ccgcggcggacatcacctccgagtacctctcccgcctccgccgtaccgagccgaccttgcgcagcttcatccacgtcgcggacgccgccgccgagcgggaggcggaggaactcgaccggaggattgcctccggggagaaggatgcggtgggtccgctcgctggagtgctggtgggagtgaaggacaatctttgcacagccaacatgccctccacgggcgggtcgcggatactggacgggtaccggccggcgtacgacgccactgccgtgcggcggctgcgggaggccggcgctattgtgttggggaagacgaacctcgacgaattcggaatggggagcaccaccgagggctccgcgtttcaggtgacaacgaacccgtgggatgattcacgtgtgcctgggggatcctctggtggttctgctgctgcagtatctgctaggcaatgcgtagtgtcactaggtagtgacacaggtggaagtgtgagacaaccagcgtcgttttgcggtgtagtgggtttgaagccaacttatggccgggtttctcgttttggtctcatggcctacgcttcatcactggatgttgtgggatgctttggttcgtcggtttttgacactgcaaccatcttatctgttgtcgctggccatgacaagatggacgcaaccagcagttcacaggttgttccagagtatgcatcggagttggtctccctagatttactagaatcgaaaccattaaatggtgtgagaattgggattatacaagaaactcttggagaaggtgttgccagtggagtcgtatcatcaatcaagggtgctgcttcacacctggagcagttgggatctgtggtggaagaggtttcactgccttcattttctcttggcttaccagcatattacatactagcctcatctgaagcttcttctaatctatcacgctatgatggtatcaggtatggaggacaggtctcggcggatgacttgaatgagctttatggagagtcccgggctaatggttttggtcatgaggtcaaaatgagaattttgatgggaacctatgctctttctgctgggtactatgatgcatactacaaacgagcacaacaggtcaggacactggttaagcaaagcttcaaagatgctttggaaagatacgacattctaatctcaccagctgcgccgtcagcagcctacaagataggtgaaaagataaatgacccgttagccatgtatgcaggagatatcatgacggtgaatgttaatttggccgggcttcctgcattggttgtgccttgtggatttgttgaaggtggagctgcagggctcccagtgggactccagatgatgggatctccattctgtgaggggaatttgctgagagtaggccacatctttgagcagactctccagaatctcagctttgttccaccgttgttggcagagggccagttgtaacagataatccactcgctgctcaacaagcaattacctgagttacgggttttggggtggctttctgtcattcgcatgcggaggaaattggtagcacgcatgacgcatttagaaaatagaatcttttgctcgtggggtcgctgataattgtgagagagcaacgacacccatgtgatgtacaccagcaaccagcacattgcataccacacagcattttacatgccttcagaatgattgatgattttgtatcaatgctggttttctc

SEQ ID NO: 16182 - DNA, 918 bp, Zea mays
  Clone ID: LIB3062-010-A11_FLI
cagcgccctgatatgataacccctggagttgatgctcaaggccaacctattgaccctgagaagatgcaggagcattttgaggacttctatgaggacatctatgaggagttggggaagtttggtgagattgagaatctgaatgtttgtgataaccttgctgaccacatgattgggaatgtctatgtccagttcagggaggaagagcaagcagccgcagcatacaatgctcttcaggggcgcttttactctggccgccctataattgttgagtattctcctgtgaccgacttccgtgaagcaacctgtaggcagtttgaggagaacagctgcaaccgtggtggctactgtaatttcatgcatgtgaagcaaattggcagggatctcaggaggaagctgtatgggcgttctgcttccaggaggtaccatgggagaagccgaagccgaagcccgccaccacaaaggaggggccaccgtgaccgtgatgactaccaccaccgtgaccgtgatgactaccgtggtggcggcggtggtggaaggggaagaggtagcaggtatgacaggtacgatgatggagcaggcagaggtggcaggcatggcaggtatgatgatggagcaggcagaggcggcagacatgacaggtatgatgatggaggaaggcgcaggcatggtagcccctcaaggcgtgcaaggagcccagtcagggaaagcagcgaggagcgaagggccaagattgagcagtggaaccgtgaacgggagggaaaacagtgagctctccgtggctactgttcgccggacttgttgcttagctccggctctcatcgctatattctaagtatgcttgtgtggatggcattctgcctggctaagtaaaaccttttaagatcaggaattcaggattcctcggttcattttatggtt

SEQ ID NO: 16183 - DNA, 965 bp, Zea mays
  Clone ID: LIB3062-010-B10_FLI
ctacggtgacgtgagccgccccaaccccatgaccgttttctggtcgaagacggcacagagcatgacgtctcgcccaatgaaggggatgctgactggcccagtcacaatcctcaactggtccttcgtccggaatgaccagccgaggtttgagacttgctaccagatcgctcttgcgatcaagaaggaagtcgaggatcttgaggctggtggtattcaggttatccaaatcgacgaggctgcactgagagaagggctgccgctccgcaaggctgagcatgcattctacttggactgggctgtccactccttcagaattaccaactgcgagatccaggacaccacccagatccacacccacatgtgctactccaacttcaacgacatcatccactcgatcatcgacatggacgcggacgtgatcaccattgagaactcgcggtccgacgagaagctgctctccgtgttccgcgagggcgtcaagtacggcgcgggcatcggccccggtgtctacgacatccactcccccaggatcccgtcggctgaggagatcgccgaccgcatcgacaagatgctggcggtgctggacaccaacatcctctgggtgaaccccgactgcggcctcaagacccgcaagtacacggaggtcaagcccgccctgaccaacatggtctccgccgctaagctcatccgcacccagctcgccagcgccaagtgagcaccttttttttgcctttttcgtttccgaggagggcgtcgtcgatgccaatttgtttccaataaacagggctgtgcccgccgttctgttgtactccgtctgtggttaggttagtagttttcttgatctcgcccccacgcggtacctgttttactactctctgtttggtggtttctgaggcaagttgcccgtgtacttgtatcgtaaaaaccgagtgggacatctgcatcgtttcatctgccaccactcc

SEQ ID NO: 16184 - DNA, 1133 bp, Zea mays
  Clone ID: LIB3062-010-B5_FLI
ctttcccgccgactgatcccaccaattctgcacccgcgcagttcctgattcgattggcaagcgcaattggccgctcctgaccagacgccggatagggctggatttgattggattggatccccaattgtgtttgccacgtccgtgcgttcgggcgggcgggggagttactttagggtttcggcgggtgcggtcgccgtgtaggcggtagggttttgccatggcggagaagggctgcctcaagcggctccagaaggagtaccacgccctctgcaaggagccgcctccgcagatcgttgctcgcccgctgcccaacgacatactggagtggcactatgtactggaaggaagtaaaggaacgccctttgaaggtaaagatcatacataatataccacattatctactgcctccaatatttgttttgttacttataatctcaaacgatgttttccacgcttcaatttccctacctgcaggtggatattactatgggaagctcaaatttccaccggattatccttttaaacctccaagcatcagcatgacaacccctagcggcaggtttgcgccacataaaagaatatgcttgtcaatgagtgactttcatcctgaatcttggaatccaatgtggtctgttgcaagcattctcactgggcttctgtctttcatgatggacgatgcactgacaactggaagcatcaagacgtcagatgcagaaaagagacgtttagcaaaagcttcccttgcttacaattgtgagagcaaaaactgtccgcacttcaggaaacttttcccagagtatgttgagaagtacaatcaacagcaacaattggagaatactgccgcagagccggtgccacaggagaatcctgcacctgttccatcccttgctgtccagcaagctccggtcgtcgccaatagggcgcaaccactggctgaggtacgccgtgacaagaaccagaagaaggcggtgcccttctggatggtgctggtcatgttttcagtttttggtgccgtgatggcgttgcccctaatgcaactttgacaacaataaagaccatgaggacgtgtgataccggggcagtaattttgtatagttttctattggttcgtgagtgtaacaaagttgccccct

SEQ ID NO: 16185 - DNA, 782 bp, Zea mays
  Clone ID: LIB3062-010-F10_FLI
tgaaaactgtcgaaagagaagcaaacacattgcattttatactatagattgcaaggattcatgtggtgaaatatttgttgacttacagaagcatagctatgttcagaaaaagcctggaggagcaactgaacaacaggagttgacatattctagtcttcaggaagctatctctgtgccttggaatagtctaccgaagaagacggcaaaattatactttgctatgagagtactggaggattatgaattatctgaagggcgcagccctggcgaaacaacactttctgacatagatgcagttctggctcgaaggaaggatatgtgtgataaaatgtctttgaatgagtctcgtattcctactactctcgtggaacgactgctagcagctggaaagaaggagcatcctcctgtatgtgctatccttggtggtattcttggtcaggaggtgatcaaatcgatatcctgcaagggcgatccagtcaagaatttcttctatttcgatgtggctgacggtaaaggtgtcatcgaggatatcccaccaccaccacctgcaaaataaagcactcagctgtgtaactctcgactcgacttggttcactaatcgttttctgtacccactcagcttcgaacatgtagcaacttttagatctagagccatgtgaaaaaaggcaagtttgactttaacccagatgtttagggattgttcgagcagcaaactgtgacagtatgtatgcatcgacaatttaaagctgaagtctggacggtttccatgcttttgggggcgg

SEQ ID NO: 16186 - DNA, 887 bp, Zea mays
  Clone ID: LIB3062-010-H11_FLI
gtaccagaagatcttcaaggccgactaccaggtgccgccctgggtctccggcgacgcgcgccgcctcatcgcgcgcctgctcgtcgtcgaccccgccaagcgcgcctccatcgccgagatcatgtgcacgccgtggttcaggaagggcttcgtgccgcccgtcctttcgcccccggtgacgcccaagaaacagcagctggacgaaggcgctgccctcttcgacaacgacgacgacgacaacagcaacagcaaccactctggcgccacctcccctcggtcgtgcaacgcgttccagctcatctcgtccatgtcctccgggttcgacctgtcggggctgttcgagagcgagcagaagaccgcgaccgtgttcacggcccgcgcgccggcggccaccgtggtggagaagctggagtccgtggcgcgcgccctaggattcgaggtcaccagggggaaaggctggaaggtgaggatggaggccaaggccgagggcacgaacggacggctcgcggccaccgccgaggtgctcgaggtggccgtggacgtgaccgtggtcgagttcgtgcacgacgccggggacgcgctggactttaacaagttctgcgccgtcgacgtccgcccggggctcacggagatcgtctgggcgtggcagggcgacagccccgccgccgccgtcggcaccgcgtgaacaagcgtccccgtctgtcacgtggaagttgtagcaactttgcgtaggagttaaacacggctgcactggcaccagctttttatagcatgtaaagtttcaagttctcgtcgttgcttcgagactgccatggtggctagttcgttgtgtgccatatgctgtacaggaaggaaagagtcgaatcgagccggggagttttcgatcg

SEQ ID NO: 16187 - DNA, 1183 bp, Zea mays
  Clone ID: LIB3062-011-B12_FLI
atgagcaaagtagctgggagcagcatgttacaggctgcacctgctgtcaaagctaatagtgcagtgtctcagacaaaaccacgaagggctaagtacaggcaagtaaatgctgcagacaaatctccatgtcctgtgaaggtgaatcaggggaacagcgaagccgttagtaaggagtctctatcttgtggagaaatgctatggcagctctctgtagcagcatgtggtcttcagcagagagagaaaatcgttcctacaagtgttaacttctttaccggttttagaaagaacaaattttctagttctgatgtcaatgaggggatgcctgagaaggcagccaacactgagtccactctttcagaacagcccattgctgatcatatgcaggatgactattgggctgacattctcattaatgtggaggagccgctatctaacctgaaaaagaagatagatgagagtaagaaaagagtaaacaagaaggcacctcaggttaagaaacctcctgttaattcattgtcgactgcagaaaatgtagacgagccaaggagtgaaggcaaccaagatacaggaaatgaggaacaacttaggaacgaaaccaagttgttttctgcaaatggatctcaactgaacgccggaaccaaatttggtcaagagatggaaaattgctttctgtctggactggtgctgcacttcagcaggccatgcgctgttccatcacagtgtgaccttatcaagatctttagccaatacggtcctgtcaatgaagtgaaggcagatgttgcaaacagtgccagctctgcccaggtgatcttcaagaggcgcatggatgctgaggcagcgtttgcaggtgctgggaagatcagtgcccttggacctgcccttgtgagctttcgtctcactgacttcccagctagtgcttcaggaaataaagcttcccatgttgcatcaaagagcgaatagtgttgcttgaccagtgaggtaaaaacggctttcgtatctcttccctagttgggtctgggtttgagtttgacagctgctgtatattatcttatgcacattatggtgtcctcttgtttttttagggaaactggatgggggagttagagaaaaaggtatactctactgtatgtggtagttaggttgttgcaggattaagaggaacagcaatgtcatctgggtcttc

SEQ ID NO: 16188 - DNA, 927 bp, Zea mays
  Clone ID: LIB3062-011-B9_FLI
gggggaggccgccaagaacggggccgccgccgcggatggccacaagcctggcccggtgccattcttcgccgcggggattagttcggtgcttcaccccaagaacccatttgctccaacattgcattttaactaccgttactttgagacggatgcaccaaaagatgcacctggtgcaccaagacaatggtggttcggcggtggtactgacttgactccttcatatatcattgaagaggatgtgaagcatttccattctgttcaaaagcaagcatgtgataaatttgatccaagttttcacccaagattcaaaaaatggtgtgatgattatttctatattaagcaccgtaatgagcggcgtgggctaggtggaatattttttgatgaccttaatgattacgatcaagaaatgcttctcaactttgctacagaatgtgcggactctgtacttcctgcgtacataccgatcatagaacggcggaagaacactccgttcaatgaggagcacagggcatggcagcaattgcggagaggtcgttatgtggagttcaaccttgtctacgaccgtggtacaacatttggcctaaagactggaggaaggattgagagcatacttgtgtcccttccgcttacagcacgatggcagtatgatcataaaccggaagaaggaaccgaggaatggaaacttctggaagcctgcataaacccgaaggattggatctgattagccgttattcttgagatcttttgttagagttttcccttctgtagggctaagaccacgtgcagtttcattatatattttgcatctgtagaatcgtgaataaatatgatgtagtaatgctgtagctgtctgtatctatctgctgttttttccccatgtgaatgagagaaccattggcttctgtattacgaaggattcaggtttct

SEQ ID NO: 16189 - DNA, 1344 bp, Zea mays
  Clone ID: LIB3062-011-C11_FLI
cccactagctgaacttgaacgccgctgtagacataatggcctctctctgtgtggtggtaaagaaatgatggtcgccaggctgcttaacttggaagaggctgagaaggaacgaatatacgagaaagatgttgacatgaaatatgtgcagggtgaacagcatgtggttggaagagaggacagtggtgtgaatgctcatagtacttcaaggtttggtgaaggttctaatggtgatgaattagatgtctctcggaacagtacgagagctggtaaaggacgttctggtggatctgcttctgccgaacttgaatcatttccaagcaagaagccgaaatacgatcctgttttgccagcttctaaatggagtcgagaggatgacatcagtgacgatgaagataggaaaggtggccgaggcttgggattaagctattcatccggaagcgatattgctgatggtctcggaaaggtcgatacaacagaagctagtactgaccacacaagtcgtcatcatgatacgattgttgatgaagagcacaggcagaagttgaggcagattgaaatttctgtcatgcagtaccgtgaatctcttgaggaacagggtctgcgtgacttggatgagattgagaggaaggttgccagccatcgaagacgtctccagtcagaatatggtttatccactccagctgatggtgctaacagcaggcgatcttctgaaagaacatcatcgtcgtcggagcggaaagagaggcatcgcgatgcacatgatcatcctaggaaacggggccggagccagagtagaagcttgagccctccaaggaagtcacaggagagggatcgagagcacaatcgcggtagggaccggtctcatggcaacgacgtggggagggatagggtacgcgggaaaagtgcaagccaagggcgagacgaccaccacgacagaagccgagatagagagaaggacaggagaaaagggaggtgaccgacccgaaaaccctcgtcaccatgcaccatttgccctaagcgaagggcccaggagcattatttgagctgggctacacgcccaccagcatctccaacggtaaacatatcttcgcaccaggcaggttaccctggtctgctccatgcttcgtctgtaataggagtttttgaggattaagttgaggttttttagagaagacttgttcgtaactttttttcttctttttttgcggattattcagatgtacccgatgtgtagtttatgctcaaaaccaatgtcgaatacagccagacccagaattgtcagtatcagacaaccgaggtatggactgcgattctgttcttccctggtggtgggctggtacgtgt

SEQ ID NO: 16190 - DNA, 1722 bp, Zea mays
  Clone ID: LIB3062-011-C7_FLI
caacgccgcgggcgcggaggcgggcgtcggcgccgccgtcacccggcgcatcatggcgtcgctcaagatccccggggacgagtacgccatggtgtgcacggccaacaggaccgcggcgttccgcctcctcgccgagtcctactcgttccagcccggcaagcagctgctccccgtgtacgactacgagagcgaggccgtgggcgccatggccgacagcgcgcgccgccggggcgccgaggtcgcctccgcgaccttcgcctggccgagcatgaggatccacggcgccgacctccgcaagaggctggccaggggccggcgccgcggcggcgggggacgcggcctcttcgtcttcccgctcgcgtcccgcatgacgggcgcccggtacccgtacctgtggatgagcgcggcgcaccagcaggggtggcacgtcgcgctggacgcctgcgcgctcggcaccaaggacctcgacacgctcggcctctccctcatccgccccgacttcatcgtctgcaacttcttcaaggtgttcggcgagaacccgtccggcttcgcgggcctcttcgtcaagaggtccagcggcctcgcggcgctcgagcgctccgtcatcgcgcgcagcatcggcatcgtcagcatcgtgcccgcccgccgctggtcgctgcacgacggctactccaccgagctggagcactcgcggagcttccccaagctcgccgccgacccggccctggacgacgccgacgtcgagaccaagagctccttctccggcccgctcagctccaccgccatcactcgcagcaggaccctgcagtcggacgcggcggagaacggcgacgcccacgcccacgccccggagatccgcgaggtcggcagcacggcagagaacggcttctactcggaggaacccagagcagaggaaacagagcggctggccaaggaggagcaagacggggaggggagagagagcgtgatggaggtggagtgccggggcctggaccacgcggacgcgctggggctcatcgccatcggcaaccggctgcgttgcatcagcaactggctggtggtggccctgcagaaactgcggcacccgcacgccgataacgggcacccgctggtgaggctgtacggcccgcgcgtcaagttcgaccggggcccctcgctggcgttcaacgtgttcgactggaagggcgagcgggtgtcgccgctgctggtgcagaagctcgccgaccgccacaacatctccctcacctgcggtttcctgtgcaacatctggttctcggacaagcacgaggccgagagggccgtcgtcctggagcacagggtcgccggcgatcccgtcgccgcgggcagcgccggagggaagaggaggaaggacgccggtggtggcgacgtggggatcctcgtggtgaacgcgtcgctgggattcctgagcaacttcgaggacgcctacaggctgtgggcgttcgtggccaagttcctggacgccgacttcgtggagaaggagaggtggaggtacaccgcgctgaaccagaagacggtcgaggtgtagacgaaacagacgagagcgctgcagtagcttcagctcagcttggcatattggtacggttcagttcactgtctgtaaagcaccattcttttaggatctgctctgccatcccctccagccattctttcagtgtaaactgtaaggtgtaaagtgtttccataatgatgatatcatttgat

SEQ ID NO: 16191 - DNA, 1349 bp, Zea mays
  Clone ID: LIB3062-011-D10_FLI
gccgtgtaaaaaagggaaaaagaaaaaaccagagcaacgcagccgcaggctgggtgagcggcgcgggtcttcgtcggccggccccttcaccggtggcgagcatccaccagaccaccagtggatgcgcccctgccccccatgccccaggtcgagtcggccactgcctcggaggcgccgccgccgcaggacgcatggctcgtcgagctcggcagtcgcctcccgcagtgggagtcgctgcgggattcctccaaggtcattatcccgatttcaatatctagggtgaaccagtttgatgctgcaaggctagatgttgagatgtcggccatgttgaaagagcagctagtcaaagtgttctctttgatgaagccaggactcttattccaatatgagcctgaacttgatgctttccttgagttcctcatctggaggttctcaatttgggctgacaagcctacccctggcaatgcactgatgaacctgaggtacagagatgagcgggcagcacccatcactggaaaagaagttagaacaggtttggaaggacctgggctttctgtttctcaaaagatattttattgtattagctttgttggtggccaatatgtatggtcacgattacaatctttttctgctttccgtcgatggggcgattctgaacagagaccactagctcgccgtgcttgggcgttgatgcggaatgctgaagtattttatagggctgcttcattctttaacctattattgtttctttatggtggaaggtacaaaactgttgtagaaaggattctgaaggcaagacttgtttatgggagccccaacatgaatagagctgttagttttgagtacatgaatcggcagctggtctggaatgagttttcggaaatgttgcttttgcttcttcccctcctaaactcgtcttcggtaaagaagttccttctccccttctccaaagataagtcaggaggttcttctggtgatgaagcagattgtcctatatgtcggtccagtcctagcattccatttattgctcttccatgtcaacacaggtattgctactattgcctacgcacacgttgttcggctacgacttcttacagatgcacacgttgtgacggggcggtggttgcaattcaaagactaggatcaggttagttttacgacctagttgggttaaagaattctcgcccgtttctacagagaatcagcacttcggtgtttcatacggttacaagtttggatacgcgtcattcactgtatgtacatgtaattgccccaagtgtggacagttcggatgccatgagcccataactgacttgttgtatatcgaatgaatagtccgtcacaaaact

SEQ ID NO: 16192 - DNA, 664 bp, Zea mays
  Clone ID: LIB3062-011-E12_FLI
cgaggcggcacggccgtggagggcctccgtggctgcccctactgctcctacccgccgccggccgcagccttcagcctcctgtccccggccgaggccatgaagcgggaggaccccggctggttcggcggcgccgaggagctgcgccagggcgtctggaccgtcgaggaggacctctacaccacgctcaagaagaaggtgagccgggtgtacgccgcgccgccggaggagaggaagaagcgcgtctacagcaccgcgccgtccaagttcaccaccatcgatcagtatagcgggctcgggttcaggctggtgaggatggggttcgaggacatgtacctctgcagcccgggaggcatgtacgacaagttcggcaaggactactttctgtgcacggggatggcgtccatgttggtgcccgtcgtcgtcaaccccggcgaggagtggaaggcggcgcaggtcatcgagcatgacaacttgtaacttcttcttcttcttttggtcaacggaattacagaatcgaatggcgcgcggctccattctcgaatacatgtcgatggtccgatctccagtgagatatatacatcaatacagatagttctttccatgggaagtgttaaacattgaatgtaaaatgagaaagtgaatgagaaaactatcatttttattg

SEQ ID NO: 16193 - DNA, 1573 bp, Zea mays
  Clone ID: LIB3062-011-E8_FLI
tcaaaatgaaatagctgaggcactttataagcttgtgtcagataagcacttgtggtcacaatgtcgccagaatggtctgaaaaacatccataaattttcatggcctgaacattgccagaactatttggcacgtgtagtcactctcaagcctagacatccccgctggcaaaagaatgatgttgcagctgaaatatctgaagcagattcacccgaggactctctgagggatattcatgacatatcacttaacttaaagctttccttggacagtgaaaaatcaggcagcaaagaagggaattcaaatgctttgagaaggcattttgaggatgcagcgcaaaagttgtcaggtgttaatgacatcaaaaaggatgtgccaggtgagaatggtaagtggtcgtcattgcgtaggaggaagcacatcattgtaattgctgtagactctgtgcaagatgcagactttgttcaggttattaaaaatatttttgaagcttcaagaaatgagagatcaagtggtgctgttggttttgtgttgtcaacggctagagcaatatcagagttacatactttgcttatatctggagggatagaagctagtgactttgatgccttcatatgcaacagtggcagtgatctttgttatccatcttcaagctctgaggacatgcttaaccctgctgagctcccattcatgattgatcttgattatcactcccaaattgaatatcgctggggaggagaaggtttaaggaagacattaattcgttgggcagctgagaaaaacaaagaaagtggacaaaaaatatttattgaggatgaagaatgctcatccacctactgcatttcatttaaagtgtccaatactgcagctgcacctcctgtgaaggagattaggaggacaatgagaatacaagcactgcgttgccatgttttgtacagccatgatggtagcaagttgaatgtaattcctgttttggcttctcgctcacaggctttaaggtatttgtatatccgatggggggtagagctgtcaaacatcaccgtgattgtcggtgagtgtggtgacacagattatgaaggactacttggaggcgtgcacaaaactatcatactcaaaggctcgttcaatactgctccaaaccaagttcatgctaacagaagctattcatcccaagatgttgtatcctttgacaaacaaggaattgcttcaattgagggatatggtccagacaatctaaagtcagctctacggcaatttggtatattgaaagactaaatctttgatctttgctggtcagcagaggaatcaaagcaggaatgtaggatcgaggagagtgacaggacttcccctctgtgcacttcgccgaaaagtaataatgggattgctatgcatggcccttgttgtacactagaaaattgggcacgcaaacttgtgtcagtttttccgctgttgcgaaattcagtgatggtgtttttgtaactataccaacctgtgtcagttttgccgttgttgcaaaactcagtgatggtgttttttgtaattattatacatccgaataataagactggtgtttcc

SEQ ID NO: 16194 - DNA, 997 bp, Zea mays
  Clone ID: LIB3062-011-F11_FLI
gcagcattaaactcgaccacaccaaacgacggccggcccaaattaaaagaccgacccggcccttgcaacaaccacgcaaatagatcccactcatatacactccagtagctagtagtagtcgacccatctgcatctgtatgtgtgcttgcccccggccggccacctttccggccgatccatcatctagagctagctcatcatcagtctttggcgtgtgtgtatgtatatggtggtgaccagcagctagctatagcagcagggtggttgttctatagttcgttcctatggttatggcggcggcggcggcggtactgctcgcgctggccgccgtggcgacggaggtggccgcggcaggaacgacgtacacggtgggcgcgccggacgggctgtgggacatgcagaccgactacgcgcagtgggtgaagagcaagaccttccgccccggcgacaccatcagtcagtgatctctctgggtctctcgtttattattgtttcggtcacgcatcgtcgttgacgcgcggcgcggccatgcaccgcatatgcacgctcgatcgtcctgtcctgccctggcagcgttcacgtactcgccggagctgcacgacgtggtggaggtgacgagggccggctacgatgcctgctccagcgccaacaacatctccgccttccgcaccggcaacgacgccgtgcccctcaccgccgtcggcacccgctacttcctctgcggcctcacgggccactgcggcaacggcatgaagatccgcgtcgacgtcgtcgccgccgcggcctcgccgtccgcgccgggccccgccgctgccgccgcggcgccgccgacgacctcgtcgccctgcatcgtcggagtcgtcgccgcctcgctactgctgcttctgctgcacgccgtcgtcagctactagcttcgccacgcgtcgcttgagttttgttatgtttcggctgcgtgtgtgttcgtccatgttccatacatatacacactactgttctt

SEQ ID NO: 16195 - DNA, 493 bp, Zea mays
  Clone ID: LIB3062-011-G7_FLI
gcgcccgcgagctccgcgacctcgtcgccgtcgccaggctctgcaccagggacagggacgacagggacgagggcgctggcgtcgtcaccattccgcagatcgtcaggtacctccaggggaagctggagcggatcggatgccaggccaggttcggatgatgatgatgacggtgatggttcgcctgcgttgcgtgcgcgggcgatcagcgtatcatcatcgtctttgttcttctttaacagcctgtctgtaccatcaaatgtacaaaagcgcgtggcttttcttctgtggatgcccagaatctgttggtgtcgatcagtcgatagaggaaccaaagtgagttgctgactgcaattggaagcggagtgcagttttctcttctgatggacatttttttcgagatgttttgctgtgctttttgtgacgtgacaagaacagagattgccatggcagttttgaatctgagttctgagatgatagaaaacatgttctgctc

SEQ ID NO: 16196 - DNA, 1466 bp, Zea mays
  Clone ID: LIB3062-012-B1_FLI
gcacaagggccaggacgtagccgtcaaggtcatccccaaggccaagatgacaacagctatcgccattgaagatgtgagaagagaagtgagaatattgagttctctgacaggccacagtaatttagtgcagttctacgatgctttcgaggatgaagataacgtgtatatagttatggaattatgtaaaggaggtgaactgctggacaggatattggctagaggtggaaagtactctgaagaggatgcgaaggtcgttatggtacaaattttgagtgttgtatcattttgccatcttcaaggtgttgttcaccgtgatctgaaaccagagaatttccttttctcttcaaaggatgaaaactcttccttgaaggtcatagattttggcttgtctgactttgtgaagccagatgaaagactaaacgacattgttggaagcgcatactatgttgctccagaggtcctccacagatcttatgcccccgaggcagatatgtggagcattggagtaattgcctacatcttgctctgtgggagtaggcctttctgggcgcgcacggagtcgggaatcttccgagctgtcttgaaggcggaaccgagttttgatgaggccccatggcccactctcacggctgaagctaaagattttgtaaaaaggcttcttaacaaggattaccgcaagagaatgacggctgcacaagctctcagtcatccatggatccgtaattctcaacaagtgaaggttcctttggatatgataatctataagctaatgagagcgtacatcagctcgtcttcgctgcggaagtctgctttgagggccctagccaagacgctgacgacggaccaactcttttatgtgagggagcagtttgaattgctgggcccgaacaagaatggttacatctcattgcaaaatctgaaatcggctctagcgaagaactccacggatgcaatgaaggactccagggttgtcgattttgttaacaccgtgtgcgctcttcagtacaggaaactggatttcgaagagttcgccgcttccgccatcagcgtctaccagatggaagccctggagacctgggagcagcacgcgaggcgcgcgtacgagctgttcgacaaggaaggaaaccggcccattgtgatcgaggaacttgcgtcggagctcggacttggcccgtcagtgcctctccacgttgtcctccaagactgggtcagacacgccgacgggaagctgagcttcctggggttcatcaagctcttgcacggggtctcgtcgcgctcgatcccaaaggcctagcattgtacaccatccatccatcgtcgttgttgttgtagttgtactgaagtaaagctgttgtgtagacgagtgtacagatgaggatagggaaaagaaatgaacatgatggaagactggaagggccgtaagatttgcggctgctgtttgtcaatgccaaattgccattgcctgc

SEQ ID NO: 16197 - DNA, 806 bp, Zea mays
  Clone ID: LIB3062-012-C8_FLI
agcgtctgctgaggctgaggatggcgtcccgctcgtgctcccgctgcgctgccttggcgccgcacgctgcgctcccgctctcctctctcctcgccccctcgccctctgccgcgcgccctcgatccgcgcccctctcgtgcgcagctcggccgtgcaggggccacgcggcggcgtcagcgttgcacggcgcggcagggcggaggcccccgagcgtggcggcgatgtcgtcgtcgacgccgccgccgggatccgtgcagaagtcggaagaggagtgggaggccatcctcacgccggagcagttcaacatcctacgcctcaagggcaccgagtaccctggaacgggtgagtacgacaagttctttgaggagggcatttataaatgtgctggatgtggaactcccttatacaaatcatcgacaaagttcaactcagggtgtggctggccggcattctatgaaggacttcctggggccataaggcagacgtcggaccctgatgggaggcggacagagatcacatgtactgcttgtggaggacacttggggcacatattcaaaggggaggggtttaagacgcctaccaacgagcgacactgtgttaacagcatctcgcttaagttcaatccgtcccccgaggaagcctgacggcagatgaactcccaatctgtaactcaacaacagaataaatttggactttgtttgttgctttcacattgtgtagagagctatgagatcgagtttgtcattcctcggatcatttcgaatatgatgtaaaaaatccaatcacaagtgctggtctttgttgat

SEQ ID NO: 16198 - DNA, 1028 bp, Zea mays
  Clone ID: LIB3062-012-D2_FLI
gctcgtcacttcgcttccccacttctccattccattgcggttctgcgagcccctacctccctgtggtgcttggccatggcggactaccacttcgtgtataaggacgtggagggggcgagcacagagtgggacgacatccagcgccgcctcgggaacttgcccccgaagccggagcccttcaagccgccgcccttcgccccgaaggttgacgccgacgagcagcccaagtccaaggaatggcttgacgtgcgcgagcccgaagagctcgaggaactagaggacgatctggatgacgaccgcttcctcgagaagtacaggaagatgaggctcgcagagctgagggaagccgcaaaagccgcgcgatttggtactatacttcccatcactggctccgacttcgtgcgggaggtatcgcaggcacaatcagatgtttgggttgtggtcttcctctacaaggatgggatacctgaatgtggattgcttcagaattgtttggaagaattggctactaggtatccagcgacgaagtttgttaaaattatctccacagactgcatccccaactacccagataggaatgttcctacaatactggtgtataacaacagtgctgtcaaagggacttatgttggtttgcagaagtttggtggaaagagatgcacacctgaatctgttgcgttagccctttgccagtcagacccggtactgaatgatgggcatggtggcagcgattcatctcggggcaatgtcttcgaaggtgttcgcaggaagttcatagagaaggttgtggcccagcatgaagagcgggaagaagaggacagtgactaagctaatacttgtgtttgttttccgcagctggcggatccaatttggttccaatgtttactgatcttatgtgatttttgtgggtgaaatttgccagagttttctgatacctggctgtgcggctgaagtttttgaaagttcacgggtcttattgcctacctttcagctgtaacacagctccattattatattgttaagagatc

SEQ ID NO: 16199 - DNA, 1105 bp, Zea mays
  Clone ID: LIB3062-012-E1_FLI
ggggaacaaaaaggaagggcgaggaggacagggagccgagcgcaagagctgaggcttcgccgcgaaaccccagacctcgcgccgccccttcccctccgcggcgtcgtcctcgcacgctctccgatccaagatgtataagctggggagaggaaaccgcgacaaggtgcagcagttcatgaccattaccggcgccaggcactgaaagctagtgattggcacttggaaggagcttttgacttcttctatagccaacctcaggtttctgtggtcaatactcggcatcttgaagatattttcaacagatataaagaacctgatgctgatatgataatggtggaaggaatatctcaattttgcaatgatctacaggttgatcctcaggatattgtcatgcttgtcatatcatggcacatgaaagccgccacaatgtgtgaatttactcgtcaggaattcattggtggactgcagtcaattggggtagattcaatcgagaagtttcgtggaaaattaccatcattacgagctgagctaaaagatgacaataaattccgtgatatatacaactttgcattcacttgggcaagggaaaagggtcaaaagtctctctcactggagactgctattggaatgtggcagttgctatttgctgaaaggaactggcctcttctggatcattggtgtcagtttttacaggtcaggcacaataaagccatatctagagacacatggtcccagctgctggaatttgtgaagacgaccgatccacagttatccaactacgacgacgaaggtgcctggccctacctcatagacgaatttgtggaatatctgactgagaacggactcgtccagcgtaaaagatgaacaacggggagatgcatctccaaacaatggttgggctgtacaaacatgatttatctcggtcagctcgacgcccagggcctgatattggcactcctgctcaattcattcaccaaactgttggcatatcattgaatttgcttataaacgtggggaaacataacttgcctgggaagtggtggctgtcagcctgcgatcgtgaactgtaacttatcgaaaatgcaacggagtttgggactctact

SEQ ID NO: 16200 - DNA, 1178 bp, Zea mays
  Clone ID: LIB3062-012-F4_FLI
ccatgcgtccggagggatgatgctattaaagatcttaatagagctatggagattggggatgagaatgcaattgaaaaatttagtaaaaggactgtcaaggttacaggaaggcataatgatgactgcaagaggctgttaaggttgatgggtgtccctgtagttgaggcaccaggtgaggctgaagcacagtgtgcagcactttgtgaaaatcaccaggtttatgctgtagcttcagaggacatggacacactgacttttggtgcccgaaggtttcttcgtcacttaactgaccttggttataagaaatctcctgtgacagaatttgatgtgtcaaaggttttggaagaacttggactcacgatggatcagttcattgacttgtgtatccttagtggatgtgattactgtgagaatattagaggtatcggaggacaaagagccttgaaactcattcgtcagcatggttgcatagaagaagttctgcaaaatctgaaccagacgagattcagtgttccagaagactggccttaccaggaagttcggacattgtttaaggaacctaatgtttgtgcaggaattccagatttcacgtggacctcaccagatccagagggccttatggatttcttgtcaacagaaaacagtttcagtcctgatagagtaacaaaggcagtagaaaagataaaggttgctagggataggtattccccaggcagaatgaagcatttaacaccagttgctagcttacgaggatctcatactgagaaggaaccccagtgcatactaggttctccaggacaaactctgaaggtcatgtcatctccacaagtatgcaagagtccaagctctggtttcagatatggtagctcaaagccatttatgctgggcagacagtcaggatttcatggaatgccttatgctctctcttttatctaaaatctgtagctgctctggtttatgagaaggttgaccgaagctgtagctgcggctacatttttagatgatggaaaccgatatccggctttcacctcactgggaggatatggccaagtagctgtagctgcagctacatgaaaggatgctcacttataatatgttaatctcgtgctactattgtaatctttccatttctattgtaacgtagttaatcagctactgcagttcatcgttgacatctt

SEQ ID NO: 16201 - DNA, 749 bp, Zea mays
  Clone ID: LIB3062-012-G8_FLI
caagggacaaggatggtgaggtgggagatgatgtgtttgatgaagaactggaggctgaggaaactgacaacccagagctagctgttaagcctgtttatgtcaaggacgacttctttgattccctctctagtggaacgtttggacgtggagggccaaatggaaggggaagaccttctgaacggcgcagagtagacacagagacgtttggtgaatttccgaggcacaggcagccctaccgtggtggcggccgaggctaccgtggcggtgggcgttcccgtggttcatattacggtggcagaggctatggaaacacggggaggggtggccctgggaattcttatcctcactggggcaatgggagagattgattatagcagcagcagccatacttgcgggtgttgtagtcttttgccacatgcatgaagcgcatccattactattaaacaaataaatggaaccttaccaccatgtcactcgtcggtgtgccttgtccagacaaggcctgtagcgtttggtcattgatgtggtgcacccctgccctgtaggagagttaccagtagatgagcagatgagatgatgcttgataggtataagcttgtggcccttgatgtgcataccttgcacttgagatttagttgtataggccggtctaaatgcaggcatgcaacgtcggctctagctcagtaaccttttcctttcacaaagtttagccgtgttgtctattttgtattggtgatagtgtaactttg

SEQ ID NO: 16202 - DNA, 1196 bp, Zea mays
  Clone ID: LIB3062-012-H12_FLI
acgaggagatgatggcgtgcggcggcggcggggagaagaagcggcgcctgagctccgagcaggtgcgcgcgctggagcggagcttcgaggtggagaacaagctggagccggagcgcaaggcgcggctggcgcgcgacctcggcctgcagccgcgccaggtcgccgtctggttccagaaccgccgcgcccgctggaagaccaagcagctggagcgcgactactccgcgctccgccagtcctacgacgcgctgcggcacgaccacgacgcgctgcgccgcgacaaggacgccctcctcgccgaggtagttgtcgacgttatgccgttatacaagctgctggacgagcacgatgacgcgcgcaatggctgaccgccggcctgaccctaactcggttggctgcctgaatttctcctagatcaaggagctcaaggcgaagctcggggacgaggaggcagcggcgagcttcacgtcggtcaaggcggagccggcggcctcggacgggcctccccccgtaggggtggggtcgtccgagagtgactccagcgcggtgctgaacgacgcggacccgcccgtggcggaggcgccggtgccggaggtacggggtactcttcttgacgcgcccggcgccgtggcggcgaaccatggcggcgtgttcttccacgggagtttcctgaaggtggaggaggacgagacggggctcctggacgacgatgagccctgcggcgggttcttctccgtggagcagccgccgccgatggcgtggtggaccgagcccacggaacactggaactgaaccgaggaggaggtagatgcagcgcagcgtagactcgggatctgggccgagcggtggaggaataaagaattcggagcgagaggcgggggcttttctgcaaattttgtaaaatggagttttacgtagccctctttcgtcaattctcgcgcgaatattttagcagtagcagtagtctttaggaacccagtcgagatcagtacctggttgcgtttggactcgaatgcaaaaacaaaaaaaatgcaagaaaaagagatgagaccaaacactgatgcagaaaggggagagagggacagtgggaagaggagtgtagaggaagagctgagcgaggtagggagtaaaggacaagctgtatgtcactgttagtgggcccagggccacgtgaaagtcaggcattgttggcgccc

SEQ ID NO: 16203 - DNA, 1588 bp, Zea mays
  Clone ID: LIB3062-012-H8_FLI
aaagactaaaaatgctcatagaaaagacaaaaatcaagagagcctgaaagggaataggggaagtgctggatttcctcctaggaaagatatttcagatgtatctaacaaaaagagtgacaagcaagagttaaagcccatccattgtaaagtgcaaacaggaaagaggaagagaggaacagaaaggaggttgttatcgaagaagcaaagttgccaggaccctggaccattgcctgcgtatcgccaagaaattgcatcttgcaatgaatccagaaaatccacccacagaaggattgaaaatgacccttctaccgaggtgaagcttaaagttggtgatgtgagattggcaaacattgatgaaaacatcaacaagcccagtgggactcagagagaaggaatagaaattttttgtggtcctgatgattggacaaaagagcaggacatggcattgcgcaaagcttacttcagtgcccgaccatccccacatttctggaagagggtttcaaaaatggtgccagggagatctgctgaagattgcttcaacagaatttatactgacctctcaacaccgactccaattgccccacgtcccagagcaagtaaaacaacattttctcctataggaaattttacattgtctgatccaaaacctccaaatatcttggaacctacagttggaatgcgaaagtccgctaaacagaagagtctagtagcacagaagacagtgaggcatttgttgcagaaacattgccgcattgaccaagctcaagaggctgaccacttctcagtttttgaaagctcaccaagtgccttacaattgaacttatcttttgacaattctcctgggactcctgacagttatatgaattcagattctctaggcaagcacagtggaaggtcttcagcacgaaagaaaccattttcaaggttaagaactaaaccatctgaacccagcccaggagttctaaagcctataaagaatgttatcctacatgagaggtacattgataaattggcacgtagagaaggcgcaaaaaggcctcgcagaagggctccagctggctctaaagctgctgattctgggaagtctctttctgagcagcaagctggtagtctgaaggctgctaaaaatgctctcatctcagaagcaaccgacttcataagcagttttaagacgcttcaagccaattcgcttgcgcatgctgtggagaatagtgaagacgagattgaatgtgatgccagtgattgtagccatgatgataaagaataagaatgtccttatagtcttgattcccagcggcccttagcaatcatctcctttttgtcaactaacgttagtcatcacttatcagttgtcagctgatgttagtcagcacttatcagctgcaataaggctaggcagttgtcagggcagtgtattctgcctaatatgatgtatctagttttgttcctcttagtgcatcagagatgttagttagttgtgaaatgttgccttcgtcatgccttatgaagattgaaatcactggagattacaatggtcgaacctgattctcttgtgtaattaagtttgcataaatcagaaaggttcatt

SEQ ID NO: 16204 - DNA, 671 bp, Zea mays
  Clone ID: LIB3062-013-A7_FLI
ctgaaaaatcgactttgaaccctaatgctaaggaattcaagctaaatcctaatgccaagagtttcactccgtcagcatctctgaggccaccacaccctacatcatctgatgcatcatattactatcctaataacatgccggcggtgccacttggacccggtttgcctgtgggcatggggttcccaccggcatatggcgcccagcctgtcatgtacaatactcaacctggagcatcaccgcacggttatatgcatcctgctggtccacaggagatgcaacaatacagaggaagaaacttttagatataccattctgaactgctcttagatggaagtcgctgcaatccccacaagtgggattttgaccagcaaaaaccgctattacaatggaaaaaactggtcctgttgtgttgctcggattggttggacaaaaaagcgcaccgactttgtgttgctcggattgcctggtcaaaatgctcttcattgtcctgtatcagtgttgctcggaagcaggttcactggaatttcatattatttttgtcagactattgatgttgtaaattgaattgcgggtcatctgttcgacccggaaatgacattcataaatgtgtgaggttgccccatgtaacatttatgtgttccttaacgttgttctgatgtaagatttggacg

SEQ ID NO: 16205 - DNA, 906 bp, Zea mays
  Clone ID: LIB3062-013-B10_FLI
ctagggtttttgattttagccgccgccgctgctcatctcacatccctcgagaagacgcctgctcctcgccgatcgatacgatggccgtcttctccgacctccacaccgccgacggcctcaagtccctcgaggctcacctcgccggcaaaacctatgtgtctggtgactccattactaaggatgacattaaggtcttcgccgcggtgccgtcgaagcctggcgctgagtttcctaatgccgcccgctggtacgagaccgtctctgcggctgtagcctcaagattccctggtaaggctgttggtgtaaatctgcctgcgggatcagctcctgcggcagctgctcctgcggatgaggctgaggatgatgatgaccttgatctttttggtgatgaaactgaggaggacaagaaggcagctgatgagcgtgccgccgctgccaaggcctcttctaaaaagaaagaaagtggtaaatcctccgtccttatggatgtcaaaccatgggacgatgagactgatatgaagaagctggaggaggctgtccgcagtgtccagatggagggtctgacttggggagcatcaaagcttgtgcctgttggatacggcatcaagaagatgactatcatgttgacaattgtcgacgatcttgtgtccatcgacactctaattgaggaccaccttacgcaagagcccatcaatgagtacgtccagagttgcgacattgtggctttcaacaagatctagagttcagtttctgagattgggcaacggcagcggctcagctcgtcaagtttgtgctgggatgccagtttatcccttctagtctattacagaaatgttgttcggagctgagtctattataaacatcttggtctgagtttattgttgagtggtgccagtttttttcaat

SEQ ID NO: 16206 - DNA, 816 bp, Zea mays
  Clone ID: LIB3062-013-F8_FLI
gtgaggcgtgagcgccacacccacacgaaggatcccgaagccgaagagaaccctaccgaggaggcagaaaatccgtaggcgcgcctcatacgattccgagatccgtgcctcttatcggcagccatgatgctgcgcgcggcgggcaggcgactcctcggcgtaggaggcggcgatccagcgcccgcggtcgctgctgctgtggcggcgagcaggagcagaggataccacgagcgggtggtggaccactacaacaacccgcgcaacgtggggtccttggacaaggacgacacggacgtcggaacggggatcgtcggcgcgccggcgtgcggggacgtcatgaagctgcagatccgcgtcgacgaggggtccggcaggatcgtcgacgcgcgcttcaagaccttcggctgcggctccgccatcgcgtcctcctccgtcgcttccgaatgggtcaagggcaagcaagtggaggaagtggtggccatcaagaacaccgagattgcgaagcacctgtctcttccaccagtgaagctccactgcagcatgctcgctgaggacgcaatcaaggccgccgtgaaggattacgaggcaaagaaagggaagaagatggccaaggcagaggagcaggacaccccatgcccgtaagagcgacagctagtaaactgaagcgagcagagagtactgtatgtagtatgtaacggctaacgagcgaggtactcgtgtcgtgtgtgccaaaagaagcatgtatgtaatgtaaagctaggtaacaacgatgtttgggtttcatagaataagcgaacttgccgcagtgtttttttt

SEQ ID NO: 16207 - DNA, 1501 bp, Zea mays
  Clone ID: LIB3062-013-G4_FLI
agcaatgacggcgactacgagcacacgtccgcagccgcagccgcagccgcagccggcggcggtggcggaggcaggggcggcggccgccgcctctgggtcaaggagcgcgaccacgagtggtgggaccggatgagcagccccgcgtgccccgaggacgagttccgccgcgccttccgcatgtcccgggccaccttcgaggccgtgtgcgaggagctgggcgccgccgtcgccaaggaggacaccatgctgcgcgccgccatccccgtccgccagcgcgtggccgtctgcatctggcgcctcgccaccggggagccgctccgcctcgtgtccaagcgcttcggcctcggcatctccacctgccacaagctcgtcctcgaggtctgcgccgccatcaaggccgtgctcatgcccaaggccgtgcagtggcccgaggcgcccgacgccgccgcggccgagtccgccaggttcgaggccgcgtcggggatcccgggcgtcgtgggagccatgtacaccacgcacatccccatcatcgcgcccaaggccaacgtcgccgcctactacaaccgccgccacacggagcgcaaccagaagacgtcctactccatcacggtgcagggcgtggtggacgcgggcggtgccttcacggacgtctgcatcggctggccgggctccatgtccgacgccgacgtgctcgaccgctccgcgctctacctgcagcgaggcgccgcgggcctgctgcaggggcagcgcctggtgggcggcgccgggtacccgctcatggactggctgctggtgccctacacgcaccacaacatgacgtgggcgcagcacgtgttcaacgagcgggtggacggcgtgcgcgccgtggccagggacgccttccagcgcctcaagtcccgctggggctgcctccagaagcgcaccgaggtgaagctgcaggacctccccgtcgtgctcggcgcctgctgcgtcctccacaacatctgcgagcgcgccggagacgccgtcgaccccgacatcgcgttccagctcttcgacgacgacatggtcgccgagaaccccgtgcgctccacggcggccgtcgccgcgcgcgacagcatcgcccacaacctcctccaccgcagcagcagcagcagcagtagcgccgccgccggccccaggttcgccttcaattgaactctgacggcgggggcgaggaaaagcacctcgctttctcggcgggatcagagaagacgacgccacgagggcgaggctcagcaatctttcaccgtttttttcgcttgaatgaaattgtaataagttgggaacatagcaacgggggttgatagcgaaacatacatagggttcaaagatacagtaggtgattggttgataggatttgagattgttctgcattttttttttgtagagtcaaaggttcaatcatcatttttcagatttggtgagaccgcgtagcctgtgtagtcaatactgtgcaggctattttgccaccagactttgc

SEQ ID NO: 16208 - DNA, 920 bp, Zea mays
  Clone ID: LIB3062-013-G8_FLI
aacccaagcctcctcgtcctctgtcagactaccactctctccctcgcggactcgcggttgattcctcgcggcggattcgcatcttccgcgtcagggacagggagagtactccgtcggacggttggaggagaacagggggagaggagctctgagatggagacggccgcctcggcagcgcgcctggtgaactacccgctcgtcgcggcgctcctcgcgttcgccctcgcacagtcctccaagttcttcaccacctggtacaaagatggccggtgggatgccagacagtttatagcttctggagggatgccatcatcccactcagctacagtgacagcactcgcagtggctgtggcgatacaagaaggctttcatagtgcaacctttgcaactgcactagtctttgcatgcgtggttatgcatgatgcttttggagttcggttacatgccggaaagcaggcagaggtgctgaatcaaattgtctatgagctaccagaagaacacccattatcagagacaaagccattgcgtgaaatccttggacatactgttcctcaggttgtggccggttgcatccttggaattctcatggctgtcgttatgcacctggctctcgggagttcttagtcaactgttgttcatggatgtcatgacagatgatcacctaatgtctcgctggtgatggctataaagcatgaaaggcatgatctccgcatggatctggttgtccaagtgtttggtagtacgaagttctaaccgatttagttctggacagtaggatataggttgtgtagcttgaatcggttactgtaaatctgaaaggttttgctttcaactccaactccaaccacggtgtaatggaagctttgttatacaatcaacagcagtaaattcattctgaggtaacgatcggtatagttgat

SEQ ID NO: 16209 - DNA, 472 bp, Zea mays
  Clone ID: LIB3062-013-H6_FLI
aagctcttgagaatcattctgcttccagacatgattgattgatgtagaattggagttggcagttttacctcaacctggccttggatagattgatattacagattgtaagttgtcaactgtggtttgtctatatctggatgatgttttgagggaaggagcatgccagaaggatgccacattgaggccaattaagtgctagtcatctaggaattgagcttccggaaaagaatttgaagtgtacttagatacaatggtgtcaccaactatactcttttccccctcttctctctcgttttaggacggcatgtgatagctgcaatgtgatcttatctgattcataggacgacgccatatagaaatgtcaagcatcgttttttcctgtaattacatcaaattggccagttgtcattgtgtatacttagtctatgtaaagtatatcaattcatactttatgacaagggacccttaggat

SEQ ID NO: 16210 - DNA, 1651 bp, Zea mays
  Clone ID: LIB3062-014-C7_FLI
caggcgtcttcgtactcgcctatctccgcgacccaaagcgttcccccttctcccattcttctctcatttctcaccaccgccgccgctaccccctttcgacaacaccatgagggagtgcatctcgatccacatcggccaggccggtatccaggtcggaaacgcgtgctgggagctgtactgcctcgagcatggcattcaggctgatggtcagatgcccggtgacaagaccattgggggaggtgatgatgctttcaacaccttcttcagtgagactggcgctgggaagcacgtcccccgtgctgtttttgttgaccttgagcccactgtcatcgatgaggtgaggactggcacctatcgccagctcttccatcctgagcagctcatcagtggcaaggaggatgcagccaacaacttcgctcgtggtcactacaccattggcaaggagattgttgacctgtgccttgaccgcatcaggaagcttgcagataattgcactggtctccagggcttcctcgtcttcaacgctgttggtggaggaacgggctctgggcttggttctctcctcctggagcgcctgtctgttgactatggcaagaagtccaagctcggtttcaccgtgtacccatccccccaggtgtccacatccgtggttgagccatacaacagtgtcctgtccacccactctctcctcgagcacactgatgttgctgtcctgctcgacaatgaggccatctatgacatctgccgccgctcccttgacattgagcgcccaacctacaccaacctcaacaggcttgtgtcccaggtcatctcatccctgactgcttccctgaggttcgatggtgctctgaacgttgatgtgaacgagttccagaccaacctggtgccctaccctaggatccacttcatgctttcgtcctacgctccagtcatttctgctgagaaggcctaccacgagcagctgtccgtggccgaaatcaccaacagcgccttcgagccatcctccatgatggccaagtgcgacccccgccatggcaagtacatggcatgctgcctcatgtaccgtggtgatgtggttcccaaggacgtgaacgctgctgtggccacaatcaagaccaagcgcaccatccagttcgtggactggtgcccgactggcttcaagtgcggaatcaactaccagcctcccagcgtcgtccccggcggtgacctggccaaggtgcagcgtgccgtgtgcatgatctccaactccaccagtgttgtggaggtcttctcccgcattgaccacaagttcgacctcatgtacgccaagcgcgccttcgtgcactggtacgtcggtgagggtatggaggagggcgagttctccgaggctcgtgaggatctggctgcgctcgagaaggactacgaggaggtcggtgctgagtttgacgagggtgaggacggcgacgagggtgacgagtactagacgctctactggcgcggcgtcgtcgggcttgtgtgccactgctatcctgtgatctgccctgagtggctcctatcgtgttatgtttctgtcggttcttatctatctgtcgttgtgtggtttacaacttacgttgtaagactttattcccccgctttgctactgggttattaagtttggcgttattgtttt

SEQ ID NO: 16211 - DNA, 1213 bp, Zea mays
  Clone ID: LIB3062-014-E5_FLI
ctgatcagaagatcacaagcataaaggaaatccttccgattttggagaagaccacacagctgagagcccctctgttcattattgctgaggacattactggtgaagctttggcaactcttgttgttaacaagcttcgaggaattctcaatgttgcagcgattaaggctccaagttttggtgagcggcggaaggctgtacttcaggacattgccatcgtcacaggtgctgagttcctagcaaaagatcttggtttgttggttgaaaatgctacagaggaacaacttggcacagcaaggaaagtcacgatacatcagactacaacaaccctcatagcagatgcagccagtaaagatgagatccaggcgaggattgcacaactgaagaaggagcttgctgagactgattcagtttatgatactgagaaattggctgagagaattgctaagcttgccggtggtgttgctgttatcaaggttggagctgcaactgagactgagcttgaggaccgccaactaagaattgaggatgcaaaaaatgccacttttgcagctatagaggagggcattgttccaggaggtggtgcggcatatgtgcacctatctacggttgtccctaagatcaaagaagcaattgaggaccctgatgagcgtcttggcgctgatattattcaaaaggcattggtagcacctgcttcattgattgcacacaatgctggagtagagggtgaagtggttgtcgagaagatcaaggagagcgattgggaggtgggctacaatgcaatgactgacaagtacgagaacctgatggaggctggtgtgatcgaccctgccaaggtgaccaggtgtgcgctccagaatgcggcctcagtagctggaatggtcctaaccacgcaggccattgttgttgagaagccaaagccgaagcctcaagtggcagagccaccggagggagcccttaccgtttaaaaacttatcgttcttgaggctgctgtccagacggttcagatcagttgagagggtagaactttggtttgagaattttggttcagatccactgggagttgtagagtaggattgctattttgcagacgaagggtaattttactctggtctgaacttatctgaatcgaagacatttgcatcaccattttttaaaaataagctcatggcgatgctggattgtacgagcaagtacagtatgtttttagcctctc

SEQ ID NO: 16212 - DNA, 469 bp, Zea mays
  Clone ID: LIB3062-015-F11_FLI
cgagaagaagagatgttacatatataataactactgtgtaggcagcggcatctcctgctgggacgaagattcaagaagctagctaagagagaagggcataacgagataataagcagcgcgcgaagatgcaagactgggcgccggtgttcgtctcgctggtgctcttcatcctgctgtcgccgggcctgctgttccagatgccgggcaagtgccggatcatcgagttcggcaacttccagaccagcgccatctccatcctcgtccacgccatcctcttcttcgccctcgccgccatcttcctcgtcgccgtcggggtgcacatgtacctcggctcctaggcggcggcgcggggcgccgtaccttctctctctcgccgcgcgcgccatcgttctcttcttttatgttctctctctatatatatagtctgtatgaatgaatgatatcatataataatgtacgtaccgtcgtc

SEQ ID NO: 16213 - DNA, 1517 bp, Zea mays
  Clone ID: LIB3062-015-F4_FLI
gctagaaccatcaccatcagttgggttgctgccacgtgcttccttatcagatggtggctcaatcaagtctactccagtgaaaagtgtgattggacaaggtggccctagcatcgtcaagaaggcacatagcagcaacccaactgatggtgatggttctagcaaaaaaatgaaaaaagagataaagaaagtagatgcatgtaacgtgaccaggctgcaagttaagaatgggacaaacaatgaaccagcagataggaaggggccacatgcttccttatcagcttgctcagtcaactctacttcgctgaaaagtgtgattgctcaaggtggtcctagtattgccaacaagatcatatcaaaattaaccgaggatatgaccgtggtgacatccattgacggacaccccaccaagacatggatcgtgatgacttataagggagggaaggtttccatttgggactatcaggagaagaaaactgtgatggagttgaaggtcaatgaggaatcaggcaagattgctcgtatcgcgcatggcatttctcaaaacttcaaagagacaggtgtcccacattcagtttgttcagccaaatttatcgctcaagggaaatggctggtagtgggaaatagtgatggatacatatatgtctacacttacactgacactaagcttaaggaggccaagaaattcagagctcatgacaactctgtcgacgtgttggctgtccacccaaccgaggcgtaccttctttcatcatctgcttatggcaaaacaataaagctttggagctggggcagtgactcgatcatgaactgggtgcaaattaaaacatttaacgtgaaacctacatatccggatggagtgcgcagtctcaggtttaacccaagggacaccaacacttttgcttgtgttacgtatgaagatagagtaaaggtcggggacataaaaaatccttctggtcttaccaccatactgaaggggccattgaaagctgattattgcttctctcatactcatccgcacttgatggttactttgagccgaacatcacctgatgcccagatacggaatttgaagacaggaaaagttgatcaaactcttagcttgagtgggggaaaaacaacttgcattgcttgccacccaacacttccaattctggttaccgcgttagatgacgggactgtatgtttttgggatgccagtatctacaggcttgaggaaaaagtaaaaattacgggcagctgtgctctcgatttggttttcatcgccgatattaatggcagcgcaaggtacttttaacattttttttctattgacgacttaatttatctacaaaaacagtagccgtgtgcctttgctctctgtggtgactagacgatgccatgtgagttgccgtggcccgtggggttcatagggagtacatattgatgaaagaatgtagtttttatgctaacattatttaatactttttataaagaaagattatattgaattattgaaataaatgatgcttattttgttt

SEQ ID NO: 16214 - DNA, 1243 bp, Zea mays
  Clone ID: LIB3062-015-H7_FLI
ctaccacggagatctgaatgccttgagggacgacattgtggagctgaagccgactctactggttggggtgccccgagtgtacgaaaggatttatgaaggtatcttgaaggccattgcggaactcagacctctaagaagggtcatctttaatgctttgtacaaccgcaaactggcaagcatgaaagcaggctactcgcacaaaaccgcttcacctttcgcggacatgctggcttttcgcaaggtcaaggcaaggcttggaggtcgtcttcgcttactgatttcaggaggggctccgttgagtaatgagatcgaggagttcatgagagtgaccacctgtgcatacttcatccaaggctatggtttaacagaaacactgggacctagcactgtctgctacatcgacgacatggccctggtcggaagcgctggtgtgcctgccacctacaccgaaattcggctggaagaagtgcccgagatgggctatgatccactcggcgtcccttcgcgtggtgaaatctgcatccgggggaaatccctcttcgctgggtactacaaaagtccagaactcacaaacgaagccatcgttgatggatggtttcatacaggtgacattggagagatgaccccagacgggatcttgaaggtgattgacagaaaaaagaacatatttaagctgtcacaaggggagtatgttgcggttgagtacctggagaaagtgtatggcttccctccactcgttgaagatatctgggtatacggggacagtttcagatcaagtttagttgcagtagtcaatccacaccaagaaaacacaatgaagtgggcagagtccaatggctacaagggttcttttgatgaaatctgcaaacttgaaggactcaaagagtacatcctgaaagagctggcagccgttgcgcagaagaacaagctacgaggcttcgagtacatcaaaggcgtagtgttggatcctgtgccttttgacatcgagagggatttggtgactgcaacaatgaagaagaagagaaagaatatgctgaactattaccagtctgagattgacacaatatacaaaaagctggaggcgcagaagaatgctgccagaactaagtgaagagatgtgccctattcgatcatcagctgaaaacaagggaaacgacaccgttgtaaatttcacattaatattgcgaagtaacaactcagggctatgagtaaggaataaaatgtatattgtgcctttgtctat

SEQ ID NO: 16215 - DNA, 256 bp, Zea mays
  Clone ID: LIB3062-016-B9_FLI
ccccaagttgggtggtggcggtggcaagcgctgaaagaacctaagtgtcgttccttgaccttgcaattgctcctccatagcccaccttgttgcaccaacgccacttttgtagtacctcggttaattttgcattttctttcagagttgtttgtgggttttgagttccatctcaagagagttgagtttatttatctttatattgggtgaaatgttcatatgctttcctcagcttggatgatggtttgctttgtttctc

SEQ ID NO: 16216 - DNA, 674 bp, Zea mays
  Clone ID: LIB3062-016-D2_FLI
agaaaagcagttcttcagctaggcaggagggcacaggaaggaggagatggcgtcaaagaggattcagaaggagctcaaggatctgcagaaggaccctcccacctcgtgcagtgcaggtcctgttggtgaagacatgttccactggcaggcaacaataatgggtccatctgatagcccatattctggtggagttttcctagttacaatccattttcctcctgattatcctttcaaaccaccaaaggtggcatttcgcactaaggtgttccatccaaacatcaacagcaacgggagcatttgcctcgacatcttgaaggaccagtggagtccggcactaaccatctccaaggtgctgctgtccatctgttccctgctgactgatccgaaccccgacgaccctttggtccccgagatagctcacatgtacaagacggaccggcacaagtacgagaacaccgcgaggacctggacccagaggtatgccatgtagtattttctctacctggcctttggggtcgctgctgcgttgtgttgccgggacctggacgtgcctccatgtattcgttctatccttcctgtataatgatgaaccgaattgggtttgcagtacagtgccgcgtgtggtgctgaatgctgctgtattgtgtcacttggaagctgtaattctcagtgtc

SEQ ID NO: 16217 - DNA, 1030 bp, Zea mays
  Clone ID: LIB3062-016-D9_FLI
agggctgcgatggctcggtgctcctggacgccgttccgggggtggccaactccactgagaagctggcgccggccaacaacaactcggcgcgggggttcccggtggtggacaaagtgaaggcggcgctggaggacgcctgccccggcgtcgtctcctgcgccgacatcctcgccctcgccgcagagatctcggtcgagctgtccggaggaccaaagtgggcagtgcttcttgggaggctagacagcaagaaggccgacttcaagagcgcggagaacctgccgtcgccgttcgacaacctgacggtgctggagcagaagttcgcggccgtgggcctccacaccgtggacctggtggccctctcgggggctcacacgttcgggcgggtccagtgccagttcgtcacggggcggctgtacaacttcagcggcacgaaccggccggaccccacgctcaactccggctaccgggcgttcctggcccagaggtgcccccagaacggcagcccctcggccctcaacgacctggaccccacgacgccgaacctgttcgacaaccactactacaccaacctggaggtgaaccggggcttcctcggctcggaccaggagctcaagtcggcgccgcaggcgcagggcgtcaccgcgcccgtcgtcgaccagttcgccaccagccaggccgccttcttcagcagcttcgcgcagtccatgatcaacatgggcaacatccagccgctcaccgacccggccaagggagaggtccgctgcgactgccgggtggctaatgatgattaatccacgacgacgacgtgtgtagttagaaacggacgtgaatgcatgtgcatgtgcccggccgggtcgttagtacaccgacaagcaagagtgcactagcgctatggatcggactatatggtgcacaactgcacatgcatgcatataatatcagggcctcgtcgtttcgaattgtttgctgtcgacttcaattaatagtttctcataaatgtgcaataaagaggaacccaatttctcctgtt

SEQ ID NO: 16218 - DNA, 278 bp, Zea mays
  Clone ID: LIB3062-018-F9_FLI
aacagattggcttcatggccttttccctgtatttatgtgtagtcaggtccaattcttttctgttgatgagcgcaagtttttcgtagatgactcgcggtcacggcaatatttgtgatattgtgtcatctgtggactatggttaaatttcagttatttgttttctttcaccttccagaactgttagcaagagcattctggaccaggatgctcgaacacaactggctgtatgtacatttgtgaatggtgaataaagaaggggtaataaactgctgcgaaat

SEQ ID NO: 16219 - DNA, 783 bp, Zea mays
  Clone ID: LIB3062-018-G9_FLI
ccgcgaatcacagacgcgtctatctcagcttgctgcgctgcactaccctgccctgccatcatatcgtacgtgagcccggccgagcgagagcgagggagaggcatggctgctccgaagctcgcgacgctggcgctggccgtgctcctggcggcgaccgtggtggctcccccggccgcggtgcgcgcggcgatgtcgtgttccaccgtgtacagcacgctgatgccgtgcctgccgttcgtccagatgggcggggccatgccgccccagccgtgctgcggcggcatccgcagcctgctgcagcaggccaacaacacccccgaccgccgcaccatctgcggctgcctcaagaacgtcgccaacggcgccaacgggagcggcacctacatcagccgcgccgccgcgctgcccagcaagtgcggcgtcgccctgccgtacaagatcagcaccaacgttaactgcaacacgattaattaaatgaggcgtcctgtgcgcgtccgggcgaggaatgcatgcatggcggagagtaataaagtaatgctactggtattttaagctagatcgaggtgtgcctgtctctagtcatttatggtgtttagcaatcgtctacacagttcgtaaacggtgtatcgtggatgcatgttgccgcgagcagagtacgtaggcatgaaccgatgtgtgcgcttctgtctgtgtactctctctatgtagtaatgtgtggccagtgggtgctttgatccagatgtattcgctcgtgagtggtgagtcgtggaagttgatcgtttc

SEQ ID NO: 16220 - DNA, 1163 bp, Zea mays
  Clone ID: LIB3062-019-A10_FLI
tgctatagcacagaagctgatgtttggagcataggtgtaattgcatatatccttctttgtggcagtcgtccattttgggcacgcacggaatctggcatattccgttcggttctcaaagccgatcccagttacaatgaggcaccatggccttctctgactccggaagcaatggattttgtcaagcgattgctgtgcaaggatccgcgtagaaggattactgcagctcaggctttaagtcatccatggatcagaaattataatgacattaagctgccgttggacattcttatattccgacttatcaaagcttatattcgctcctcatctttacggaaagctgctctgagggctctgtcaaagaccttaaccgtagacgagcttttctacctgaaatcacagttttctctattggaaccagacaggaatggatgcatcactcttgacaatatcagaatggccttaacgagagaagctactgatgcaatgaaggaatcgcgagttcaagatattcttgtttcgttgagcgcccttcagtacagaagaatggaattccaagagttctgtgcagcagcagttagtgtgcatcagcttgaagcattggatagatgggagcaacatgcgagatctgcttatgaacattttgagaaggaaggcaaccgagctattgtaatagatgaattagcttctgaattgggcctcagcccttcagtgccactgcatgtcgttctgcaagattggatcaggcatacggatgggaaattgagctttctcggatttgtcaagttattgcatggcatgtccagcaggtccctgtcaaagatgagatagctgttgataatctctaacgacagcgcatgcttacaccgccttagcccttgtcgacttggttcgtgggttggagcttgtgtatcaagggcgtatctagcagcacctgatctgtcactaatttgagtatagagttatgtttgttgttgcctgcctactgatcattagccgataggaaaaaggaaaatctcacccatatctgcaacatgtgatgttatctaacagtgttagattaggcgtcattttctgttgtgatttttggaaactttgtaatgcttccttcctggaactggagcaagttaactgcaagttaccaggttggcctttagagcatgaac

SEQ ID NO: 16221 - DNA, 753 bp, Zea mays
  Clone ID: LIB3062-019-A11_FLI
tcgcctaaagccctcgccgccctctttcggctcctcgcctctcgtccacgcgcgacgacgtgtcggcaaacactcagtccatcccaagactcgcgaggcgatggtggacgcgtggtggcctctgctgggcgcggcgatcccggcgctggtggcgggtcagtttgtccgcatcaagcgccgccgcgacgaggagcagcgcctcaaggcggcgcgcgggcgggagaagagctccgacgaggtattcgtctgcgagcgcgtgtgcacctccaagcgtatgctcaagaaggtaggggccttctccaaggaccccataccggagacctgcgtcaccgtctgcggcgtctctgaactcgacgcctgcgccgacgcttgcgcgcgcaccgtctgcgtcaaccagcaccaggtgcccaattggaacgacgtctgcctcaagaggtgccagagcgagtgcctcaaactctcctcaaacctcatgtaatgaccatctcgctattgtgctgcgctccttatataccaccccgtcaggttcttctctgcttctatccatatcatggttgaggaacttcagacgtcgataaccgtaatttatatatctcaaggaattggagtgagtgaatgtagctggtcaaggcggttatgtctttcattacattggctcttgcacatttctcttcggcagaatttgtttccctaccgaagatttgtttctctttggcagaatttgtttccaactaattgtgagtactaggtacc

SEQ ID NO: 16222 - DNA, 365 bp, Zea mays
  Clone ID: LIB3062-019-A9_FLI
cctgcataaacccgaaggattggatctgattagccgttattcttgtgtcccttccgcttacagcacgatggcagtatgatcataaaccggaagaaggaaccgaggaatggaaacttctggaagcctgcataaacccgaaggattggatctgattagccgttattcttgagatcttttgttagagttttcccttctgtagggctaagaccacgtgcagtttcattatatattttgcatctgtagaatcgtgaataaatatgatgtagtaatgctgtagctgtctgtatctatctgctgttttttccccatgtgaatgagagaaccattggcttctgtattacgaaggattcaggtttctaaacact

SEQ ID NO: 16223 - DNA, 176 bp, Zea mays
  Clone ID: LIB3062-019-B12_FLI
ttcgaagagatttagtgttgtagtggtatgatcttatttaccacccacctatttaaccacgagatgtgcagtacagcagcagcatcataaagtttctgactgcaagaacgttgctgtagggaaggaaagtaactgtgctagtagtgtacttgcttacttcaaggttaatatctgcc

SEQ ID NO: 16224 - DNA, 1668 bp, Zea mays
  Clone ID: LIB3062-019-B9_FLI
catagacaggcgtcttcgtactcgcctatctccgcgacccaaagcgttcccccttctcccattcttctctcatttctcaccaccgccgccgctaccccctttcgacaacaccatgagggagtgcatctcgatccacatcggccaggccggtatccaggtcggaaacgcgtgctgggagctgtactgcctcgagcatggcattcaggctgatggtcagatgcccggtgacaagaccattgggggaggtgatgatgctttcaacaccttcttcagtgagactggcgctgggaagcacgtcccccgtgctgtttttgttgaccttgagcccactgtcatcgatgaggtgaggactggcacctatcgccagctcttccatcctgagcagctcatcagtggcaaggaggatgcagccaacaacttcgctcgtggtcactacaccattggcaaggagattgttgacctgtgccttgaccgcatcaggaagcttgcagataattgcactggtctccagggcttcctcgtcttcaacgctgttggtggaggaacgggctctgggcttggttctctcctcctggagcgcctgtctgttgactatggcaagaagtccaagctcggtttcaccgtgtacccatccccccaggtgtccacatccgtggttgagccatacaacagtgtcctgtccacccactctctcctcgagcacactgatgttgctgtcctgctcgacaatgaggccatctatgacatctgccgccgctcccttgacattgagcgcccaacctacaccaacctcaacaggcttgtgtcccaggtcatctcatccctgactgcttccctgaggttcgatggtgctctgaacgttgatgtgaacgagttccagaccaacctggtgccctaccctaggatccacttcatgctttcgtcctacgctccagtcatttctgctgagaaggcctaccacgagcagctgtccgtggccgaaatcaccaacagcgccttcgagccatcctccatgatggccaagtgcgacccccgccatggcaagtacatggcatgctgcctcatgtaccgtggtgatgtggttcccaaggacgtgaacgctgctgtggccacaatcaagaccaagcgcaccatccagttcgtggactggtgcccgactggcttcaagtgcggaatcaactaccagcctcccagcgtcgtccccggcggtgacctggccaaggtgcagcgtgccgtgtgcatgatctccaactccaccagtgttgtggaggtcttctcccgcattgaccacaagttcgacctcatgtacgccaagcgcgccttcgtgcactggtacgtcggtgagggtatggaggagggcgagttctccgaggctcgtgaggatctggctgcgctcgagaaggactacgaggaggtcggtgctgagtttgacgagggtgaggacggcgacgagggtgacgagtactagacgctctactggcgcggcgtcgtcgggcttgtgtgccactgctatcctgtgatctgccctgagtggctcctatcgtgttatgtttctgtcggttcttatctatctgtcgttgtgtggtttacaacttacgttgtaagactttattcccccgctttgctactgggttattaagtttggcgttattgttttcttgatctctg

SEQ ID NO: 16225 - DNA, 953 bp, Zea mays
  Clone ID: LIB3062-019-C1_FLI
cgaccagttgggcgcggtgttccttcaatcggtatggctctgccaggatttgtgtctcaacaacaacttggtctcaataataattctgagatgacctggctaccaatattgactggtgcctctggagctctaggagcaccttatggttccccttatatagccatggatggaagttattactctcgacaatctgaacaagcatcttcatcagtttctattagagaacctagtgcaaataatgcttcttctctgttgaagtcccaagaaataacagaggttgcaagtgatgaaataactcaacgccaaaataagcctcgtcgatactcggagatgaactttggccaatgaacatagctgtgaccagtgaggattcattggagcttaggacccaagtaagacctgtgcaagagacccaagccttactaagtccttgcaacatctcactgtctgatgtctagcactttcggctatcttgtaactcccaaaatgccaggcttgacagttgaaggtgttgcaaccatatcagtatgatcatttgctgtgattattctgaagggctagtgttgttacactatgaggtgagatttacatggtactccacttcaccgcaatatcagacgtcgtatcagcatactgcatatgggggaggtcttgatggaaatcgtgagaggtctccgtgctgtaaagctcgtgttccatcgtacatcagtctgtgtacttttgggtgtgcgcttgctttgcttctgtgcctctgccttcagctcggtggcactcggctgacatgcatccgttatatttacttgttatatctgatccgatgtattgaagatggttagtagagcatgatttacggtggtgaatcttgctttggtcgtgttgacaaatcagggccttgcacgtaaaagaaccggtgcatccgagacgccagtgcacacagctcatggcgctgccgc

SEQ ID NO: 16226 - DNA, 1085 bp, Zea mays
  Clone ID: LIB3062-019-C9_FLI
cgaccgtgtgaagaacttgactgggctggtggagctgtacggccggaacaagcggctgcaggagctggtgaacctcgtggtcgtctgcggcgaccatggcaacccttccaaggacaaggaggagcaggccgagttcaagaagatgtttgacctcatcgagcagtacaacctgaacgggcacatccgctggatctccgcccagatgaaccgcgtccgcaacggcgagctgtaccgctacatctgcgacaccaagggcgccttcgtgcagcctgctttctacgaggctttcgggctgacggtggttgaggccatgacctgcggcctgcccacgtttgccacagcctacggcggtccggccgagatcatcgtgcacggcgtgtctggctaccacatcgacccttaccagggcgacaaggcgtcggcctgctcgtggacttcttcgacaagtgccaggcggacccgagccactggagcaagatctcccagggcgggctccagcgtatcgaggagaagtacacctggaagctctactcggagaggctgatgaccctcaccggcgtgtacgggttctggaagtacgtgtccaacctggagaggcgcgagacccggcggtacctggagatgctgtacgcgctcaagtaccgcaccatggcgagcaccgtgccgctggccgtggagggagagccctccagcaagtgatgcgcgacggcggccacagacctgatcgatcgatgagcgagagggagcactcggagtgtcgtgtcttttcccttgccatttctttctttttttcccttcccggaggcgaaaaaaagagtctgcttttgctaggcggcgggcgttcgttgctgctctttgcttcaagagttaaatttacctaccttgtcaaggtcttgttccatcattgatccgggtgtcgcttttttagtagtctgatggactgttagtagtttgcgttgcgtcggttgagagggaacgttggtggtggtggtgtgtgtgcagtcaggcgtggtgctccctttgtttcctggatgggatgttgctccttgaataataatcgtagtggccttggagcccttttcctg

SEQ ID NO: 16227 - DNA, 812 bp, Zea mays
  Clone ID: LIB3062-019-D9_FLI
gcacgcaagcagagaggcgtggaacttttcctttgctgggccataatgcaaggatttgtcatgatgctgcagaatagatatcagcgtcaaagattatatactaggattgctttggggaaggctaaaagaatggatgttgtatggggagagactgctggtgttgaaggtcaattgttgctgttgtgccctctccttttcctcctgcagggattcgagggttatgttgggtttttacttctgcgcacagctcatactggcgttgtccctgagtggcaggttgtggtatgcgggatcctgctgatcgcgatggcaatcggtaactttgcaaacacagtggacaccctggtaaccaagtcccggttcaaggcgaagatgaagaaatccaagggcagacgggacctcgacacatgcccctcgccaacaggttcatcatcgccgatagattcagcgaccaccaaagcatgaacaaggccaagaggaaaaggtgcccgtgtttaacccgggtgtgttaccactgtaaagcattttagtgtttttttttcttggccgtcagctcgtaatcctgtccgtcgtctgtgtcgaagctcatactcgtgtaatcaatcatcaggcaagtaggctgctgatggttctaggctggaggtggccgagaataaacttgtggtgtttgtttatatacctgtaccctgaatgaacatcgagtgggctagggtggtgggcttaggactatgtaaggcttagcaaaattttccaagtatagttgtgagacaggcaggcatttgtcacaatgaatgaaacatgcgaagttgtat

SEQ ID NO: 16228 - DNA, 1086 bp, Zea mays
  Clone ID: LIB3062-019-E1_FLI
acgtcctcctcttgtgatcggcaatcttggcaccaccacggcctttcgctcaaggagccagccgtgtgcctgccgaccagcccagaggcgtcgaggccgcggctattgacagttaggtcggggtcggagccagccgtcgaggcccgatgggcagcaggacgacgctgcccctattaataaagccgccatgcgtgtgcccggcactgcacaacatccatcgtccatcgacccacccaacctcctcctccgccccgcgcttcgcctgggtaccggcgtccgccgcgccccgtaccgtctcgtccaggaacaggaagagcagtaacccatccacccatccatcggggatcaccaggggtcaggggagcaagatgtcgactgccaccgccccaagattgcccgctcccagatccggggcaagctatcactatcagacgaccgcggctccggcggccaacaccctctccttcgccggccacgcgaggcaggcggcccgcgcgtccgggccacggctgtccagcaggttcgtggcgtccgcggcggccgtgctgcacaaggtgaagctggtcggcccggacgggacggagcacgagttcgaggcccccgacgacacctacatcctcgaggcggccgagaccgccggggtggagctgcccttctcctgccgcgccgggtcctgctccacctgcgccgggaggatgtcggccggcgaggtcgaccagtcggaggggtccttcctcgacgacggccagatggccgaggggtacctcctcacctgcatctcctaccccaaggcagactgcgtcatccacacccacaaggaggaggacctgtactagagatcgggttgctttatgcatcagtggttgctccaagggtggtggtgcgttcgttgctgttccgtgccaccagcggaagggggatttcgttgttgagatgggctagttcttgtcatcaatttcggtcattcgatgagatcatggcatatgagttgtggcaataatgctggcaatatggttttgcaattcaaactgcaaatgtgaccagcaatgtcaaaaactgcacactgtgtctctgtgcgaacttgtg

SEQ ID NO: 16229 - DNA, 1589 bp, Zea mays
  Clone ID: LIB3062-019-E11_FLI
gggtgctccgtcaaggaccgcagcgctctgagaatgatcgaggacgcagaggagagagggctgatctcgcctggcgccacgacgctggtcgagccgacgagcggcaacatgggcatagccctggcgtacatcgctctggcccgaggctacaggttcgtcgcggtcatgcccgccgagtactcgctcgacaagcagatcctgctgcggtacctgggggccgatttggtgttaaccgatcctgcgcttggcttccagggacagctcgacaagctggaacagctcaggaaagaaatacccaacgcgcacgttcttgaccagttcgcaaacgcggcgaaccctgaagcgcactttagatggactgggcctgagatctggaaggatacggcaggcaaagtcgacatcttcgtggccggctccggcacgggaggcacggtctctggcgtcggcaggctcacgggctcacggtcaccgcgtggtcggcggctggacaacgaccagtcggcggctggacaacaacgagtcgacggtcggcggctggacaacgacgagtcggcggccggcggctggacaacctgcgagtcggcgagtcggcggctggacttcgggcgccggtggggcgaggggcctgcgacctacggcagtgctccggccgtccggcggtccggcctccgtgctccgggcgagcggcgctgcgagctccagcggtgctccggggtctgggcgtgggcggctccacctccacggctggcggcggctggagctggagggtataggatagaggaaggatgttcacggggctgggcgcggctggagtgggctgtcgcgcggcgatggacctattcgttttagtgggccgcgaccgggctgcagcccaggcagccccggtcggagatccgccactgtacttgaagacgaagaacccggcggtgaaggtcgtctgcgttgagcctgctgagagcccagtcatttcaggcggcaagccttctcggcacaagatccagggcgtcgggccgggattcgtgcccaagaacctggacacctctgtcaccgacgagatcgttacggtgaccgcagaagatgcgatggcgaacgccaggaggttggccagggaagagggtctgctagtgggcatatcgtctggggcgaatctggcagcttgcctcaaggtggcgtcgagacaggagaaccgagggaagatgatcgtcaccgtgtttcctagcggtggcgagaggtacatgagctccgatctcttcgcggatgcaagggaggagtgcgtcgccatgaccttctgatcttctggacgctctgtgcggatctgcagcggcaaactgctatttctcagcgtggaatggatttttagtatcgtcgatccaatccagcagcttgcggaggcagaagatttggaatccttctggcagaaaatttactgcgcatttgcgttccattggcaggaaagactctgtacatgctcttgggctcttggctaaggacctttacagctttccttatttcttcttggcacagaaatttcagcagagaattgtaccacgagctataaactgagagatgccaatcagtatctcgttgag

SEQ ID NO: 16230 - DNA, 1169 bp, Zea mays
  Clone ID: LIB3062-019-F1_FLI
cgtccgccgtctccgctccggttttcgctctctcgctgccgtcctaggtttggagccaggtcaccggcgctaggagggcgtgaaatcgagtcgacggtcggcactcggcactcacgcgttctccacctactgctggcgctcctgtgaggcgacgccggaccggccaccccgcatgcgaacagcgcacggaccggccaccggtgtgactcctccatccaaggcttcagctccagacggagccgccccgccaatcgccgtccgccgaaccgcctaggaatttgttttcctcatctaaagttactgcattatattccatagaaatggctatggggttgattaatgctaatcctataatccatgagaaaaaagaaagacgcatccgacaggcaccagagaccacagatgaaaatgcggcagagtccatagaccagctggaaatatttgatcacattagagatataaaggatccagagcacccatactcactggaacagcttaatgtggtgactgaagactcaattgaactcaatgatgaaagcaatcatgtcagggttattttcaccccaacagtggagcactgcagtatggcaactattattggcctttgcatacgtgtgaaacttgtacggagtctccctccttattacaaggtggacataagggttgcccctggatcacacgcaactgaagctgctgtgaataagcaactgaatgacaaagaacgtgttgcggctgcattggaaaacccaaacctactggacatggttgaagagtgcttatcaccaacattcgattgaggtctcagttattgcacatctgggagccatggtgtttcatgttcagaagccacacaagcttattgccataggaattcactcctgaatattatatttgagggccatggtgtttcatgtgcatgatttttttttgtcctccgtccctttgagttaatacaattgttatctttttggacatttgttggtgcttgtgacctccctgggcaaagggacatgtaatcagatcttgtgtagtagctttcagagcgtttccagtgccacgccattttgtggctgtgtacccccagtcaactgaacttgggtgctgtttggttcaaaaaatgtaacacaaatggtaatggtaatggtttcggctcgattactggcggtacc

SEQ ID NO: 16231 - DNA, 1236 bp, Zea mays
  Clone ID: LIB3062-019-F4_FLI
caaaaacagatgaagggaaggctgaaactctccatcgcagctacaggcagagaaaaagatcccaaaggtacacaaaggactatgttgaggccatatcagatattgacctagattttgacagcgatgatgatatcatgggtgaagcagtctatgatgaggaatatcttagaagaaggaaacggtacaaggcaagcctttctgaaaatgatgatgagtttcagttggatcaagtcgccaatgatggtgatgaagtgggcacttctttgaatgttaatgaagatacagaagatctccaatggtacaaaagatttccacttctcacccctcaagggaccaagttgaaatctattgatgaaatccaaactggcatccgacgcagtaagcgctccacccgttcccgtattaactatcgacagcttgatacttttggcgcaaatacaaaatatggaaagtcagagaaatgcaatgcatcagatccggatgctggttctgatgcgctaaatgatacggagctctcaacaagtcaagatcgagaggaagaagacgatggagtaaacaaagcacaacagcagtacacagagaaaccaatcgttcctgtcaaggagagtagaagtgtccggagaaaattcctcgtcctaaatgagcttgtgcctatagctggttttgatgatgcttcagtcttagtgaaagataagcacgtgaataacaacggaggaaaatgttctgcagcacattagggcgttggggaagctctttttttttgtcacatgggtagcaaatactgggtagaactgctcgcttaagcatggaccaacgagaatccaatgagatggtgatgcaacattggtcttgtttgggcagactgctgcttactacttccagtgtcatgccagcgaggagatgagatggtccatgggtgctgtgtggctgaattcccagcccataaagccaagtccctctctgatacttggaggtcttgctgagatgtgcactaggcacaccgcgtcgattggcgctgtacaattgtcacagctgtacgtgtatctcctccatgtatatacagtgattgggagcaatagcgtcttcaggtttcaggatgcctatgggtagttgtctttgtctcttcttccttttcccctcttctgagcatctgaagttcggcaataaactcgattcaactgtggcatttacttatttctgtatgcggtaattaatatcgctcgatcttacactact

SEQ ID NO: 16232 - DNA, 1075 bp, Zea mays
  Clone ID: LIB3062-019-G8_FLI
cttcggggttatctgtcagcctctcacacagttattgaagaaaggtgtgcacttcatttggacatctgagcatgacaccgccttttccaccctcaagcaagctcttacgtcggctcctgtgttatcattaccagattttgcttctcccttcacagtggaaacggacgccagtgcagtcggtattggagctgtattgatgcagcatgggcacccagttgcattcctcagcaaggctttgggccctaagacccgtggtctctccacttatgaaaaggaatacatggcgattattgtcgcagtccagcagtggcgttcctacctccaacatggcgaattcacaatcctcacggaccacaaaagccttactcagcttaacgagcagcgcctgcacacgccctggcaacacaaagtcttcaccaaacttttgggcttgaattaccgcatccagtacagaagtggctctgacaaccgtgctgctgacgccctgtcacggcatagttttgcagaatgtcaagccgtctccgttattgttcctcaatggctggttgccgtccaagatagttatcaccaagataaacaagcactttccctcatctctaaattggctgttgacccagcggctgtacccaattttaccctgcatgatggtctactccgatacaaggaacgcatttgggtgggtgaggacacacatctgcagcaccgcattgtcgaagctttacacagttccccattgggcggacattctggcataccagtgacatacagccgtgtgaaaaaactctttgcctggactaagttgaagccctttgtgcagaagttcgtgcaggaatgtcaggtctgtctgcaagcaaagccagatcgagctgcttatcccgggttgctgcaaccgcttcctgtgtgtaacacctcaaatccatcaattaaaataatacattattagttgctaaactaagtagagagtaaattaaaaatttatcaagtgtttgaatgcattcattatcggtgcatgatttctttgtttgttaatgaattgcaacacctttattttaatttattctctttgtgaagctct

SEQ ID NO: 16233 - DNA, 783 bp, Zea mays
  Clone ID: LIB3062-020-A3_FLI
gaagaagatcgaagccttggacaaagacatacttgtcaaggagggagagatcacgatattgcaggacaacatcgacaagccgttcaatatcatctgcagcccaagttcgatgcaggagttcggcatggggtgaagatggctgctattttgtaagtgagttggtggatgaaaattcaagttattgtagaagacaacacatttctttgcatattacatcctgctatgatgttctgaactatgatgggttcaacgggtgccatttttctcttagagctattgttgacatggaagaaatggtggcagcaccagcttagtatggacaacaactgaaatctcctacagaagttgtttctaatgtgctattgagctccattgtgttttggcctacgcaatcttgttctccagtctgcctccaagaaaagctctatagtcccatagtttctgctaaggttcaacaacttcaggatcaattataggctgagaagcaagaaaaaatggacttcgtgatgaagcggaaaccattgatagtatgaagaggttgatggaagaaaataacaaccttcttcgtcaactataaagcttcaattgaagaaaagtgcctccatcttaagtttggttgactactataggacatgcagccttgtggtagctatagtagtagtagatatttatagttgctctagatttgaagttataggattatttttaattatgtttaatgtttaataatttgagttgaagttataagatttgctttgaattttaagttaaaggatttgagat

SEQ ID NO: 16234 - DNA, 477 bp, Zea mays
  Clone ID: LIB3062-020-B9_FLI
gaattcatggacagtgcctgaggttccctctccaccaacagcctcggggctcaactggcacgggaatttgtgtttccctgcgtatgacagcaccatgttgttcctgaaattacctcccttcagaactccgaaagtcacttcaccgtaccttccagtttcaagcgccggagaagagagtactgagaggcgacaagaagatcactagacaccactgtccggtctaggctatcttgagaaaggcttcttggtgggctaaatgacgaaagaaaatatccaggactgggtggtcattcaaacatcaactgagctatccagtagccaggttttaagtgtgttgtaatgcttcaatgtgtttcattttccaaagacctgagcttcgcttgtgatttgttccgagctgtacggtgtcgattttgtgtatataatataatataacgaaataaagggtacccagtatgagtatgatcattccgaaat

SEQ ID NO: 16235 - DNA, 767 bp, Zea mays
  Clone ID: LIB3062-020-C12_FLI
ctccgcgtttacacccgccgccactcctgctttggcgccgtagctagcaaaggcgatatccatggcgacccctgcacggatcgagctggacaagctgagcgtggagcagctcaaggggctcaaggagcagacggatctggaggtcaacctcctccaggacagcctcaccaagatccgcaccgccgccacccgactcgagaacgcctccgccgcgctccaggacctatccctccgcccccaagggaagaagatgctcgtgccgctcactgcgtccctctacgttcccggttcactggacgacgcggagaaggtcctcgtcgatgtcggcaccggttacttcatcgagaaaaccatggctcaggggaaagaatactgtgaaaggaaaattaatttattgaagtcaaattttgatgaattggttgaggtggctacgaaaaagaaagccatagcagacgatatgggtttgctactacaagccaagctgaggcaagcgtcaccgggcccaagttcatgagagctggatgcacacctcgtctcttctacctatgttgtatcaaacatcatttagtaattttgaagttggagtcacgcagcagcgtagattatattctttggcatcttctgtcgtacagcacactatttgaatggtttaattttgttcctactgctgcccgtggaactttcatgagcttgtatgggtgggaccaaacattgtaggtctggccgatgggggtggtacggcaccaagcattgctctattctattgt

SEQ ID NO: 16236 - DNA, 1246 bp, Zea mays
  Clone ID: LIB3062-020-E6_FLI
ctgcgccgggctctgccccgtcgccctcggcgccgacggaggcgggtccgtgcgcatgccggcggcgctctgcggcgtcgtcgggttcaagcccaccgccggccgcctctccaactccgggcttcttcctctgaactggaccgtcggcatgccggggatcctagcagcgacggtcgaggacacgctgatcgcgtcggtgccgggcagctagcttcttgtttctcccataaaccaaatctttcgattcacatgtctgctttgttttcacccatgaggtaatgaaaacaccacgcaaatgttgtctgctttgttttccgtgcttcctttcaggtatgcggcgattgctgatcagtcaaaacaaagccctttacagcctgaactgaacctgcccatgctgacacgcacgaggtccatgcccagcatcaggctcgccaaatacgcaaagtggttcgacgacagctcggaggacatcaggagcctctgcgggaaggcgctgcagatgctgcgcacgcactacggctgggagagcgtggacgtcaccgtccctgagatcgaagagatgcggctggcgcactacgtgaccatgggctcggagtgcactgcctccctcgctgccaagtacctggacagcatggacaggtccgaggtcgggtgggacgtgcggatcgcgctcagcgcctacgggtccttcagcagccgagactacctcagcgcgcagcgtctccgatgccggcagatgtacttccacgagaagatcttcgagacggccgacgccatcgtcacgccgatgacaggggtgacggcgtacgcgctgcaggacgacgcgctgaggacgggggagctggactacatcaacggagctgcgctggtgaggtactcgatcgcgggcaacttcctggggctgccggcgatcaccgtgcccgtcgggtatgacaggggagggctccccgtggggctccagttcatcggccgcccgtggtcggaggccacgctgctgcacctcgcctacgccatgcaggaggcgtgcgggaagaaggtgcaccggaagcccaaggtgcactacgacctcctcaccaaagagtagctccgattcgtattgtgtcatgcatgatgctggcatgatgctggtgcacatgcatgatgctccgattcgtgtacttctaatgtgttaagatagagaccattcgtgtgccctcgatgtcgtcgtcattgaaacattatgcaagtattgtgtatagtgtgcttt

SEQ ID NO: 16237 - DNA, 1167 bp, Zea mays
  Clone ID: LIB3062-020-H12_FLI
ccacaacaatgtccagtttgcgacattgacctatgttgacccatctacctatcagataatgggaaacttgaaaattgtcacgactgggattttgtttaggcttgtcctaaaaaggaagttgtccaatatacaatggatggcaattgttttattggctgttggtacaactacaagccaggttaaaggatgtggagattcaccatgtgattctcttttctcagcaccattggagggttacttgcttggaatactttctgcttgtctttcagctctagctggtgtgtacacagaatatttgatgaagaagaataatgatagtttgtactggcaaaatgtacaattatatacgtttggagttatctttaacatgggctggctaatttatggcgattttaaagctggatttgagctaggtccatggtggcagcgcctttttaatggttattcgatcacaacatggatggtagtgttcaatttaggatctactggtcttctagtatcatggttgatgaaatattctgacaatatagtcaaggtgtactcaacttcaatggcaatgcttttaacgatggttttatctatatatcttttcagtgtgaaagctacaattcagctcttcttgggcattatcatttgtataatttccctgcagatgtattttatgcctgtgcacatgcttattgagttgccacaaactttgcctgtaacatcaaagtaggttcatggcattgttagctaacccattgatcagctgagggtagggcactgttgattgagtggttaattgactatctgcagcccagctctatttgagtcatatatttggagatttatggttgtaatctcaacagctatggatatagacagctaggttagtttcatgttgcaggaaaggtgaatcaactgtcaagtgagcatgtaatgccaatacaaatggattgaaagttaacacctacatgccttccaatttttatccaggtaaaagatggaggctgattagttttgttgcctagggaaacgaaatccattcaaatgcaagttttcttaaaatagagcaaaactactcattcaccttgtatccacagttttgcattaatggagtcgatatggaactgacaagtacaatgagttatggcttcattacaaaaaagtacacaattttgctcc

SEQ ID NO: 16238 - DNA, 528 bp, Zea mays
  Clone ID: LIB3062-020-H3_FLI
aggctccacacagacaactccgtagagctccctgctttgttcagacttcagagcccttcctcttgtgtccgtgcaaattggtgatacttgaacagggatctcctccatattagtgagcaggatgtataatcctcccagtgggcaggacatgtcctactacgatcatgtgcagaagcgccatgaggagaagggctgcctatatgcatgcctgttcactgcgtgctgctgcttctgctgcttcgagacctgtgagtgctgcctcgaggccatctgctgctgctgctagttctgcttggagggcatgggcgtccatcatcgtggagatgtggccatgcgggacacccaccgccgaataaaatgctgtacttatatgcacgcacgttagaaatgcattagtgtctgtttgatgtgatcttgtgtgtgtgcgcgcgcatcttcatttgcactggaaaatgctttattatttgtgaaggtctgtaaatctgttgtatgtatcttggtcagatgaactctattattgtgccatat

SEQ ID NO: 16239 - DNA, 484 bp, Zea mays
  Clone ID: LIB3062-021-B2_FLI
gagcagaaaagtgagccttaccaaaggtttgagcatgagaccaacggcaacagttggaattcctcccaaaattcttcatcgaagaacaattccagttcttgggacgactgggacgacccaggcaagaaagatgagcctgcgaaaccgcaccagagcagtgactcctgggctggctgggatgatgggaaggatgatggttttgatagccctagttacaacaatcacagcacctccaacaaggggagcaaccaaaacgggacatccggtggcacattttggacagaaggcggcttccgctgaaaccagtctcttttccatagagctatactttcagagttgttacatgccaggaaacgtgagggtccagtggttggtattatttgggatacttaaacagtcgggtgaaagggtttgtgtgttttgtaccatgtctacaactgttattatatctagtgagatatatttctgtggtcagatgccattc

SEQ ID NO: 16240 - DNA, 1085 bp, Zea mays
  Clone ID: LIB3062-021-C11_FLI
gctggaaagtgcacttcaatctataaaacacaactcaaatacatgagtttgtggcaatgataagctagcagagttttgcatcccacacccaaaagatatggtatcagaatttattcggtcctatgagattggtgccgatcgtactgcttctatagagacattaatgaatcacttacaggaaacagctcttaaccatgtgaagacagctggccttcttggagatggttttggcgccacgccagagatgagcaaacgaaacttgatctgggttgtcagcaaaattcagcttcttgttgagaagtaccccttgtgggaagacacggttcaagtggacacgtgggtagctgccgctgggaaaaatggcatgcgtcgagactggcatgtcctcgactgcaagtctggatgtacgatcttgagagctacaagtgtttgggtgatgatgaataagaacactagaaggctttcaaaaatgccggacgaagtaagggctgagataggcccgtatttcaacgcccgcgcagccataacagatgagcagagcgagaaactggctaagccagggagcactgctggtggcgatgctatgaagcagttcatgagaaaggggctcactcctaggtggtggggtgaccttgatgtcaaccagcacgtgaataacgtcaagtacatcggttggattcttgagagtgctccgatcgcgatcctggagaagcacgagctcgcaagcatgacgctggattacaggaaggagtgcggacgcgacagcgtgctgcagtcgctcaccaccgtcgcgggtgaatgcgtagacggcgacacagactccaccatccagtgcgaccacctgctccagctggaaacaggagccgatattgtgaaggcgcacacggagtggcgcccgaagcgggcgcatggtgaggggacccccatggggggtttcccggcggagagcgcgtgaatccatatttggcagggtgagggggacggctgtgaagcacagatcctatgtttatgggtacactaacgcccaactgagttgagtgtgttttggttggttggttggtcgcgacaagtatggcaggcacatg

SEQ ID NO: 16241 - DNA, 598 bp, Zea mays
  Clone ID: LIB3062-021-E10_FLI
gccggtcagcaggaggagcagcggcggcggcggagagaaggctgctaactggtggccggccgttcgccgcgagctccggcaccccgcagccggccggcacgcctccggtccggcggacggcagcagcagcatgtcttcggccgccccgctgctaggcggcgaggccggcggtggcgagcccgcgccgcggacgccgccgccgccgtcgtcgtgggtggggcgcgtggtggacgcggcggaggcgcgcgcgcagctggggttcgcggtgccgatggtgctgaccagcatggcctactacggcatcccgctggtgtcggtgatgttctcgggccagctcggcgacgtccacctcgccggcgccacgctcggcaactcctgggccaccgtcaccggctacgcgttcgtgaccggtctgagcggcgccctggagacgctgtgcgggcaggcgtacggcgcggggctgcaccgcatgctgggcctctacctgcagtcgtcgctcatcatgtcggccgccgcgtcggcgctcgtctccgcgctgtggtggttcacggagccggtgctcctgctcctgcggcaggagcccgaggcgtcccgcgcc

SEQ ID NO: 16242 - DNA, 808 bp, Zea mays
  Clone ID: LIB3062-021-F1_FLI
gttaattactcgtacttgagaaacaatgctcctgcaagagcagttggtgcacaaaggaaattggagttggattatcagctcccagagactaataaccataataaggtgacaaaggcagaagcgatgaaccagtcttggtccagaccagcagcagtaaggagcaatgcaggaaatcatcttgccaacgacctgaacccccgtgtacctgaccttgccgagaagctgtctcagttgtcaatgggccccaacagggtgtcgggtttgggttccgagaggtttgttagaacccatgagaacgctgccaagcgccccttgcccgtgggatccagggcgtggcatggtccagctgaccccttccggcgcccatacgagatgccaggtgatagaactctccttccaaggaatctcgttcgctgaggctgaagctcttcgcaagaaacatatccaacgctcgctctcttcggagctactcttccccggctatttacctcgcaacaataaataaacaaccaaacttcgtttccagcagcgggtgttgctcagcattgtctgttaccgtgcttgtgcgtgacgaggataagaggcgtccgggtttgtgcaccccccctcccccggggtcctcgagggctccagggctggttggttgcagcatggcccgatgtgtctccatgtgagatcgtttttttaattatgctgtgcgatgtgtgattggtaacactgcttcagttgttaccgctgcttgttcagtgggtttgtatgaactgtgacatggtccgctaaacgttattctaaatactggtatgcaaac

SEQ ID NO: 16243 - DNA, 329 bp, Zea mays
  Clone ID: LIB3062-021-F3_FLI
aaacagcaaacagacaggtgcccgcttacataccggtccatactgtcaggcactactctcctttcttgggcctcgacacgactaatactgtgctagtccagaacagatgagccatagccattacctgtgtgcctcccaggttcagttcatatgttgtatgtattaatgtatatcagaagagtcgtgcttagtagtagcaagaacctagtcctgatccagaccgtgaatctggatcatcttgtcctgtggttgtaccgtgcagaacagacagatgtcggctagtcgtttggttctgaagtaagaaactataagcatgcgtgattttggcc

SEQ ID NO: 16244 - DNA, 589 bp, Zea mays
  Clone ID: LIB3062-021-G5_FLI
gtgcaggggcaggggcagggctctagcgtcaccaagattggactatggggtggaccgggagggtcggcacaggacatcacggcagagcggccaccgcagcgtcttcacagcgtcaccgttcgtgctggcgttgccgtcgactccatcgagttcacctatactgacagcgctgggcagaggcgcgccgctgggcgttggggtggacttggcggcaatgttcgaacgatcgaccttggcaacgccgaggatgtcagggaagtctcgggaacatacggcgcatttgaaggtgccactacgctgacctcgctcaggctcgtcaccagcagcagaacctggggcccctggggggtcgagaacgggacgcgtttctccgtcacggcgcccatcggcagcagcatcgtgggattctatgcgcgggcgggaacaaggctcgtcgacgctatcggtgtttacttgcgtcagatttaatttgaataatagcaggggagctactgctagctacgtacctgctccatcctccattatcctttatttcaattcgctcatcatcgtcgtgtgtaaattaaataaataaagctcttgtgcccat

SEQ ID NO: 16245 - DNA, 325 bp, Zea mays
  Clone ID: LIB3062-021-G8_FLI
gggaaaatgggacgagttattggcagaaaggggtcaacgataatggctgtgaaagaatgttgcaaggttgaaatacatattggtggtgctaaggggcctccagacagggtgttcatcattggaccagagaaggaggtcaggaaagctgaggccatctttcgaggccgaatgctggagttctagagatgttaccctttgcgatacaggtttcaactgctttatattttgaacgtaaaaaggggaatatccaaaaggtgtatgcgggaccgtggatcccttgaccgtctgtgaatcatgaaaacaaaataaaggatttcaacttggc

SEQ ID NO: 16246 - DNA, 1428 bp, Zea mays
  Clone ID: LIB3062-021-H2_FLI
cgacctgctcgccaagaccggggtctccccgcgggacatcgacatcctggtggtgaactgcagcctgttcgcgccgacgccgtccttcgcggacatggtcacgcaccggtacaggctccgcggggacgtgcgcaacgtgcacctcgccgggatggggtgcagcgcggggctcgtctccgtggagctggcccggaacctgctgcaggtggcgccgcggggcacgcgcgctctggtggtgtccacggagaccatcacccccaattactacatgggcgaggagcgcgcgatgctgctgcccaactgcctgttccgcatgggcggcgcggcggcgctgctgtccaccgacggcgccggcgcgcggttccgcctggcgcgcgtggtgcgcacgctgcgcggcgcgtcggacggcgcgtaccgctgcgtgtaccaggaggaggacgagcgcggcaacgtgggcatcaacctgtccaaggacctgatgagcatcgcgggcgacgcgctgaaggcgaacatcacggcgatggggcccctggtgctgccggcgtcggagcagctgctgttcgcgctgtccttcatcgcgcgcaaggtgctgaacaaccggatcaggccctacatcccggacttccgcacggcgttcgagcacttctgcatccacgcgggcgggcgcgccgtgatcgacgagctccagcgcagcctgacgctgtcggacgagcaggtggaggcgtcgcggatgacgctgcaccggttcggcaacacctccagcagctccctctggtacgagctcgcctacgtcgaggccaagggccgcatgcgcaggggagaccgcgtctggatgatcggcttcggctccggtttcaagtgcaacagcgccgcctgggagtgcatccgccccgccgccaacgccgacgggccgtgggccaactgcatccaccggtaccccgtgcacattcccgacgtgctcaagcactgagcccggcgccagctccagttccgtgccgtgccttgcctttcccttttcctcctcgcccggttgccattgcacctgctgctacatttggtttgtggacatcaaaacgaaccgctggaacagcgattggccgtggtcgtgaactaggttggtggaatatgtgatggagagtgacagagtacttgtcgtgtcgtatcaaggcggcggggtggtcgtcataaaggaggcgaggtcgggccaggctgccgtacatgggcgcccggggaacggacgtgtgttgtgcttgtccggggcgttgtattatctaccattttcctatttcttattacaattcattcctgcagtataccatgaaaagagatatgacatgagctagagctactagtagacgacaagacgagcaaaagctttgatgtatgtgtgcacctactctttatacaatcaagtgttctcatttaagt

SEQ ID NO: 16247 - DNA, 1094 bp, Zea mays
  Clone ID: LIB3062-022-A7_FLI
ctctgctagctagctcttgtcttgtcactgagtgagcatgcagcagggagctgtctagctagcctagtacaggtggagtggagtgtgtggtggagtgcaaaccaaatcaaacgaagaaaaagaagcagcagcagaagaagaagacacccaccaccagcagcaagcagcaatcagcaaccagcataacgaaatgtcgatcaagtactgcgaccagcacaaggactgcgagcggcagcgtctgtaccgtcgcttctgcgccgccctggtgggcgtcatcgtgctcgtcctcctcatcgtgctcatcgtctggctcgtcctccgccccaccaagcctcgcttcttcctcaacgacgtgagcatcgtgtgcatcaacgtcagctccgcctcctacctcaccgtcaccatgcaggccacgctggcgtcgcgcaacaccaacgaccgcgtcggcatctactacgaccgcgccgacgtgtacgccgagtaccgggcgatgcagatcacggtgcccaccgcgctgccgcccttcttccagccgcccaacgacgccgccgtctgggcgcccttcctctccgcctccaacgtcccgctgccgccctacctcgccaccgcgctcacacaggacgagacggcggggtacctgctcgtcaccatccgcgtcgacggctggatccgctggaaggccggggccttcatcaccagccactaccacctcagggtgcgctgccccgcgctgctcaccgtcaacgacggacaaggaagctacggctccaacgccggtggggggctcggctacttcaagttccagcgcgcagcaccctgcatcgtagacgtctgagatcgatctcgattcaaaaatcacattaaagaagctcggccgggatgaattgaacaagaagctcttttctttttcgtaataagatatatacatatgaatcaaataatagcttcaactctttggtttaattttgttgctttttctattttattttgtttggatgggaaaaaacgtagactatatatgtagcaattaatatctggaggatatgcatctagatggatggatatatgaatgaaagctcagctaactttgagtt

SEQ ID NO: 16248 - DNA, 1205 bp, Zea mays
  Clone ID: LIB3062-022-A8_FLI
ctcatcagtcgagcctccgtgcacgacgcattcgccttgatctccgatccctaccttcattaggagagagagaggagaggagaggagaggaggggcacggagatggagagagcggcccccgtgaggagctcccacacctcgacggctggcctgctcgcgtggcctcaccccgatggcgccgggtcgctgccagcacgccggcctaaccagccgacggaggaattcaggaatgtggtgtttggggggcagctcacggagggggccgacggcctcaacaagacgaagaggaagacgggctcctcgcccaaggggaaggagacaacagggaccgggatatccaaggccgagagcgccgccgccgccgtcgcaactgcctcccgtgatcgtcaggctagccagatcaccttttcccaggacgggaccgttcctaccaggaaggcaacttcagtggctggggtggcaaggcagcgtgagcttagccataccgtcgagagtgagggggacagtaagatgaagaggcaggtgtccagtacgaaatccaaggagctcagtggtcacgacatctttgccgatcacgaagatcccaagcccaacaggtcaaggagatcagactatggcagctctgctgctcagtcaccagtgaaaaatgcaaacgtgagctccttctcgtttggagaggccgacattgacagcacagtgaaaacagcaaagaagaaagggtccagcaacttgtctactgatctgaacggcaagaccatgcccaagaaggattcagcgtctgcagagaaacagcctccgaaccgtgcgaggccgaaaggaatgagtgggagcagcaattttgcagacgggaaggcctcaacctcaacaaccggagatcatgaaggccgtcgtacccggcagcctcctggcggcgacagcagcattttgctgggctagcgtgcatatgaatcttgctgccctatgccgccgccgcacaggtggttggtccgtcagtgtgtggtcttgttttcgtggtcaggccatgtgtcccatctccggtccttcagatgatctggttcgcatctgtcttgtgtatggttttgatatgtgttggttgtgacatgccccatggaacaaccctatcgctatgctgttttgttgtgtacaatggatgacgtgtgctgccgttttgttgtgtgtacaatggatatgtctggttgttgaat

SEQ ID NO: 16249 - DNA, 1208 bp, Zea mays
  Clone ID: LIB3062-022-B4_FLI
ccactaacactagttatcacatccaccataacgaccatggctaccacctcagctttgctagctcttgtcttgttagccagcctccttgcaggcacggtgttcagtgatgatatcgtacccatccatatacccttgttggatcggttccaagcctggcaggccgaatacaaccgcacatatgcgaccccagaggaattccagcaacgcttcatggtctatagcgagaatgtcaagttcatcgagaccatgaaccagcctgggagctcatatgagctcggtgagaaccaattcgctgacctcaccgaggaggagttcaaggacacgtatcttatgaagcttgacaacgtggcctcgtcccctgaggccatggcactgaccgtcgataccatgaatagagcaggcacatctggcggcagcaacaccaacgaggctcccaatagtgtggactggaggaccaagggagcagtgacgccggtcaagagccagcaacattgtggctcttgctgggcgtttgccgcagtggcgtctatcgaaggtgtgcacaagataaagacaggtcgtctcgtgtcactgtcggagcaagagattgtggattgcgaccgtggggggaataaccatggctgccatggtggtcactctagttctgccatggagtgggtcacccgcaacggcggcctgaccaccgagtcggactacccatatgtgggtaggcagggacaatgcatgagcgacaagcttggtcatcatgcggccaagatccgtggccggcaggcagtgcagggcaagaacgagggcgcgctacagcatgcagtggcggggcggccggtggccgtaagcatcaatgcaagcagggccttccagttctacaagcgcgggattttctcaggcccctgcaacaccacccggaaccacgccgtcacggtggtcgggtatggagccaacgctagtggccacaagtactggattgtcaagaactcatggggtgagaggtggggagagaagggctacgtgcgaatgcagaggggtgttagggctagggagggcgtgtgcggcatcgccatagcgcccttctatgcggtgatgtgagagtaccgtctctccccatactagttaccagttgcattctgattctaaacaagtatgggtgtcatcttggagaagaatgcatggaattaaataaactacagctcaccgagggatggtacatg

SEQ ID NO: 16250 - DNA, 548 bp, Zea mays
  Clone ID: LIB3062-022-B6_FLI
caaggataactgcccggtacggacattcagaggacacaaaaatgaaaagaactttgttggcttgtctgtgaacaatgaatatattgcttgtggaagtgagacaaatgaggtttttgtttatcacaaggctatctcgaaaccggcagcaagccatagatttgtatcttctgacccggatgatgccgatgatgatcctggttcttatttcattagtgctgtctgctggaagagtgatagccctacgatgttaactgctaacagtcaggggaccataaaagttcttgtacttgctccttgatgttatggagggcgttcaagaggttcacagtactgtccagttgtttcctttcgtgtcattatattcccccaaaattgggaacgggggcataattgatctccggttagggaatgaagttttgcagatggtcagctgacgtagggttttgaggtatcagaatgtgcatagtcatgtttatgttgtataggtgtaattgtgtaaagcagccaagttattggttacaagtgtaacacgagaaatacacattaac

SEQ ID NO: 16251 - DNA, 793 bp, Zea mays
  Clone ID: LIB3062-022-C3_FLI
gggttaggaaggcggcggccagcggcgagaggaggaggggtgggtcagccatgacggggaaggcgaagccgaagaagcacacggcgaaggagatcgccgcgaagatcgacgcggcgacgacgaaccggggcggcggcaaggccgggctggcggaccggctggggcaggacaagggcgggcatgcgaagctggcgtgcccgctctgccgcaccccggcgcccgacatcaagtccatgcagatccaccacgaggcgcgccaccccaagctccccttcgagccggagaagctcctcaacctgcactcctccgcccccgctgctgctgttgccgccgccgccgccgccgccgccgctgccgaggccaccacctccaagcccaagcccggcgtccgcggcagcctcaagaagtaagcttgctggcttggttggctcgcccgcctgcatggggcacaattcccttcggtttcaatcccatccgccgacccgatctataatcaatcaaaccgccgccctccggcctggcggctgccgcagtcggcctgcggtgtactgttagtctgctgctgatttccgttgttatactgctggtacatgtgtcgtgtgatagatgtgtcaactatatatcaatctcgtcgccggcagctctagcatgtttgagtatgtgttgctgctctgtggtgccggcgacgatgactgctagtactgttattgtgatcgggtctccttgaacaatggcataaatatgttgcttgtttactttttcctctaatggcaagtaaagttcatgatttgcg

SEQ ID NO: 16252 - DNA, 575 bp, Zea mays
  Clone ID: LIB3062-022-D10_FLI
ccaagggaaccaagattcatcgcaggagttccagcctagaagaataagcttgcttgccccgttttcttccctcggatggcgagacaagaacaagggcaagcagaacggctctgatgagtcaacaaacggtaagctcaataatagcaccgatcaaggggttgaaacacccaaaaaggacgactcgccaaaagagggtgaacagattgtccgaacaccggaaagagacaatgaactgagactagggacacccaagatggatagtgaggtaccaagtgtggaaatggcggcaaacagtacgaatgggctggaggaccagttggaggagataaaattggattgatatcctttggctggtctctaagtcgcaacataaggtgccattaaattatgtattggtgtatccattttccacctctattcttttaggtttatagattcttgtataacttgaggagagagaatgaataaactatgtttgccctcttatagttctgttgatcgcctgtaagctatcatgagtacacaagaaaaagacgtaccaaatagaagattaccacgaaagcaatttttggaac

SEQ ID NO: 16253 - DNA, 1401 bp, Zea mays
  Clone ID: LIB3062-022-D2_FLI
agtgtatttacgaggataaagagtttacagagttcaaagcttttgatcctctgtttcctaacaagccacaaaaggaacactgcgaaatgcatgccccttgggaagaaaccaaaaaatctcagccatggtggcaagtagctgatgtcgatggtttggcttcccttgtcgctgaaagagcaatggaaaacattgtcaacaatgatctgccaagacccactcagacagtccgggttcatggacctcaagtgaagggccctgaaaacaaggatgattatgggatgtctgttgtttctgggggccaagagccagatcctgtacatgacactatggagtgcagctacagtgtttcaagcaccaccaatgacatgaattcttctgacgggggacgttggcagcaccacgaaagaaataatgtgtccggggatgcacggggttcttatagttccaccaacagtacaccgggcagcaagccaacatatcaggatgcttctgagagagccaagctgctagatgctctccggcactcgcaaacacgtgctagggaagccgagatagctgccaagaaagcgtatgacgagaaggaccatgtcatcaagctactgttccgtcaagcctcacacctcttcgcatgcaagcagtggttgaaaatgctgcagctggaaaacatatgccttcagctcaggttcaaagaacaccagatagcaaccatgttcccggaccttccatggatgttggtgaaggaaaaggtagcaccgtctcaagagcacaatgaaggggctaggaagaaaggcaaaaggccaaacaggaaaggtggcctctgcgatgccgttgcatttgctgttggtgttggtatcgttggtgctggattgcttcttggatggactcttgggtggctactgccctagctggaagttccatcgacttccatgaccgtaaaggtgacaggataaatgcctcctgtgcacactagattgaatggcaatacattgcatggcaataggtaagttccaagtgtgtgcttcatggagagagagatggggcagctttttggtattcttccatgatactctgttgatttggtgatgatagcttgatgccttatgttggttcatgcatatataggaaggatctggtgtacgtactgccagaaactggatacctaggttggtagtgtgggtgtggatgcgatggttgtctgtgtgctgtacataggggtcagtggtggtctggtggaaagatgaaatcagccgacttcaacaacacatgtgctagtactgtaaatctgtagcttttatttgcttaatgtagcccgaattgtcctaatccgcttgctgtaatgtgtggaacgtatttgcatgtcttgtttacttctggtggatatggacccagtatctatttatc

SEQ ID NO: 16254 - DNA, 859 bp, Zea mays
  Clone ID: LIB3062-022-D4_FLI
ggttagaatggatcctcgaaacaaagaagttaatctcgatagtttaatgtatggtacaattggtggactaacagaacaagaactaaaaaaacaagaagcagaatacatttaccgttaccgttacaatggtggtggggcaactcaagtttggctaagttctggaagatttgttgtaatagatctttcagcgggcccttgtacatatgggaaaatagaaactgaagaaggcagtgtcagctataggtcaatgccacggctgtcacaaataatcttcccaagaggacttgctgccccaagtgctagttcaacgcaagatattttcattgggcagctcggaggtgcaattgcaactaccattgagcatgtgatagctcctgatataagatttgaaactgttgacatggcagtgaggttgcttgtacctattattgtgctacagaaccacaataggtacaacattcttcaagaaggccataactatagtatagatgttcaagctatagaaagggaggttaaaaagatggtccaccctggtcaggaggtaataataatttctggttcgcatgcgctgcaccagcatgaaaagttagctgttgcagtttccaaagcaacacgtagccattctcttcatgaaacaaagagtgatggccggtttcatgtccgtaccaaaacttacttggatggagcaatacttaaagaggaaatggagcggtctgctgatgtgctgtctgctggtctattagaagttgcaaatccttctctctcaagtagattcttcctaaagcagcattggactgatggagaagatgatgtaaaagactctattaagcacaggcccttgtgggaatcttacatgccc

SEQ ID NO: 16255 - DNA, 653 bp, Zea mays
  Clone ID: LIB3062-022-E4_FLI
cgccgtcaccgcgcacctctggcgttgcatgtgcgtcgcgcgcgggctcgccccgggctcggacacgcggctccgcgtgccggccaacgtccgccaccgcctgcgcccgccgctcccgcggagctacttcggcaacgccatcgtgcgcgacctcgtgaccacccgggtggaggacgtcctggaacgcccgctcgggttcgtggcgcaggcgatcaaggacgcggtggaccgcgtcaatgacgcctacgtgcgctccgtggtcgactacctggaggtggagtcggagaagggcagccaggcggcgcgcgggcagctcatgccggagtccgacctgtgggtggtcagctggctcgggatgcccatgtacgacgccgacttcgggtggggcacgccgcggttcgtcgcgccggcgcagatgttcggcagcggcacggcctacgtcacgcagcgcgccaacagggacgacggcgtcgccgtgctcttcgggctggagcccgagtatctgcagtgcttcgaaaaggtgttctatggagagtgagtcgtgagattactagtgtcatccgcgtttcgtcgtgagcaccgagtgcgattactgtagcttggaacctgatgctgtggatgtgggctttgcaaattactccggtttctgtgtt

SEQ ID NO: 16256 - DNA, 880 bp, Zea mays
  Clone ID: LIB3062-022-E9_FLI
gcagcaggggagactgggagatagagagaggagagggagggtttcctcaaagagaacctgaacccaaacccaagcagagaacactagcgttccctcaccagggcgggcgtccatcccagcagccatggcgatggcgtacaagatggcgacggaggggatgaacgtgaaggaggagtgccagcgctggttcatggagatgaagtggaagaaggtgcaccgcttcgtggtgtacaagatcgacgagcggtcgcgcgccgtgctggtggacaaggtgggcggccccggggaagggtacaacgagctcgtggccgcgctgcccggcgacgactgccgctacgccgtcttcgacttcgacttcgtcactgttgacaactgccagaagagcaagatcttcttcatcgcctggtcaccggcggcgtcgaggatcagggccaagatcctgtacgcgacatcgaagcaaggcctgcggcggctgctggacggggtccactacgaggtgcaggccaccgacccctccgagatgggcttcgacgtcatcagaggccgcgcgcaatgaggcccccgctgcgctctgctcctatttacgtacttacctgtgcgtgggcgtgttctcctactactcactgctcagtagtcagtagtcatctgcgttcgtgtgtgtgtgtgtgtgatcggccggatgctaattggcgttggtgtgctcccgtagcgatcgatgctgccaatctgacgaggcttcgcgtgtgtttgctttgctattttcggttctcgggagagatggtgcaggcgtggtgtgttgatgttgatgggtggagtagaagctcaggggagtggcagcggactaatgaaacgtccacctctgcgacgtagaattccactg

SEQ ID NO: 16257 - DNA, 406 bp, Zea mays
  Clone ID: LIB3062-022-F4_FLI
gacgtggacaggtaccctcccaaggcgtacgtctgatgggccagggccacgtcatgcggcataacaattgtatgatctgatacgagttccgtcacgacgaaggaagaagggcgtgtgaggcagaaaattatacttgtatgtttttttcatttgttttttcttttgcttcgttttcttttctttttcccagtagattgccgtgagtagacagtgctggcttttggaattcagacgtgtatgtggcgtaaaatgaattccaagagctagcagtgccattctttatcttctcagcctaccctatttgttgtctagtccttttgtcttctctttggcgttctagacgcccgggaagtagaatggacagacgaacaccaccagtgtgcagttcacatgactagagagaact

SEQ ID NO: 16258 - DNA, 646 bp, Zea mays
  Clone ID: LIB3062-022-G12_FLI
taatgcttttcctgttcaacattatttacactagagtctgtagcaacagtagctacatccataggtgtaccacagccttgctccagactctagtgtaaataatgcttttcctgttcaacatttcagtccgaggcatacacaagccatgccagactttgctcgtgtatacaacttcctgggaagcatatttgatccagagacaaatgggcatttgcagaagttgaaggaaatggatcccattgatgctgaaacggtactgttgctgatgaaaaatctgtcaatcaacctaactagtccaaactttgaggagcataggaggttgctctcttcggatgcctcaagcatggatcaaaagtcgggctcttcccgggttcatctcccgttcatgataacgagcaagtgagagaagcagctggctggcctgaaggcaagaaggtcgtttggagtcgtcacactcaggagcaaggcgatgcgtatgtacatatatcttaataagcagctttaggatagcttggtttgctcgaccgacatgttgcaagtttatgcgcctttttctttattctccgcccctccagttttgcccgttgtagtatggaacttataacatgcgtgttttatgccgcatcttacaaaatatttttgtccc

SEQ ID NO: 16259 - DNA, 564 bp, Zea mays
  Clone ID: LIB3062-023-A5_FLI
ccgacgacatcgtggacttggctcacggcaagcggctgtgggagctagccaaggacaagtatgagccgctgtggatcaaaggcggtgggcactgcaacctggagacgtacccggagtacatcaggcacatgcgcaagttcataagcgccatggagaagctggccaaggacagcagcaaggcggcccaggcgccgccgccgtcgagcatggccgccgaagaaagacacaccaagtgcttgagattcgggaagagatgagatgccggcgacctggacctgggaaggaaacgcggtgcagcagcaaccctagttcgtgtatcatccgtgtgagattgagttcagacttcagagtagagagtagacagagtggagtgacagacagacctgtggctgctgtagtatgctgtacgtgctggagttcaggactagagagatgtctttgttttcctaggggcgccacggattagcctgttcgcagctgaattttttcttgttttttttttctgttttcgctatctgtattgtagtcactgtgcaaaaaaaatcgttttgattgattggctgc

SEQ ID NO: 16260 - DNA, 766 bp, Zea mays
  Clone ID: LIB3062-023-B9_FLI
cgtccttctcttcccgacttcctcgcgttcatttcttcaccccacccgccccccaacgccaaatctaacagcaaaggtccggaaccttctagccgcacctagggtttggattggcgccgagcatggcgtacgtcgaccacgccttctccatctccgacgaggacgacctcgtcggcggcgccatggggggcccgcgcggggcgcccgtgaaggagatcgccttcgccgccgcgctgctcgccttcggggcgctcggtaccatcggtggcctgctaatggccgtcaaccgcgtcggaggggaccgcgcgcacggaattttcttcatgatgttgggcattgtaatgttcatccctgggttctactacacaaggatcgcctactatgcttacaaaggttacaagggcttctctttttcgaacatcccaccgatctgaaggagtgtgctgctgcctgctggttatgaagtggtgtcgctggtttaagagtttgtcgactctgtcgaatggctctgtagacacccttgttctacatctgtctgtggccattctctttgaacactctagaatgaactggtggatgtgtacagataaatgcagccatagttgtgctcctccatcgcggtttggccgattggaaggttgtttgttgtgctcgtgtgaccatgttcaactaatacgcatcgctacttgtgcattactgtcatttttgtcagggaccttaaacctttctatgataataagatctcgtcgttccaattgtgaagaat

SEQ ID NO: 16261 - DNA, 848 bp, Zea mays
  Clone ID: LIB3062-023-E10_FLI
atcgcagctccgctgccctgctctccacctcctccagacctccaccatggacgagccgccgctccatccaccgcccctcccccatgccctcaccaccgccgagtaacacctcctcgccgccgcccttgccttgacggattcgaataattcgtggaagagaagttcttattcccttgccttcagccgtactgcggcggcggaatctctctctggacttctccccgatgtccgtggcggccgagcaggaggtggcgccggccgtcgtggccgtggccgtggccgaggcggaggagtgggaggtgtgcgcctgctgcgggctcagggaggagtgcacgccggcatacgcggccggcgtgcgcgcgcggtacggcgggcgctggctgtgcgggctctgcggcgacgccgtgggcgaggaggtcgccgccgggggcggctcggtgctggagctcgaggcagcgatcgcggggcacgccgccttctgccacgcgctcggcgggcgccggacgccggccacggccgagcggctcatcgcagcggtgcggcggctgctccgcggcgccgacgcgggcggcaaggaggaaaaagccgtggtggtggtggagttccaggaagcctcttgaccgcctgcctgaatttgaatgggacggatcgaagatttgttcttgcaggcggcgctagctagctactctgctagtcctcttttcgtaatttgcattttgattagatctcactatttgtatgcttaaattcggacatgaacgctaaaatttctccagcccttgtacacgccctaggagatgtggaacatcagaaattttggagaaagagggttgtgagagatttgaagt

SEQ ID NO: 16262 - DNA, 958 bp, Zea mays
  Clone ID: LIB3062-023-E2_FLI
cgggccacctcgttccccatccgctcaggccaatcaacagaagtgacgcgagcacgagcacacatcccctcccttcttcggttattcctcgttgcgtgccctcgccgcagacctctgccatggcggaccagctcaccgacgagcagatcgcggagttcaaggaggccttcagcctcttcgataaggatggcgacggctgcatcactaccaaggagcttggaacggtgatgcgctcccttggccagaaccctaccgaggcagagctgcaggacatgatcaacgaggtcgatgcggatggcaatgggaccatcgacttcccggagttcctgaacctgatggcgaggaagatgaaggacacggactcagaggaggagctcaaggaggccttccgcgtcttcgacaaggaccagaacggtttcatctcggctgccgagctccgccatgtcatgaccaaccttggcgagaagctgaccgacgaggaggtcgacgagatgatccgtgaggccgacgtcgacggcgacggccagatcaactacgaggagttcgtcaaggttatgatggccaagtgaggagcggtccccgtgaaataagtatctatggattgaagcgaattatcaggcacacaagctgtactttgtcatgtccctttgagtacgcatcagtgtcatgcaggtggtaatgtcttgtagtggtccgtttaggcggtgtagtcatgggaacgcgacatcagatacctggtttcttttgattgtgatgttatcttgcattattgcacctgtaggatttgttgaagctcatattttccagggttttggatcttttgtgctagtcttaagtctttgtgtatgcaggcgtggagctaggattatgatataaggggtcaactaattcatcaatactatatgatgttatcaagcttaagtacttataatatgtaataagaattctagttctttat

SEQ ID NO: 16263 - DNA, 625 bp, Zea mays
  Clone ID: LIB3062-023-E4_FLI
gaagcgagcaaatactgttgagctgatgaagaagatgccccaagtgcgaccgcatctccgccgagaagcgagcaaatactgttgagctgatgaagaagatgccccagatgctgctcgactacaagaaacgtaggtgggagaagaagatgaaagtggaggagagcggcaagaattgataccacgcggctcgtccagggtgcttctcttcctaaataaggtccaaactttatccaggagttttgcaggacggctagattctgacgcgtcattcccttggtggattccttctctcctgtgatgcgactttggacgcactatcctgattgtgatgctttccaacacttgtgccactggatcgtgatttcagtgagccccaacttctgcagcactagtattttgttgagacaaatcagctataagcatgccatctgcccaataaacttgttcatcatgtaagatcaatgctgttagtttttgtccgagtttgtgcttgcgtttgcttatacttacctgcagaagaatggttgtctgaaaagtttgtccttctgtaataagtgttgaatgttggaaatcctaaccctctcggggttgggagattaatatatagacttagttggatgggccc

SEQ ID NO: 16264 - DNA, 624 bp, Zea mays
  Clone ID: LIB3062-023-G10_FLI
gggcgccgttgcgcaatggcgcactttgattggaccaactgatgcaaaaaaggccaaaacctctcatccaaacagcattagagcaatgtgtgggctggactctgagaaaaattgcgtgcatggttcggattcaccagaatctgcagacagagagatctcatttttcttcggagaagctgaatccgtaactgtggaacatgatgagctatagacgccacactggtatcagtggcaatattggccggctcattggacaacgtgggagagtatcgactctgctgcttctagtgttcgtcatgcttcttttatgaactaaacccgaagacgctgcaatttgaggaggggatgtcagttgtcacagaggagagagtcatttttagggctagtttggaaatctcatttttttcaagagatttttattttcctaaaggaaattagtttatttttctttgagaaaatagaattcccttgggaaattagagtttctaaacgagcccttaatttcgtaaaattatgtccggagtccatatttcctatcggagcaccatggtccttgaacttgcaaaactatatggtgcaaaccaaatattgttttttcatccgtgttgacgtcttgtgtggcat

SEQ ID NO: 16265 - DNA, 1422 bp, Zea mays
  Clone ID: LIB3062-024-B9_FLI
caaaaaaaaaagaagccgttggagcgcctccctctcaaacggcactcttccccactggcccactcctccgctccctcccgcatacaaatcgtccgccaacaatcccccaaaccctactccaccacgcgatcaccgaccgacgcctctccgacgagcaactcaaccccccaccgcgcacgcgagagccggatccccacgatggcgacgatccagcaccaggcgaaaccggcggtggcggcggcgccgagcacgactactggcggtgggcagcgcgcgatggacctctacgagaagctggagaaggtcggagaggggacctacgggaaggtgtacagggcgcgggagaaggcgacggggcggatcgtggcgctgaagaagacgcggctccccgaggacgacgagggcgtgccccccaccgcgatgcgggaggtctccttgctgcggatgctgtcgcaggacccgcacgtggtgcgcctgctggacctcaagcagggcgtgaataaggaggggcagaccatcctctacctggtcttcgagtacatggacaccgacctcaagaagttcatccggggacaccgcagcaacaacgagaagatccccgcggccaccgtcaagatcctgatgtaccagctctgcaagggcgtggccttcgtccacggccgcggggtgctgcaccgggacctcaagccgcacaacctcctcatggaccgcaagaccatggcgctcaagatcgccgacctcggcctcagccgcgccatcaccgtcccggtgaagaagtacacccacgagatacttaccctgtggtacagggcccccgagattctgcttggagccacgcactactccaccccggttgacatatggtccgttggctgcattttcgccgagctggtcactaaccagccacttttccctggcgactcggagctgcagcagctgctccacatcttcaagttgcttggcaccccaaacgaacaggtgtggccaggcgtcggcaagctgcccaactggcacgagtacccccagtggaagccgacgaagctgtctgctcttgtgcccggcctcgacgctgatggctacgatcttcttgagaaattgctggaatacgagccggcgaagcggatccccgcgaagaaggccctggagcacccctacttcaaagatgtgaggaagggagatgcgcactgactgaagcgatccaccaagggcccgccctcacgagttgacatatatatacgtgtgtgtcgtcgtgtcgagcatgattgccctgaagcaattcttttgctaccagggcacagcctactttctgttctctagttgatgttcgtgtcgtgtgtgctgtgaaccgttcgctttggctggtgatggatggaaatgttatgtttctaggattactgatgaaactttgatgtctacctggtc

SEQ ID NO: 16266 - DNA, 1271 bp, Zea mays
  Clone ID: LIB3062-024-C5_FLI
gagcgtgctcgcgaggccctgcttcctgctgcgatggggggcgagacgcacctgagcgtgcaggagctggcggcgtcgctgggcgcgctaccgccggagttcgtgcggtctgagcaggaccagccgggcgcgaccacgtaccgcggggccgccgtgccggacgcgccggtgatcgacatgtcggagcccgggttcggcgcgcgcatggccgcagccgccagggagtgggggctgttccaggtggtgaaccacggcgtgccctcagcggcggtggcggagctccagcgcgtcgggcgggccttcttcgcgcttccgacggaggagaaggagcgctacgccatggacccggcgtccggcaagatcgagggctacggcaccaagctgcagagggacctcgagggcaagaagacgtggaacgacttcttcttccacgtcgtcgcgccgccggagaaggtggaccacgccgtctggccccggagcctcgccgggtacagggaggccaacgaggagtactgccgccacatgcagcgcctgacgcgcgagctgttcgagcacctctcgctggggctggggctccacgggggcgccatggcggaggcgttcggcggagacggcctggtgttcctgcagaagatcaacttctacccgccgtgcccgcagccggagctcacgctcggcgtcgcgccgcacaccgacatgagcacgctcaccgtcctcgtgcccaacgaggtgcaggggctccaggtcttcaaagatggtcaatggtacgaggccaagtacgtgcccgacgcactcatcgtccatatcggcgatcagatcgagattttcagcaacggggcatacaaggcggtgctgcaccgtacgacggtgaacaaggagaagacgcggatgtcatggccgatgttcgtggagccgccgggggagctcgtcgtcgggccgcaccccaagctggtcacggaggagagcccggccaagtacaaggccaagaagtacaaggactaccagcactgcaagatcaacaagctccccatgtaattatgtacctcgggttctactgtcgtgtgcacccgcttctgtaatttcagtctaccatatttaagtcacataaccgttattccagtcgcatgcatggccacagaattggcttgtgggctctttcgtctggtttgggccattgcgggctgcttatctactctctttcccgaccgtgttatttgttgttgttgtaagggcactaatacatgttaaagaataacgggtcttttgtccgt

SEQ ID NO: 16267 - DNA, 888 bp, Zea mays
  Clone ID: LIB3062-024-F6_FLI
gctggaagctccagttgttgttgttacaggtgcatctagagggattggtaaggcaactgctctagcccttggaaaagcaggatgcaaggttctggtaaactatgcccggtcctcgaaagaggctgaagaggtctccaaagagattgaagcatctggtggtgaggctatcaccttcggaggagatgtttcaaaagaagctgatgtagagtctatgatgaaagcagctctagataaatggggaacaatagatgtgctggtaaataatgcagggattacacgagacacattgttgatgaggatgaagaaatctcagtggcaagacgtaattgatctgaatcttactggtgtcttcctttgtacacaggctgcaacaaaagtaatgatgaaaaagagaaagggaaaaattatcaacattgcatctgtagttggtcttactggcaatgttggccaagctaattatagcgcagccaaggctggagtgattggtttcacaaaaacagttgccagggagtatgcaagcagaaatatcaatgtgaatgctattgcaccagggttcattgcatctgatatgactgccgaacttggagaagagcttgagaagaaaatcttgtcaaccattccgttagggagatatggccaaccagaggaagttgcagggttggtcgagttcctggcccttaaccccgcagctagctatatgactggacaggtgcttacaattgacggagggatggtaatgtaagatttgagttagcttgatgcacttctacttttgctgagcatttaatgttgaacacccttgttgtgcacgggcgattttggacaacaaattagtgttgtctctttctttgtaatactctctggtaataaatctagcatgtggaatgg

SEQ ID NO: 16268 - DNA, 761 bp, Zea mays
  Clone ID: LIB3062-024-G11_FLI
cgggggccaaggtggagaacaacaggttctgcgtctccgtccacttcagacgcgtcgacgaaaagatgtggggcgagctgtcagagtcggtgaggggcgtgctgcgggggtacccgaggctgcggctgacgcacgggcggatggtgctggaggtgcggcccaccatcaagtgggacaagggcaaggccctggagttcctgctcgagtcgctcggcttcgcggactgcagcagcgtgctgcccgtgtacatcggcgacgaccgcaccgacgaggacgccttcaaggtcctgcggcgccgcggccaggaccagggcgtcggcatcctcgtgtccaagcaccccaaggagacgagcgcctcctactcgctccaagggcccgccgaggtgatggagttcttgctgcggctcgtcgagtggaagcgcctctccagggcaaggctcaggctgcaatgagatgagatggcgcaactgccgtacgtggacacgtacgacgatgcaacggattaagctaactgccaagtgccagttaatcaagttaagatcctgctacgtggaatcctgaactgcagagaaccgacgacctgacactgtctctctactgtccccgtagtgatcaacatgcgtgtatacatcgttgtctcatacagtactagttagttagtattaagcatgcctgttacatatatatagcttcatgtgaatgtgttgtactgatgtgtgatcttaaaagtatgctgatgaacggtgtgatattttttaatc

SEQ ID NO: 16269 - DNA, 700 bp, Zea mays
  Clone ID: LIB3062-025-A8_FLI
tagttttagatcgcgagtaccaccctccgacacccacatatgtttctccaactcccatctatcacccgcccgctgagacagaaatgaagtatgacaagaagcacttctttgatcactttcacaaggaccatgactaccaccacttctttgaccacttccacaagaagcctgtgccacccaagccaaaaccagagccagagccaaagccaaagccacaacctaagccagagtacaagccccccatgcccacatacgggtctccaactcctatctaccatcctccagccaagaaagaagtggcatttgacaagaagcacttccttgatcacttccacaaagaccatgactaccaccacttctttgaccacttccacaagaagcctgtgccaccaaagcctaagccggagcccaagccagagcccaaaccacaacctgagcctgagtaccacccacctacaccgacctatggatcaccgactcccatctaccaccctccggccaagcattgatcgatggagttgaatggtggtcagtgatcgacgttgctagctaagagttgcatgtgtggtctagccaacgtggtttgcagtcctgcttttttgtttctacagaataaattatagctttatttgggtatgtatacttatttgtgtatcggttagtatcatataaatgtatgatttgagtgtgcgttgttttt

SEQ ID NO: 16270 - DNA, 1106 bp, Zea mays
  Clone ID: LIB3062-025-A9_FLI
ctgccacatacgagccaaaaaggaacagtgaaataagggtttttgagagttcagatgagatttcaacggatcttgctgagtatatctcacaagtttcagaaatttctgtcaaagaaaggggatactttgccatcgccttatctggaggtcccctagtcagttttttggggaaactttgtgaagctccatacaacaagacactggattggtccaaatggtacatcttctggtctgatgaacgtgctgtggcaaaaaaaccatgcagagagtaactataggttaacaaaagaaggattcctcgccaaggtaccgattctgaatggccatgtctactccataaatgacaatgccacagtggaggatgcagcaacagactatgaattcatgatcaggcagctggttaaggtccgcacaataggagtctcagagagaaacgactgtcccaagttcgatctcatccttctcaccatgggctccgatgggcatgtggcctcgcttttcccgaaccaccctgccatggagctgaaagacgactgggtcacctacatcaccgactctccgcagcctcctcctgagaggatcaccttcactctcccagtgatcaactcagcatccaacatagcaatagtgtccactggtgatgacaaagcaaaggctgttcacatagcagtttctgacatggccgaaggtcttgatgctcctacatcactgcctgctagaatggtccagccaacggacgggaagctggtatggtttctggacaaggcggcggcatcattccttgactccaagaacgacgacgacgacgcttgctacgatcgtcacgagtgactaactctgaggatcgttggtcgttttgaagcgaatgaacggaggtgtgtgtaagtaggtggtggcgtatgatggaagacgcgctgttccccttttagctcgatgcatgggttaattttgttctgagggtttttagctccggaaatctgaaattgcccttggtccttttgcagtgaggtgatttaaaagcgatgaaatgtgtatgcgatgttgagtcgtcaaagaacaccggaatttaactgtggtcgtataatattatgtgctacattctatgc

SEQ ID NO: 16271 - DNA, 704 bp, Zea mays
  Clone ID: LIB3062-025-F1_FLI
cgcgcctcgatcctcctcgcccctccggcctctcctcccctcccccgcacctgcacctgcggagagcgccgcaagctagctgcagaggagcgagacagcaggaggaggaggaggacgagaggaagaagagatggcgggctgtgatggagccaagtcgtcggcgtccatggaggaagaggcatgcgcggagaagaagtacggagggatggcacccaagaagcccttgatatccaaggaccacgagcgcgcctacttcgattctgcggactgggtgctgggcaagcaagccgcgaacagcagcagcagcagcacgaggaccgcagccgcggttgagtctctgaagcccaagctgaagcactgatgagactgaactcgctaaccggtctgtccctctctccctgtccagagaacgccgcaccaccagctgccgcctcgtaagcccacctgcgcttccagttgagagacgcacggccacgcgtcggcgtcgcagctgctggaggaggagctcggtcagagtcaaggactgaggatgccgacgagctcggcctcggataaatgttttagctggtccggaatcgtagggacgacgacgagccagaaagatccgaatccgaaatgcggtctggcttcttggcgggcagtgcctgttattgtgtcataaagaacggatcaattaattataaattatctggctgaattctggc

SEQ ID NO: 16272 - DNA, 774 bp, Zea mays
  Clone ID: LIB3062-025-G7_FLI
attgaattttggaataatgtatatggatttgatatgagctgcataaagaaacaggcgatgatggagccactggtagatacagtggatgcaaatcagattgtcactaactgccagttactgaagacaatggatatctccaaaatgaccccaggtgacgcgtcctttactgtaccattcaagctggtagcagagcggaatgattacattcatgctcttgtcgcatacttcgacgtgtcgttcaccaaatgccataagctgatgggcttctcaacaggcccgagatcgaaagccactcactggaagcaaactgttctctacctggaggatgttataactatctgtcagggggaaagcctgagtggttccatgacagtcacacccaataagagtaaccctcgagatatcgacattaagctcaagtactccataaatgggcataggtgtcaggtatcaagaacacagttctacaagatgcggtgacaatggaacaaacaagagttgcttcaaagctcattaaattttgtttaacgagtatcttgtttgacagaaattgtgctatttttattgttcatgtactatgcatcaaatattagattctttggaatctagcaaaagtagggagtagattaaactggcctgctgatatgagattgatgtagtgcaaaactgtcatattgccacaaggtcgttggtggttgtatgcatttgaaggcggttgcaaattattgctttacgcattccaccattaatccttgcctttgattttgtgtgtgt

SEQ ID NO: 16273 - DNA, 1010 bp, Zea mays
  Clone ID: LIB3062-026-A1_FLI
ccgcgcggcgccggtccctgtcccggtcccggccctggcgcccgccgtgtccgtgcagagctgggccgagcgcgggtactccgttgtcaccgtgcagtgcggcgaccggcccaagctgctgttcgacgtggcgtgcacgctccacgacatggactacgtcgtgttccacggcaccgtggacaccgcggccggccgcgcgcgccaggagttctacatccggcgcgccgacggcagccccatccggtccgaggccgagcgcgaggttctcacccaccgcctccaggcagccatcgagcggaggtcgctggagggcgtgaggctggagctgtgcgcgccggaccgggcgggcctgctgtcggaggtgacgcggacgttccgcgagaacgggctgctggtggcgcaggcggaggtgtcgacgaagggcgaccaggcgtgcaacgtgttctacgtgacggacgccgccggcaaggcgccggaccggggcgccatcgacgccgtcagggagagggttggcgcggaccgcctcgtggtgagcgaggagccccgcccgccgcagcagcagctgtacccggacgcctccgggccaggcagcggcggcggcggtggcctcgggctggtatacctcggcaacctcgtgaggaggaacctgtacaacctcggcctcatcaaatcgtgctcgtgaaggccggccgggtgctcgggtcgagacccgcgtcgtggaggggacggacggacacgcgccattgctctgtgtacgtactgtattgtacatacagggcaccgacgtcggtcgtcagatccagtgaccggcaccgacgccgtggcgtggagcaggatggctagccgtacgtagagaaactctgtagccgtgtactgtactgtagatagacaaaaccgtcgctggcagtggtagggggttgcattcatcgtgcgtgggacgattcgttatttattactgtacctgttattctttccgttcgttgggtaaccacacctctctctctttgctc

SEQ ID NO: 16274 - DNA, 811 bp, Zea mays
  Clone ID: LIB3062-026-B1_FLI
atagtctctccaatcttgatcaggatctcccgaattatgcccaacacacggtgcctatattctctcttcctcaagaatggctgtggtgtgaatcttggtgtggaaatgccacaaaagcaagagcaaagaccattgatctatgcaacaatccaatgacaaaggagccaaagcttcagggtgctagaagaatagttccggagtggactggtcttgacagtgaagcacggcagttcactgcacgaatcttgggtgatgatgtcgagcctgcagatgccacacctccgccatcggaggcaccgaagcctgaagatgatcaggatgtgaaagatgagctatgatcgcaagatgtttccaggcttggtcttactgaatgaaagtttggtgactcgacagtcatcagttcagaacacaggcacacagctagtggagcgcagagggatagtttaacgcaggtgcaaatttgtcaaaacactacacctggaatcctggactacattgattcaggtatttcgtttacagtaatagtttcaagacctttaaccaaatcatatggcggggaagctgcgtccagtaataggttaacaaggcagccagctggggtgtagaactctgtctgctctcagctgcatacacatagactgtaatggtcaacaatttaagatctccttgagacgctgtaaaatttatcggctgccagtcgaaaggcaacagcgaagctggcagctgaaatgcccgagaattttgtagcactcagcaaacggattttttaaacactcagtaagtcaataatgcgacaatgcctgtcgcatgt

SEQ ID NO: 16275 - DNA, 650 bp, Zea mays
  Clone ID: LIB3062-026-C3_FLI
cttctagctatgttggatgagtatgttatgctcagacaagaaagggaagaagaaaagaaaagaatgcgggaacaaaagcgctacattgagcagcaactgaacaccgatcatgaagggccatttggatcgcgggtgagtccaaaccggcctgccagttcgaagaaggctgttggcgtaaaggtgaacggcagcgtctcaaacggcactcctccaaacagaaggctctcaatcagtggccaacagaacggtggtggccatggcgtcaggtctggagggaaggatagcaagaaagacacggcgaagacagcatctccagggaacaatgcagttgcagctgctcctgtggacgcggtctcccaaatttctgtcaccgatccggttccgagcacaccatgatctttaacctagcatcgtatattagatataagcgactctttttctgatgttctgttgttttgtggtaatatcttataatgccttcgtagagtaattatgatgcctgcccatccttcagctgctttggcttcatggtgtaattcttgttttagttccgctcggccgtgctgtttcgccctgtcagacggtgtagtgtagtcttactgagatgtattgcattaatcagtgtgctggacatatagctgttgaaacgt

SEQ ID NO: 16276 - DNA, 580 bp, Zea mays
  Clone ID: LIB3062-026-D6_FLI
cggagtggactactgggcagctccgggttctgcggctgtccccgcagcgcacggcaaagcgccagctggttcagctcgaggagaccaatgggaaaaatacatcctactcaccacagactgtgtttgtatcacgtgcaaattgttcaggatgaaagggagctcaagaagcagaagcggaagcaatccaacagagagtccgctcgcagatcccggctgcgcaaacaggctgagtgcgaggagcttgggcaacgtgctgaggctctgaggtcggagaactcctcgctcagggccgagctcgagcggatcagaaaggagtacgaacagctactttcacagaacgcttccctaaaggaaaagctgggggctgccagtagtgattcgcttcctgatatgaacgaacagaacgacggcgacggagacggcggctacaggaagcagcctgattccgatggccaccagcctgggagcgagtcctgacccgtttttagctcaggattcttttggaatgcacattgcttatatattcattctcttgaacgttgtggaacgcagcataggaaggaaatccaactttaattag

SEQ ID NO: 16277 - DNA, 919 bp, Zea mays
  Clone ID: LIB3062-026-F5_FLI
ccggcaagatcgagggctacggcaccaagctgcagagggacctcgagggcaagaagacgtggaacgacttcttcttccacgtcgtcgcgccgccggagaaggtggaccacgccgtctggccccggagcctcgccgggtacagggaggccaacgaggagtactgccgccacatgcagcgcctgacgcgcgagctgttcgagcacctctcgctggggctggggctccacgggggcgccatggcggaggcgttcggcggagacggcctggtgttcctgcagaagatcaacttctacccgccgtgcccgcagccggagctcacgctcggcgtcgcgccgcacaccgacatgagcacgctcaccgtcctcgtgcccaacgaggtgcaggggctccaggtcttcaaagatggtcaatggtacgaggccaagtacgtgcccgacgcactcatcgtccatatcggcgatcagatcgagattttcagcaacggggcatacaaggcggtgctgcaccgtacgacggtgaacaaggagaagacgcggatgtcatggccgatgttcgtggagccgccgggggagctcgtcgtcgggccgcaccccaagctggtcacggaggagagcccggccaagtacaaggccaagaagtacaaggactaccagcactgcaagatcaacaagctccccatgtaattatgtacctcgggttctactgtcgtgtgcacccgcttctgtaatttcagtctaccatatttaagtcacataaccgttattccagtcgcatgcatggccacagaattggcttgtgggctctttcgtctggtttgggccattgcgggctgcttatctactctctttcccgaccgtgttatttgttgttgttgtaagggcactaatacatgttaaagaataacgggtcttttgtccgt

SEQ ID NO: 16278 - DNA, 880 bp, Zea mays
  Clone ID: LIB3062-026-F6_FLI
gacaaaaggcatttgcagaatggattctttacacatctagtggaatttccagtgcattataccattcatgtgatgttggcacttggtgcattctgtcttttcgtgtattgcagtttttggacttctggctttccttcatggctgtcgtgggtacgttcatatatatggctacaattgatgaagtttcaaagagagcaatgcatactgctgtatttatcctcacggctcttttagctgcgactggtgcaacaagatctgcaaatattggaattgttattgccattggttctgttggcctgcttatggggtggctactggagttctctacagcacgaaggtttatatgctggccctcacgaattaaccttaatatgcctcaaagttggccaaacctcagaactttgttccagattactctggagatggtgaacaaacgcttccgttggatattcttacttttgggtttcatgacactgtcttttgcggctatcagctggaagctggaatcaaataacaactactggatttggcacagcatatggcacataaccatttatacttcttcattcttcttcctgtgctcaatgcgtgtcagcacaaggaacagcagtccagagtcaaactatgagctaacgaggcaagactctttgcctagatctgagccaagggaaacctaggtttgtttgtgtaggtacatgattatctgttgcagtccggagcgtaataacatatgaccaatcacagaagagggatttgggaaccacgtgtggtaagtctccgcagctgcatcgcatgagaactgtaaatagcacggtgcaggtaaaacatctatttgtgggatgttcatcgatgaacattgataatcatgtaaatgcgttgt

SEQ ID NO: 16279 - DNA, 1085 bp, Zea mays
  Clone ID: LIB3062-026-H10_FLI
cttcacctcgccagacgagctcctcgaggaagagtactacgacgagcagctgccggagaagaagcgccgcctcaccccagagcaggtgcttctgctggagaggagcttcgaggaggagaacaagctggagccggagcgcaagacggagctggcgcgcaagctgggcctgcagcctcgccaggtggccgtctggttccagaaccgccgcgcccggtggaagaccaagcagctcgagcgcgacttcgaccgcctcaaggcctccttcgacgctctccgagcggaccacgacgccctcctccaggacaacaaccgcctccgctcacaggttgtgtcgttgaccgagaagctgcaagagaaggaggatgcgacggagggcggcgccaccgctgacaccgccgcgccggcggtggacgtcgaggcttccctggccgacgacgtcgaggagccagcagagcctgcggcgacgttcgaggtgctgcaggaggtgaagtccgaggacaggctgagcaccggcagcggcgggagcgcggtggtggacgcggacgcgctgctgtacggcaggttcgccgcggcagttgatagcagcgtggagtcgtacttccccggcggcgaggaccactaccacgactgcgggacgatgggccccgtgaatcatggcgccggaggaggcatccagtcggacgacgacggcgccggcagcgacgaggggtgcagctactacgccgacgaagccgccgccgccgccgccgcgttcttcgccggacacgccacccaccaccacgcggacgaggacgaggacgccggccagatcagctggtggatgtggaactagacgttcgatcttcccacgccgatcgatcgaccgtcttcgaatcctgtgtcaacaagaagaaaaaagaatcgtgccgtgatttttctttgcgcaacgctgctgtaagcctgtaatggtgaatttctagctatggttatgccgttatgaaggaagaaagtgtatgcatgcatggtagggtaaagagtgggtaattaatatcgttgatcatcccagtcactcgtggtgttccagaagatcaatggagttgggggag

SEQ ID NO: 16280 - DNA, 1644 bp, Zea mays
  Clone ID: LIB3062-027-C11_FLI
cgtcttcgtactcgcctacctccgcggctcaaacctttcccccttctcccaattcccgccgccgctccatcccgtaacgcgacaccatgagggagtgcatttcgatccacatcggccaggccggtatccaggtcggaaacgcgtgctgggagctgtactgccttgagcatggcattcaggctgacggtcagatgcccggtgacaagaccattgggggaggtgatgatgctttcaacaccttcttcagtgagactggtgctgggaagcacgtgccccgtgctgtttttgttgaccttgaacccactgtcatcgatgaggtgagaactggcacctaccgccagctcttccaccctgagcagctcatcagtgggaaggaggatgcagccaacaactttgcccgtggtcactacaccattggcaaggagattgttgacctgtgccttgatcgcatcaggaagcttgccgacaactgcactggtctccagggcttcctcgtcttcaacgctgttggtggaggaacgggctctggccttggttccctcctcctagagcgcctgtctgttgactacggcaagaaatccaagcttgggttcactgtgtacccttccccccaagtttctacttcggtagttgagccatacaacagtgtactgtccacccactccctcctcgagcacactgatgtggctatactgctggacaatgaggccatctacgacatctgccgccgatcccttgacattgagcgcccaacctacaccaacctcaacaggcttgtgtcccaggtcatctcatcccttactgcctccctgaggttcgatggtgctctgaacgtggatgttaacgagttccagaccaacctggtaccctacccgaggatccacttcatgctttcttcgtacgctccagtcatctctgctgagaaggcctaccacgagcagctctctgtggctgagatcaccaacagtgccttcgagccatcttccatgatggccaagtgcgacccacgccatggcaagtacatggcctgctgcctcatgtaccgtggtgatgtggtccccaaggatgtgaatgctgctgtggccaccatcaagaccaaacgcaccatccagttcgtggattggtgcccgactggcttcaagtgcggcatcaactaccagcctcctagcgttgtgcctggtggcgacctggccaaggtgcagcgtgccgtgtgcatgatctccaactccaccagtgttgtggaggtgttctcccgcatcgaccacaagttcgacctcatgtacgccaagcgtgccttcgtgcactggtacgtcggtgagggtatggaggaaggtgagttctctgaggcccgtgaggacctggcggcgctcgagaaggactacgaggaggtcggtgctgagttcgatgagggcgaggatggcgacgagggtgacgagtactagagaagtttgctgatgacgcagcatcaggccagtgtgctgcccttatcccgtgatctgccgagagttgctcctgctatcgtgttatgtgtgtctgttctgaagtattgtgtggtttacaacacctgatgttgtaagagttgttaattcccctgcattgctaccgggttattgagaataattatggctgtttacgttgttgctt

SEQ ID NO: 16281 - DNA, 601 bp, Zea mays
  Clone ID: LIB3062-027-C6_FLI
agacgacttgtttcattgattcttgaagagatcgagcttcttttgcaccacaaggtcgaggatgtcttgcaactgcggatcaagctgcggctgcggctcaagctgcaagtgcggcaagaagtaccctgacctggaggagacgagcaccgccgcgcaggccaccgtcgtcctcggcgtggccccggagaagaaggccgcgcccgagttcgtcgaggccgcggcggagtccggcgaggccgcccacggctgcagctgcggtggcaactgcaagtgcgacccctgcaactgctgatcacatcgatcgacgaccatggatatgattattatctatctagcttgtggtggtggttgaacaataataagcgaggccgagctggctgccatacataggtattgtgtggtgtgtgtgagagagagagaaacagagttcttcagtttgctatctctctctgcatgtttggcgtcagtctttgtgctcatgtacgtacgtgtgtctacctgcatgttggttgatccgattgcatctgctgtaaccatatattaattggtccacgatgatatgatttgatactatatatatactaaaaccggacttcttatt

SEQ ID NO: 16282 - DNA, 690 bp, Zea mays
  Clone ID: LIB3062-027-E5_FLI
gcaacccacaaaaggatcaaggatgaaattgagcttggcaatggcctgccagatatcagaagcactcggcaatgtctccaggcagtaaaagacgccgggtttgaggttgtttgggataaggatcttgctgaagattctcccttgccttggtacttgcccttggatccaagccgattctccctgagtagcttccgtttgacctctgtgggacgcatgattacccgcacaatggtcaaggccctggagtacgttggtcttgctccgcagggcagtgagagggtctctaatttcctggagaaggctgcagaagggctggtagagggcggaaagaaggagatcttcacgccaatgtacttctttcttgttcggaagcctcttctggaatgagctcttggatcaccttttcagagagagaaggcaagtggtcatttcgaagaagccgaggagagggaacctggaatcaagaaaaccttcagctctcctgtgtaggaggaaagttaacgaacagtgtagtaactgttcagctttgtgtttattcagttgttttgctgcttgaggttattcgtttctaggtgggggttggaatccttttcgccataaacctctcagtggcataaataagatggtttgcataagagtacttcatggataccgtaagggctactactgaaagagaaatgtttaagcagc

SEQ ID NO: 16283 - DNA, 720 bp, Zea mays
  Clone ID: LIB3062-027-F12_FLI
tccagggaacttttagtggctgttgccagtggatgggataagcatgtggttatcatcgacaaaataattccccaggcttggaaggatgaacctgtggcaaggattcttgagctctgcattctacatattgctatggctgagatggcatcaaaaggaacaccccacaaagttgtcattaatgaggcagtagatctggcaaagcgattttgtgatggtggtgcccctcgggtaatcaacggatgccttcgaacatttgtgaaggatcatgttgatgttgcaggcacgagccaggaagctaaatcaaaatcatgattttttgcaaatactcatacaacaaaatggtggctgaagtaaagaagtacggagagaaccttgctgtcttgagttcaggcgaataccttctgtctccaaggtttagccttcaacctaagggaatctaaaaggtaaacatgatggactcatcaaggagccacaacacgttcattcttttagaatgttcggttattaggtgaagtatacagagctgtaaaccggtgatgcacattcatgcttcatctaaaacaaccgaaggttatggcttctgatagcctactcgacgcagatcgttaaatgatcagatattaagatgaccaggagttgtgtaaaagcttgatgcatatgtaaaatgttatatatacttggcattggctcattgcaatgggagaaggatattctagtttc

SEQ ID NO: 16284 - DNA, 886 bp, Zea mays
  Clone ID: LIB3062-027-H6_FLI
ttccacctcctcgtccacgaggtgaggaaaccctagcgaccgaccatggcgttgctcccgcgcaccgcgcggctggccctcctttccaccccgcgggcgtactccgctgccgctgctgcgggcgcctccccgacgtccccagcgccatacgggggcgcccccccaccggcgatgtcgaagacggccgagttcgtggtctctaaggtggacgacctgatgaactgggcgcgtaagggctcgatctggcccatgaccttcgggctcgcctgctgcgcggtggagatgatgcacgccggcgcgtcccgctacgacttcgaccggttcggcgtcatcttccgtccgtcgccgcgccagtccgattgcatgatcgtcgccggcacgctcaccaacaagatggctccggccctccgcaaggtttatgaccaaatgcctgagcctaggtgggttatttcaatgggcagctgtgccaacggtggtggatactaccattactcctactctgttgtacgtggatgtgaccgtatagtccctgtggacatctacgtccctgggtgcccaccaactgctgaggcactgctgtacggcgttcttcagctccaaaagaagatcaacaggcgtaaggatttccttcactggtggaccaagtgaagcatgctcctgctatttctcggtcgctatgttttctttgcatttgacctgcttgtcacatctgaaataaggacacactttgctcggatttgcaagttctcttttttttttcttggtgtgtctggaaggatgtatgtccaggttgtttgatgaacgtataactcgtgtaccagcagacttgctgtgaatctatatttttcgagcttccagtcttccactgtaatacagcaaatacacc

SEQ ID NO: 16285 - DNA, 1451 bp, Zea mays
  Clone ID: LIB3062-028-C7_FLI
gcttgcacagcatacgctcccctcttctatattcccttgtctttacttgccctatacttcccaaactcgaatcgtgtatggtggtagctcctaaatccttcggcgggcagttaacccccaatcattgatccctcaccagcttgggggcggtttcgctccggttcttgcgcttcggctccaggccatggagcagcggaggtggctcgcagtagccgttttgatgtgcctgctggtgctttgctccgggagagaactgaagaccaaacacgtgcccatatatgacccagtgctggcccggacacttgctgaatatacttctgctgtctatactgctgaccttacccaactgtttacatggacatgtgagagatgttgtgacttaacagaggggttcgaggtgatagagctgattgttgatgtgaaaaattgcttacaggcatatgttggatttgctagagacatgaatgcagttatagttgtgttcaggggcactcaagaaaacagcattcagaactggatcgaagatttattctggaaacaacttgatctcgactacccaggcatgcctgaagcaaaggttcacagtggattttattctgcttaccacaacacaacaatgcgtgacagagttatgagaggtattaaaaatactaggaaactgtatggtgatattcccatcatggtcacaggacattccatgggaggagctatggcttcattttgtgcccttgatcttattgttaatgttgggttcaaggatgtgtcactcatgacatttgggcaacctcggattggcaatgctatatttgcatctaatttcaaaagatatttgccgaatgcaattcgattgatcaatgcacatgatattgtgcctcatttacccccatactatcactactttccacaaaagacataccaccattttccacgagaggtatggattcataatgttggcctaggaagcctcgtatattcgattgaggaaatttgtgatgattctggagaagacccgacttgtagcaggtccgtgagtggaaacagcgtgcatgatcatgtacactatcttggcatcagcatgcatgccgagtcatggggacattgcagaatcgttacggacaatagtaccctgccacagcagtataagatggatcctgatggcaatataatcttgtcgaagcagcctggcttatcagtaaatgaactacacagtgcacaatgaaaaactcaagatagcgttaataaatttcatttcttgtatgatcctctgatggacttgaaggggatatattaggacggacgaccttggctacaaaaaaaaggcagcaatctccattctataggatgtatgtacatatgtctgtgatgttagttccaaaccttagcatctgctatctgtatatgatgttgcagtaaaatcaaacttctctttacacggaatactgttttggtct

SEQ ID NO: 16286 - DNA, 506 bp, Zea mays
  Clone ID: LIB3062-028-D1_FLI
aaggatttgatttgtttatcacgacggctccaattcctgacttgaatgacaagcttgttgtatttgggcgagttatcaagggagaggacatcgttcaggagattgaagaagtcgacactgatgagcattaccagccaaaggccgccataggcatcatcgatatcgtgctaaaacaggagccttgagcctggatgcacatgatgacgttaaccacatgccgacggacttttctgtagttggaaaatctatctcatcgagttggtttttgttttggtgccttattatgtgttgttgcgtggaaagcagttgtgacgcttgttccaggagtcgttgcagcagcgtttgtgtataaaatatattcacagggtttttggctgtcagcatgcgcgagcatatgctgctacaccttgtatcgtggttgtggtaacagtaagcaggctattctctgctattgctaccagtaatcggtttgggccttacgatttgcgaatgaatccaataaaatc

SEQ ID NO: 16287 - DNA, 589 bp, Zea mays
  Clone ID: LIB3062-028-F11_FLI
gcaggtttgttgtagaatccagaattgagatgcccatggaaggatggggtgagatccgggtcatcaatgagcatgtccctcagtctgttcttccaagtctgtacaaagctgcaaatgcatttgtgctgccaacccgtggtgagggctggggcagaccggtggttgaagcaatggccatggaactgcctgtgattgtgactaattggtcaggtccaacagagtacctgactgaggagaatgggtatccattggatgtagacaggctgactgaggtgacggaagggccattcaagggccacctatgtgctgagccatcagttgctcggctgagggatttaatgagacatgtcgttgatgatagagatgaggcaaggaataaggggaagaaggcaagggaggacatgataaagaggttctctccagaagttgttgccaggattgttgctgaaaagatacaacaagtgcttatccacactcagttgacaaatgagtagatacaatgtgaaactagaaagttcatgcaccatggaattccacatatgtatgtataacactattcttgctcattaattttcccaaagtttcatac

SEQ ID NO: 16288 - DNA, 1037 bp, Zea mays
  Clone ID: LIB3062-028-H3_FLI
ggaagaaagactgttttattgctttcgactctgcttactagtggattgggtcttctaagtgctctatctattaactacttgtgcttgctggttcttcggttttttgtcggcataggagtgggcagtgggcatgtattttcatcttggttcttggagttcgttcctgcaggaaatcgtggcacttggatggttattttttcctttttttggactattggcacagtcttggaggcttcacttgcatgggctgtactatcagcattgagttggaggtggttgctggcattgtcttcccttccatgcttcctcttgcttcttttcttcagaatcacacctgagtcaccacgctatctttgcgcacaaaatagaatgactgatgcaaggtttgtcctggagagaatggccattgcaaaccaagcagctcttcctatgggagttctcacataccaccaagaaacaaaaactgaatgcattactcatgtttctgaggatgaacatcttattccagtcagagagaaggaacatacagataggaatgctattagttccaaatctggtgctgttgctgtattgcacaagctattatcacataacttgctcaaatcaactctacttctttggtttgtttactatgccagttccttcgcttattatgggataacattgctgacatcacaactaagtgatgtgaatagaagctgtaaatctgatctggtctttgaagtgcaccaaaataatggcaatctttataaagatacttttatcactagtttagcagagatcccaggcttgattttatccgctttgcttgttgatcggtttggccggaaagctactatgtcgtgcctgatgtttgcatgttgtgctttccttgggccactcgtacttcatcagaatgagttgctgacaactactcttttattcggagctcgtgcttgtggcaccggtgccactacaactttatgtctatatgcccccgaggttcgttttaactttcttatggcaacatgtattttaatataagtttattttgttct

SEQ ID NO: 16289 - DNA, 496 bp, Zea mays
  Clone ID: LIB3062-028-H8_FLI
ggcgcgggccggccgccgggcgaggtgcgcgtacctgccgtcgatcgtcgccggatccatccaccatgggcggtggcaacggccagaagtccaagatggcccgcgagcgcaacttggagaagaacaagggggccaaggggagccagctcgagaccaacaagaaggccatgagcatccagggagcacgccgaggccaagcatcccaagacagacgtgtaccagtgcttcccccatctgaagaagtgaaaggcctgaacttagcaaccagtgctggtttggccagggggcgttccttgtgttgagggtgttcattccgtgttatcttcccgtcagtcatgcgtcctgtcctatgttaacctacataagaaagtgatgtggtgtccacttctagtgaaactactgtctgctgttaaaacctggttggtttcagaacgatgattttcgtgtgcaaaacagattactggtccgtgggagttgggccagtttgcattgtctt

SEQ ID NO: 16290 - DNA, 922 bp, Zea mays
  Clone ID: LIB3062-029-A6_FLI
aaccaaggagcaacttggttatactgtggactctagcccaaggatgacttaccggatgctggcctattgttttcgagttatgtcctccaaatacagtcctatttatctgcaaagtcggattgataacttcattgatggtctatctgctctgctggacgagctcagtgaagagacttttgagcaccatagaagtggtttaatagctgataaactggaaaaggaaccttcacttagctaccaaactagtgattattggtctcagatcgctgataaaaggtacatgtttgatatgtcaaaactggaagctgaagagcttaagacagttcagaaggctgatgttatagcttggtacaacacatacataagatcatcgtccccaaagcgaagacgtctagcaattcatgtgtatggttgcaactcagatattgctgaggctgctaaactccaggagcaatcttggactataattgatgacgttgaatcattgaaggcttcgtctcaattttattcaagcctttgttgagggaagttgggcatgatctgtcagtgtgtgcaaagcgcgtaacttggacattgccgaggcccgctaaggtgcaagaatttcgtggatcataatagatgatttaggccccttctgcagatcaaccgccatgttatctatggccggcttgaaattgaacagcatcgttgcacctgaccaacatcatcaacgagtatagtgctagttgggtaagaaaaataggattttgtcagtgcattatgtgattttcataacaaacacacatggctttattgttactttgcgccaagaaatgttgatcttccaatatggcgtagtaattgatggatgagtttttgaggaaacataattttgtacttggagatgtaaaatgtttctggaatctttactgaacaattttgg

SEQ ID NO: 16291 - DNA, 1097 bp, Zea mays
  Clone ID: LIB3062-029-D12_FLI
tacccgagtacccaacgcgctagctagttctattgccgcaccccagatctccaggagggactcgttctttcagctaactacactgcacgcaatggccaccacggcgaccgaggcggcgccggcgcaggagcagcaggccaacggcaacggcgagcagaagacgcggcactccgaggtcggccacaagagcctgctcaagagcgacgacctctaccagtacatcctggacacgagcgtgtacccgcgggagccggagagcatgaaggagctccgcgaggtcaccgccaagcacccatggaacctgatgacgacctccgccgacgaggggcagttcctgaacatgctcatcaagctcatcggcgccaagaagaccatggagatcggcgtctacaccggctactccctcctcgccacggcgctcgccctcccggaggacggcacgatcttggccatggacatcaaccgcgagaactacgagctgggcctgccctgcatcgagaaggccggcgtcgcccacaagatcgacttccgcgagggtcccgcgctccccgtcctcgacgacctcatcgcggaggagaagaaccacgggtcgttcgacttcgtcttcgtggacgccgacaaggacaactacctcaactaccacgagcggctgctgaagctggtgaagctgggcggcctcatcggctacgacaacacgctgtggaacggctccgtcgtgctccccgacgacgcgcccatgcgcaagtacatccgcttctaccgcgacttcgtgctcgtcctcaacaaggcgctcgccgccgacgaccgcgtcgagatctgccagctccccgtcggcgacggcgtcaccctctgccgccgcgtcaagtgaaaacatgccctggcctggcctgccccaccaccgccaccgacggcgccgccggccgcatcctcattccaatcataatagacgacccgcagcattaattatccaccggctttttttttttggctctttcttgcccctgttatctttctcctcctcttcttcttgggaattgtcgctgccgtttcgatacgtaaatcacgagatcggtaatacagtaatgctcctcaatttt

SEQ ID NO: 16292 - DNA, 1171 bp, Zea mays
  Clone ID: LIB3062-029-D7_FLI
cgaacagagcactgaagcagagcgagcgagctgtccggccaaaccctcacggccgcctccacaatgccgcgccatctcgcgctgctcctgcccctgctactgctggcctcgccggcggccacgcgcctggcgtccgccgcctgcgcgggcgagaagttcccggcggggcgtgcgtacgcgtcgtgcgaggacctgccgaagctgggcgcgtcgctgcactggacgtacgacgcgtccaagagctccctgtcggtggcgttcgtggcggcgcccgcggcggcgggcggatgggtggcgtggggcctgaacccgacgggcgagggcatggccggcgcgcaggcgctggtggcgctggcgggggccggggccgcggcgcccgccgtgcggacgtacaacatcacggggtacgtcccgctgggcaaggcctccacgccgctggacttcccggcgaccgacctcgccgcggacgccgcgggcggcaagatccgggtgtacggcaagctgcagctgcgcaaggggatgaaggccgtgaaccaggtgtggcaggtcggcgcgtcctccacgggcggcgcccccgacaagcacgcgttccaggcggacaacctcggcgccaagagcaagctcgtcctcgccggcaaggcccccgcggcggccgaggccccctcgcccgccctcgcgcccgaggccggcggcccgtccgcgggcggcgacagcggcgcgggcgcgtcctcgtccacggcgccgtccaagtcccccaacgccgccgtgcccgcggccggcgtgtccgcgcccgcgctacttgcgctcgcgctggtggggtttttggcggcggtatggtgacgcgtgaatggtggagccatcatcccggcgaaggtggcggcggcgggctggggacgaaatatcgcgctgttttctttttattggggttcgtttttaagctttgtttttggccgtgaaataaaaatagttgctgtacttgttgagctgttgtttggtagagtcatagtgacgatttattattactagcagtaccgagtctgtgatcatggccgagagattaagctcggattagcagtggccagcaagatgagctggcggccggcgctcttcagtcgccggcgatgcaggcaacgccggccggttgattagaagattttgtgcacgtttcctg

SEQ ID NO: 16293 - DNA, 1010 bp, Zea mays
  Clone ID: LIB3062-029-E2_FLI
gcttactacacactcgaaacacatactagttggtacagtacagagtacacatatatttaaacgacacaggagctctacggcccagccccaccgatgtgctgtaaaggcaggccacatcagcaccgacagtgggcccactaacccgacacgggatcggcacacagacacattatttattcgaccacaacacaaaacgacgctcctacgctcctttactaggcggggcccgccgcgccacgtaggacacgacgtgaacccgaacacaaaagcaggtttttcctagcgacctatgccggcgccatgccgtgctgttgccgtggcagtggcaccagagcggcgcacgccaggtgacaggctgacgcagcgagctagatcggccgccgtccggcgctggactcactcgacggacttctcgacggcagcgacggcggcctcgggagcagggaccgccgcttcctcctcggtcgctgcgacctcaggagtggcagcaaccgcaggcgatgcctccccctcctcctcgttagcctccacagccgccgcctccttggtctcggcggctatctccggctcagcagcctcgaccggggcagcagcagcctccgtctctgctgccggcgcggcggcctcgggctctgcttccttgggctctgcctcggtcggctcagcctcagctacggcctcggcctcgacctcgacctccttggactcagtctcggcctcggccgacaccggctccttagcggcgacgacctcggtctccgccgccggagcagcggtctcctcgttcggggtctcgacggcggccagctgggcagcctccactcccgctgcagcagcagcagcagcctcctcgacgggagcggcagtcgggacctggacctcgacggcggccattggtgcagtgcagctggacgtgtgtgtggaactgtggactgtggagctaacagctaacaacgaaggcactgaagctcggagctaagcagagtgcagactgcagagctcaccagtgt

SEQ ID NO: 16294 - DNA, 1444 bp, Zea mays
  Clone ID: LIB3062-029-H3_FLI
cgagaccatcgacgagcatcttcctgcatctgcaatggctgccgctaccgtgtccgtcccccgcatcaagctgggctcccaggggctagaggtctccgcgcagggcctcggctgcatgggcatgtccgccttctacggtccgcccaagcccgagcctgacatgatcaagctcatccaccacgccgtcgccgccggggtcaccctccttgacacctccgacatgtacggcccgcacaccaacgagatcctgctaggcaaggcgcttcaaggcggtgtaagggagaaggtcgagctggccaccaagtttgccgtctccttcgccgacggcaagcgcgagatccgcggtgacccggcgtatgtacgggcagcctgcgaggccagcctcaagcggctcggcatcgactgcatcgacctctactaccagcaccgcatcgacaagaaggtgcccatcgaggtcacgattggtgaactcaagaagctagtggaagaaggaaaggttaagtacattgggttatccgaagcatctgcatcaacaatccgaagagctcacgcagtccatcctatcactgcagtacagcttgaatggtcattatggtctagagatgtggaagaagatataattcccacttgcagagaacttggaattggaattgtagcttacagtccactaggcagagggtttttttgtagtggagcaaaactagttgactcactgtcagagcaggacttccgcaagcatatgcctagacttcaaccagagaatattgtcaagaatgctaagatattcgagcatgtgaatgcaatggcagctaaaaaaggatgcacaccatcacagctagcattggcatgggttcaccatcagggaaacgatgtttgccccatacctggaacaacaaaaatcgagaacttcaaccagaacgtgggggcgctttctgtgaagttgacaccagatgagatggccgaactcgagtcctgtgctgctgcaggtgaaatcttgggtgaccgttatcctcaaatggccaacacctggaaggactctgagaccccgccattgtcttcttggaaatctgagtagccaatctggtgtctcttcaattctgccaccgtcacattggtgtatctccaaattgtcggactgcagaagatactcaggtgcactttgcaaaagcgtccatatgatgtgcttgccttttgcaagctatgatgtttggtacttggtgtgtattgcatgcctcaatttgtatcaagagtatttacccatgagtatagcttgaaggttaaaaccactggttcgacgaataaccatgtgcatttgtatcgagagtatttaccatgagtagcaaactgaattttgtaataatagtcaaaagtgtgattgtaaaatgtacttagggaatgtggtacgctatattagcgtgcaaacataagtatagccagttaagcc

SEQ ID NO: 16295 - DNA, 748 bp, Zea mays
  Clone ID: LIB3062-029-H8_FLI
aagagggaagagcaccaaggaccttcggcgcccgttcaggatccacatcttcccgagcgagttcttggttgacctcttcctcttcggaccacctccaaggctcttggtgtagcttgccactctcaccaatcaagttttcatgtctgatctcgacattcagatcccaactgccttcgatcccttcgctgaggccaatgctggggactctggtgcggcagcagggtcaaaggactacgtacacgtgcgcatccagcagcgtaatggtcgcaagagcctgaccaccgtccagggattgaagaaggagttcagctacagcaagatcctcaaagatctcaagaaagagttctgctgcaatggtacagtggtccaggacccagaacttggacaggtcattcagctccagggtgatcagaggaagaacgtctcgaatttcctcgtccaggccggcattgtgaagaaggagcacatcaagattcatggtttctgagcaaccgccgggtccatagcaaaccaaccctgcatgcagggccagcttattatatataatatctgaggtggagcatatctatctggctgtgtactgcaagcaggcctagtacgccgcctgcgcgttcctcctattacacatataggcccctccctgcgtgtatgcttgttaccgtcgtgtcgaaccttgtactacgaggctccatcgaacatcgatggcttgcttctttatcagaacatgtttgaataaacgctatttggt

SEQ ID NO: 16296 - DNA, 474 bp, Zea mays
  Clone ID: LIB3062-030-A5_FLI
tctcagttggatagactgtcttgctgagagggtcactgttaataacactatgtaccacaagagctgtttcaagtgctgccatggagggtgcaccatcagcccttctaactacagcttcccctcgtgcgcaatgtagttagaagggctggtggtgcaagcaccaccacatccagctgatcaaggagaaggggaacttcagccagcttgagaatgaccacgagaagacatcacaggctgggtcactggaggaggatgaacaagagtattgatcactgagcacaaccacagatgaataatgaatcctcttgcatttgcctagagcactatgtatttctgtggcgtggttcgatttcagttttaccaatggaggtcatgtgtgttcagagaacaatgatattgttgtcttgtatctgcatgtaaacgttgttatctttgagtcagatactctacctggtttcaccattttcattggtc

SEQ ID NO: 16297 - DNA, 1181 bp, Zea mays
  Clone ID: LIB3062-030-C9_FLI
caaggcaaaaaagatctctgaggaggaatacgtcactgccatcaaggaggaaatcaacaaggtcgttaagcttcaagaagagcttgacattgatgtgcttgtgcatggcgagcctgagagaaacgatatggttgagtacttcggtgagcagctctccggttttgcgttcactgccaatggctgggtgcagtcttatgggtcaaggtgcgtcaagcctccgatcatctacggtgacgtgagccgccccaaccccatgaccgttttctggtcgaagacggcacagagcatgacgtctcgcccaatgaaggggatgctgactggcccagtcacaatcctcaactggtccttcgtccggaatgaccagccgaggtttgagacttgctaccagatcgctcttgcgatcaagaaggaagtcgaggatcttgaggctggtggtattcaggttatccaaatcgacgaggctgcactgagagaagggctgccgctccgcaaggctgagcatgcattctacttggactgggctgtccactccttcagaattaccaactgcgagatccaggacaccacccagatccacacccacatgtgctactccaacttcaacgacatcatccactcgatcatcgacatggacgcggacgtgatcaccattgagaactcgcggtccgacgagaagctgctctccgtgttccgcgagggcgtcaagtacggcgcgggcatcggccccggtgtctacgacatccactcccccaggatcccgtcggctgaggagatcgccgaccgcatcgacaagatgctggcggtgctggacaccaacatcctctgggtgaaccccgactgcggcctcaagacccgcaagtacacggaggtcaagcccgccctgaccaacatggtctccgccgctaagctcatccgcacccagctcgccagcgccaagtgagcaccttttttttgcctttttcgtttccgaggagggcgtcgtcgatgccaatttgtttccaataaacagggctgtgcccgccgttctgttgtactccgtctgtggttaggttagtagttttcttgatctcgcccccacgcggtacctgttttactactctctgtttggtggtttctgaggcaagttgcccgtgtacttgtatcgtaaaaaccgagtgggacatctgcatcgtttcatctgc

SEQ ID NO: 16298 - DNA, 1402 bp, Zea mays
  Clone ID: LIB3062-030-D10_FLI
atttaggactgaggcaacctcggctggaaggagaagatacttggctgttgtagatgaattcatggaggctgtccatgcacgttggcctaaagcagttgtgcagtttgaagacttccaaatgaaatgggcctttgagactcttcagaggtatcggaaccgattttgcatgttcaatgatgacgtacaggggacagctggagttgctctagcaggcctacttggtgctgttagagcacagggccgtcctctccaggattttacgaatcaaaagatagtcgttgtgggagctggaagtgctgggataggtgtgcttagcatggctaaacaggcaatgttaaggatgcctgggatccacagaaccggggaagggcataatcaattctgggttctggacaaagatggccttattacgaaagctaggaaggacctggattctgcagtggcgcgttttgccagaggctttggtcctgatgaggtcccagatctctatgagggggctagtcttgttgaagtggtcaagaaagttaagccccatgtgcttttaggactatctggagttgggggcatatttaatgaggaggttctcaaagctatgaaagaatccgattcccctcggcctgcagtttttgcaatgtccaaccctactactaaagctgaatgcactcccgatgatgtattcaagcatgttggagataaagcgatatttgctagtggaagcccttttagtaatgtttctttaggaaatggtaaatctggttatgctaatcaagcaaacaacatgtatctatttcctgggattggtttaggtgcccttctttcaggtgcccggcatgtttcagatggcatgcttcaagcagcagctgagtgcctggcatcatacatcacagacgacgaaattcgaaaaggaatcctcttcccttcggtctccagtattaggcacatcaccgcacgtgtcggcgcagcagtcgtccgtgccgctgttgctgaagacctggctgaggggtgctgtgatgtgggtcctagggagcttgggagtatgtcagagtcggaagcagtggactacgtcgctcggaagatgtggtaccctatttacagccctcttgtgagcgacaaataataaatccgaagatctcgatgcctgcgcagaagcagatgttccattgaaggaatgtatcggatttgatatttttcttaaccatctctaaattagctgctcatctagaaagcatttcggcagagattggtgcccacgcatatggctaatgtatggctacattcatttgctctagacatgatttcgtcaccaggggacactcagttttgaaccgttgagcttcatactgccacgggaaccgtatttttcatcattattgtaatataaggcgccggagtttctgtcctg

SEQ ID NO: 16299 - DNA, 1722 bp, Zea mays
  Clone ID: LIB3062-031-B9_FLI
cgcggcgaagggggagaagcgcaagtggttccccgacgcgcggtggctgccgccgacaggcgttcaggtcgggaccctgtactacgggaacggcgatccgaccacgccgctgtggccgtcgtgcgcggctggggacgactgcgagcggctgagcatggaggagctggacggcagcgaggagatgccgggcatcccggcgctgccagtgtcggccagggacggggagacaatcctcaaggcgatgggcggcgatgtcgcgccacccaagtggcagggcggcgacggcgcgcccgtgtaccggctcggccccggcccggccgtgttgaacctcacctacattggaaacgagactttagcaacaatcgaaaatgtgtttgcggtgatagaaggaaaagaggagcctgacagatatgtgatcataggcaaccatcgtgatgcttggacatttggagcagttgatcctaacagtggaacagcagccatgcttgagatcgcggagaggctgtccaagctacaagcgaaagggtggaggcctagaagaacaataatcctatgcagttgggacgcagaagagtttgccctgatagggtctactgaatgggccgaggagaacatggacactctagcttcaagagctatagcttacctgaacgtggacatatcagtgtttggtcctgggggtcttatgccccgtgcgacccctcaacttgatgaattgatcaaagaagcaagtaaaatggtaccagatcctgatgaaccatctcaaaccttgtatgacaccatgatgcgccatcatccaccgatcactagagtggctggtgctggaacagattttgcagcatttgtccagcatataggagtcccgtcactcgacatgtcttatgggctgtttgaagaataccctgtttaccactcgttgtatgatgattatgtttgggtggagaggtttggagaccccttgttccacaggcatgttgcagtggccagcgtttggggtctgattgcactgaaacttgctgacgacgagatcatacccttcaattacgtctcttatgcctccgaactggaggagtgcacaaaagatatcgtagataaatgtaaaggatttcctgtcagtttctctcctttgcagaactccatcaagcagctcgagagtgctgccaccaaaatttacaaagagaagaagttgctgcaagcagaaaactggagcctaaagacaagtaagtatacgctgaaagtcagggagataaacgaccggttgatgatggccgagcgagcgttcaccaaccgagaaggactggtcgggagaccatggtacaagcatatgatatatgcatcatcggatcaagacgactgggggaccaaagccttccctggtatagtctcggccatggacaaggctaagaagtccaacacaaccgagacgtggcgactgctgcagcacgagatttacagggttgccagggctgtgtccaaggcttctgcagtcctggatggtaaactaacatgatgtgcacgtgcactgcagattttcattctattctacatagatcgaagtacccgatggattcagtttccatttcgtttcttgaaagctgaagtgcgtggaatacctgtcaggcatcattggataattgtgtaaataatgaagaaatatgctcaagttagtgtcctatgaataaagaatagtggaatcatctctcacgatgattcccttgagag

SEQ ID NO: 16300 - DNA, 376 bp, Zea mays
  Clone ID: LIB3062-031-C2_FLI
aacatcccaatcccagcaacatctgcaccgaaacggtgattgatcctcgtgttcccaacaacgagtgcatctgctccaagaactgcgcctgtgccggtaagtgcatccttgagtcggctgatgctgtccagacctgctttgtcgactgcgtcctcaagaacgactgcatctgcagcagcaagatcatccccggcgctgacgacccaaaggctaatgccaagtgaagtagtactatcatcccaaataatgtcctacgtatagtacctgctgaataaacctcccatgcaccaacagggagagagtctgtacgtcttctttgtaatcatgaaccgcttgtacgtgtaatatataataaaccactctccaccttacacat

SEQ ID NO: 16301 - DNA, 1532 bp, Zea mays
  Clone ID: LIB3062-031-D11_FLI
aaagaaagcagcctacttcttcaggaccagcaaatagtaccggtacaggaaacactgtgggtcctgcaaactccccaccatctacaccatccacacatactcctggggatggacttggaatgggtggtaatatgcgccacgttccaaagaacttaatgatttatggtgcggatggaactgggcttgcctcctcttcaaatcaaatggatgacctggagcagtttggtgatgtgggctctttggatgataatgttgaatccttcttatccaatgatgatggagatcccagggatatttttgctgcactcaaaagaagtcctgcagaacctagcccagccgtttcgaaaggttttactttcagtgaagtcaactgttggcgcacaagcaacagcaaaattgtttgctgccacttctcttcagatggcaagattttggctagtgcaggacatgaaaagaaggctgtactttggaacatggaaaattttcagacacagtatacaccagaagagcatgcccttattatcactgatgtccgtttcaggcctaactctagtcagctggcaacatcttcttttgatagaactattaaattatggaatgctgccgatcctggattctctctgcatacattcactgggcacaacggccaggtcacatcattagattttcatccaaagaaaacagaccttctatgctcttgtgatggcagtggtgaaatccggtactggaatgtgacccagtttgcatgcttgcgtgccataaagggtggtagtgcccaagtccggtttcaacctcatgttggacagtttttagccgcagctgctgaaaacgtggtttccatatttgacattgagacacatgggaaaaaatacactctacagggccataacactgatgtgcagtcagtgtgctgggacaacaatggggaatatattgcatctgtcagtcaggacctagttaaggtttggtcaatgtcaactggggattgcatttatgagcttagttccaatggaaacaagttccattcttgcgtgttccacccgagctattccaatctcttggttattggaggctaccagtctctcgaggtttggaacatggtgaaaaaccagagcctaaccgtacaagctcatgaaggtctaattgcggcgctggcgcagtcaccagtcacagggatgatagcttctgctagccatgacaactctgtcaaggtgtggaaatagcagtaacaacgattatgatgcacctaggtagctttttttccagggcaagtgaaatttctcctgctgaggcataaaataaggaagagtagtaaattagatggttgccggtcgcggttcagctgtccaagagcagtgagtttgttgatgggttgtattgtatttatgctgataggctgtttgtgtagctcagaaacaaaaaagaatacattggctgaaaaggtgtccgcctgttttattttttgtttctgccgtatcatatgtaaccatttaacgttccctgttttttaattggaactcgctgcgattggc

SEQ ID NO: 16302 - DNA, 1011 bp, Zea mays
  Clone ID: LIB3062-032-C6_FLI
caattggcttagacttggatcttgagtcacttgagtggtgccttgaaaacaacctaagcaagattggagctgatgggtattcaagaatgttgcttttccatggaaatgttctacaaccaatggaatcccgtcttgtcaagcaaaagtttactaatcttgtgcatggtctagatttgaacagcaacaatggcacaggaagtaacagttgcaagcagatgggtcttgctgactcgaagtgcttagccaatctgaccatgtcagaggcagattttcctgcaagggatattatctgtgcattcaactacagctgctgttgcctgcatagtagaaaggacttggttttatatttcaggcatgtatgcagtgtgctctcggaaagaggtggtatatttgtaatggatgtatatggtggcatatcatctgaacgcaagttacgtctccagcggaaattccccagcttcacgtatttctgggagcaagatgagtttgatatcatcagtcgccaaacaaggatcagtctccactttcaaggcggaaagaaacagatgctgcgatatgctttcacataccattggcgcctatggtcgattccggagatcaaggactgcttggaggaggctggattcaagtgggtccacgtttggatgagggagatgccaaatacccagtcaggtggaaacgccaaggagtataacgccaaccgggacgtgaagtacgaagaatcgcagcatttcaaccaaggagatgcttggaacgcctatgtcgttggagtagcaaatgtctagccggtacgtgctgaattctgctacgaaaatgtgatggtggctctcagtttcccaggttcgtggacgcttccgctttgatcacaactcctgcatcgcgttgctgcggaggaagtatgcagcaggctggctattaccggacccagagaacttttactccagaacacggcctcagtgatgtttctgttttcaaaatgaaatgctggcaacgtgacatgcctttgaatgt

SEQ ID NO: 16303 - DNA, 515 bp, Zea mays
  Clone ID: LIB3062-032-D12_FLI
catttgctttcactgttggagaaagccttggaagaggaagaaaaaccaaccgccaattctgttggtgggcctttcttacattattcaggtccaggtcacatgatgcacagacagcccgtccgacgccgcgttagctacttgcctacttcagctatatgaaacggcaaaagtcttcccctcgttccccaatctcctctccatcgaaaccctagcacgacgcaattcccgtcttcccacgccgtgtcgccgttgctatgggcaagaagcggaagctcgagcccaaatcggcggcagggttcacgccggttaaggcctccccgaccaccaggtctgccaccgctaaggccgctggtctatccgaggtcctcgcccccgtcgaggctacgatggagaagctgccgcagggggcaggcggcgaggatgtagaggaaatcgaggaggtggaggtcgaggaggaagtggaagtggaagaggaagaagaaggcgagagcgaccaggcttcgatccaggcgctg

SEQ ID NO: 16304 - DNA, 1161 bp, Zea mays
  Clone ID: LIB3062-032-E11_FLI
gcgggctccgtcttcgccaggccgggcttcgtgagcatcgccgaggtcatcgagcgcgacgccccgggctgcaacacggacctcgtccacatcgcgtacagcctctccaaggacttcggcctcccgggcttccgcgtcggcatcgtctactcctacaacgacgacgtggtggcctgcgcgcgcaagatgtccagcttcggcctcgtctcgtcgcagacgcagcacttcctggcgaggatgctctccgacgcggagttcatggcccgcttcctcgcggagagcgcgcggcggctggcggcgcgccacgaccgcttcgtcgcgggcctccgcgaggtcggcatcgcgtgcctgccgggcaacgcgggcctcttctcgtggatggacctgcggggcatgctccgggagaagacgcacgacgcggagctcgagctgtggcgggtcatcgtacacagggtgaagctcaacgtgtcgcccggcacgtcgttccactgcaacgagcccggctggttccgcgtctgctacgccaacatggacgacgacaccatggaggtcgcgctcgaccggatccgccgcttcgtgcgccagcaccagcacagcaaggccaaggccgagcgctgggcggccacgcggccccttcgcctcagcttgccgcgccggggagcaaccaccgcttcgcatctcgccatctccagccccttggcgttgctgtcgccgcagtccccgatggtccacgccagctaggtagtcaccgagcgttcggtaagactggctgtaggttgtgccctcacatgactgcaaacaagtggacaaaaaaaaagacaagactaataaagggcgtacgtagctagcttgacattacacagagtgacagagacgttgcacaggcgtcagcaggcgtcggcggtaagcagctagtcaagtaggacgcatttgtcctcgattttttcgtgttttttttttgacgaaggggcgaagtcccctatttcattaagaaataggaaagtatgaaacaaccgcacccacgcggtaggacctccaaaaagaacagccacggccagaaagttatctagactctaaacactatcgctagatcagtgaagagactatgataacagggaaagttttggcctacgaagagctacataagactttcttatatac

SEQ ID NO: 16305 - DNA, 921 bp, Zea mays
  Clone ID: LIB3062-032-E9_FLI
atccattcaagccgccgtccttcatgctactcacgccaagtggacgctttgagattcagaagaagatttgtttgagcatatccaattaccaccctgagcactggcagccatcatggagtgtgcgcacagcgttggtggccttgattgcattcatgccaaccaaccctggtggggcattgggctcattggattacaaaaaggaagatagacgggcacttggtataaaatcacgtgaagcaccgccaaaatttgggtccccagaacgacaaaaactaattgatgagatccatgagcaaatgctcagtaaggctcctcctgtcccccaaacgctaccaaatgtgccaaacgaggagtctaacgaattacccgcatctgacccttctggcgagcatgcagacaaggtagatgaaggtgacaacacatctggttctgtatcagactcgtctagtggccttcctgtgcctgaatctgaatcgggggttacagaaaacactggtgaaacctcagcagttgaggttgccaaccatcatgtgcctgaagcaagccacagagagaacattccaagagttagttcgtctcaccagaatcctgctgttgcgatccagaagccaaagcatgacaggctgttgaccttggccgcatttgggctgactcttgctattatggcacttgtgatcaagaaattcttaaaaatcaatggcttgggcggtttcattgagggcaagttctgagtagggattgtgcataagttggatgtaagagatgactcattcctcatactaatatgctataagctatataaccccgtaagatttgtaaatgactgtttagttattatagatgaaatcaaaatggtacggtactattaataccccattgtatctagtacacctgatggaaagtgcagagttttgaggcttc

SEQ ID NO: 16306 - DNA, 1431 bp, Zea mays
  Clone ID: LIB3062-032-F7_FLI
cactgacttgattgcaatgaaccatgccgacttcatcatcaccagtaccttccaagagatcgccggaaacaaggacaccgtcggccagtacgagtcacacatggcgttcacaatgcctggcctgtaccgcgttgtccacggcattgatgtgttcgaccccaagttcaacatcgtgtctcctggcgcggacctgtccatctacttcccgtacaccgagtcgcacaagaggctgacctcccttcacccggagattgaggagctcctgtacagccaaaccgagaacacggagcacaagttcgttctgaacgacaggaacaagccaatcatcttctccatggctcgtctcgaccgtgtgaagaacttgactgggctggtggagctgtacggccggaacaagcggctgcaggagctggtgaacctcgtggtcgtctgcggcgaccatggcaacccttccaaggacaaggaggagcaggccgagttcaagaagatgtttgacctcatcgagcagtacaacctgaacgggcacatccgctggatctccgcccagatgaaccgcgtccgcaacggcgagctgtaccgctacatctgcgacaccaagggcgccttcgtgcagcctgctttctacgaggctttcgggctgacggtggttgaggccatgacctgcggcctgcccacgtttgccacagcctacggcggtccggccgagatcatcgtgcacggcgtgtctggctaccacatcgacccttaccagggcgacaaggcgtcggccctgctcgtggacttcttcgacaagtgccaggcggacccgagccactggagcaagatctcccagggcgggctccagcgtatcgaggagaagtacacctggaagctctactcggagaggctgatgaccctcaccggcgtgtacgggttctggaagtacgtgtccaacctggagaggcgcgagacccggcggtacctggagatgctgtacgcgctcaagtaccgcaccatggcgagcaccgtgccgctggccgtggagggagagccctccagcaagtgatgcgcgacggcggccacagacctgatcgatcgatgagcgagagggagcactcggagtgtcgtgtcttttcccttgccatttctttctttttttcccttcccggaggcgaaaaaaagagtctgcttttgctaggcggcgggcgttcgttgctgctctttgcttcaagagttaaatttacctaccttgtcaaggtcttgttccatcattgatccgggtgtcgcttttttagtagtctgatggactgttagtagtttgcgttgcgtcggttgagagggaacgttggtggtggtggtgtgtgtgcagtcaggcgtggtgctccctttgtttcctggatgggatgttgctccttgaataataatcgtagtggccttggagcccttttcctg

SEQ ID NO: 16307 - DNA, 746 bp, Zea mays
  Clone ID: LIB3062-032-G12_FLI
catgtttcaatatgttccatcccttgtgattattgacagatgggtggttgagaatcaggttggcaagaagacccttgctattgatgattgtgattccagacaatctgtctatgtgtatggatgcaaggattctgtccttcaagtaaacggcaaggttaacaatatcactgttgacaaatgcactaagtttggaattgtattcaaggatgttgtagcagcttttgagattgtcaactgcaatggcgttgaggtccaatgtcagggtacgtcaccgacaatatcaatcgacaacacatctggatgtcaattatacttaagcaaagattcgctgggagcttcaattacttctgccaaatctagcgaaatcaatgtgatggttccaagtggtggcgctgatggtgattgggtggagcatgcattgcctcaacagtacatccatagtttcaaggatgggcagttcaccacttcaccagtttcacactcaggagcgtgaatacaattgttactgctgttgtttttgaggtttgtaaacagttttgggtcttgcagcactggactcggtctgcgattgttgttttttgttgcccttgctcagtccgcggtgtgtatgtcctgcatgcacgtggttcctttctgttggtgtttttgtgtgccaacaaaccaccaaacttggtttgtatgtctttagctgatcattctttgacactgaatctcattatatttgtattcatttggacgcttgcttt

SEQ ID NO: 16308 - DNA, 2685 bp, Zea mays
  Clone ID: LIB3062-032-G2_FLI
gaacaataactggtataagtgatatggatcctttaaggtggaaaaactcccaatggcgcaatattcaggttgcatgggatgaagcagcaccaagtgagagacgcaccagggtttccctttgggaggttgaacctgttatcgctccattcttcatttatccctcgccattgttcactgcaaaacgtccgaggcaacctggggtaacagatgatgatagctcagaaatggacaatctttttaagcggaccatgccatggtttggtgaggaggttggcaagagagatctgagtactcaaaacggtttagttcctggattaagtttggttcagtggatgaatatgcaacacaacccctctcttgccaacacggttatgcaaccggaattgctaaattcgttagctggaaaacctgtacaaactctggctgcggctgatctatctaggcaaattagcttccagccccagttcctgcaacaaaataacatccagttcaacacttcgctgctacctccccaaaaccaacagaccgaacagttagcaaatgtaatagctacaccaaaccaattgggaagtgttatagtaccacaaaaggcagttcaaaattgcagttctgaacagaaacagaatctggttacacaaccactgcaagtcagccaaccaatggttagtgtggcacagcctcaacttgtccatactcaactccagcaacctcaagtagttctccaggctcagcctcagcaacctcaagtcattgtccaagctcaactacaacaacagcaacctctggttcaaaatcacaccaccatacaaggtggccttcaacaaatccagcttctgcagcaacagcaagttcagcagtcagtgcaggaacaacagcaaataaagatacagccttttcaggtacctaatgatgccaacatggtaacacagttatctgatcagatgaaaatacaactattgaaggctctacagccacagcagcctctggtcatggaacagcagaaaatgatatttgatttgcagcaacaagcagtaaattctcagtcaactgctcagcagtgctcacaggtagctacccaagtggttggtttgcatagcagtagcactaatcagtacccgacgcagcaaaagactcaacctctcaaaacatttcaagattttcctgggaatgctgtttctattgtaaaaccagaaattgtcacctccgtgggtgctcgctctttgcatgtgcctggtggggtgcagtcaatgaagatggatgaagttccctcttcttcaacatcgccatccacaaacaacaatcctgttattttgcgatcaactccaagtagctccaagaaccaatgtttacctactgcagcaaaggctcctcagtcatctgttgtattgggttctacacttgaacagggtatgaagccttgtgacagtacacaacacccaatggtgattcccaagctggctgaagaaaggccagctactggacaagactacatgaacaacaatcagctggattatttggatacatcatcttcagcgacttcagtttgcctttcacaggctgatggatcgctgcaacaaagttttccaccttcatccttcaatcaacatcaaccgttgagagaagcagttccagatagtgagtttgaggttacagatgcaggaaataactttctatttggggcaaatatcgatggccatatggagcctcttaacgaagacgatttgcttggaactgccttcgaagctgacaagtacatggaacagatgccaggaaacggcatctctaactacatttcatcaaaggattctcagcaagagttatcatcttcaatgatctcacatccatttggcgttgctgatatcgcgttcaattccatagattcatcgatcaatgatatccaattcttaaacagaaattcccgggctccaggtcctgctcaacaacgtatgcgaacatacaccaaggtgcacaagcgcggcgctgttggaagatctatcgacatcaacagatattctgggtacgatgaactgaagcatgacgttgctcgtatgtttggaattgaggggcagctcagcgaccaaaacagagttggctggaaactggtttacgaagatcacgagaaggatgtcctattagttggtgatgacccatgggaggacttcgtgaactgcgtgcggtgcatcaggattctttcgccgcaggaagagaggcaaatgaggctggccagcgactacggagacagctttgttggcaaccaagcgtgcagcagctcggacggaggtcgcccgtggagggtcaccggcgactagaaatagcaggcgatgtctgagcacaaatgtttggtataatccgtccaacgatagcaagaaaatgatacgcgatttctgagcacaaacttttgcactcagatgatcgtgcaaacaattagcattttaagaaaaatgttgcagttcaatgtaactgcaggaatgtctctgatgtagcctcttcgatgtggcagccttaacaatcgatgtgctacagttactctgcctatgtatttactatactacctcggccttgtatatccttttgacgtaggagcagctggacgctgaaccccccggaggctgttagggacaataacaaccgttcataatttgccacagatacagatctgagtggacaaatggattcagtttacgt

SEQ ID NO: 16309 - DNA, 1645 bp, Zea mays
  Clone ID: LIB3062-032-H2_FLI
ccagactaccccctgcctgcaggctcctgcaactgcaatgtcggcgctcgggacgctctccggcggggccgccggtgtctccggcctcatccgcctccgccgtcgggtggcccccgcgctcgcggcgccgtcgcaccacgccgctgggacgttgaactgcgccgccttgcccgatgccgccccgctcgtctggggacgccagctccgcccgtcgctcctcctccccgccacactgctcccgtcgtcgtcgcagggcgccaggaggcacacgccacggcggcccgccgcagccgcaggggaggccaagtctgtgggtttcctggagaagtacccggccctggtcactggcttcttcttcttcatgtggtacttcctcaacgtcatattcaacatcctcaacaagaagatctacaactacttcccctatccatactttgtgtccttgatccatctagtagtgggtgtcgtatactgcctcatcagctggagtgtcggtctccccaagcgagcgcctatcaatggcacgctcctgaagcttctctttccagtcgccctgtgccatggtattggtcacatcactagcaatgtgtccttcgctgctgttgcagtctcatttgcccacactatcaaagctctggagcccttcttcagcgcagctgctactcagtttatccttggacagcaagttcccttctctctgtggctttctcttgcccctgttgtcatcggtgtttcaatggcatcccttactgagctctcattcaactggactggcttcatcaatgccatgatatcaaacatctcattcacctacaggagcatttattccaagaaagccatgactgacatggatagcaccaacgtgtatgcttacatttcaataattgctctcattgtttgcattccgcctgcagtgatctttgaagggccccggctaatgcagcatggattcagtgatgccattgcaaaagtaggcttgacaaagtttgttagtgacctattcttggttggactgttctaccatctgtacaaccagattgctacgaacaccttggagcgagtggctcctctgacacatgctgtgggcaatgtgttgaagcgtgtgtttgtcattggcttctcaatcgttgtttttggcaacaaaattagcacacaaactggaattggcacgtccattgccatagctggtgttgctatgtactcttacattaaggctaagattgaagaggagaaaaggaaaaagagcgcatgatgagctgactgctgtgaatattttaccttctgcgtctgggacacaacaacaacatcgtcgacaatcaagattatgccttgttttgtagtattcgtcttgagtcgctttgtttattaccaatctattatctggtgttgaacagcagcacattgcagaacagatgatcgtcgagtgaccttcatatacgcctgtaactctctctctctccctctctctcagctcagcagtttagatcgactatactcattggacatggacctatctatatatcttctttgtaaacaggacagagtcggactcctgctgcagtattatcaactcatctattttaaactctttaagttggatttattttcaattttttttgtgcttcaataaattactagattttat

SEQ ID NO: 16310 - DNA, 1025 bp, Zea mays
  Clone ID: LIB3062-032-H8_FLI
aagttgtccaggaaagatataaaggctcgttgtccagcttgccgtggtctctgcaattgtaaaccatgcagccttggtaattccaagggttctacgcctaaggaaccgccaaaagttgaaaggaagatacttagcataaaaatttccaaccatcaattttacaagcttttacctgtaagacttgaccaggaacagctagatgagttggaactggaagctaaaatacaaggaacaaaaatatctaatgtctgcgtccaggttgctgaaactggtcagagtgagtcactctactgtaataactgtaagctctcgatgagccgattattaaggtgctgcccaacatgcccgtttaagctgtgcctaagttgctgtcagaagatacgtgaaggaaacatgtcggacaacacccctgaagataaattcaagaatcggttgattcaacaagagtctgtccatgaggatggcagtattacttgcccttcgattgagctgggtggatgtggtgacgccatgctgaacctaatatattcatctccatctagccagtccgaagagctcagttcagaatgtgagctagatgctgcaggcaatcattctggagtgaaggatgctcaggctcatgggtcacctgtacctgagagtaatggaagattattggctgctgcccaggcagaaacagtgtctgaggaatgaagatgcagctatggttggctcatcgttcaggtgggagcgcaagctgacatgttcactagcatgaagcctgaagatgtgtatgatacggtccggattcgatagagggtaggttgcttaatttagctaggttatcggcctatatggctattgattttaggcctgtgacctggggatatgtttcgtctttgatccgggagtcgttatgttaaacatcgttgtacatatggttatggctttatttttgtcattaccgagaggcgggagctgatggattggttgtattgtcgttcgtctaagggattaccttgataatttttatgtgcggtactatc

SEQ ID NO: 16311 - DNA, 882 bp, Zea mays
  Clone ID: LIB3062-033-C9_FLI
ccgccgagaacgctgcccaccaccaccaccaccaacagcttggtctagcgcccgacggcgacggcgacggcgactgttggatcgacgacaaccaagagaactacgacaatatgcacgcgcaccagggctgcgaggactgccgcggcctcctcgacggcatactgtccgacttcgacgactacgacgggagcccagcacggccgaggtccccgccggcgccgtaccgcgtcgtcttcggccacgacgacgacactctgctggagctggagtgggcggaggaggccgccatggacccgttcgccaccagcgagtccgcggggggctggtacatggacggcctggtcatggccatggcgtgggacgagcagcaggacggcggcggcggcttcccgttcgagccctgcaacggatacgaaggggaggcgggcgccaccgggcagctctatgatgctgatgccagcccgctgtgggagtgagagtgaagtagtggacccggttacgtcgatcacacgtgtccgcgtcgtctgggccgtgccgcgctgccgcgccggcctaactactcctccgtagtccgtactttactttgcgccgcttttgcaaaaaatttttgaggatatgaatttgctgaagagaactggacttgtgtgcctcttgtgcttattagtgttgtgtgcctcagaagcattctagtttttgatctttgtttttatttttttttttgtttgaaagctttgtgctaaatgaagtgcattgtctacattcaggtttgctttactgcctgcagtctgtttcagacgcgttcggatggtttatgctctcgaataaaaaacagaggtcgtggataatgtagtgcatatacggtatcgccagtcttttttagac

SEQ ID NO: 16312 - DNA, 587 bp, Zea mays
  Clone ID: LIB3062-033-D6_FLI
atcgaagcctggacgacgcgaccgcgcggcggcggctcgacgcaaccagcacggcggcggcgcacagccccgacgacgactctccctgctgccttctctcctgtgaggatctgctctcttccttccctctcctatcctctgctctcgctgcccccaaactctcgccctcgatctcgctcctctacgctctcgcacagtgacgctttgttcaaggtgtggccgccgccagtcgcctgcgtcgttgaagcagttgctgtcgaggttgaggtcctcctgggggagacgcgcggcgcggccgaggcgcagcgcggtcaggttcgggtatgacctgcatagctactcccagaacttcgacgatggcgttgcctagtcagcccggcggccacggctagcttcttcagtacgtgtagctagttaggagtctaggatattcgtgtaactagctacggccaggatattagtgtggctttaattagtgctttttgtcctgaccactgagatttcagtccagtgttaacttccggtgattatctgtgctctctagctggttcatccagttatattgtataaagaaattacttcatctt

SEQ ID NO: 16313 - DNA, 485 bp, Zea mays
  Clone ID: LIB3062-033-F12_FLI
atcactcccaccgtctccacagcaaccagcacacatttccctttggcggatcgaaggagggaaggaggagatgggtggcggcatggaggtgcacaaaaaccggtggatcgaagagtggaacgccggccgggagaacctcgagttcaacttccgctggacccgccgcagcctcgccgtcgtcggcctcttcggcctcgctgtccccatcctcgtctacaagggcatcgtccgcgaattccatatgcaggacgaggatgcaggtcggccatacaggaagttcctgtaagcggcgtccagggctgcagaatacgtcgattcctcgaccggggctgcgaggaggggagtttctattcagtttgtatcggtattgttttagtctgaatctgatgaagcaatttggaatgctgaattattgtgcctgatccaaatgaataaggtgtaatgactcgtcttttcaattactgaaactggagatgtttgaattt

SEQ ID NO: 16314 - DNA, 963 bp, Zea mays
  Clone ID: LIB3062-034-A8_FLI
tggcacctccattcatctatattgatcaggttaagaattcactaactggtcgcattgaggtttctgctcagaatgtgtggattggaaaaggaggagcctacaccggagagatcagtgcagaacaactggtggacatcggctgtcaatgggttattcttggacactctgagcgtagacatattattggtgaaaatgatgagtttattggaaagaaggctgcatatgcattgagccaaaatgttaaggttattgcctgcataggagagctgctggaagagagggaagcaggcaaaacttttgatgtatgttttaggcagatgaaggcttttgcagatagtatttcaaactgggcagatgttgtaattgcatacgagcctgtttgggctattggaaccggaaaagttgctactcctgagcaagcccaggaagttcatgctgctgtacgcaattggctgaagaccaacatatcacccgatgttgcctctagcactcgaataatctatggaggttctgtgaatgcagccaactgtgcagagctagcaaagaaagaagatattgatggttttcttgttggtggtgcctctttgaagggccctgatttcgccaccattatcaactcggtgaccgctaagaaagttgcagcctgatgagccccgtctgttagaaataagtggtcatctgtgtttcaacctcacctgccacgccgtaaagcctgtaggaggtgatccgtgtgatggtgtgccgtcaccttcttgcctttgctgatttgcaacaccacggaaacagaaaataacgcaagatgtcacattttttttgttctcgtagtccgtagaccttgtgtacgttacgggagttcagttgcacgttggcgatgtacgtttagaatattgttttgctctgtccttttgtaaggggaaaataatttgttgacagacgaggagaaatgataagtgcttttttttt

SEQ ID NO: 16315 - DNA, 811 bp, Zea mays
  Clone ID: LIB3062-034-B10_FLI
gtgttaacccaattggagtcaggagttgttatgatgagggtaagcgtgtagcagagacgctgatgttcgactatcacaggcagcatggcattgaaatccgaattgccaggattttcaacacctatgggccaaggatgaacattgacgatggccgtgttgttagcaacttcattgctcaggctgtgcgtggcgaaccccttactgtccagaagccaggaacacagactaggagcttctgctatgtcgccgatatggttgatggtcttattaggctgatgaacggaaacaacactggaccgattaacttggggaacccaggtgaattcaccatgctggaacttgctgagaatgtgaaggagttgattaacccagatataacagtgacgatgaccgagaacactcctgatgatccccgccagaggaagccggacatcaccaaggcaaaggaagttctagggtgggagcccaagatcgtcctgaaggacggcttggtgctcatggaggatgatttccgggagcgcctggccgtgcccaagaaaaccaaggcctaaactgccctgcggtgggcgaagaatatccacgggggagcatactcatagttggcttgtcattattcgtggccacatttcattacggaatttgagttccaataaacggaatataccttcttcgatcaccttgaaggattgtatcattagaattttcatacagggctggccttttgagtctctgcctacgcacgcagatgttgtggttcttgtgtttgtagcctatatgtactccctgagtcgattatagaaatgtttatgcc

SEQ ID NO: 16316 - DNA, 364 bp, Zea mays
  Clone ID: LIB3062-034-E1_FLI
aaatctttctgcaacggcgaaccgactgcggtgaagagcatcttcggccgtttccttctgcacgtctaccccggggaaacgttgtccactgagatgtggcttgacggccagaaggtgcactaccaaacgaaggccaaggagcggaaccgagctgtcctctctggatatgtgttgctccagcacatcccctcgtcattgtaagtaaaagttttgtttcttaaaattggtgcccgctgaaagcatttggcttggctgtgataaattgagcacgaggtgggctgccactgtaatgatagccatgtatgggtctgcacataacacattcgtactgtattgataagaagcacgtaccacttaaatacgc

SEQ ID NO: 16317 - DNA, 682 bp, Zea mays
  Clone ID: LIB3062-034-E10_FLI
aatcgaaatcgatccgatctccgcttgcgctgaagcctgatctccaccgggttcgcagcaggggcgcaggacctcgatcacgaggaggcaggggagcagcatccacaaccacaagccatggcggggagggccaacatccccactaacaactccgccctcatcgcaatcatcgccgacgaggacaccgtcactggcttcttgatggccggcgttggcaatgttgatctgcgcaagaaaaccaactacctcctcgtcgacaacaagacgacagttaaacaaatcgaggatgcgttcaaagaatttactacgagggaggatattgctattgtgctcatcagtcagtatattgccaacatgataaggtttctggtggatagctacaacaagcccgtccctgctattctggagatcccatccaaggaccatccatatgatccagcgcacgactcggtgctctctcgagtgaaatatctgttctctgcagaatcggtggcgtctgataggcgatgaaggcatccttgcgtagcagtacccttcgatgcatctattttgttatggtattgaaaagaagatggcacgtaccattgggtgcgagcgagccagcatgaacaataatgagcttgcaaacaataattggttgaactaaaccaacaccctttttttcataaatggttcgaatgat

SEQ ID NO: 16318 - DNA, 888 bp, Zea mays
  Clone ID: LIB3062-035-B2_FLI
gcggccgcggggttctcgttcctgcgcctgcgcggcctccgcgcgctcctccgcgccctccgctccacctccgacgccgacgccgacgcgggcctcttccgcgactcccagtccatccgagatctccaagtgatcccggtgctgttcgagcacagcctgcgcaaggcgaccggggacgcggtgctgacggtggcgcaggtgctgggcatggagcccgccgccgccaggctcaggaaccccgccacggactccgaggtcgtgcttgcgctcagggtgctcgaaggttgctgcctcctctgcccggcctgcgcagccgcggcgcaccgctacaatgccgtcaaggtggttttgaatatactgatgacacgtggtatcctcgagcaaagagcatgtctcgacactctcttagcgttgctggtgaattgttcaggaaacctgacggatttcaaagaacaagatggactaaataaaattgctgtcattgtaaaagatgcaaatagggatgaccatgtaaggttaaaatgttccgagtttctgcttctttactctggaaacgcaaaagaaaaatgtggcgcagattccgagtctaatatgcgagaagatttggcaaaggttttcggagaaaaatgtgcatcatttatctcctcaatgaacctattcagctcaactctagagtcacaaatgaggcaatctgagctaagctttcttgcagagcatgtgttggattacatgtagagccatactaaagataaccataatcgtgccattttctccacacacaacagagttcagtgctccaaaatgtatgtttcctattaacttgggtaattattgacgatgctactgtatatgaactcaactacgagaatgttactgttcaccgagttt

SEQ ID NO: 16319 - DNA, 824 bp, Zea mays
  Clone ID: LIB3062-035-B5_FLI
gcgcttccggccttcacgaacaggttcgtctcctcggctcctccttggcttcgcaagagtggtgccgagtagctcctccgcgctccgccgggaccgacttgccgctggccgccaggggctccctcgcccaggaccggctccgccgtccaaccgtcctatcccctccggcctccgcccagatatgggttcttgggagggccaagctaggcagcttttgttggatgaggaagaagatgatgaagagtttttctttcttcttctccctgctatactttcattcctctctgaagagcaaagcgaaactggagcagctattgaaagtttcgtggaattcaagaggagcactgcagccaaaacgctggaagctcttgaagaaaagaagaagcatgatgaagatttctctattaaaaagtgtctagaggagttggatacaattgatgggctgacagatgaggatagatcatatgcaatggaagtctttgaatctgggttcaacagagaagtgtttatgagttcaaaaaaccacaatgttaggttgttttggctcaagagaaaaattaaagcgcttgctgctatcatgtgatgtgaagtgaatgtggttgtgaagagataggcttacagaaaccgaagacatccaactgctagtaccgttccagcgagaagacttcagccctgctttcagagtgcttggtgaacgatggaaggcctaggatgctgtttttgtttatgttgcttagagacggatattggaacgaggatataccttgtttgtacggtatcgtgctgccaaaattaatgcgttttaagcaatattttgctaggct

SEQ ID NO: 16320 - DNA, 1136 bp, Zea mays
  Clone ID: LIB3062-035-C10_FLI
tgcaagtgacggccccgacccatcatgcgccaggcgaatcaaaccactacctgatttgtttaccccccgaaaatttgccgtctcctcgtctcgctcctctccctgcgcagcccccagatccggcaccgcccgctcctcgatccccgcaccccacgcccgcaggccgggaccggcggggtcgcgcgccgggtaggaggaggagaagaggaagggcggtatggcggcgccgccggcgagggcccgggccgactacgactaccttatcaagctgctcctcattggagacagcggtgttggcaagagttgcctcctgttgcggttctctgatggttccttcactacaagctttattaccacaattggtattgactttaagatacgaacgatagaattggatggcaagcgtataaagctacagatttgggatacggcgggccaagaacgcttccggactattaccaccgcgtactaccgaggagctatgggcatcttgctggtttatgatgtcaccgatgaatcttcttttaacaacatccgaaactggattcggaacattgaacaacacgcctctgataatgtcaacaagattttggttggcaacaaggccgatatggacgaaagcaagagggctgtacctactgcaaaaggacaagcacttgctgatgagtacgggatcaagttttttgaaacgagtgcgaagacaaacctgaatgtggagcaagtgtttttctccatcgcacgtgacatcaagcagaggcttgcggagactgattcaaagccagaggacaaggcaatcaaaattaacaagccagaccagggttccgaggcaccagctgcccagcgatctgcttgctgcggctcataagcagatgcacgatggccatagcctttggttatttgacattatttatttcccgcttggctgttataggaaggatttgaagaagccacttatgatataccgatgtggttgtactcgtggttgcttccattctttgaagcaaccacctcttgctgttgacgtagctattgctattgctgggagctattgcactcttgcattgggatccgttggaaaaactctcccctccctacagtgtgtaatgaatgaaatccatatcgttgggtttgcatgg

SEQ ID NO: 16321 - DNA, 539 bp, Zea mays
  Clone ID: LIB3062-035-C6_FLI
cgggagacggggaggtctcgcggcttcggcttcgttaccttctcctccgagaactccatgctcgacgctatcgagaacatgaacggcaaggagctcgacggccgtaacatcaccgttaaccaggcccagtcccgtggcggtggcggtggcggcggtggctacggcggcggtcgcggcggcggcggctatggtggcgggcgccgtgacggcggttatggcggcggtggcggctacggcggtcggcgcgagggtggtggcggcggctacggaggcggtggcggctacggcggtcggcgcgagggtggtggtggcggctacggcggcggcggcggcggctgaagggactgatgtgtgggcccatcctggcttcggccgagttatcttatctatctatagtatcgtgttaccgttcgcttctgtcaccgtgttagtgtccgttctacctttggattaggtgttggtacccctgttgttccctttggttgctcccgctatgaaacgagacgagagaagaatgagcaaggtttttgttccccgct

SEQ ID NO: 16322 - DNA, 1702 bp, Zea mays
  Clone ID: LIB3062-035-G5_FLI
tctgttacaagcttggtggctaacatcaaaggggagaacaggtttgcagaggtcaaggcagagaaggccgatgttcaggcagaaattcacagaggaaagaagcatttctatggtgatgacttggatgcagaggaagggaggcgcagtaaacattcagcacccgctatcgacactgatcaccttgtgcgggagatgatggacaaggtcttgttgtgcaatggcgagacatgttcaaaaggcgtcaaggaactccgtgaagccctgcagcatgacgtggcaaagaattcacacggggttcatggaaaagggtccggacatggcaagggccgtggcaagaaacagccgaagaaggaggtggttgacttggagactctcctcgtccactgtgctcagtctgtggccaccgatgatcgacgtggtgcaactgagctcctgaagcagatcagacagcatgcatcgcccaatggcgacggtgaccagcgtttggcgcactgcttcgccaacggccttgaggcgaggcttgctggcaatggaagtcagatttacaagtctcttataatgacgaggtttccctgcaccgatgtgctgaaagcctaccagctttacttggcagcttgcccattcaagaagatctctcatttctttgccaaccaaaccattatgaatgctgtggagaaggcgaagaaagtccacatcgtggactatggtatatactacggctttcagtggccgtgcctcattcaacggctctctaccaggcctggtggccctccgagactccggatcacggcaatcgacacaccgcaccctggttttcgcccagcagagcgcatagaggagaccggaaggtatctaaaagattatgctgagaccttcaatgtgcccttcgagttccgagccattccatctaggttcgaggcggtgcagatagaggatctccacattgccaaggacgagctgctgatcgtcaacagcatgttcaaattcaagacactgatggacgagagcgtggtggctgagagtccaaggaacatggtcttgagcacaatcaggaagatgaacccacatctgttcatccatgggatcatcaatggctcctacaacgcaccgttctttgcgtctcgcttccgggaggccttataccactactccgccatctttgacatgctggagacgaacatcccgagggacaacgagcagaggctgctcatcgagtcagcactgttcggtcgagaggcaatcaacgtgatctcctgcgagggcctggaaaggatggagaggcccgagacatacaagcagtggcaggtgaggtatcagagagctgggttcaggcagctcccgatcaaccaggacatcatgaagcgtgctcgggagaaggtcaggtgctaccacaaggacttcctcatcgacgaagacaacaggtggttactgcaagggtggaaaggacgcatcgtgctggcgctctcaacgtggaagccagatcacaggtcttcctagctcctcctcgagggcggctacatggttgcagatcgagcactgcactgtagatggatggaggcctgttcgtatctttggatgcttgggctggttgttcctgggatgcaacatatagctaggctaggctgtgctattcgaactactaaagcatgttttgcactgtctttatatagtgatgccatcaatggtccctgcatgttaggtt

SEQ ID NO: 16323 - DNA, 1046 bp, Zea mays
  Clone ID: LIB3062-035-G6_FLI
gtcccataatacatgtgggccggcatcatgaaggggacttgatcattcatcaagctagcacagagccctcatatagttatgtgccatcaatctttttaccacaatggtgtaatatatcttgttcttgagtacatggaccgtggatcgcttgcagacattgttaagcaagtgaagactattctggagccataccttgcagtactttgtaagcaggtcttggagggtttattgtatcttcatcatcaaaggcacgtgattcacagggacataaaaccatctaacttgttggtcaaccgtaaaggtgaagtcaagattaccgacttcggagtgagtgctgtgctagcaagctcaataggtcagcgagatacatttgttggaacctacaactatatggcgcctgagcggattagtggtagcacttatgactacaaaagtgacatatggagtttgggcttagttatacttgagtgtgccattggccggttcccttatataccttcggaaggtgaaggttggttaagcttttatgaacttctggaggccattgtcgatcagccaccaccttctgcacctgcagatcagttctctccagaattctgctcatttatctcctcttgcatacagaaagatccggctcagaggatgtctgcttcagaactcttgaatcacccttttttgaagaagttcgaggataaggacttaaacctggggattcttgtggagaacctggaacctccaatgaatatacccgaatagcctgtcgtttttagtgatgaagcctttgttgtgccttcagggtttggcctcgaagcctcttggcatctgctcctcaactgcagcctccctacctgaatatgctataacatcattgtatgattcaagccccttgtggctatctgagcataagagtagagggaactatgctgcattccgtgtatggtcaccttattgtagctattgttgcgacgggccttgtgattttgagtcttgttttaacttttgcagtcttatcggctgtggattcaaaatgaacgaactgaatattc

SEQ ID NO: 16324 - DNA, 901 bp, Zea mays
  Clone ID: LIB3062-035-G7_FLI
atggaccccaccggcgtcgacggcgattccgcggcggcgaggggaagcggaggcggaggggggacaggggccggccggtgggcggttggcgcggtgtgcgggggcctggtctactaccactgcgcggtacggcgagccagcgcggtgtcccttgcagcagacgtgctcctcgtccttctctgctcgctctccatcctcggcctcctcttccgccacctccacatctcggtgcctgtggatcctcttgaatggcagatctctcaggagatggcaaatagcatagttgcatccttagccaatacagtaggagctgctgagtctgtattaagggtggctgcaactggacatgacaagaagctgtttttcaaggtggtttctacattgtattttctagcagctttgggaagggtggtgtcaggcgctgccgttgcatatgctgccctatgcatcttctgcctctacatgtttgcacaaagcaccgatctgtttgatcagctcccttcttgggtccctgtgggtagggattctttgggcggtactcaggataccgcgtgaagcgtgattttctacatgtacatggattgcagagttttttcttctcttccactgtctgtatatggtcttgcaggctaatagcttgaacccagtattacaactgtacccagtgtatctctgcccccacggtattacaactgtacccagtgtttagcaatggagtaatgatctttgtatatatatatgacacgtttgcaacttgctagatgccagtgatgcaccttgtatgttttcggagctcattgcagatctctctggcttgacatggttgttggtcgtgagattttgtgatggtgtgttttgcctgtaatctaaatatctaataaagatctgtctttcatcacgt

SEQ ID NO: 16325 - DNA, 1228 bp, Zea mays
  Clone ID: LIB3062-036-A9_FLI
tgaagggcgacgtccagagagtaagaacgaggcgacacagtatggacttgatatgactgagcaacaatatcttgagcattcgattccatggatagctgccaatgatgctgcttggcgtgcgttatgtcgttactgggcttcgactgaatttaaggcaaagtctgtgcgacacagttccaatcgtggaaccgagtcgtatcacaggtatggaggtgatgatcactttcgtttggcaaaacgaatggaagctagcactggtgcagtgcctagtgatgttcaaatataccttagggggcacagaggatcagatcctgcaaatccagatgtgttgtgcagccaaaaggcaacagatcgtgtgctgggtgtttggaaatgtttggtaggttctgtttatatggatttttgtatgtaagattacattgttcttttgtatgaggctgcatatggcgaggcaatgtctagttagcacggaccagactatgactggaggacctcacctattgatcctcaggctgtgtatgcaagtggtggaaaagctcatggaaggtacacaatgtttgctaacatcatcgactcgaaccaggtgagggttcagcgtggaggttcatcgaggtctactgctcgtagctcccgtcgctccactcaagattcagcagaagtggagcaactgcgagaagaacttaggcgacattaggattacttgaagcaacaagctgcgcaacatgaatattatgctacacagattcagcaacagcaaacactcatacaacaactagcacaggcccaagggatacacgtcccggtgccccccaccacctcccgttcattatccttggtcttcacctccacctatacctacatctccatctaccgaacatcagacccctccagctaccttgccgacgcatgaacaagaggacgggttagactttgtcgaaaccctcttcaatagtggaggtatcgaccatcactcttcactgtaacccgatggtgatcgacgaccgtgagcttccatgttattgcgttctgatacttgagacttttattatgactatgtatgagatattgtctcttattagtactggatgatgagatgtgtcttattatgactatggatgagacttttgtgatgtaattgatgagactatggatgagacttttgtgatgtaattgatgagactatggatttaaatattgttatgtgattgtgtgtgagatgttttatgcg

SEQ ID NO: 16326 - DNA, 1487 bp, Zea mays
  Clone ID: LIB3062-036-B7_FLI
cattatctgtgtcccctagagtgatgcacgggcattgcgtgttgtgctgagtctgactggagtcaaggagggtctaagaggccatgttgttgtagagatgagtgatcttgataatgaacctttagtgaaactggttggtggtgaactaattgaaacagttgttgcccatgacgtgattggacgtctgatgatacaatgtgcactccaacctggccttgcacagatatgggaagacatattgggatttgaaaatgcagagttttatattaagcaatggccagaattggatggcatgcggtttggggatgtgttgatctcatttcctgatgccgtaccttgtggagtcaaggttgcttcaaaatctggaaagatcttgatgaatcctgatgatggttatgttttaagagaaggagatgaggtccttgttattgcagaagatgatgatacttatgctcctgcccctctaccagaggtgaataagggttttctgcctaacataccaacccctcccaaatatccagagaaaattttgttctgtggttggcgccgtgacatccatgatatgataatggttctggaagcatttcttgctccaggttctgaattatggatgttcaatgaagtgccggagaaggagagggagataaaactgactgacggtggtttggatataggcgggttaataaacattaaacttgtacataaagaaggcaatgctgttatcaggcgacacttggaaagcttgcctctggagacatttgactctatgagtcagtagaggactccattgtacattctgattcgcgttctttggccacacttcttcttattcgtgacattcagtctaagcgtctcccatcgaaggagctgaagtcacctcatcgttacaatggcttctctcacagtgcctggattagagaaatgcaacatgcatcagacaaatctataatcatcagcgaaatacttgattctagaacaagaaaccttgtatctgtctccaaaatcagcgattatgttctatcaaatgagcttgtaagtatggcactagcaatggtagcggaagacaaacaaataaacagagttcttgaagaactttttgctgaggagggaaatgagatgtgcattcggtctgctgaattttacctttatgagcaagaggaattgagtttctttgatattatggttagggcgcgtgagagagatgagattgtgattggctaccgtcttgctaacaccgaccaggctatcattaacccagaatataagtctcagattaggaagtggtcactagatgatgtctttgttgtcatctcaaaaggtgactaattttcaggagcgtcacttttttgtgtaagtgtatattctaatgctaatccgtgctaattgaaatgataaccggtcaaacatactgtaaagtacagtcctgatccaaacagtcagctatgtacatgttaaattgtagcattcaaccaatcttggcacaaaac

SEQ ID NO: 16327 - DNA, 546 bp, Zea mays
  Clone ID: LIB3062-036-C2_FLI
aaagcttctgaggatcagaagctttctgattcacctccaagcttagatgactacccagagagcatgcaaccttctcccaagaaaccaaggatagatgcattatcaccagattcagagcgcgatacaacacaacctgaattcgaatcccatttgatcggtccgtgggatcacggcattgcattcccagtggaggagttcaaagcagaccctgctatgagcaagtcataaggcaaacttcaccttgacagaaaattttcagagttgacctctccacgagatgatcattctcatgtgaatatatattatcttaacaacagaatgttgtacgggtttttgaccctgcacctgatcccttcagccacgtccagttattcttatcactgtagtatccatcaacaagtcctgtaattatgaggatggtgttacagagtttctagcaagcatttccatcgagggaatggccctgagttgatccatgtagcaagaaagagaacatgcttacaagcaatatatttgctgtgaaaagggcacgcccctggatcttcc

SEQ ID NO: 16328 - DNA, 1028 bp, Zea mays
  Clone ID: LIB3062-036-F9_FLI
gcttctgtagactagtaccacacagtttgcgagaaggggagaggtagaggttccgaggtagagagatagagaggaggagagggagggcgaggcggcggattcgtcactccgttcttctccgctgatctggaggaaggaggcgaggggagttgcaaatccatcaatggccactccaaccacctattcagtccgcatatcctcggagacccacaagattgaagcctgggtggtgtctgacgaagctttggccaggcaactgcaggaggaggagaacacgcgtgacgctgctgccgacaccagagaattcgccggcaatgtacccttggagtcatcgtcaccggctgttgagtacaggcctgcacagaatgcagctcaggtcgcaagggaagacaatgtggacccagataatatgtcatatgagcaactacaagcattaggggaagcagtaggaactcagtccagagggttatctgatgagctgatatcttatttggagccatttaggaacaagtgcacttttttctccaggaaaaagaacagtgaggaatgtgtgatctgcaaaacaacatatagaagccggcagaaattgataagattaccctgcagccactgttatcacgcagattgcataactcgttggcttaagatcaacaaggcatgcccagtctgcaacgaggaggtgtttggatgaactgcaaggttcctggcagatgctgcggtttcatcgttacttgcttgcggcatgcttttgagaagaggttggacgcatatggtccattgtttgtgattatgttgtgagcctagtttggtggccctttgcttaagaggactggctctgcccatggggtcggtctacacgtgtgctagtaactggaccaggtcgcgttttgtgatgcgtctatccatcttggttttatcacaaattgatagatctgttgtgtgggtagtttcgttgccgttttctgaatataatggatggtgtttttgcccccctttttgagagaagttcaagcaaagagcagttcaat

SEQ ID NO: 16329 - DNA, 371 bp, Zea mays
  Clone ID: LIB3062-036-G2_FLI
ccagcaagcaaaaattccccaatcctctcgtctccgcggctaagatgtcggggcgcggcaagggcggcaagggcctgggcaagggcggcgcgaagcgtcaccggaaggtgctgcgcgacaacatccaggggatcacgaagccggcgatccggaggctggcgcggcggggcggcgtgaagcgcatctcggggctcatctacgaggagacccgcggcgtgctcaagatcttcctggagaacgtcatccgcgacgccgtcacctacaccgagcacgcgcgccgtaagaccgtcaccgccatggacgtcgtctacgcccttaagcgccagggccgcaccctctatggcttcggcggctaggtctgccgcggccgc

SEQ ID NO: 16330 - DNA, 1880 bp, Zea mays
  Clone ID: LIB3062-036-G8_FLI
gtgcttttttgcagggaagaaaatgcctaccacaggcgtgattgctggtaccagagatggcctttcatctgagagcatctctagatttctgctgcctgcttctgaatgcgagtttgtattgaactcagttatagaagaaatacaaaaggacccttggcctgttccagctgatcagcgtgcgtctaggtgcactggagctgccttaagtgttgcagccaatctccttggggtttgtgttcctggatcaggtgctaggataatggcatttgttggtggtccatctacggagggccctggtcctattgtatccaaatccttatcagagcccattcgctcacacaaagaccttgataaagactcggcaccactctatgataaagctgttaagttttatgatcaaattgcaaagcagcttgtgcaccaagggcatgtgctggatttgtttgcttgtgcagttgaccaggttggagtcgctgaaatgaaggttgcgattgagaagactggaggaattgttgtgcttgctgaaagttttggtcattctgttttcaaagactcacttctccgcatctttcagtcaacagatgacaaccttggtttatcattcaatggtattcttgagattaactgttcaaaggatgtaaaggttcaaggcatcattggaccctgttcttccctggagaagaaaagtcctttgtcttccgacactgttattggtcaaggaaacactagcgcttggaagatgtgcggccttgacaggaagacatcactttgcttggtatatgacattgcaaaaaaagatggcccagattcaattgctcaatcagcaaacaatcagttttacttccagttcttaacctactatcagcataatgagggtcagatgagattaagatcgaccacaatctccagaagatgggtctctggtgacaaccatgtggaggagctagtagctggctttgatcaagaagctgcagctgcagtcatggcacgcttggtgtcatttaagatggaaactgaggttgattttgacccagtaaggtggcttgatcgagctttgatacgtttatgctcaaaatttggagattatcagaaggagacaccctcatcgttcagtttatccccacgactatcaatatttccccaatttatatttaatttgaggcgttctcagtttgttcaggtttttaataacagtcctgatgaaactgcgtattttaggatgatgttggacagagagaatgtaaccaatacaggtgtgatgattcaaccttcacttatatcctattcatttcaatcagggccagagccagttctcttggatgcaactgcaattgcttctgacaagatccttttattggactcttattttactgttgtcatattccatggggtaaccattgcgcagtggcgaaatgctggctaccaagatcaagaaggtcacgaggtgtttgctcagttgttaaaagctccacatgaggaagctaatttaataataaaggagcgatttcctgtaccccgtttggtagtctgtgatcaatatggatctcaggctcgatttttactggcgaagctaaatccatcggtgacatataactcggacaacccctcccctggtggagacgtcatattcacagatgatgtgagcttccaggttttcatggaccatcttcagcgactagcagtccaataggatatgaatctgtagatcagtgcatagagcaattttatactaccaatgatatcttctgtagagtgataatatttttgttttgtatgtcttacaaattcgttgtagctggttttaaattatataagtttcttttagaggcaatcaaattttgcaacttgataaattatgataataaatgacctgtagaatg

SEQ ID NO: 16331 - DNA, 2220 bp, Zea mays
  Clone ID: LIB3062-037-B12_FLI
gaccacactagcgcagcgcgcacaggagcaaaggggggcatcctctatcgcgcgcgcgccatggccaccaggccgggccctttgactgaatggccatggcaaaggcttggaaacttcaagtacttggtgatggctcccgtggtggtccacggcgcgcggcgggtggtcgcgcggggctggggcgacatcgacctggccttcgcgctcatcctgccgtcgctgctgctgcggatggtgcacaaccagatttggatcagcgccgcgcgctaccagacggcgcgcggcaagcaccgcatcgtcgaccgcggcatcgagttcgaccaggtcgaccgggagcgcggctgggacgaccagatcatcctcaacggcctgctcttctacgtgggctacctggcgatccccagcgcgaggcgcatgccggcgtggaggtcggacggcgccgtggcgatggcgctgctccacgccgggcccgtggagttcctctactactggttccaccgggcgctgcaccaccacttcctctactcgcgctaccactcgcaccaccactcctccatcgtcaccgagcccatcacatccgtgatccatcccttcgctgagcacatggtctactacgtcctgttcgccatccccatgctttcgactctctacatggggaacgcctccgtcctgggcatcgtgctctacatcgcctacatcgacttcatgaacaacatggggcactgcaacttcgagctggtgcccaggtggatgttccagctcttccctcccctcaagtacctcatgtacacgccgtcgttccattctctgcaccacacgcagttccgcacgaactactcgctgttcatgccgctctacgactacgtatacagcaccatggacaagtcgtccgaccagctgtacgagacctcgctcaggggagcggaggagacgcctggcctcgtccacctcacgcacatgacggacctgcagtcggtctaccacctgcggatcggcttcgcctccgtggcgtccagaccgtctgccaccagcgccatgtggtggtacatgtgggtgctgtggcccgtggcgtggctgtccatggcgctcgcgtgggcctacgggtcctccgcgttcgtcgtcgagaggatcaaactcgggaagctgaggatgcaaacgtgggcagtgccaagatacaacttccagtacggcctgagctgggagagagaatcgatcaacggcctcatcgaaagggcgatactagatgctgatgcgagaggtgtcaaggtgctcagcctaggactgctaaaccaggcgaaacagctgaacggcggcggcgagctgttcaggcacaggtatccgaagctcagagttcgcctcgtcgacggaagtggcctagcgactgctgtggtgctcaggagcattcctcgtgacgcgaagcaggttctcctccacgcgggcccttctaagatagcgtgcgccacggctgctgcgttgtgcgagaggggcgtccaggtcgtcatgaacccaaacaaggaatatgacatgctcaagtcacagattgcagatagcaaagcaagctattgggaacgacgctccgacaaccaccacacgcctcaggtttggctagtagacagcatcgacgacgaggaacagaagatggcaccgaaaggagccgtattcgtctcaatctcacagttccccatcaagaaaatccgcaaggattgcacctacctgagcactccagcaatgaagatccctgaaaccatgcaaaatatccatgcctgcgagaactggctgccaagacgggtgatgagcgcctggcgcatcggcgggatacttcacgccctggaagggtggaccgtgcacgagtgtggggacgccatggtgcatgctgagaaagcatggtcagctgctattaggcacggattcgttcctttgacgaaagcctgaaagcctgtacgcaactctagacgccattcgacgatggctggaaaactacgtttcagcaatcggtagcacaaattctccccagctacagaagccgactatatggtctgcttgacgagtcgtccagggaggcacggcgtgatgaatggcgaccttgattccaacagcatatagtaactatatatatagttatgttgtggcattgtatgatgcaagtgcgagaaactgctttgtggctgtgtgggtgacatatacaattataataaaatgtcgatttggcttgtccttttg

SEQ ID NO: 16332 - DNA, 991 bp, Zea mays
  Clone ID: LIB3062-037-B8_FLI
attggtgacgctgacgccccagtaccatcgatccccatggtcggcccgatggtattggtgacgctgacgccccagtacttccatatcggtgcgctgccattgggatcgaggctctcaagtacatcagctacccggctcaggtgttggcaaaatcttctaagatgattcctgtaatgttgatgggaactcttctctatggtgtgaagtacacacttccagagtatttatgcacctttcttgttgccggcggtgtgtcctcctttgcgttgttgaagacaagctccaagacaattaagaagcttgccaaccctaatgcacctcttggttacacattgtgcttcctcaacttagcttttgatggatatactaactcgacccaagatttaataaagtcaaggtacccaaaaacaaacccatgggatataatgcttggcatgaacctctgggggaccatatataatgctgtaattatgtttgttgcgccattactattcagtaactggccatatgcaaatggttttgaggcattgagattttgccaggagaacccagaggtggcctgggacattttcctattctgcctatgtggcgccgtggggcagaacttcatcttcttaaccatcagccggtttggctctcttactaacacaacaatcactaccacccgtaaattcatgagcattgtggtttcatccgtcatcagtggcaatccattatctttgaagcaatggggtagtgttgtgatggtcttcttaggcctctctatccaaatatatctcaaatggaagagaaagaaaggcagagagcacaaggagtaagcttgattcttcaaccttttctgatttgtaacttcaattggacagatctcttgtgaggttgaccaggataacgttaatgcagtctgtttgaaattaggaacttttacatggattattatgagtgataccaagtgtgaggctgagctattggtaacagctctaatttatgttct

SEQ ID NO: 16333 - DNA, 1506 bp, Zea mays
  Clone ID: LIB3062-037-C6_FLI
catcgctgtgatccctccaccctcctcgtccccctagccgtgtcgcgatggccaccgccgccgccgccgccgccgccgcctgccctctcctgctcctcgccgcgctactcctcgcggtgtccgccaccacgagcgcgctcaccgacgacgtgctcgcattggtggtcttcaagatggacatctcggacccgtcgggccgcctcgcgacgtggaccgaggacgatgatcgtccctgctcctggccggccgttggctgcgacgcgcgcacgggccgcgtcacctcgctctctctcccggcggcgtcgctctcgggccgcttgccgcacgcgctgctccgcctcgacgcgctcctctccctcgcactcccgcggaacaacctctccggccccgtgccccccaacctcctaaccgcgctcccgcggctccgcgccctcgacctctcctccaaccgcctcgccgcgcccgtccccgcccagctcttcgcccaatgccgtgccgtccgcgccatctccctcgcgcacaaccagctctcgggctacatcccgcccgccgtcgcgtcctgcgcatcgctcgtgtccctcaacctctcgtccaatcgcctcgccggtcccatcccggacgggctctggtcgctgccttcgctccggtccctcgacctctccggcaacgagctctccgggagtgtgcctggtggattcccccggaccagctcgctacgggaggtggatttgagccgaaacctcctcgccggggagataccggcggatgttggagaggcggcgctgctgaagtcactgggtttggggcataacttgttcactggcagccttccggactcgctccggaggctggccggtctgcagttcctcggcgccggcggcaatgcgcttgcaggggagctgccagcatggatcggggaaataagggcgctggagcgccttgatttatcgggcaaccgatttgccggcaacattccctacactatcgcgaactgcaagaaccttgtggaggtcgatctaagctgcaatgcgctcaccggcgatcttccctggtgggtgttcggcctaccgctgcagcgcgtctcggtggcaggcaaccagctgaatgggtgggtgaaggtgcccgacgacgcagcaatgacgcttcgtgtgctggacctgtcgtgcaacgcgttctccggcgagatcccgctgcggatcactgccttcgcgggtttgcagtctcttaacctgtcctcgaattccttctcggggcagctgccggccggcattggtggattgaggctcctcgaggttctggacgtgagcgctaaccgacttgaaggaaccgtgccgccggagatcggcggtgcggtggcgctccgggacctgaggatgggaaggaattcgcttacgggacgcatcccggcacagattgggaactgcagctccctcgttgcactgtaagtaatacagtaaattgtttcccaacccatattctggaatgaaatttgacgtcattgggatt

SEQ ID NO: 16334 - DNA, 571 bp, Zea mays
  Clone ID: LIB3062-037-D8_FLI
acaaaacactcccactgtcccacaccctcagtccacagactcgcactgcactcgtccaatccagggaggctgggaaggatcagggatccatccaccgttctgtcttctcaggtcgacaggaggccagaccaggtgcgcgcgtccgtgtcggcgatgagcgcgggcgggagccgggcgcggcagaacgcgatgcgctcaggggtggtggtgctgggcgccgtggccttcggctacctctccttccgcgtcggcttcaagccctacctcgaccaggctcaggaggccatcgactccgcccgcgaccccgaccctgaccccgccaccaccgccgcgagggacgcgtccgacgatcccggcgccggtcgcccagggggagacctcgggccgtccaaggacccggccgtcgtactgcgcgactgaggcccggtgcgggcgtttggttgcgccattttggcaaacaccttgtacgcgggcccttgcttcgactgttttggtagtatgggccaccctgtgtgagatcttcttccctgctgctttgaagtttgaactggtttctgtgtgatgcccacat

SEQ ID NO: 16335 - DNA, 773 bp, Zea mays
  Clone ID: LIB3062-037-F7_FLI
accacagccagtcagccacatcactagctatctgtgcagaggcaatggcgtccaaggttgagctggtggtggaggtcaagtccccggctgacaagctgtgggcggcgctgcgtgactcgacggagctgttccccaagatcttccccgagcagtacaagagcatcgagaccgtcgagggcgacggcaagtcggccggcaccgtccgcctcctcaagtacaccgaggcggtgccgatgctgacgttcgccaaggagaagcttgagacggcggacgacgagaacaaggtggtgtcgtacagcgtggtggacggcgagctggcggacttctacaagaacttcaagatcacgctgaaggtgactccggccaaggcggagggcgagggcggcgccgtcgtcagctgggccatggagttcgacaaggccaacgaccaggtgcctgacccggacgtcatcaaggagaccgccaccaagacgttccacgacctcgacgactacctcctcaagaactagatggagcgacaactggagatggtccagtacagtacagttccagtccattcatcgacgcgtcacagtctactagtgcacgtcgctggtgtggtgtggtgctggtgcctgctggttccttaatttgcttgctagctagctacgtaccgcggtccgtgtccttgtctctggctgatgtttgctgcctgcggccgtcgtgcatccgacgacgtgtcgttgcgttgcgcactggtcctccgagtcaataaagctctcgtgttcatgcgc

SEQ ID NO: 16336 - DNA, 690 bp, Zea mays
  Clone ID: LIB3062-037-G12_FLI
gttcctgccgcgcctggtggagcggtacgcgagggaggcgtgcgtgggccccgacagcgtcctcccgtgggcgcagcgcgagggggccgtcgccgtcgtcgacgaccggccgcagcaggaggccgcccagcggggcgtggggagccggcgcaaggccgtgcaggccgtagagtggctgccgtacgccaccagattccgctatgccttcgccaggagcatggtcgacaagccacactgctagctgcttcgcctcgcactcctcgcatcgcagctgttgccgtctggccccgtttccgctggagaaagacatctgatcgctgtggcgcagccattctgatggctatatgtaaatgtctcgttgatgctgcgctgttgacggctagatagtactgctccgttccgtagtgaacaagtggcaaggatgggacgaagggtttgactaattttgcccaaggtgtacagaagctattatttcaggtttcagcagcagtctgttggagaccatttgaattcattcgaattgtttatctacttggtcgtttgtatttccattggtgggagcaacttgtcctgtttgggacagcttcagctctaaaaaatttggttggtaaagttggtagatagagcaggttattagatactccctctaggtctaaattttttgacgttttggacagattctcacatacc

SEQ ID NO: 16337 - DNA, 626 bp, Zea mays
  Clone ID: LIB3062-037-H8_FLI
agggcacaagcagaagttgcggttgtacttttcttcctccgccgtcggctcagatctctgcgtgcgggctagcgatggcgtcgttctcggaggctcccccagggaacccgaaggcgggcgagaagatcttcaagaccaagtgcgcgcagtgccacacagtcgagaagggcgccggccacaagcaaggtccaaacttgaatggtctttttgggaggcagtcgggtaccaccacaggctactcctattccgcgggaaacaaaaacaaggctgtgatctgggaggagaacactctgtatgactacctgcttaaccctaagaagtacattcctggaaccaagatggtcttccctgggctgaagaagccgcaggaacgtgctgatctcattgcgtacctgaaggaagcaactgcgtagtataatgacacgcctttgccatgaagagaaaattcgttttgcagtttaataataaacatttttagacaatttgggtcactctggttggacagggtacacaatctacgtctcagtatttttgttcttatggtctcggtattgaatgcctaggtgagttttttttagctgtgcacaaaaaaacagttaaactcgatggtatctcaactgctggag

SEQ ID NO: 16338 - DNA, 988 bp, Zea mays
  Clone ID: LIB3062-038-C3_FLI
ccgaattcccaggcaggcaggtcggcgaggagggcaggaagaccgaagaccgagccgtgcgggggctcgggacgggaacgggacaggaccccaaaatctcagatccttcctgcccgcccgcccgtgcccgtcgacgcgtcgttcttgccggccgcgccccacctccgccctctcctcctccagggggatcggatacgccacaggctgcgcgatggtgctgtgggtcttcggctacggctccctcatctggaaccccggcttcgacttcgacgacaaaatcctcggcttcatcaagggctacaagcgcacctttaatctcgcttgcattgaccacagaggcacaccggagcatccggcgaggacctgcacgcttgaaaccgacgacgaggccatatgctggggaattgcatattgtgtcaagggtggtccagaaaaagagctaaaagcaatacagtacttggagagaagagagtgtgagtacgaccagaaaatatccattgatttctacaaggaaggagatcccttgaaaccagctgtgacgggcgtcttagtgttcgtttccactccagatccaattggcaacaagtactatcttggccctgctcctctgcaggatatggcaaggcaaattgctacagccaatggccctactggctataatagggattacctgttctcaatggagaaggcattagccagcattagccacgaagatgattcgatcatagagcttgcaaacgaggtgaggaaggtgctcaacagaacaaaggagaccaagatcactggtgccaatgcttccctgaaatcacatgcccctcttgtgcacctgtccgcgcttccagaaggcaccgttgtggactcgagatagcgagagccttggacgttggacctctactcggaatttacttccagctcttgcatgtttgtggccatcatgtactgattttcccttttcaacagttgtcgtgaggctgtatcttctggagtt

SEQ ID NO: 16339 - DNA, 1357 bp, Zea mays
  Clone ID: LIB3062-038-C5_FLI
tcacgacatcaacctgtccccatccatctcgcccgcgacgtttgatggagtctctcctcgcctcgcgatccattaggtcttccttctccgccgtcgccagcatcaggggcgccgcttcccccaggccctcgcgcgtcgccaccctcgccagcgcctgcgccggcgcccgctcccgcgcgctccgtgctggccacacggactcaatccttgaggtgctggcacaggacgatatgctgaacgcaaaggagctggtccaatgggagaatggcttgtcattcaatgacatagcggctaggcaggggattcgcatccgcagacactgccgccccactgcctccttgaaggagatagaggaggagctgggagccccccttaacatcctagagaagatcatttgggacaaggagattgaagtagctgaggggcatgctaagaagcctcttgaggaggtgattcaggctgcaacgaaagcccctccttcaagagacttctatggcgctttagaagctgcctacaagcgtaatggggtgcctgcattgattgctgaggtcaagaaagcatccccgagtaggggtgtgctcagggagaactttaatcctgttgaaattgctcaagcttatgaaaagaatggagctgcatgtctgagcattttgacagatgagaagtactttcagggaagctttgataatcttgaaaaggtgcgcagctcaggagtgaagtgccctcttctctgcaaggagtttgtcattgacaagtggcaaatctataatgctcgctctaagggtgctgatgcaattctactaattgctgctgtgctaccagatcttgacataaggaaatttcttcagatttgcgaagagttgggaatgacagctcttattgaggttcatgatgaaagagagatggaacgtgtgctgaagataaatggagttaagcttattggtatcaataaccgaagccttgagacatttgttgttgatacttcgaacaccaagatgttgctcgagaaacatggggatatcatcagggagaagggaattttggttgttggtgaatcaggtctgtttactccggatgatgttgcttatgttcagaatgctggcgtttctgctgttttggttggggaatccctggtgaagcaagagtgccctggacgagccattgttgggttatttggcaaagaactgctgcactgagaggacaaagattgtagtagtacatggtttggtggtgaggtgttagtgctaggctgctagctgttagccatagcatcatttgcagtaatagcattggttttattaataataccaccgaatgtgacatgcagaataaaaataatgttcaataagttccattc

SEQ ID NO: 16340 - DNA, 925 bp, Zea mays
  Clone ID: LIB3062-038-D11_FLI
gctaccagcaccacagcctagcaccccaccgcgtctagggttttctgctccaatggccgccgcgggggcagacggggagcgcaggatcggggtggccatcgactactcggagagcgccaagaaggcgctggactgggccatcgacaacctgctccaccacggggacaccctcgtcgtcgtccacgtcctgcaccacggcgcggaggagaccaagcacacgctttgggccaagtccggatcccgtaagctcccccactcaagctctcgccgcatccatccctacccttacccaaatgctcacccgctgcccgctggtgtctgtttcggttttgtgacggtcttggctcgtcggctccatctgattcgctcgatcggtgggtctcgcttgcttcgatccccgcagcgctgatcccactctccgagttccgggagcccgaggtgatgcagggctacggcgtgcgccccgacgccgaggtgctcgacgcgatcgacacggcagcgcgccagaagcagctgaaggtggtggcgaagctctactggggcgacgccagggagaagctctgcgacgccgtcgaggacctcaagatcgattccctcgtcatgggtagtcgcggcctcggcccgatccagaggattctcctgggaagcgtgacaaactacgtgctgtcaaacgcatcgtgcccggtgacagtcgtcaaggggaagtagcggcctggacagcgtgccagtgatatgaatgaagatgctagcgtgcagtttgtgtgggttatagctaaacactatgttccgtcttgttgctgcatttcaataaagcatgtgtcttctagatttcacaaatctctctgaggctctgacctctgtcttattagctgtgaaactgtccgtacttcattcctgtttagatcgaattcgaggattggttcat

SEQ ID NO: 16341 - DNA, 1204 bp, Zea mays
  Clone ID: LIB3062-038-E8_FLI
ctcgggagtacttcgagctcgtccgcagcactgccagcggaggcgggagcccgccgccgcgatacgtgtcccgcgcgtgctccgccatctgcgctctcatgcccatccttacgctgtactatggacgcatggatgttactgtggcattttctgcattcgttattgccatagcattgcttttacaaagaggaaatcctcgttttgctcagctaaccagttcagtttttgggttattttactgtggctatctaccttctttctgggttaagctccggtcaggattagctgcccctgccttaaatacaagtatagcataccgttggccaattcttctgggtggacaagctcactggacagttggacttgtagcaaccttgatggctattagtagcatcattgctgctgatacatctgctttcctttgtggaagggcatttggtcgtacccctttgactaacataagccctaagaaaaccttggagggtgctttagctggcctagctggctgtgtgctgaccactgtgctgctgtcaactgccttacgctggccaagatcactgttgagtgccacagcttatggaatcctgatctttctgggttcattgtttggggatcttgtcgagtctctgatcaagcgtgacgctggtgtcaaggactctggatcactcattcctggtcacggtggaattctcgaccgagttgacagctacgtgttcacaggggcactctgttactcttttgtcagagtagctctaccctcgtatggggtctgaataaagcacctggatgtttgctggtttgtctctcctgccatcagcaatgcggttaccgtattttaacataatgatgagtattgctgagaatagccctagacagacaatgtggtcctcctatccaaatccaagcaaattgggcgtccgagtttctgactgatgaagatataaccgaagatcacggccgccagcttaacgtcgacagtgttacggacttagggcttgagatggcctttccagctcaaccagtctgttgcagacttgtagctttgggtgtacatagtttatccttttttttcatagggtagaaaggaaagcgtaattatccttcgcaaaagctgttaactgtgtattgaggcagcttatgtcaatatgtactatacctgttggtatcgattgttttaatgatccaatgcatttgattggtaact

SEQ ID NO: 16342 - DNA, 893 bp, Zea mays
  Clone ID: LIB3062-038-F11_FLI
acccaagggtcgcggctcaagagcacacacagccagtcctgaaacggacacgttcttggagaatcaaccaaacagatattgcaatgaacctcgtacccgaaatgaggcagcagaagatgatagtggctgggaaactgtaagccaagttgaggagaatgggtcttgtaattcaccgggcggaagtgaaccgtctgtaaatggcttctgtggagaaaacgatgcttccgtaagtggaaccgactgggatgaaaactgtgacaatgatcaggcacacagtgagatcagtgaagtttgttcaacagcagcaggcaggtctcggaacaaaagatcattcgccggactatggagatcatcaaacaccgtggaccaaaagaagatgggatccaatacactcaacggtaggtcatcaaatgccaggatgtcaaatgccaccgaatctgctgacctgaagaatagcgaagtgtgtgacagtccgcacatcacagggcagtggaggccggacctgctaaacccggacatcgttcgagctataaaaggatgcatcgactggccccgaggagtgcagaagcagagcttgaggtccaaggttctggaggcaaggattgacggcagtaaggtccagctgcgtcaggcactgaagcagaagatatagcgtggtcagccggtcactttattgctggtgggggctttcttcagctggaggcctggagcaggcaaggcagcgacccgcgatatgaatttctgcagcagtgggtatctcagttgatgcctgacggcccactgacctgctttgcttccgtaatgaaatagttcgctcagtgccccgttgtaatcacgcctgtcctgtgtagaaatactttaatcaataagcaatgaaatcattcgaccacact

SEQ ID NO: 16343 - DNA, 980 bp, Zea mays
  Clone ID: LIB3062-038-G1_FLI
tgccaaatgggtctctgaacttcaaaccaatgggtctctggtagtgccgagaattgtcttggaagcacttcctgctgttttactattcgaaaagaagcaaaaggcaaaagctattgatataatagtgagtgaatgcagggataagggctatgacggtattgtgctcgagtcctggtcaagatgggctatttatggcgtgctggatgatcaagagctacgttacatggcacttgaatttgttaagcagctgggagaggctttgcattcagtcaattccaaatcaagtagccaccatttggaactaatttatgttattccggctccaagaatgcaaaagctcaataatcaggactttggacccaaagatctcatgcatctggctgacactgtagatggtttttctcttatgacatacgacttctcaggacctcagaatcctggtcccagtgcacctctgaagtggatacatcattctctagcagcacttctttcagcaaaaggttcctctcatagcaattcacattcacggatgatattccttggcatcaacttttatgggaatgattttctactgtctggaggtagtggtggcggtgctatcaccggaagagattttgttcatttacttgagaagtacaagccatctttgcagtgggatggaaaaagtttggagcacttctttatctattcagatgaaggcgtgaagcatgctgtattttatccaacgctgatgtcactctctgtacgtctggatgaagcccgaaattggggaacaggcctttcaatttgggagatcggacaaggtttagactacttctttgatattttataggaatgtctcaatatgtcttttggtactgtgtggagttgtgtccactaatctagtatgtgaattatgcattttggtactgtatgcaccgtgggcattgttcttttcagcattgtaatatcagctggcaacagctcacattaaccgtgag

SEQ ID NO: 16344 - DNA, 1510 bp, Zea mays
  Clone ID: LIB3062-038-G3_FLI
ctttgagggcagttcttatgatgcttctctctcctagccaattcattttctctgagaaagttagatgcggggattgtgtgccatgaatgcagagatcattacaacgaaggtttggttggagtccttaaacaagccttgtgtcagaacatgagcccagggcccaagtcttatattgcacatatactgagtatgtttggcctctgtggttttccaagcaagctaggaggaaatatgagaaatgttttgtgtgacagtgagttagttgatctggaactgttgcttgcagatggcgaatctctaagtgctcatgcggctatcctatcagcaagatgtcctaaattattaccatctgaaaaaacttttgtccgtgatgggtcagtaacttatgaatggggcagaaggtcatgctatcatgttcgaatgtctgatcgtgtagatagtcacgctctgaagaaaattttggagtatgcatacactgggttggtcactgtagatgatgccactgttaagcctgtaaaaacacttgcaaagtattgccatttgagatcgctacacttgatgcttcagaaagagcaacctagatggcactcatgtcccatatatgatcttactacagcactcgaaccagctaaacattcgttctcggacatcattttggaggcccaatcaaatgacaaaatggagtgtcaccatggttcgtgccagttattgactcctcatattcatagccataaggtcattctgagcgtgagctgcgaatacctccgtgctttgttccagtctgggatgcatgagaggtagctttgcggagactatcagagttccggtcggatgggaagcactgagaaaacttgttcagtggttctactcaggcgagctgcctagagttccacctgactgccgatggaaggctatgagtacagaagagaagctatctatcctgaaatcgtacgcggagctgtcgtccctggcggacttctggttcgtggacgggatgaaggaagagagccttcaagtgttgacctcgtgcctgaattcctccagcacagacgcctccctcgccttcatcggcttcgcggcgaacttgggccagtgggagctggtggaggccgccatcagcagcgtggcgcatctgtaccccaggctgcgagactccggtcggttggagcagctcgatgaggacgtgctcaacatgctgcggacagagcatgtcaggtatttgcagcaccgcagtgcaagtaactgaatccttaatgtcatggagggttttttttccccgtccactggtggtcgcatagcggtcctgttgtggtggtgtatgcacagctgttgcgttaaaaaaaactgtacagccacttccgttgaagcttatggcgtcatgaacggggctcatctccgttgaaacaggtactctctccgttcttttttatttgtcgcgttttagtaaaaaaaatgaattagcggacgataaatattagagaacggatgtagtatattagtattggttgat

SEQ ID NO: 16345 - DNA, 826 bp, Zea mays
  Clone ID: LIB3062-039-B2_FLI
ttgaacattggtattgcactctggttggctgctggtggtgatggttgggtggatggaagtatatgtcgtatgcaagatggttctcgctataagtacaggtcgagatctagagtccttatagtgggttctggggctgatgagcagtgtgctggttatggtagacatcggactaaatataggcttggagggtggaacgcattggatcaggagatgagactagatgtgcagagaatatggaaaaggaatatgggaagagatgataggtgcatctctgatcatggcaaggaggcccgtttcccatttcttgacgagaacgtgataaaaactttgttggaaattccgttatgggaaattgctaagcttgatgaacctgttggaaggggtgacaagaagatcttgagagaggttgcaaggctgctgggcctacaagaagctgctcttcagccaaagcgcgcgatccagttcggttcaaggatagcgagggagtcgaaccgcaagaacttcggcagcaacagagccgcgaaccaggcatcagcaggcagcgtgcagattcaccagagtccagcttctccagtggcgtcggccacacgccagccatttcttaccaacaatcagccatgaacacgcttagctgtgacaagtgccgcatggtttggttgatggagcatcattatcagttgttacggttcatcacaaattttcaaacgattcattgtcagctggatggagcatccatcatttgttatgtatactagccctgaatcctgatcatgtaacagcaacttggacgtggttgaaacctaaaagtggccggctgctttgtgtc

SEQ ID NO: 16346 - DNA, 1344 bp, Zea mays
  Clone ID: LIB3062-039-C1_FLI
cttcaccttcggtatcctaggtaacataatctcgctgatggtgttcctttcgccgctgccgacgttctaccgcgtgtaccgcaagaagtcgacggaggggttccagtcgaccccgtacgtggtgacgctgttcagctgcatgctgtggatcttctacgcgctgctcaagtccggcgccgagctgctggtgaccatcaacggcgtcgggtgcgtgatcgaggcggcgtacctggccgcgtacctggtgtacgcgcccaaggccgccagggcgctcacggccaagatgctgctggggctcaacgtcggcgtctttggactcgccgcgctcgccaccatggtggtctccagcgccggcctccgcgtgcgcgtgctcggatggatctgcgtcagcgtcgcgctcagcgtattcgccgcgccgctcagcatcatgcggcaggtggtccggaccaagagcgtggagttcatgcccatctcgctctccttcttcctggtgctgagcgccgtgatctggttcgcgtacggcgcgctgaagagggacgtgttcgtggcgttccccaacgtgctgggcttcgtcttcggcgtcgcgcagatggcgctgtacatggcgtacaggaacaaggagcccgcggcggtcacggtggaggtgacggtggaggaggcgaagctgccggagcacgccaaggaggtggtggtggtggccgaggccagggcgagctgcggtgccgaggtgcaccccatcgacatcgacatcgaagctacgccgacgccggtggaggaggtgcacgagccgcaggtggtcgtggtcgtcgacgtggacgtggagcctgtcacctgcgccggcgccgccgaggcagctgcgggagcaggggcagatgcgtccggcgtggccgacggcggcgtccatggacccatggcgccgccggagcagctggcgatcaagcccgacatggccatttccgtggaggcgtaggttggttaaagtgtaatagcagagtgagtcgacgatatcgatcagtagtaggtttgtcgagtcaaggaagtggcctgctgctgctactacgcgacagcagcggccagatgcactgcctgcatgcatgcagtccctcccgttgactcgacccgtagagatgggatggaacggaagtagcggcgccttggcacccacggccagccgtactggcctgtgtgatgaaccggcgagagagatatgagataatgtgcgagcgagagagggttgggttgtggtagttgaagaagacggctagctaggtgctgctgggctctctatctgtctctagatctgtgtgtgtctgtgtaatcgattccctcagcttgcttgccgcc

SEQ ID NO: 16347 - DNA, 901 bp, Zea mays
  Clone ID: LIB3062-039-D7_FLI
gcagactttacttaggccgtccacaaggagaccctcctcagctagtaccagtagtcgtcgcatttgcaggcagatctgagttagccggcggatccgatccgtgcgcctgctgtgtgtgtgtcggtggagatggccacagcttacgctcccatggcgagccaggtgatgaagagcagcctcgtcgtgcactcgaggccgaggggcctgtcaggcgctgctgcgctcacgaggcggccccggttcaccgtcaaggccatccagcccgagaaggcaacgtaccaggtggtgcagcccatcaacggcgaccccttcatcggcagcctggagacgccggtcacctcgagcccgctcgtggcgtggtacctctccaacctcccggcctaccgcaccgccgtgagcccgctgctgcggggcgtcgaggtcggcctcgcgcacggctacctcctcgtggggcccttcgcgctcacgggcccgctccgcagcacgcccgtgcacggccaggccggcgcgctcggcgccgccggcctcgtcgccatcctcagcgtctgcctcaccatgtacggcgtcgcctccttcaacgagggggacccgtccacggcgccctcgctcacgctcaccggcaggaagaaggaggccgacaagctgcagaccgccgacggctgggccaagttcaccggggggttcttcttcggcggcatctccggcgtgctctgggcctactttctcctctacgtgctcgacctcccctacttcttcaagtagaaatcatcaaagatgcgtatatatatagctccggccgatcctcctctctagctgcatggtatgtaggtggtgtggtccttgtttcatttcactccagcggtgatcagcgccgtgtataaatgtaattcctctgctttgc

SEQ ID NO: 16348 - DNA, 1758 bp, Zea mays
  Clone ID: LIB3062-039-F3_FLI
cagcactgaacacttgattgattcagtaggtagctagctagctgaatcacaatggatcctaccaagttccgtccgtccagtagccacgacacgacggtgacgacgacgaacgcgggcgctcctgtgtggaacgacaacgaggcgctgactgtggggcctcgcggtcccatcctgctggaggactaccacctgatcgagaaggtggcgcacttcgcgcgcgagcgcatcccggagcgcgtggtgcacgcgcgcggggcctccgccaagggcttcttcgagtgcacccacgacgtgacgtcgctgacgtgcgccgacttcctgcgcgcgcccggcgtgcggacgcccgtgatcgtgcgcttctcgacggtgatccacgagcgggggtccccggagacgatccgcgacccgcgcgggttcgccgtgaagttctacacccgcgagggcaactgggacctgctgggcaacaacttccccgtcttcttcatccgcgacggcatcaagttccccgacgtgatccacgcgttcaagcccaacccgcggtcgcacgtgcaggagtactggcgggtgttcgacttcctgtcgcacctccccgagagcctgcacaccttcttcttcctcttcgacgacgtgggcgtgccgtccgactaccgccacatggaagggttcggcgtgaacacgtacacgttcgtgagcgcggcggggaaggcgcagtacgtcaagttccactggaagccgacgtgcggcgtgcggtgcatcctgacggacgaggaggcggcgctggtcgggggacggaaccacagccacgcgacgcaggacctgtacgactccatcgcggcggggagcttcccggagtggacgctgtacgtgcaggtgatggagccggacacggaggagcagtacgacttcgacccgctggacgacaccaagacgtggccggaggacctgctgccgctccgccccgtggggaggctggtgctggaccggaacgtggacaacttcttcaacgagaacgagcagctggcgttcggcccggggctggtggtgccagggatctactactcggacgacaagatgctgcagtgccgggtgttcgcctacgccgacacgcagcgctacaggctggggcccaactacctgatgctgcccgtcaacgcgccgcgctgcgcgcaccacaacaaccactacgacggcgccatgaacttcatgcaccgcgacgaggaggtggactactacccgtccaggcacgcgccgctgcggcaggcggcgccgcccacgccactgccgcccaggccggtcgcggggaggagggagaaggcaaccatacgcaagcccaacgacttcaagcagccaggggagaggtaccgctcctgggacgccgaccgacaggaccgattcgtgaagcgattcgccgactcgctcggacacccaaaggtcagccaggagctcaggtccatctggatagacctcctcgccaagtgcgacgcgtcgctggggatgaagattgccacccggctcaacatgaagccaaacatgtgatgcatcatgcttgtgctgaataataatgaagacgcatgcatgtcgtcgccaggaacaaagatcgacaaataatacaagaccagcacgcatgggcatactctatatatacgtatagcccgtgcccgtgcccgcctttgtaccaatacaagccaaaccaagtggatgtgtattattattattattactaggtgagtgcccgtgcgttgcaacggaacacaaact

SEQ ID NO: 16349 - DNA, 586 bp, Zea mays
  Clone ID: LIB3062-039-G11_FLI
aataaattggacaccaatcatcactggtgtgagcgccatcccttagtgatctgagccatggagctggctttcctgctttcacaagagcagcacttgatgggcactgagatactgggattgtgtggatttcgagcctggactattgaaatgaacagaaaaccaaacagtcctaaccaaatccagcgtctatgtgacgaggactgattaaggcaccagtgcagggcttcagcgacaatgttcagccaagacattgcaaaccaatataaagatattttccttgatgcctcctatcccccaaaatgattgctcctccttcattgacattggagaaacacataactctgttttttcctgaacgggggatttagaagcatcatgaagggtgtatgtgtagtgagaagctatagatggtgaaggagatagatataggtaatagcagtatggtgtgacaatatgggcggaacaaatgtacaatgtagctatagatatatgtggaatgaacttccgatccttttttttcagttcagctactgttaacaagtactaccaataaattataccgcaatgcatatatatgtcagttccc

SEQ ID NO: 16350 - DNA, 1375 bp, Zea mays
  Clone ID: LIB3062-040-F3_FLI
ccgggggctggaaggaccggacgacggtggaggatatggacctggctgtccgtgcgatgctgcagggctggaagtttgtttacgtcggcgacataaaagtacgccggtgctaacgatcatcactactttctcgcacggaactcaagagcataacaagaaacgaattctaacgatcctcaggatatataactgcatctgtatgtatgtgcgttaggtcaagagtgaattgcctagcacgttcaaggcataccggtttcagcagcacaggtggtcttgtggaccggcaaacctgttcaagaaaatgatggtagagattttagaaaacaagaaagtgtcattgtggagcaaaatctacttatggtacaatttcttcttcgttgggaaggtcgctgcccacacggtgacattcatctactactgctgtgcgatccccgtgtctgttttgcttcctgagattcagatacctctctggggagttgtctatatcccgacgctcataaccctcttgaaggctcttggcacaccaagttcgtttcacctggtgatcctctgggttctgtttgagaatgtcatgtcactgcaccggattaaagctgcagcaagtggtcttctggatgctggtggacgagtcaatgagtgggttgtcaccgagaagttgggcgacaccagcaaggcaaagcctggcgccaatggatcagatgatgtaaaggtgatagatgtaaagctaacagaacccctcgttcccaagctagtgaagaggcgagcaagattttgggagaggtacaactgctcagaacttttcgttggaacctgcatacttctgtgtggtttctatgacttgctttttgcaaagaagggatactacatttttctcttccttcaaggcacggctttccttgttgttggctttgggtatgtcggcacactacctcattgcaatgcataagctggcatggacaattcatataccttcttactagaaacagatcaagcaaagttcctctctcctgcccatatggaacttcaatgatagttgagcaatattcccatgatcagtcttggccagacatgattcactgccaagaaggttgttcagatgtcgtcgtcactcttctgtcagtctttattgtcaagaaggccattcaaatagtgtcaccgttccaaatttataataacagtgtttactgaagcatcatgacatacaagaatgattggtgcagcagcatttagtaaacatcccgtagagatgcagttcacagtcgtgaaagaactgcagctgctgtaaatggaatagcaccagttgccaatttctgtagatctccgaacttttttttggaaattttgtgatattactcagagttcagatcaataatgg

SEQ ID NO: 16351 - DNA, 772 bp, Zea mays
  Clone ID: LIB3062-040-F8_FLI
gcgcagcttagatcgagtccaagaggttccccatgagggacctatgtgcgatctcttatggtcagatccagacgaccgatgtggttggggcatctcccctcgcggtgctggctacactttcgggcaggacatatcagagcagtttaatcacacaaacaatctcaaactcgtagctcgggctcatcaattagttatggagggatataactgggctcatgagcaaaaggttgtcaccatattcagtgctccaaattactgctatcgatgcggcaatatggcatccattttggaagttgacgactgcaacagccacacattcatccagtttgaaccagcccctaggagaggtgagccagatgtgacgcgaagaacaccggattatttcctttgagctgtcgatgttaccgtttcccagcctgtgtcgtgataatcgatgccaacgtctgctggatcaagggccagacagaaataacaggggaatgccgaagcactatgcccagagtttcacccttttcaggcgacagagaagggcggccatccacctacaactctggccgccctctgttttatgcactttttacagagtcgtggaactggccaaaaagaccggagtaccatttgcacctgtgtagcgtaagcttgtactacaaataggcgtgtgctaatctgtatcaccattcatcaattgcaacgaactgttgaactccttccatcagtaaagtaaattttggtaaaagaacggcttacagtgtcggtaatgacactatcagac

SEQ ID NO: 16352 - DNA, 749 bp, Zea mays
  Clone ID: LIB3062-040-H4_FLI
gctctactgaacattaccgctcatcatcagggtacacagagagaagagagagagacctacagagatggcctccggcggctccagcaagcagctgaaggctagtcttctcatggtggtagcagctctgctcctcctcatctgcacctgcactaccagggggcaagcggcaaggccggatccaggatccgagggccacacgccacagcagctgcgcgctgctgtatccgtctccgttgctgctggtaatgagaaggagagtggctcatcagtggccgtggtggaaatgcgtcggcagcaagagccggaggcggtgagtgaatgtgaggacgacgacggagacgacgaacaggcggagtgcctgatgaggaggacgttgctcgctcacaccgactacatctacacccaggggaagcacaactagctagtcactgctcactagcctgtgctgctggctcatgctcatgtcatgtcgaggaaacaagttcaagggacaaaaacaaaacaaaaaagctcgcatggttcacgagctagcctagccaacctgaagttctacagtgccgtacgtcaactgtgtggattgttttaaaatatatatacctagtcttttcctttctgcagttctgccaggctgtggattattttcatatttacttcgctaattactccctgtgatttccccatcggctttctcgagatcatgtacaatatagttagtagagaaaaatataaacgcatatattggagattcg

SEQ ID NO: 16353 - DNA, 1274 bp, Zea mays
  Clone ID: LIB3062-041-A2_FLI
tagaaagaagatgctacgagcacaggctgagagggagatactagaaatgctagatcatccatttctccctactctttatgcccattttaccacagacaatctctcatgcttggtcatggagtactgtccaggcggtgatttgcatgttcttcgccaaaggcaacctggaaaaagctttccagagccagcagcaaggttttatgttgcagaagttctccttgctttggaatatcttcacatgttaggggtcatataccgtgatctaaagccggagaacattttagtccgtgaagatgggcatataatgttatcggacttcgacctttcactgaggtgctcagtgaatcctgtgctccttcggtcatcttctgttactgcgaaccaccaaccgaggaaacatacaggaccttgtgcagagaactactgcataaattcgtcttgcctccagcaaccctcttgtgcccaaacatcttgcttcacaccacgcctaccatcaattccaaagcctcggaaacctaaatcctcccagaaaaggcttccacagcttgttgtagagcctactgatgcacgttctaattcctttgttggcacacatgagtaccttgcaccagaaatcatcaaaggggatggccatggaagcgctgttgactggtggacgtttggtgtcttcctttatgaacttctatacggcaagacacccttcagaggacctgggaatgatgaaacattggcaaatgtggtctcgcagaatctccggttcccagaccatccagctgtgagcagcaacaccaaagatctcatcagaggtttactggttaaggagcctgagaacagatttggatcgttgagaggagctgctgagatcaagcagcaccccttctttgaaggcttgaattgggctctgattcggtctgctgctccaccagagacacaaccttgcaacatcgtgactcttgccaaagagcggaagaaagaaggcaagtgcctggagttcagaagcaactcagaggaccttgagtttgaagttttttagtttcgttctggtacagtttagcactatttccgctgatataagcctacatttttttttctatgaatagccaaaggcttgggggtgtacatgtagatccttgtatttcagtaattgctatgtccctgtcaatagcatcaccaaattgaaaagaataagcagcttatgctattattatcattgctgctgcatatgaattggttcctattggagacccagtaaattttactcgtgtatttgcatg

SEQ ID NO: 16354 - DNA, 545 bp, Zea mays
  Clone ID: LIB3062-041-F8_FLI
ggggccgagggagggagcctgctccgctctgcagcacgaacatgatgaagccatcgtgtgtactgcttgtttccagccttcttgtagccactcttgcagctgcttcttcgtcctctcctccgtattccgtcggcaagcacccagggtggctgctggttctaggtcgcaaaggcagagaactcggccagtcgtcagggtaccattaccagcatcagagcaagcagcccgagctgcagggagtggctatggaggtaaagatacccgaggaggaggcgacggcgaggcggacggccgatcagagcggggacgccgaggcagggctgatctacagcgcggactacagcagcgtggccatgcatgctgcctctccgccgacggcgaagcccaagcacaggcaccccaccagaccataggaagctgtccttttatgtagccaatcgtatgctgtccgtttcgtgtgtttcttatctcgctggattgtacgagcagaagcacccctgccgtctctgtaaaatataggccctcctgatgtgctgcttctttcc

SEQ ID NO: 16355 - DNA, 698 bp, Zea mays
  Clone ID: LIB3062-041-G7_FLI
agaccatgaattatcgtcatcgctattcaattttttacttttcttttcacccgaataatcatatgagttggttccaagatcacaggaccaacgtgctctgtttggacaaattggtgaccatttctattcacgtttcatccatgacttgcacgtgcagagatcagggcctcccctcgatgatgtggagatgagaatccgacggcccctgcctgtgcctggaatttcctctgtccgtcccggcgtcctcgtcctcgtcctctgcttccaattccagagccaattcaatggcagcgaattcgttcccgtccgtctgagcccgacccgcctactcactcggggatcgcggtgaggtccgacgcgaagcgcacgaggcgcctgccggggcgcgcgggccgccgcaccggtggcgccgccaaggccgtcgtcttgtgctgctcgcgctcctcgtcctctggcggcggcgcgaagacgaggggcgcgacggcgccgcgtctccgccgtcccggcgcggcggaggcggatgcggatgcggaggcccgggaggagagcgcggccgaggcccggacggcgagcgcggcgacctcctcgcgccgcaggccgcggcggcgcgcggcggccgggagcacgaagtagagctgccccgcgcggagcggctccgcgtggggcaccgccggcggggccgggccctcgaagcccat

SEQ ID NO: 16356 - DNA, 436 bp, Zea mays
  Clone ID: LIB3062-041-H11_FLI
tcaatatagtcacttcgtcttcctaatcacctaggggaaggcgaatatataatacatcttgatcatttgcaatggaaggagattaaatacatgacaccaagaagtcaggatcttggcataggaaacaaatacatagtctgtccagacctcaaaatttgagttggaatcttggaattgacatttccttataactcaattccagtattttgctgagaaaatcaattgtaacatggaatccaattccagccttttcaaattgtatctaggcgtagacatttctagaatttgtctagggcgacacaaaaggaaatgtattgcatttttattgcctaaaacaaactttggcattaggtcctgtttggatccttgaattgaattgtattctaacaatcataatttagacatagatcaattaagttaatatagttttacatgg

SEQ ID NO: 16357 - DNA, 1151 bp, Zea mays
  Clone ID: LIB3062-041-H7_FLI
cctgcgctggtctcgccatggccgccaaggtaaaccaatcgcctcagaactctcgctcgattcgcagagcttcggcggcccgggggtttaataactaacggagttcatcgctcactcggctcgtcgtgtcgtggcgcagaaggtggtgctgaagctggacctgcacgacaacagggacaagcagaaggtgctcaaggcagtctccactctccacggtactcctctcctctcccctgctctgctcccctccaccgtcactgtcatggaggccgcgcgcctgcaggagtaggaccctccgcgacctccctcaagtatattcgtagcgagtgagtccgtgtccgaattctggtctctgacgcggcggcaaccccacgcgcgtgcgcaggcatcgactccatcgcggtggacatgaaggagtccaagctgacggtggtcgggctggcggaccccgtcgacgtcgtgggcaggctgcgcaaggtcggctccgccgccatcgtctccgtcggcccggccacggaggagaaaaagaaagacggcgacaagaaggaggggggcggcgacaagaaggacgctgacaagaagggcgacgacaagaagcccccgccgcccccggtgtacccgtacccgtacccgtggcacgcgtacgccgccgccgccgccgccgcgcagtaccagtaccacccccggccgtacccgccccagtacgtcgtccacagcgccgaggaggaccccaactcctgcgtcatctgctgatctgatgccggcgtggcgcagcacagtcaccgtcttcttttttgcacattcctatatttgttgttgttggcctgcttgcctacctgctcgatcgaccgccacgtcgtcggtgatcgccgggaccggggcgggtgtggtggttggctgctccgctcgtctctatgctggcggtggggttggtcgttggcccgtgtccgcaggtcgttgcaatcatgcaggcggtccatccaaaagtacttgttgccttgtcggggttctcaggctgctgaccagcgtggttgcgtagtgtgcatgcggttttttgtccttggctatttgcctattcggggtgtttgaggcatgaaatgaaactatatatagagagagagatttataaagattaattgaccttgtaatgt

SEQ ID NO: 16358 - DNA, 1312 bp, Zea mays
  Clone ID: LIB3062-041-H9_FLI
gattgaaaaagaaaatggtcttgcggtcttgctctccttcctcgtggtcggcggccggtgcagctgtagccacgcgcgcctcggcaaaccctccgcctcctctcccatcctcccctccatcccgtcccagccgcagggccatggactcttctgccggcgcaggccgccaccgcgttcgaatcgcagtcgtcggcgacgtgcacaatgattgggcccttgaggaagattcaaaggcgcttcgatttcttcagccagatttagtgctttttacaggcgattatggaaatgagaatgttgaacttgtcagaagcatttcagatcttcagttaccaaaggcggcaattcttggcaatcatgattgctggcacacacatcaattctcagagaagaaggtcgatcgtgttcggcttcagctcgcaagccttggtgagcagcatgttggatacaaatgtttggacttcccatcaattaagctgagcgttgttggtggacgaccattttcttgtgggggtgataggctacttagaccaaggcttctgtcaaaatgttatggtgtcaatgatatggctggaagtgcaaagaagatatacgatgctgctgcaggtgcaccagagggacattctgttgtattgcttgcacataatggaccaacaggtctaggttcaaaaatggatgatatctgtgggcgggattgggtacctggtggcggtgaccatggcgatccagatcttgagcgagccatctccgatttgcaaagggaagccagagtttccatcccgctggtcgtttttgggcacatgcacaagagcctggcctacgggagaggcttgaggaagatgatcgcctttggagccaaccacatcatatatctgaacggagcagttgtgcctagagtgaaatttgcccaaacaactcctgggcacgagcaaaatcaacccgaaggatcgggatccatagctccaacgttgcgcgcgttcaccattgccgatctctatgaagggcgtgtggagaagatctctgaggtctgggtgctggtgagtggcgccaggaccgaggtcgaggaggaaatcgtcttgtataagcatcctcgagagcagcatatgttgtgatggttatgagaccattatcttaccaaaaaaagatgtggtgttgtgagacgaaaatgtgatttgtgaatgccgtaaatgtgggggcgatgctgaagttgtgtgttataaagagccaaatgtgggggcgatgctgaagttgtgtgttataaagagccttgtattcgaactgaaaggagcacttcattatagagatcttttacctc

SEQ ID NO: 16359 - DNA, 1402 bp, Zea mays
  Clone ID: LIB3062-042-B6_FLI
agcttgcacttctcatgacactggagcaggggaaacctatgaaagaagcccttggtgaggtcaattatggtgcaagtttcatagaatattttgcagaggaagcaaagcgtatatatggtgacatcattcccccaactttatctgatcgcagattgttggttttgaagcagcctgttggggtagttggagctattacaccatggaattttccattagcaatgataacccggaaggttggaccagctttggcctgtggctgtactgttgttgtcaagccatcggagttcacacctctgacagcattagctgcagcagatcttgctcttcaagcgggaataccagcgggtgcattgaatgttgtgatgggtaatgctgctgagataggtgatgcgttgctgcagagtacacaggtcagaaagattacattcactggatcaacagctgttggcaaaaaactgatggctggatctgcaaatactgtgaaaaaggtctccttggaacttggtgggaatgcaccttgcattgttttcgatgatgcggacattgatgttgctgttaaaggcagtcttgctgccaagttccgtaacagtggacagacatgtgtttgtgcaaacaggatattggtgcaagaaggtatctacgaaaagtttgcaaaagcattcatccaggctgttcagagtttgaaggtcggtaacggtctagaagagagtacatctcagggtcctctgattaacgaagctgctgttcaaaaggtggagaagttcataaatgacgcaacttcaaagggagcaaatgtcatgctaggtggtaaaagacacagcctgggaatgtcattttatgagccaactgtagtagggaatgtcagcaatgatatgcttcttttcagagaagaagtttttggtccagttgcaccccttataccgttcaaaactgaggaagaagcagtccatatggccaacgatacaaacgcaggcttagctgcatacatttttaccaagagcatacctcgttcatggcgtgtatctgaatctcttgagtacggcttagttggggtaaacgaggggattatttcaacggaggtggcgccatttggcggagtaaagcagtctggtctagggagagaaggatcgaagtacggcattgacgagtacttggagctcaagtacatctgcatgggcaacttgggttgagtcctgaagtcggcctctagctcgaaacactcggcagatgatgaacggagaaaccaggcgtgcttagaagggcgtgagttgcgtttagctgcaagatcggtcatgatggctgtgggagagcagttttagaataaatcgaataagccgcggagcattaaataaaagaagtggaaatgagatgtaaatggcgtggaactataaagtatagcttc

SEQ ID NO: 16360 - DNA, 1123 bp, Zea mays
  Clone ID: LIB3062-042-C2_FLI
aaagaatgctcctcctcctatggtaaggttgtctgggaaaagtttggtctctgccatctggaaaggggacagttcgatagttgctgaacttcttcagtcgatggaacctcatgttgaagaagaggtacttagtgatctgaaggccaaaatctgtgctcatgacccatcagattctgaagatattgagggaggcatccgtaattctctcttgtggctgcgtgatgaattacgaactcttccatgcacttacaagtgccgtcatgatgctgctgcagatttgatccatttgtatgcttatacaaagtgctttttccgagtccgggattacaagacagtaaaatctccaccagttcatatcagtccgcttgacttaggccccaaatatgccgataaactgggaccaggctttcaggagtactgcaagacatacccagaaaattactgcttagcccagcttatctattggtatagccagaattcagaacctgaatctagattgacaagagctagaaaaggttgcatgtcattgcccgatgtctcgtccttctatgtgaagtctctaaaaccattgcaagagcgagtttatgggaacagaactgtgagattcatgttatcacgcatggaaaaacaggcacagagaccatggccaaaggataggatatgggtgttcaagagtgatccgagatactttggcagtccaatgatggatgccgtgttgaataattccccccttgacaaggagatggtgcattggctcaagacgagaccaaacgttttcctaggctagaaaaaaaatgattgtaggcagataagatggtatttggttgtttctcccttttggagattttagtctgcaggatttttttttttccaggctcacaccttggctacctgatcacagggagtttagcttatagatagcagggtaacagtcaccaccccccatctgtacattccccagtccctacataccttgcggagatgtatctggttagtaaatgatagatttgtcattgatttaatgtagtgaattttcccataggaatgcccccccctcttttgtttcatgtaaatgcagaacaatttcaatcttgaattcagtaatgtgttacaggcattttgc

SEQ ID NO: 16361 - DNA, 583 bp, Zea mays
  Clone ID: LIB3062-042-C7_FLI
atttctgggctcctagttcagttttggtgcagctacagcacactgccgctgaatgtgattatttctcagatgggttccaagttcaagaaatcactggtctcggagaacgtgagggagtcgctgcacagctggtgcaagagggttaaggacaggagccgacacaacccgctcttctcgcggaacgggaccctcacgaccagatccgtgtgctccctagacaccacctacgagacggatcacgagacgaacacggtgtgcacgctgtcgaggacggcgtcggcaacgtcgctggacgaccagttgaccgtggtcaccgtcgatgacgagccgtcctgcattgagaaggatgtctgacgcagttgctgattcgccaaaactacatactgcatcgacctgtgtgttaggaggtactctaggactgaaatgaatgtatatgtgcagtggttgcccctatcgtggcagtgaccatgtgtatatatagaactaaaaaaactataatgtctcttagctgagagtgagaggctgtacatggaaatacttgaggcagcttggaccaaatacaaaactgcggccccgtttgttt

SEQ ID NO: 16362 - DNA, 1415 bp, Zea mays
  Clone ID: LIB3062-042-E2_FLI
acgcgtacagattctccatctcttggtccagaatactgccgaagggaacgctcgaaggaggtattaatcaggccggcatcaagtactacaaaaagctcatcaacttattgatagagaacggaatagagccatttgtaacaatttttcattgggacgtccctcaagcactggaagacaagtacggtggctttttaggcgacaggattgtaaaggattacacagacttcgctaaggtgtgctttgagaacttcggtgacaaggtgaagaattggttgacctttaacgagccacagacatttacaaccttttcgtacggaacgggagtttttgcccctggacggtgctcaccaggagaaaaatgtgctcagcctattgctaactcactcaccgaaccatacattgctggccacaacatccttcgagcccacgctatgactgttgacctctacaacaagaattacaagggtacagacggccgcattgggcttgcgtttgacgtaatgggtcgcgtgccatatggaaatacatttctcgatgaacaggcccaggaaaggtccctcgatcaaaacctaggatggttcttggagcctgtggtccgtggtgactaccccttctccatgagatcattagcgaggaaacggctacctttcttcacggataatgagcaagcgatgctagcgggttcctatgacatattggggataaattactatacctcaaggttctctaagcacgtcgacttctcagaagactactcacctaagctcaacgccgacgacgcctatgccactgcagaaatctttggacctgacgggaattctattggtcctcctatgggaaatccatggatctacatgtaccctaaaggcctaaaggatctccttatgatcatgaagaacaaatacggaaacccgcctatctatatcaccgagaacggaatcggggacgttgacacaaaggataatcctctatccatgcaagatgcgttggacgactacaagaggctagattacctccagcgccacatctcagttatcaaagaatcaatagacttgggggcggacgtgcgcggccacttcacatggtctctgttggacaacttcgagtggtctagtggctacaccgagcgttacggcatcatctacgtcgaccgtgacgacggctacaggcgctacctgaagcgctcagctaagtggctgcgagagttcaacggagctgccaaaaaggctgaaaagaaggttcttacgccagcttagaatgtagtggtgtgtagtttcagttcagctgtgtgtctgatgtgtatggccgtgggatgaaacaagctagaatgtagtggtgtggtagtttcaattcagtagtgtgtgtccgacccgttttatgcaaataaataattaatggacgtgatccatttgtcg

SEQ ID NO: 16363 - DNA, 1011 bp, Zea mays
  Clone ID: LIB3062-042-E8_FLI
gtcttagtacattggttttttgtactaatatacttgtctaagtattagaaacaggaagaagaagaagagaagaaagttggctgtgtacaaccaacaggctgtttcggtctggggcaccggactgtccggtggtgcaccggacagtgtccggtggtgcaccggacagtgtccggtgcgccaggctgcctcggccgaagaggccgctctcgggaatttgctgacggcgttcggctaaaattcaccggactgtccggtgtgcaccggactatccggtgagccaacggtcggccagggccaacggtcggccgcgcgatctgcgcgggacacgtggccgagccaacggtcggaagggggcaccggactgtccggtgtgcaccggacatgtccggtgcgccaacggctcccggatctgcaacggtcgaccgcgccaattaaggaaaggaatcgggcaccggacactgtccggtgtgcaccggactgtccggtgcgcccgacgacagaaggcaaagatggccttccagatttgttctcaacggctcctagctgccttggggctataaaagggacccctaggcgcatggaggagaacaccaagcacaccaagcaactcttgagcattcttgatcatccacactaagtctttgcgcatccgtttgttattctaagtgattcgagctccgttcttgtgagaaactgtgagatagtctttgagctcgaatcttggccgtgtgtgtgcgcgtttcgctgtggatttgtgtgtgttgcttccctcccttactccgtgcttctctgtgaatcttaagtgtaagggtgagagactccaatttgtggagattcctcgcgagtgggataaagataagcaaggcaaaacactgtggtattcaagtgggtctttggaccgcttgagaggggttgattgcaaccctcgtccgttaggacgccacaacatggagtaggcaagttttgtacttggccgaaccacgggataaatcaccgtgtcttccctgtgtt

SEQ ID NO: 16364 - DNA, 438 bp, Zea mays
  Clone ID: LIB3062-043-B1_FLI
gcatctggatacgtcgactctaattacaaacatcagaaatatcgagaaggccatcagagattgcttggaccacttcaagagtacgcggcacatgatcctctattatgaggatataatcagcaacagcaatgcattatcccgggtgcaagagttcctcggggtcccggtgaggaggctgatgagccggcaggtgaaaattcacacgaggcctcttccggaccttgtcaagaactgggaggaagttagcagcaaactgaacgggacagagtttgctcacttccttgatggttcagattatgccaagtgatggacggcaggttattcgcatttggagttgtagttgcaaacatgctttagaattcttttgtacagatgagtttgtaatgagcaaggcataaagacaacagatgacgatcacaagtgcaaatggaatcgtag

SEQ ID NO: 16365 - DNA, 624 bp, Zea mays
  Clone ID: LIB3062-043-D10_FLI
gagccactggagcaagatctcccagggcgggctccagcgtatcgaggagaagtacacctggaagctctactcggagaggctgatgaccctcaccggcgtgtacgggttctggaagtacgtgtccaacctggagaggcgcgagacccggcggtacctggagatgctgtacgcgctcaagtaccgcaccatggcgagcaccgtgccgctggccgtggagggagagccctccagcaagtgatgcgcgacggcggccacagacctgatcgatcgatgagcgagagggagcactcggagtgtcgtgtcttttcccttgccatttctttctttttttcccttcccggaggcgaaaaaaagagtctgcttttgctaggcggcgggcgttcgttgctgctctttgcttcaagagttaaatttacctaccttgtcaaggtcttgttccatcattgatccgggtgtcgcttttttagtagtctgatggactgttagtagtttgcgttgcgtcggttgagagggaacgttggtggtggtggtgtgtgtgcagtcaggcgtggtgctccctttgtttcctggatgggatgttgctccttgaataataatcgtagtggccttggagcccttttcctg

SEQ ID NO: 16366 - DNA, 1071 bp, Zea mays
  Clone ID: LIB3062-044-F8_FLI
gccgatcgctcctctccactttccacattccagttccactccgcctccgctgccggtcgccgactccgaaactccgacagtccgaccacaaggtcttgtgcgggatccacagaaggatgagtgaagaggataagactgctgcttctgctgagcagccgaagagggcccctaagctcaatgaaaggatcctctcttctctgtccaggaggtccgtagctgctcatccgtggcatgatcttgagatcggtcctgatgctcctgctgttttcaatgttgttgttgagatcacaaagggaagcaaagttaaatatgagcttgacaagaaaactggactgattaaggttgatcgagtcctatactcatcagttgtataccctcacaattatggtttcgttccaaggactctttgtgaagacaatgacccattggatgtgttggtcctgatgcaggagcctgttattcctggttcgttcctgcgagcaagagcaatcggccttatgcccatgattgaccagggtgaaaaggatgacaagataatagcagtctgtgctgatgatcctgaatatcgtcactacaacgacatcagtgagctgtctcctcatcgcctgcaagagatcaagcggttctttgaagattataagaagaatgagaataaagaggttgctgtcgatgcattcttgcctgcgaccacagctcgagaggccattcagtactccatggatctgtatgcgcagtatattttgcaaagcttgaggcagtagattggaagcaactatttatctgggcgtcttggaatgagtgtgattttaataagtcaaaacacttgatattgtgtgcaaatcttggggttgagaacaatgtcactagctgtgatttacttctgtgacttgcattttttttcttgttaaattatgaataagcgaagtccatacgtctactgtgtggcttcttgctgggttcatcgtctacccatgttcctcaagcttgggaacatggggcttttccccatttccgtgtcttccatgcgaagtaaaatttatttgtatacaatcgtattaatctgttcatgtg

SEQ ID NO: 16367 - DNA, 1895 bp, Zea mays
  Clone ID: LIB3062-044-G3_FLI
tcaggtatatgcctcgtaagagagacttctggttaagtgtactccctttgattcaagttgtttggatcctaacttcctaggaaggcatctgaaaggatataatccaggtgactaggtcttgagcaatattgcaattatcttaaaaaggatcaactgtagtattctaccagtgtacttgaattgcttcatgcatgtacggtggcagattttagttggatttttcaattctcatggccttgcatggtgctgacagcaagcaaatattgacaggaacacctttttattgtcactgaactactgcgagcaaatctatacgagtttcagaaatataatcaagaatctggtggtgaggtgtattttactttgcctaggatacaggtatgttctgtgtccttcactgagatgttctccccgggaccatgactgctacttataatgatatcatacttgtatataatgagcatttgcaattcaccctgtagtcagcccctagacaaaagttttctaacctgctacacatttaaacagtcgtttaaccattgagctgtaaatgagcaaacttatttgatatcctgaaatggtagccttcgcaaaattgattcagaaagttacaaagttctagcaatttgaaactttgcctttgttgtaggttatagctcggcaatgtttggaggccttggtttacttgcaccgtctgaggatcattcattgtgacctaaagccagaaaatattcttatcaagagctacagtagatgtgaaattaaagtcattgatctgggaagtagttgcttcttgacagacaacttatgtctctatgtccaatcacgctcttatcgagctcctgaggtcattctaggcctaccttataatcagaggattgatatttggtctcttggttgcatcctttctgaattgtatactggtgaagtaagtatgttttatttaattgaaatgcttggtggcttgtaggattgaaactggtctttagtattattttgacaaaactttgaggcctcttttcttgtatgaatgcaataccaacgtataactccaaccagaattagaaattaatcttttttattaatgttgtaagcacatgcgagctggagagttgtggaatgggtgttttgggtgcttcttttccttggaactatatcttctttcctttacatataacaggtattatttcctaacgagcctgtgtccgtaatgcttgctcaaatgattgggataaccggcccaattgacatggaaatgctagaattgggacaggagacacagaagtatttcactgatgattatgacctttttaccgagaatgaggagacagatcagctagagtatttgatcccggagaaatcctccttgcgacaacacatacaatgtcctgattcagagtttgtcgattttctgtcttatctactgcaaattaaccccaggaaaagacctacagctgacgaagcactacagcatccatggctttcttttctcgtactaatgagaagccatccggtgctttcttcacatataaaggttactttgtctcctgacatggagccctcataaacttattgaaaaatatcgattttcttggtgtttctcttaattaacgctaatcattactcttttccttctgttgtagaatagccctccttttctgggtgcaggattcttctttttttgtgtcttcagggtaattcttgcgtttccttttttctgggtccaggattctttttttttttgtcttcagggtaattcttggtgtgaagtgtgaacccctgccctggagtgattcatgagtgtatgtaaatatcagaaaattttccgcggagtaactgtacagttgtaagcccactcttgtactcctgatcatgaatgataacatgggaatttc

SEQ ID NO: 16368 - DNA, 1349 bp, Zea mays
  Clone ID: LIB3062-045-A9_FLI
cacggccatcgtggcgagggcaaccaagctgagcgctactcgcagtcgcagttgttgcctgcccagcatgcagctctaactcaccccgtgcagcagacgccgagtcgtggcaggtagctaggaaggagggccggagggaagggaagggcaggccatggcgctggaagccgtggtgttcccgaaggagcacctagcgggcactgccaaggcgcgctcggcgtcgtcactggcctgcggcttccgcaccgaggaggtcgaggacaacggcggtgtggttctgcaaggagaggccggcgcggccaccacgtgggagtactgggacgcggcgctctgcccgtgctccactgcacctgctggtgccgtggaggagtgctgggacgtgcggcaccggctctccgcgtccccaccgccgccggcgccctccgccgccgtcgcagcgccatcgtccgggcacggcaaggcagctgccgcggcgcggcggagacggcggcaacgcccgaaggcggtgaagaacacggaggaggtggagagccagcggcgcaaccacattgccgtggagcgcaaccggcggcggcagatgaacgagtacctctccgtgctccgctccgccttgccgccctcctacccgcagcggggtgaccaggcgtcgatcgtggccggtgccatcaacttcgtcaaggagctggagcacctgctgcagtcgctggaggcgcagaagcggcggcgccaggggtgcaccgagccaccggcgccggcgccgttcgccggcttgttcacgttccctcagtactccaccgccgcgacgggtgtcgtcgctggctctggtgacggtgctggctgcggcgcagcgggggcgcggcgtggcgtggccgacatcgaggtggccgtggcggagagccacgcgagcgtgaaggtggtcacgccgcggcggcccaggcagctgctgaggatggtggtggcgctgcagtgcctcggcctcaccgtgctccacctcaacgtgaccaccaccgccgaccagctggtcttgtactctctcagcctcaagatggaggacgagtgccggctgtcgtcggtcgacgacatcgccgccgcggtgaacgacatactcgccaagatctccgacgagcgcgccagccgtcacctagtagccgcgtagtgtagcggcaactctgttttagcaggtgtcatgtattgttgttgcaacaccaccaattcgatcctagtacatggaaaacgcactggcaagtcgcaattggcgccactgtcacgcggtgctaccacgcgctccatacgtcgtttgcgtgaaattaaacatgtatcggttggaccagctcagtctcttgcagcgc

SEQ ID NO: 16369 - DNA, 419 bp, Zea mays
  Clone ID: LIB3062-045-B11_FLI
gccacttaaagatatatccttggctactggtgtagcagaaggcaccatcagaaattcgtacaaggatctgtatccttatgcctcaaggctcatcccgaatacctacgccaaggaagaagacctgaagaatctctgcacaccttaggaggcttacttttttccccctttctgttactacataattcggaattagatttgtcaaagaggagtgagtgaagttgttcctcgttgtgactgtaccgggcaaggtgtcgtccccgccgtgcttaactttatgatggaatttcttttcagagcacctaccacctgaagatttgtgggatacgtatactcacttcggaaagaatgtagatagcaagcagttggacaagcacaagattttaatttaaaacatgattttgttctccatcttctgaaga

SEQ ID NO: 16370 - DNA, 684 bp, Zea mays
  Clone ID: LIB3062-045-C4_FLI
ctcgtctctcttcttcgccacggcgctcgtgatgatgacgctcatgatcatgctcgagggcagcaccacatgccacgccgcgcggcatcttgccgacacgacgaccgccccgaccgctgctcctaccgccatcccggccattcctgccatgccgaagccgccggtcgtgcccaccgtgcccgcggccacccttccaccgatacccgccgtgccgacgtcgacggtgcctgcgctgggcgtgccaccgatccccgcgttacccaagatccccgcgatgccccctatgccggctgtacccgcattgccaaaggtgacggtgacgctgccgccgccgatgcccgccgtcgtcatccctaaggttggcgccttgccgccgatgcccgccgtgcctaagctgacactgccgccgatgccctcgatcccgggcgtgcccatgccgtttgtggcgccgcctccttcggcataattcaattcaccaatgtctgatagattgtccatatatctgagtattcgagttgatctcactctcgatcaatccatgtgtacgatcttcgctgggcacgcatgctgcagatttacttaattggtgtatgtatgtgattctatatacttctatatattgttgtatccagtctttttcaaagttataatgttgtgtcaagctttgtcagttcattttctttc

SEQ ID NO: 16371 - DNA, 692 bp, Zea mays
  Clone ID: LIB3062-045-D3_FLI
acggctacgaaaatagtagcgctgcgcggccggttcgagatactgtccatgtccggggctttcctcccggcgccggcgccgccgggggccacggggctcaccgtgtacctggcgggggggcaggggcaggtggtgggcgggagcgtcatgggggagctcatcgcgtcgggccccgtcatggtgatcgccgccacgttcggcaacgccacctacgagaggctgccgctggaccaggcagacgccgaggagggcgccgtgctgtccggctcgtccgagggcgccaccgcgcagcagctggagcagcagcagagcagcgggggtcccgtcgtgccgccgtccatgtacgccgtcccgcagacgccgccgcacccgcacgacatgttcgggcagtgggggcacgcggctgtgacgcgcccaccgccgacgtcgttctagctagcgctagatgcacatgcaccagctgcgacctgcaccggccgcccgcccgccgtataccctctccacctttctagttagatttccacttcttcactagctactactatagctactactctagttgttacgttagctctaccatggcatgcatgtgtgatcgttttcccatttcttctagctctcttccatctggagcgtgtggaatcaatgtacaattcctatttgcgaataccggaatccatcaatgtttactt

SEQ ID NO: 16372 - DNA, 1274 bp, Zea mays
  Clone ID: LIB3062-045-F10_FLI
gcagtactggaggaaacgatgagcttcggtactgtgggcatggaggaggagggcggcgccgcggcggcggcggaggagatccggcggctgccggccgaggtgaactgggagatgctggacaagtcgcggttcttcgtcctcggcgcggcgctcttctcgggcgtgtcggcagcgctgtacccggccgtggtggtgaagacgcacctgcaggtggcgccgccgccgcaggcggccagggcgacggccgccgccatcctacggcgggacggcctgcgggggttctaccgcgggctcggcgcgtcgctgggcggcacggtgcccgcgcgcgcgctgtacatggcggcgctcgaggccaccaagagctccgtcgggtcggccgccgtccggctgggcgtgtccgagcccgccgcgtcggccgccgcctccgccgcggcgggcgtgtccgcggctgtcgcggcgcaggtggtgtggacccccgtggacgtcatcagccagcggctgatggtccagacccccgcgtgctgccgctaccgcggcggcgtggacgcctgcaggaagatcctcgtcgcggacggcgtccgcggcctgtaccgcgggttcggcctgtccatcctcacctacgcgccgtccaacgcggtgtggtggtcgacgtacgtcgtggcgcagcggtgcctgtggcgcgccgtcgggcccgagcgctcggagagctgcgcctccctgatggccgtgcagggcgcgagcgcggccgtggccggtggcgccgcggcgctggtgaccatgccgctggacaccgtgaagacgcggctgcaggtgatggaggcggacgcggcgcggcccacgctcgcgagcaccgtgcgcgggctgctcagggagggcggctgggcggcgtgctaccgcgggctggtgcccaggtgggggtccatgtcgctgtccgcggccaccatggtgaccacctacgagttcctcaagcggctctccgccaaggacggctccttgggctagatccttcctttgccgcgctccctataaccgtaacgatcgtcaagcgactcctgccgtcctccaagtcgatggtcgatccgcggggatgggtggttaattaggaccctctctccaatcttgtacatattgctcacctgcaggttatttgccttcgttcttgttttcttgatccggcgctgtagagagtgggcactgggcaggaagaagaaggaaattttgctgtggccctgctgcttttgatgacgatgaagaaagcattgtgtgaagtgaag

SEQ ID NO: 16373 - DNA, 1492 bp, Zea mays
  Clone ID: LIB3062-045-F12_FLI
cgctgtcgtcctcgctcacctcgtccgtcctcgtgagctccgcctgccttccctctggacagctccagcctccagccatcttcccccacctgtacacagttacaaagcttggcacttcgcagttcgcactcgcatgctcttcgccccctcgcgcttaccgctgccgcgcctcccgactcgccgcctccgcctagctccgggctctccaatggcctccatgctcgccatcctcaggccctcggcgccggccccgctcgcgggacgccgggccagggctgccgcgccggcgaccgcgagggtggcgctatctaccagatctaggtattcgtcagccagggtgtcgctcggctccgaggttgcagtgggcgccgacgcgctcttcgccgactataagcccaccaccgctttcctcttccccggccagggtgcccaaaccgttggaatgggggcagaagctcagagtgttccagcagctaccaaattgttcaaccaggcaaatgaaatccttggatatgacttgctggatctttgcaccaatggaccaaaagaaaagcttgactcaacaatgatcagtcagccagctatatatgtcaccagccttgcagcagtagaggtactacgtgcacgcgatggaggccaagatgtgattaactctgtagatgttacatgtggtctcagtttgggagagtataccgctcttgcatttgccggtgcttttagctttgaggatggactgaagcttgtcaagctaagaggagaagctatgcaggatgcttcagatgctgccaatagtgcgatggttagtgtgattggtctggattcagaaaaggtgcaagaactatgtgatgctgctaatgacgaagtagatgaaaacgatagagttcaaatagcaaactttctgtgccctgggaattatgcagtttctggtggtgtaaaaggtattgaagtagtcgaagccaaagcaaagtccttcaaggccagaatgacggttcgcctagctgttgctggcgctttccatactagcttcatgcaaccagctgtttcaagattggaatctgcgttggctgccactgagattagaacacctagaattccggtcatctccaatgttgatgcgcagccccactcagatcctaacaccatcaagcagattttagctcagcaggtaacctctccggtgcaatgggaaaccactgttaagaatcttatgggcaaggggcttgagaaaagttatgaactcggacctggaaaggttatagcaggtattctcaagaggatcaacaaaggcactagcattgagaacatcggggcttaaacgtctgggatctgaagaactcttgatggaaccaagttacacagcagaggattgaaacatgccattattgtggaacgatgtttccactcagagttaccgtttttttaccttagtggttgaattttgatcttgatgtaaaattgacatgaaacacatatggttaatgattttatgaac

SEQ ID NO: 16374 - DNA, 973 bp, Zea mays
  Clone ID: LIB3062-045-G12_FLI
caggtgcagagtctttcgtcatctcttctccggcgaagaacccccagtcgcccaccagatcacttgttaaactttgttgaggggtgatggcggtttctttcgcaaacctcaacaccgaggcagggcttaaaaagcttgatgagtaccttctcactcgcagctacatcactggctaccaagcttccaaggatgacttggctgtctacacttcgttttcgtctgctccctcgtccaagtatatcaacgtagcaaggtggtttaatcacattgatgcgctcgtgaggctgagcggaattactgcagagggccaaggtgtgaaggttgaatcctcagcagttccttcagccccaactccagatgttgctgaagcacaggccccagctgctgaggaggaggacgatgatgatgttgacctttttggtgaggagaccgaagatgagaagaaggctgctgaagagcgtgctgcagctgccaaggcttctggcaagaagaaagaatctgggaagtcatcagttttacttgatgtgaagccatgggacgatgagactgacatggccaagcttgaggaagctgttaggagtgtccagatggaagggctgctctggggcgcatccaagcttgtcccagtcggatatggtatcaagaagctgcaaatcatgatgaccatagtcgacgatcttgtctctgtcgacactctcattgaggactatctgtgcgctgagccagttaacgagtacgtccagagctgcgacatcgttgccttcaacaagatctaggcgtgactttcgatcagtccttcccctggggtgctggcgatggtggtggctgggcaatgcaccagcctaatttttccatagctatatgtctgctttgtgtggccagtgatattgccgtgagtatttttggatcctattcgagtcgaatgtaccagtaccagagttaatttgctttaattcgaaacaccgttccggtt

SEQ ID NO: 16375 - DNA, 592 bp, Zea mays
  Clone ID: LIB3062-045-H8_FLI
cactaacgaacgaactcttgctccgatcacgagctagctgaggtcgacgatggcggctgtgctgaacagcaggaagacgccgcaggcggtggtggccgtgctggtggcggcggcgctgctggcttcgtccgcttcggcggcgatcacctgcgggcaggtggggtcgtcgctggcgccgtgcatcccgtacgcgacggggagggccagcgcgctccccgcgtcgtgctgcagcggcgtcaagagcctcaacagcgcggcgcggaccagcgcggaccgccaggcggcgtgccgctgcctcaagagcctcgccaacagcgtcaagagcgtcaacatgggcaccgtcgccaccatccccggcaagtgcggcgtctccgtcggattccccatcagcatgtccaccgactgcaacaagatcagctaagttacgacgaccaagctaataagcctaccgaacgtacacgtacgccccgcgcgctgcacgagtgatgaagccagggaagaaataaaataaagctagctgtattgccaggagcagcatgcattatttatcgatctatatatatatatactgtactgtagtactctattatat

SEQ ID NO: 16376 - DNA, 1564 bp, Zea mays
  Clone ID: LIB3062-046-A4_FLI
ccagaacgcaacgcaaacacagagactagagagagagagagagagagagtcccgaagcgagcacaagaggccaccgcacagcggccaggcggcgagcgagacacctccacacgtctctcccccttcccctccccttccgttccctctgtagctgcgcccgaccgaacccccctaccccgtggaatcgtcctccgatgcggcgccgataggggctggcggaggagcggaatggcggggcacggcgagaagcggcgccgtacgggaggggcccacgagaagccggaggaggaggaggaggaccgcatctcggatctcccggacgtcctgcgcctgcacattctgagcctgctgccgctcaaatcggccatccgcaccggcgcgctctcctcgcggtggcgccgcctctgggcgtaccgctggccggagccctcctcggtgaccatccgcctcccgcccggcgcggcggcggcggcggcggcgcgcgccgaggcgctggccgggatcgaccgccgcgggcggcgccgcgtcgacggcttctcgctcgccttccacgggggccagctggcgcacgcggacctcaagcgctgcgtcgactacgcggcggcgtgcgaggccgaggacctgcacctccgcgccgacggcggcgcgggcgccgcccggggctcgcgcggggccacgcgccgccccggcgcgctcaccgtgcagttccccgtcgggagcccgctgctcgcgcgcctgtcggtgcgggggctcagcctcacggccgtcaacaacgccatggtcgccacgctcgaggtgatccacctgcactccgtcttcctcacggacgccgcgctgcgccggatggtcgccgcctgcccccgcctccgggagctcgacctccgttactgccgccgcctgcgccgtgtcgacttcagcagtgtcggggtgcccaacctctgtagcttcaccgtcgtcgactgctcccgcaccaccgagctccgggtccctgtcgcgccccgtctccggtcgttccgcttcagcggtaccttcctctccagcaacattctctctggagctaagggttctcttgagcatctctacctctgctctggcgggccagagaccggccttcccgccaccaacttgccctacgcagttcctcgcctgtcgaacctcactgtcctcaccctctgcagcattgctctccagtatgtttcttctttcacagccaaggccggctcggagggcaacctgcatggcttgaaggagctccagttgctcacgttcgggatggccaactccaaccttgctgacatctatagcttcctcaagacctgcccgtgtcctcgtttggagcgcctctttgtgcagctcccgacaaacaccggtgatgcattcacggagaatttcttggaggtggcggaggaggatccaccaaaaggtggattagaaaacctttgcttagccaagctgacaaatttcaaggggcaccgcaatgagatgcaactagtaggatttctgcttagaaagtcttgtagtctgaagaaactatttctgattgctcctaaggaggatcaccctc

SEQ ID NO: 16377 - DNA, 876 bp, Zea mays
  Clone ID: LIB3062-046-B1_FLI
caagccgcacgagaaggcaggcaggcaggcagagaggaaggaagaggaggaagaggaggagaagcgcgtggaggagcgggatgcggcgggcgaggctgccgccggtcccggtcccgacggcgccgggggacgcggggccggaggtgaagtaccgcggggtgaggcggcggccgtcggggcggtacgcggccgagatccgggacccggctaggaagaccccgatctggctgggcaccttcgactcggccgaggccgcggcccgcgcctacgacgccgcagccaggaccatccgcggcgccgccgcgcggaccaacttcccctccgcgcccacctccgccgcggtcgcgccgccgctgccactccccgcctcaaccgccgccgcggcgggtgcggcgacgtccagcctcagcagcgccgttgccgttcgatctgaacgtgccggacccggcggccgacgacatggactggcgctgcgacacgctgctccgcctctagccgccgcagggccgcaaccactcccaggatctcgctcgcttcgtgtggccgacgctgatccggcggagcggagcaatgcgtgcgtgcgtaccccaccgccatgaagtgctatcgtgctattttgctattctctccatagaaattgataattttagtctctctcttttttttttaccactgccaagactcggtaattactctgtgataatgtgaataactcatcatgtaatccgtggggagtggagggagcctggtctcgcgaaaccttcctgtctcctcctgctgtgtgtgtatctgtagcagcagcagcagcaccacgatgtaatactgtctgtcttgctgtaattctcaagagataatggaattaagagtgatttacag

SEQ ID NO: 16378 - DNA, 1504 bp, Zea mays
  Clone ID: LIB3062-046-C4_FLI
atggtgcattgtgctaaatgcaatatcgaatggaacaaaaacgatggcattttcttggttgaagtgaacaggcttttgaggcctggcggatattttgtatggacatcgaatttgaatacacatagggccttgcgagacaaagaaaaccaaaagaaatggacagccattcgtgactacgctgagggcctttgttgggagatgctgtcacaacaagatgagacaattgtatggaaaaagacgaataaaagggaatgttacaaatcaagaaaatttgggcctgagctatgtggccatgatccagaatcaccatactaccaaccactaagcccctgcatatcgggcacaagaagtcagcgttggatccccattgaacaccgtaccacctggccatctcaggctaggcaaaacgcaacagaactggacatacatggtgtgcattcagaagtcttcgctgatgataattcaagctgggacaccatggtgcgaaactactggtctttgctatccccacttatattttcagaccatccaaagagacctggtgatgaagacccacaaccaccatttaacatgctaaggaatgttttagatatgaatgctcactttggtggatttaatgctgctttactgcaagtctggaaagtctgtgtgggtgatgaatgttgttcctacaaatgccccaaattatctaccactaatatttgaccgtggttttattggggttaacatgattggtgtgacgcatttgcaacttacccaagaacatatgatatggtgcatgctgatggctttctatcacttgagaagacccacaagcatagatgttctactcttgacatattcttggaagttgatcgcatcctacgaccagagggctgggtcataatccgtgacaccgcccctcttattgaagcggcaagatctgttgtactcaactcagatgggatgcccgtattttagatcttgacatagctagtgatgaaaagctactcgtctgtcaaaagccctttctcagaaaataaggagcacaagcacagtagacactgacacaagatatgaacttattctttcaccctatactgttacagttattgtctgagcagaactgagtacaaagcttgggacgaaaacacgggaaggtgccattagattggttagtaagtgcatgctgcagagaacaggcttggtggcaaagctttccaggccaaggttttattgccaagatacagagatgaagccatgaaattactttagtggtgaaaaccatatccaataaagggatgacgctgcggtgtacataatcgcggtcaatgtgccatataggtataattcgttttctccttattacagtttctctttttttgtagttggaccgatttgtttttgtatcttgtatgtaaattgattggtctataaactggtcatcccagactacagtctagtgaaaccaatataattattatttggagatgaatgataagcaagaacaatttataactgttcc

SEQ ID NO: 16379 - DNA, 508 bp, Zea mays
  Clone ID: LIB3062-046-C5_FLI
gttgcttgaagacatttggttcttgttttagtgaagacattcgtatacctgctggtacaaagattgacttccggcaaacatctgatggccagctaataactgaaattgatggcaaacaaattggcactgtccagagcaaagatctttgcagagccttcttcgatatgtatatcggtgaccccccagtttcagtagagaccaaacaagacattgcgcaaaatgtggctggactcataagaagatgctagggaaacgggaaaactaaatcgaagaacctggaattatttcattcatctatacaaggagaggacatataaacagaaaggaagccaggagaggatcgattgtatttatagtggtagactgtctttgtaagctataaacataaagcatatgcttggcaaacgcctccatgcctttcatatggtttggcatcttcgccatttcctggctggtagcgcgctgtatcatgtctacaaatatatgatacagtaaaaagttgtacaac

SEQ ID NO: 16380 - DNA, 820 bp, Zea mays
  Clone ID: LIB3062-046-G6_FLI
aggtagaaatttacacatcacagatggggttcaatgttaatagttacgttccagaattaagatcactctgttataattttatcgattattcctccagcaccaaacagcaggacaagcgcttattcctcaacagggcaagactcgtgcttaagcgatctagaagatttacaatttatggatggttttcatgtctgctgccccctgcagagtcccttgctcgacatgatcccaccagcccatgagaaagttgtccaccaccagcctgaaccaaggggagagcttaacgccatcttccccggcatcggctttcctgagcagctccttcagctgatgccggttcatgtacttgacatcggccacctcttcaggattcgggtcgagcttcacgtcacgaaccatgaacaagaggtaatccaactcgtgttcgccccattttccatctgaaggagccttgtaaagcatcctcccaagcggaatgaactggtcgacaggtaattcgtcagccactattcccagctcatcaaatagtttgcgctgggctgcatttctcacccctgcacaattttcctcaatcaactctgactcgcggtagagaggatggctacagcaggtgtttgtcaagacaatgtcatcggccacgagtccaagtataactgccatctcatggagaagatagaagctggaaatgccctgcacagagctttcagtgttttccttttcaactccaaatatgagttgctactgcagcaaaggtctgcaacaaaagtgacatttccacttgtctggacaaacacctgcggtagagaggatggctacagca

SEQ ID NO: 16381 - DNA, 1393 bp, Zea mays
  Clone ID: LIB3062-046-H12_FLI
gggagttaagggaggatccgcagagcatggtgaagcagctattaaccaagtgtgctgaagcattaagtgaggagaggatagaggagttccttaaccttgttcagcaagctcgtggagttgtatcaattactggggagccaatccagcggttaggtgcttacctccttgagggtttggttgctagacatgcaaactcaggtacaaacatatatcgtgccctgaagtgccgtgagccagagagtaatgaactcttgtcttacatgaagattttgtataacatctgtccgtacttgaagtttggctatatggctgccaatggggcaattgcagaggcattaagaaatgaggacaggatccatattattgatttccagattgcccaagggacacagtggataacactgatacaagcgctagctgcaaggcccgggggtccaccacacgtgcggatcactggaatagatgacccagtgtcagagtatgcccgtggtgaaggtctggaccttgtagggaagatgttgaaaagcatgtctgaggaattcaggatacctttggagtttacccctctgcccggtatttatgcaactcaagttacaaaagaaatgctggacattaggtcaggcgaagcacttgctgtcaacttcactctgcagctgcaccacaccccggatgagagcgtggacgtgaacaacccacgggacgggctactccggatggtgaaaggcctgtctccgaaggtgaccacgcttgtggagcaggagtcgcacaccaacacgaccccgttcttgatgcggttcaccgagaccttggactactattcggccatgtccgagtcaatcgacacgaacctgccacgggacaacaaggagcggatcaacgtggagcagcactgtcttgccaaggacatcgtgaacatcatcgcctgcgaggggaaggaccgggtggagcgtcacgagctcctgggcaaatggcggtcgaggctgaccatggccgggttcagaccatacccgctgagctcgtacgtgaactcggtgatcaggaagctccttgcctgctactcggacaagtacaccctggaagagaaggatggcgcgatgctgctcggctggaagaacaggaagttgatatctgcttctgcttggcactgacagtaacgttttcagaagaccggaagtacacgtcaactcttacatatatatatgtatgtatgtataatgaattacctggtctgctttccgcaaaaaaggacgccctttgttgtacatgtacatgatgctgtacccttagttttcctgaagtgcagaccagagaagagaacattgacattagattgtagctgctaagctgtatggtaattacagttttcttttgctctcatgtattcacccctgtc

SEQ ID NO: 16382 - DNA, 818 bp, Zea mays
  Clone ID: LIB3062-047-A2_FLI
gacgctaatgccgccccggacagtgacaacctccgtataagaagatacatagcaaaatacacaataaatccagcaatagtgaacgggttttcagactttgttggttctgttgaggtgggaaaattagctgaccttgttctttggaaaccatctttcttcggcgctaaaccagaactggttgtaaagggaggtgcaattgcatgggctaacatgggtgatcccaatgctagcattccaacacctgaacctgttgtgatgcgacctatgtttggtgcatttggaaaggctggaagttccaattcaattgcatttgtgagcaaggctgctaaagaagctggtgtcgcaacggagtacagactagaaaagagggtggaagctgtaggccgtgttcgaggcctgacaaagcttgacatgaagctcaacgacgccctcccgaaaatagaggtcgacccggagacctacacagtgaccgctgatggagaggttttgacatgccaaccagcacccacactgccactgtctcggaattacttcctgttctagaaagccactgcatcagcaaaccaccaccaccactcacgccctatgcatgcacatcgtcatatacgagtataaaagatgcaagttcaattctgtacgctaccctctccttcgctgcaactctttttaataatatggccaatgagcagtagaacacttttgccctctgctatctgcagatgctcgcatatttgtgcggaataaaacttggaacggtatagatttctgttccctgctccaaatgtggctatacatactgttgtatttgccgagttgtt

SEQ ID NO: 16383 - DNA, 895 bp, Zea mays
  Clone ID: LIB3062-047-C1_FLI
gaccccgacgcctgcgttgccctacccctacctgacctccactgctccacacctccacctgcctgcgacaaaagcaaaacctagccgccgcggcgccgcccgccgacctgccgtgccgactgctgagtgccgaccgacgtgcgcccgctgtccgctcgacgttgttggcctccctcgacgccgctggcaggtggccgctcgacggagtcgacgcctcacagcctccctcgacgcgacgccgctggccactcgacggagtcggcgcctcacagtcacagtgagatgtcagaatacaagaacgtcgttggggggaggctaaagctgaagggtaaggcactggacgtgaaggaaggtggagtcaagaagaaaaagaagaagcatcaactcgaagagtcgtctcagattgagcacgatgagctccacaaagggggagactctggcttaccaactgatcacaacaatgagcttattgaagctggcaaggtgggagatgaagaagggaatccacatcccgactatgaccacctgacaccggcggagcgacgctatatagaacagaagcggaagatcgacatgcaaaagctggccaaagttgccaacaagtcacacagggaccgcatccaggacttcaaccagtatttggcgaacctcagcgagcactatgacatccctaaagttggccctggctaacatacatagccaaactgttgtgtaggcacaaacaattgtatgctaggtgggcttcaaggacattaaaaataaataaataaatgtatgtttggtctatccagctttttgttagtatgttatgtatgattttatatttgttgtataatgacatggtcgattcatgccgtcaactgtcgcggtatatatatgtggattgatttgaatt

SEQ ID NO: 16384 - DNA, 831 bp, Zea mays
  Clone ID: LIB3062-047-C2_FLI
caattctgcatcatatctgtctgcaattccagtttcagaaatgcgcaaaaatctgcgatttcagtagctaaaaagaatgcgcaaaaatctttgtacgattgtgcgctgtcgaatctctctctgctgtgcacacgcgcgcaggagcatccgggcatgtcgaagggcgacaagaagcggctgtgcgcgctgatggactgcaggaagctgacggcggacgcgagcgagcacgccgtgcagaacgagcggctgcccctgcgcgtggtggtacaggtcctcttcttcgagcaggtccggcagtcggcggcggcagcctctgccgcccccgcgcgctcgctcatcctgcccagggacgacggcgcgtcgtacggcagctcgaggtcggcgaccacgacggcgacggaggacgagcagtggggcggcggcgccgtggtgggcgcgcctgtgacgacgtcgacgtcgggcggcgccggcgacgccagctcgctccggtccgtgagccagctgtcggccaacgagaacgggagaagcggcggcggcggcgacaggaagaaggccaagggcggtgcggtggcgccggcgccggtgaagagagtgctggggaagctgtggtccggcaaggcgagcagcgggtccgaccacacgtcggcgagccccgttgggtccctcaacctggaggagaccaagtcaatgtcatcacagatcacgaggcattctgtgtcatagttactatattactgtatatgttctctctttttttttgagtgattgttttgttggattggatttgacttacataattatggagggtgtttggtaattggtacaggtggt

SEQ ID NO: 16385 - DNA, 1147 bp, Zea mays
  Clone ID: LIB3062-047-C6_FLI
gtggacgccggaggaggacctcgtcctcgtctcctacatccaggaccacggccccggcaactggcgcgccgtccccaccagaaccgggctgatgcggtgcagcaagagctgccggcttcggtggaccaactacctccggccgggcatcaggcgcggcaacttcacggagcaggaggagaagctcatcgtccacctccaggccctcctcggcaacaggtgggcggccatcgcgtcgtacctgccggagcggacggacaatgacgtcaagaactactggaacacgcacctcaagcgcaagctgcaggccggcggcggcgacggcgacggcgacggggcggccaagccgccggcgcacaggccgccgccgtccaactccaaggggcagtgggagaggaggctgcagacggacatcaacctggcgcgccgcgcgctccgcgaggcgctcaccccgctcggcgacctcaagccgcagccgcagccgcagcgcgacggcgctggcgtgggcatcgtcggcggtgacagcccggcggcctcgagcttgtcgtcgcagtgctccccgccgccagcgcctgccgccttggggacgtacgttctcaccgcggacaacgtctcccggatgctggacggatgggccggcttgaacgggaagcgccgcggcggggctccgggcacgcccggcggcgccgagaccgcgtccaccgggtcctcctcggaggtgtcgtacggcggtggcaccgccgtcgtcgcgccggccgctggtggcccggtgttcgagtacgagacgaagccgccggccgcgccgttccagctgatgatgccgctgtctgcgatcgagtcgtggctgttcgacgacgacacccacttccaccgtcctgtccagagcgccagcttgctggacgccgcccccatggattattacctgttgtagctagcgtgtccagcagctgatccagaccaagctaatccgttcaagcaaggaagtcggtggctgattagtcggctagctagctacctgtttctaaagttgttagttttcattatatttagccttttcttttctaggtgggtaaaagttgagtgcgtacttccccttgtgcaagctgcatgttgcatgggaaaataacatatatagctcttgcttgagacc

SEQ ID NO: 16386 - DNA, 604 bp, Zea mays
  Clone ID: LIB3062-047-D10_FLI
accgtgttcctcgacgagaaccagtactacgtgtcccacctggagggtcgccacccggggctggaggcctacgacgtcgcctacaccaccaccgtccgcgagttcccggacctgcttgactccgcccgcgccgcgcggggcgccgagtgccggcccgtccagaacctcctcttctccgactgccgcctcgccatcaacgacctccccaaccagctctacgacgtctcctgggacgtcatcctcgtcgacggcccgcgcgggtacacggcttcgtcgccgggcaggatgtcggcgatattcacggcgggggtgctggcgcggacgcgggccggggagggcgtgaagacggacgtcctggtgcacgactacgagcgggaggtggagcgggcgtgctccagggagttcctgtgcgaggagaaccgcgtcgtcgagaccagcacgcggtcgctcgcccacttcgtcgtgcgcggcggtagttctgcccgccgggacgccttctgctccggcacggcggcggcccactagcttcactcttccccgtcactcacctcacctcacctgttcttctactttttttttcttaaaaaaaacctctctcgatctc

SEQ ID NO: 16387 - DNA, 1743 bp, Zea mays
  Clone ID: LIB3062-047-D6_FLI
cattaagcatggcagagacagtgatgcaagctcctctgagaatttccattgggcctgagttatcgaccgaggctcagaagattgaagaaagaaccttgaagcagcttactctaagacctattacacctccagcaagcaaatcttctgctcttagttctttgaaaataaaaggtacaaggcttggagatcatcctactggtcctagtaagacctcacaactattaaaaatacagtcagccaacacttcttctagagctccagttaaagcagatgtttcaaagctctctcagccaggaagcttccaagttctcagtcgagagcaaaacggtactgcacacaccgccaaagactgtcctgtgaaacctgtgagtcctccaactcctttggcgtcgctggaaacacagaaaaaaacagtggcgagccaaaagttgaagtttggcaccaatgagagtcttctgcccctgcaaggtccatctcgtgacagaaagtcaaatgcaagagacaaggttagattctttgagatgctacggaccaagtcttcaaatggttcaagcactgcctttgagccaggaagccaaccatccccatccagcttagttgatgtgaagcaggattcttctcttaatcttggaaatgacttccacgtgttctgttctgagatcaaatgcacggagcacaggaggtgtttctgtgaagaagcaaattcttctgatgggtctcagaggcacctatctgataccgaggagcacattgcatccttgaaactgagcgttatgggtggaatgcctcagcagcctctagttgaaaggagagaagctaactcatcatctgaacctgcggacacaggtgatgaaggatttcagtcgttcctatcggacagcgcagaagtcagtttgtcctcaacacttgcagattcagatgatggatggaatagatcccaatctggcaatgaggaagcaagttcattatcagaggatactgaatcagatgatgatttccatccagctgacatttctccagaagataagcgtttcatgatgttgcttggttggaaagaagatgaaatagtgcaagtgacacctttggatttcgacgagattgcagacacggtaaaaggctgtgaggaactcaagaagaagcttcagtctatgcagttcaatgaagaagtcaagagcattctcctccatattgagctggacgagaagcagcagcagcagcacaagagtacaggggactaaagataattggaacacccgaggccggccatgttgggacgctgagaatcatttttggcatgagtttttgtcttggatcgttagcaaggcgatatattttttcctatattgccgcgtgtccaacagttagggatttagtgctcacagataggtctgacatgtttttcgcacaccgaaaggagctttggttttccctgtgtaagtccgatcttggaatcatgctgccacatgcctttgtttgctgttaaaaacatgggttttggcatgaaaatgcatctcaaaaggttaattcatgaaaagacgtctcaaaaggttaattaggatctagtgtatatgttgatttgttgcacgaggaagtgtaattcttttctacgagacagtcacgaatagaaaatagatttcctaataggaacaagatttgctaaatcaacaatccgtccacggctcatatgttacagtatggtgcactctcatgaatgaatgacagaaatgtgtggaaagaacccgc

SEQ ID NO: 16388 - DNA, 494 bp, Zea mays
  Clone ID: LIB3062-049-B11_FLI
gcaaatttggaaagaaagcattcggtaaagtgacaatccagatcgacagggttgtcatgttggggtcagtcgcaggtgagtacaccctgctacccgagagcaaaagcggccccaatagaaacctggaaattgagttccagtggtcaaacaaataactgcatacctacataatttaggcgccctctgtaagttgaagatcgatgagtttgagtgttttcttgttttgtactctgctaaaggttaccctgtttgtgcatcattgtaaatagcgggcagagaaagatgtcgtttgctgtaccttctgtgagatataaacagatgagttctcagacgttttgtactggttgtgtcaggcttcattcgtttatttttttaccctgggattttgtctttgtaaaggggtgtaaacagaagtatatgatatggttaggttctcatacggaatggacgtttgcgactttgcagtctcttaccagtatacatgtttatttgcc

SEQ ID NO: 16389 - DNA, 489 bp, Zea mays
  Clone ID: LIB3062-050-C8_FLI
aggagctcgacggccgtaacatcaccgttaaccaggcccagtcccgtggcggtggcggtggcggcggtggctacggcggcggtcgcggcggcggcggctatggtggcgggcgccgtgacggcggttatggcggcggtggcggctacggcggtcggcgcgagggtggtggcggcggctacggaggcggtggcggctacggcggtcggcgcgagggtggtggtggcggctacggcggcggcggcggcggctggagggactgatgtgtgggcccatcctggcttcggccgagttatcttatctatctatagtatcgtgttaccgttcgcttctgtcaccgtgttagtgtccgttctacctttggattaggtgttggtacccctgttgttccctttggttgctcccgctatgaaacgagacgagagaagaatgagcaaggtttttgttcgcagctatttttgtccaatgatattgatatgttgttcccctgtc

SEQ ID NO: 16390 - DNA, 633 bp, Zea mays
  Clone ID: LIB3062-050-D11_FLI
catatcagcagggtgctcaggctggggcatatcagcagggagcccaggctggggcatatcagcagggggcccagtctggggcatatcagcagggggcccaggctggggcatatcagcagggagcccaggatggggcatatcagcagggagcccaggatggggcatatcagcagggtgctcaggctggagcatacaactatgcttatgatgctggcacggcttatgcatatgcaggttactctggctatccagttgcaggctacgcgcaaagtgcagtgcccaactattcctatgctgcacctccgcagccaacaagcagcggtgcagctacgaacgccgcaggaggccagtatggggcagttggtagtgctggatatcctactgggcaagttcagccgagcagtggcactgcaaatgcagcgcaagcacctcctcctccaccaccaccggcagcaccatatccccccagcacatatgaccaaaccagaggagcccagagataaaatctgggatgtaaaccagatggatgtttgccatgcacatttgttgagcagacaaatatggtgaaatctgggatgtaaaaccagatggctgtctgtgcctccatcccattgactagggcgtattttcacc

SEQ ID NO: 16391 - DNA, 2014 bp, Zea mays
  Clone ID: LIB3062-050-H7_FLI
cactgccaacctcgtcgcccacccaagtctcttcatttgcagcgacaaaaataggaacggagcaaaggtccggcgagccagagcaatagttaacaaccatctccacaaacaggctaccacgtagctacgtatatgccggaactgaactgagctgagaaagctcaggcgtgaactgaactagatggtgtttcctgccatcctccccaaggtggccgtgcgattgctcttcacgttctaccgcgccgccaggaagctcaggcgccacgccttccagctctacaaccgtaggaccgccgccaagccgccttcgttctccgtctcccagcagcaggccggtgccgccaccttcaagaccgacgccgccatccctgacgccgccggccggaccgtcgtctgtgacgtgcacggagccctgctgcgctcctccgcgctcttcccctacttcatggtcgtggcctacgagggcggcagccttctgcgcgccatgctgctgctctgcgccttccctctcgtctgggcactcggggagcgcagcggcggcgctggcgccgtccgggtgatggcgttcgtcaccttcgcggggctcaggcccagggacatggacctcgtgggccgcgccgtcctgcccaagcactacatggagcagctcaacgcgctggtgtacggcagcctgtggctcccggccaggaggaaggtggcggtgaccggcgcgccgcgggtgatgtccgagtggttcctcaaggagtacctggccgccgacgcagtggtcggcctcgagctgcagctcgtcacggtcggccgctgccggtacttcacgggattgctgtcaggccccgcgacggggccggagctgaggcacaaggcgctcatggaggctctaggcgccgaggacgacaccgtggccgacgtgggcatcatcagcaactccaacccgctcgaccacgtcccatactgcaaggaagtttatgtcgtgaacacagagaacacagagaatgacaagctaccgcgggtcaaatacccgaagccgctcatcttccacgacgggcgccttgccttcctgcccacccccgccgccatgcttgccttcttcctcttccttccgctcggcgtcatcctctccgtcatccgcattaacatcggcatcgttctcccttacaaggtcaacttcgtggccggcgcgatcttcggcgtccgcttccgcgcctctgggctccgcgccccgccggccgacggcgagcagcgcaggggcgtcctctacgtgtgcacgcaccggacgctggtcgaccctatcatgctcaccacggccctgcagaagcccgtgcccgccttgacgtacagcctcagccggctgtccgagctgatcgcgcccatcaagacggtgcggctgacgcgcgaccgcgcgcgggacgccgacaccatgtccaggctgctgaagcaaggcgacctcgcggtctgccccgagggcaccacctgccgcgagccgtacctgctgcgcttcagcccgctgttcgcggagctcgcggacgacatggagcccgtggccctggacgctcaggtgacgatgctctacggcacgacggcgagtggccacaagtggctggatcccgtcgcgttcttcgccaacccggtgccatcgtaccgggtggagttcctggggaccgtgccgcgggagtggacgcgcgccgggggcaggaccggcgtggaggtggccaactgggtgcagcggcgactgggcgaggcactggagttcgagtgcaccgagctcactcgccgtgacaagtacatgatgctggcgggcaacgacggcgtggtcgccaagtagagagcgcctgccgtgcatgcgctgcaacagttgggtgtggtttttattatgcatatacatgctgggtatattattgtcaaaagctagttactgtattttgcatggcagcaatggatcctttggttccgttgtgtaaagaatctttgattagctgcaaaactaaacgaatactagatgcttgaatttaacttc

SEQ ID NO: 16392 - DNA, 1033 bp, Zea mays
  Clone ID: LIB3062-051-C6_FLI
aaaaactggatcaaggcaatggccatgacagcatcacttttcccatttatgtgctttggaattggcctggtgcttaacactattgctattttctatggatcgttagctgccataccatttggtacgatggtggttgttttcatcctgtgggccttcatctctttccctcttgcacttttgggaactgttgttggtagaaattggagtggtgctccaaacaatccctgtagggtgaagactattcctcgccctattcctgagaagaaatggtacctcacaccatctgtcattgcgcttatgggaggactgcttccttttggtagtatctttattgagatgtactttgtcttcacatcgttctggaactataaggtctactatgtttacgggttcatgttgctggtctttctgatactcatcattgtcaccatatgtgtaacaattgtcggtacatatttcttgctaaatgcggagaactaccactggcaatggacttcattcttctctgctgcttccactgcggtgtatgtttacctctactccatatattattaccacatgaagaccaagatgtctggattcttccagaccagcttctatttcggctacactctaatgttctgcctaggcttaggaacactatgcggtgccgtcgggtatcttggatcgacattgtttgtgaggaggatctacaggaacataaagtgtgactaagtgaagataatatcgccccattttgggtcagcgcagagaaaatgtatggcagagccttatttgattgagcgatcactgattctaaaaccaagaacgcaggtcattttgtgaaatatgatcgttgcttggcgccgagctgaaagccatgtttttctattcttgtcctcgtttctctctgatttcttctggacttggacaggcaacaaattttcatgttgaattagttatatatatagcggtggttgtagttgttgagtagttctgtagtatataccacaattgttatccttggccccaatgatacctcagattgatgggt

SEQ ID NO: 16393 - DNA, 1307 bp, Zea mays
  Clone ID: LIB3062-051-C7_FLI
cgtcaggacccggaccaaaccaatcaggcggctcgggcgcggcggcgacacagggcaaggaggccggacgttggggggaccggggctcgacgccagccgtggatcgcgtgcggagggggacaagcgtctgcctcatgtcccgcgacggcggggaatagggcgacggcgtcggcggcggggatcggttgcggcggcgtgacgaggcggctgcggcggcggctcgggagggaggcggcaccatgtctgcggtagtctgtggcaagaggtcctcctccatcttcgccgacgagctcctcccgccgtctccttcctcccctcactcctcccaccagccggcggccaagaggtcccgccgctccccctcgcaccgcggcggctccgacggactccgaccggaggcgctcgtcgactatctacttgccctcttccccgacatggatccacagttacttgaaaaagctctggaagcatctggagatgacttggattctgcgataaaaagtttgaatttgctgcgcttagagtcagcagaagctatcttgtcatcgactggtttcaaacctgaaaattgtctgcaaacagcaattcagccttctcttgaaggtattcctaatggtggtgtggatacggctacagaacatccgcctagcgtagataattaccagacaagctataatggctctgaatgggttgagctattagtcacagagatgagaaatgcttctgacataaacgatgcacgggctcgtgcgtcaagagctctggaggctttggagaaaacgattgtagagcgtgcaggagctgaagctacacaaaacctgcataaggaaaacatgatgctcaaggagcagttgactgttgttctgcgagagaactccgtgctgaagcgggcagtcgccatccagcacgagcgccaaaaggagttcgacgagaggtctcacgaggtccagaacttgaagcaacttgttctgcagtaccaggagcaagttaggactctagagatgaacaactacgccctcacaatgcatctcaagcaggctcaacagaacagctccatacctgggcgtttcaatcctgatgttttctaagcgtagtagctgctgaacggtccgccccagattaataagctatgtatgaatatatcttgttctaccaactgctcctgagatggggatatccgataggtggattcaccgcccaagggtccagaattttcaagtcactatggttttgatttcgatatactccgtatttatttaaacgtgttgctttcatgcaattggctatccgagatattgtgtgcgccc

SEQ ID NO: 16394 - DNA, 713 bp, Zea mays
  Clone ID: LIB3062-052-A2_FLI
ccgaaatcccgttgcgtctctcgcgcgttaccaagctctcaagttttctcgcgccgacggcaatggatgaggtcaccgaggccgtgaacaacctcaacatctcgggcgtaggggccgcgggcgttgccggggcggaagggcacaagaagaatcgcatccaggtctccaacactaagaagcccctcttcttctatgtcaacctcgccaagaggtacatgcagctgcacaacgaagtagagctgtcggccctcggcatggccattgcgacggtggtgacagtagcagaaattctgaaaaataacgggcttgctgtcgcgaagagtatcatgacatctactgttgatatcaaggacgagactaggacccggcctatccagaaggccaagattgaaatattgcttggcaagacggagaagtttgatgagctgatggcagcggctgccgaggagagggaggctaatggggccgaggaacaaagctgagtacctgcaaggaaggaccttgttgtagcttatttactgttttctgctgctagatttgtcttcttcatagtttgtcgagtgggctagagacgattacttgtataatcaattaaaggcgcggcttatttagtgtgcttttacttgattcatttatgttggaatgatacaagttgtgttcaatatggtatactctagattcatcactatcttcaatttagaagatagtgcgtt

SEQ ID NO: 16395 - DNA, 825 bp, Zea mays
  Clone ID: LIB3062-053-A12_FLI
cttctgatgatgcaccgcgtgcaacagatgaacaaatcaagaaagcttcgaatatattcaaacgtattgatctgataaatttctctgcatgccaatttgctaacccagctttgcaaagacactatgggatcttggaggccttagctttaggcgaagatgagatgcctgatataaaggacgagaccctgcctgacgaagaaggcttgtctaagccaggggtagccaatgctattgaggaattcaagacttcagtctatggtgaaaattatgaccaagaggaggcagaagcggcagcagggaaagcttcccgtggtaatgcttcaaaaaagcggaaggaggtcactgatgcagctgcgcagataagtgctgcttatgactgggcagaacttgcagacaatggaaaactgaaggaaatgaccacggtggaattgagatcctacctgaccgcgcatgatctcccggtttctggtaagaaagaggtacttatcagcaggatcttgactcacctgggtaagtgaagccgggtatccgaactgttagtttcctgagacccgactgacatctgtagtgctgtctcgcggatccttgtggaccgtaatcctcccccgtgcaggctacgtgccgattttttgtatagcgacaggacagcaccagttgccaatgtaacttgtgttaagtttcgtcttgtggtatcatctgcttgtcattgtcaacatgaaacatcatgtaattctggatacttggacccacaatatggagcataactgcataaggtatgttaaagcataggccctctttagcatggctacttgctgtttcagattt

SEQ ID NO: 16396 - DNA, 1712 bp, Zea mays
  Clone ID: LIB3062-053-C5_FLI
cgtgatcttgctcagtctagactgcaagatttgctcaaggttgttggagataaccacggttcgaagcaccccctggcttcttctggaagaaattttacttttgatgttcctcagccatgtgaggatgagcaatcgacgacatcagaagctatcagcagtggccaaaattttaggcttcaaggacgcctgacaacacaaagagattataggtcacagcaatctgaaaatgacgtgcagtttgctacctctcttagctattcaatcagcagtcccccattcagtgggatgcctccaactaatggcagaaatgataactctcatatatctgatgaagattcagaggatctttgcaaagaagtacggtgcatagagaccaatgaaacagaagaaaatgaatgcttagagtcgtcagctgtgggaagcaatagtctgcaaggttcaaatgtagcttccagcatgcatgggaacgacaatacaaatcgatctgtgaattctggactgaatgatgcatcttctattaccctggaacaacatctggagaatgtcaaaaaaccgtttgccaatcctggcatggatctgggatcctccacacgtaactcgtcaagctcaaaagtaattggcagaagcaggagctgtaggtctctgatgggttctactctgttggaagacttggagaaagaagatcgcacccctccaagcagaagtttcatggactacccagggagacccgaaacatgtcaaagaagggtacccgcactgaactacgatgcagagagtgaagctttatccagggcaggatcaatgctatctgaaattaccaccacgaggggtggactgaaggaaaacagctctgctgttggtgatacggaatttgttgctggcataggtgaatttgtggcggagctaaaagaaatggcccagggtcataatggagaattggctgaagggaccataaggagcgtggggctggatcccattatggatgtcttgcaatcaccttctcgctggcctttggaattcgagaagaaacagcaggagatcattgacctgtggcatggatgcaacgtttccttggtccacaggacttactttttcctgctgttcaaaggggacccagccgacgccatttacatggaagtggagcttaggaggttatcgtttctcaagaacacatactccaacggaagcatggggtatgatatggtggcaggcagcttgagcacttctttggtttcaagtgcaaagaaactgcaacgcgagagggagatgctctgcaggcagatgcagaagcggctgacgatccaggaacgggagagcctgtacaccaagtggggagtctcgctgtcctccaagaggaggcggctgcaggtcgctcggcgcctttggacggagaccagggacctggagcatgtgagggagagcgcgtccctcgtggccagactgatcgggctcctggagcctgggaaggcgctgagggagatgtttggtctgagcttcgcgccgcagcagtccacccggaggtcgcacagtagttggcggtatggccgttcttctctagactgactgagctcgaaagatgcagctgacaaaagaaaagacaacagttattccgttgttttcgttttgtgtagtgcctgattttttttgctgtcctcttggaaaatagaaattcctgaacattttgtgaccagtctgcgagaaaatttggtagc

SEQ ID NO: 16397 - DNA, 1588 bp, Zea mays
  Clone ID: LIB3062-053-E4_FLI
tccgcgagcgctgcagcacctcggatcccgccccaatggcaacagcgtgtccgccgctctcgctgccgtccacctccctcttccgcggcaggtccgcccgcgccgggcccagacgcaggcagctcacggccgtccgctgcagcgccgtcggagaggcggtagtggaggaggcctcgcccgggacggcggaagagccgctgctggtgagcgcaatcagagggaggaaggtcgagaggccacccgtctggctcatgaggcaggccgggaggtacatgaagagctaccaattgctctgcgagcggtatccttcgttccgtgaaagatcagaaaatgtcgacctagttgttgagatctctttgcaaccatggaaggttttcaagcctgatggagtcatcttgttctcggacatccttactccacttcctgggatgaacataccttttgacattgtgaagggaaaaggtccagtgatctatgatccattgagaacggcagctgctgtgaatgaagtcagagaatttgttcctgaggagtgggtcccttatgtggggcaggctctgaatattttgcgaaaagaggttaagaatgaagctgctgtactaggttttgttggagctccgtttaccttggcatcttattgtgtggaaggaggttcatcaaagaactttacattgattaagaaaatggccttctcagaaccagcgattctacacaatttgctacagaagttcacaacatcaatggctaactatattaaataccaagcggacaacggggcgcaagctgtccaaattttcgattcatgggctactgaactcagcccggctgattttgaggagtttagcctgccttatctaaagcagatagtggatagtgttagggaaacacatcctaacttgcctctgatactctacgcaagtggatctgggggcttgctggagaggcttcctttgacaggtgttgatgttgtcagcttggactggacggtcgatatggcagagggcaggaaaagattgggatctaacacagcagtccaagggaacgtggatcctggtgttctttttggatccaaagagtttataagcaggcggatttacgacactgtgcagaaggctggcaatgttggacatgtactgaaccttggccatggcatcaaggttggaactccggaggaaaatgttgctcacttcttcgaggtcgcaaaagggatcagatactaaagaaccttgcatggttctttcctttctccaaatcggcagaagttgtagagtcggcggtcgaggatagatgcagaaagccatgtgcagtatagagtccctgaaaacatttttgtgactgattctgtctgtcgcatttcaagttccggtttcagtgtgatattgtaagcagatttgagacgaggcgtaatgaagtgcctacttgtttatagcactatagttctgtacaaccagtagtcttgtctacgatactacgaagcagaaacattgatcatgtgttgacatgatagaaatgtttcagtcttaccccatcgagggtgtttgttcttgtattctctcagaatactaattacaaacattttctttgcatg

SEQ ID NO: 16398 - DNA, 850 bp, Zea mays
  Clone ID: LIB3062-054-B9_FLI
ggctatgcagagctttgcttgcgttccatccatctccactgtattctgttttcccatgcccatgtgtggttttttttaacactgaacgcttcttctattctgatcctccagttcggacaagtcggagtcggcaacaacgacgaccacagctcccccggacaagtcagttttccagaggatcagaaaatctcccaggttgcatgcggatggaggcacactctggccctctccgagaagaaaaatgtcttctcctgggggaggggcactagcggacagctcggcaacggtgaaatagtcgacaggaacacacctgtgctgatcgatgccctgagctcagatggttctgcctgcaagaagctagagtcatccacggcagccccgttcgcagccaaagtttgggtgtcgccgtcagaacgatacgccattgtccctgacgagaacgtccgtaaagcaggcggaggcacggcacgaggcaacggcgccgacgcgaacgtgccggagaacgacgtgaagaggatgcgcgtgcagtcatcgtagtaggtcttctactaccgtccactccaccccacccccgttaaccctactactagtagtaagtactacgaagaaccggtgccccatctagcggcgcccgatttttgtgcgttacgttctgcctaaaagtgctttccgtcgacggacggacctcctggtgttgagatggtagcggtagcactgcctcgcggcgatggtgtgtgtgtgttgtgacgtgattcacctcttagagtagagaggtggctagcccagtcgacctgtgtgtgttgttaagatgtgtcctggatcttttgtgacattgcatggagggtacaat

SEQ ID NO: 16399 - DNA, 1054 bp, Zea mays
  Clone ID: LIB3062-054-C4_FLI
ggcgacgaaccctgcgcaggacgacggtccgggtccggccggcggctgggagacgcgcgagttcacgagcagggacgccgagacgaggctgaggacgccggtgttcttcgcgtccatcgaccagcgggacggcagcgccgggggggagggcgcgtgcgcggcgctcgccgccgtcctcgcggcggcgctccacgcggtccacccggcgatgcccacccggccggagctggacgcgctcatccgggacggctcgtcggagtggaggcggctctgcgacgacgaggcgcgcgcggcgcggttccccaaccggcacctcgacctggacaccgtgctggcgtcccgggcgtggcccatcgcggtgcggcacgacagggccttcgtcggcttcttccagccggagagcttcgcgtcgctgtccggcgccatgtcgttcgacgacatctggcgcgagatcgccgccggcggcggacgcgcggacgtgtacatcgtcagctggaacgaccacttcttcgcgctcaaggtggagagcgactgctactacgtcgtcgacacgctcggcgagaggctgcacgagggctgcgacaaggcctacatgctgagattcgacggctcgtcggagatgcgggctgaaggcaccgaggaggtggtcgtcgccgggaaggaatgctgcagggagttcatcaagaggttcctggccgccatcccgctgagggaggaactggagatcgagaaaaagggcggcagcggcatcgacggtggcggcgcgccgcaccggcggctacagatcgagttccacttcacagcctttacaagacggcaatagatgatgagttggcgatccgacagcagttgggggatgttccttcctcctccctgatcacagcatcatactaaccttgtgtaaattcgtctgtatatctgtatacagtttacaagataaaaatttacagggtaggatttggttctcgtttcacaattttagataggaaacaaaacattcagaggaataccattttgtaagcgagctcagtattacatgattttgcttctgttg

SEQ ID NO: 16400 - DNA, 1655 bp, Zea mays
  Clone ID: LIB3062-054-F2_FLI
cagagataggcgtcttcgtactcgcctacctccgcggctcaaacctttcccccttctcccaattcccgccgccgctccatcccgtaacgcgacaccatgagggagtgcatttcgatccacatcggccaggccggtatccaggtcggaaacgcgtgctgggagctgtactgccttgagcatggcattcaggctgacggtcagatgcccggtgacaagaccattgggggaggtgatgatgctttcaacaccttcttcagtgagactggtgctgggaagcacgtgccccgtgctgtttttgttgaccttgaacccactgtcatcgatgaggtgagaactggcacctaccgccagctcttccaccctgagcagctcatcagtgggaaggaggatgcagccaacaactttgcccgtggtcactacaccattggcaaggagattgttgacctgtgccttgatcgcatcaggaagcttgccgacaactgcactggtctccagggcttcctcgtcttcaacgctgttggtggaggaacgggctctggccttggttccctcctcctagagcgcctgtctgttgactacggcaagaaatccaagcttgggttcactgtgtacccttccccccaagtttctacttcggtagttgagccatacaacagtgtactgtccacccactccctcctcgagcacactgatgtggctatactgctggacaatgaggccatctacgacatctgccgccgatcccttgacattgagcgcccaacctacaccaacctcaacaggcttgtgtcccaggtcatctcatcccttactgcctccctgaggttcgatggtgctctgaacgtggatgttaacgagttccagaccaacctggtaccctacccgaggatccacttcatgctttcttcgtacgctccagtcatctctgctgagaaggcctaccacgagcagctctctgtggctgagatcaccaacagtgccttcgagccatcttccatgatggccaagtgcgacccacgccatggcaagtacatggcctgctgcctcatgtaccgtggtgatgtggtccccaaggatgtgaatgctgctgtggccaccatcaagaccaaacgcaccatccagttcgtggattggtgcccgactggcttcaagtgcggcatcaactaccagcctcctagcgttgtgcctggtggcgacctggccaaggtgcagcgtgccgtgtgcatgatctccaactccaccagtgttgtggaggtgttctcccgcatcgaccacaagttcgacctcatgtacgccaagcgtgccttcgtgcactggtacgtcggtgagggtatggaggaaggtgagttctctgaggcccgtgaggacctggcggcgctcgagaaggactacgaggaggtcggtgctgagttcgatgagggcgaggatggcgacgagggtgacgagtactagagaagtttgctgatgacgcagcatcaggccagtgtgctgcccttatcccgtgatctgccgagagttgctcctgctatcgtgttatgtgtgtctgttctgaagtattgtgtggtttacaacacctgatgttgtaagagttgttaattcccctgcattgctaccgggttattgagaataattatggctgtttacgttgttgcttc

SEQ ID NO: 16401 - DNA, 1901 bp, Zea mays
  Clone ID: LIB3062-054-F3_FLI
ctaggccagcaaaccccctctgtaccctccgggcaatcgggcatgaatccacccatccgcgatgctacatggagctcagcaagcctcggcgtcgtcgaccgcaggcccgcgccccaagagcactgctatcctgcagtctgatcagccacctcgcgccgccgccgcgcgggaggggggccgcggcggcacgggtccggagtcgcttgtgcgcggctcggtcgtcgcgccgtgcgtcagctgcggcatctgcggcggactcctccgtgacgccaccgccttcaccgagtgcctacacgccttttgcaggaaatgcatatatgacaaggttgcgaaagacaacataaagtgttgcccgaagtgtggcatttttatgggaaatccgttggagaagctcagacctgatcatagcctggaacacatcaggccactgatatttcctgctaagaggcgcaaggttgtcaccatgaagaagaggaaggaaagggtgtcctctgaatcaacccttccttcagtggtgggtaccactgcagaagaaagcactgcactgatacctgctgcttcagaaagtaaggcacaaaaggatcttactcctgtcggaagagatgctttgtcacgaattaggggtcgagactttgactcagcatgtggtcttactgaggatactggagccttgattgtatggcaagcaccacctattctagaggagacggctgcccacaatcagttagactccaagcaggacccagatagtttcaggcctccggcgacctctgatattgagtaccagcgacaaggaccaactgcacaaatgaccaatatttcgtttatggttgggaactcatcccatgcaaggccgactgaccaggatgatgaaaacatgagaggagatattctcacattgatcaatgagagcaatgcaagaatcatggaaatgtatgatgcccacatcagcaaactgaaggcagggaacataaaactaatagagcaactggaaaatgaaagagcagctgcacttgagaggacaagaatccttgaagagaggctccagcaagagttggaaaacgaaaggacagttgctgctgagaggacaagacttcttgaaaagaagctccaaagagaactggaacatgaacgagaagctgctattgagagaacaagagttcttgacgagagactccaaagagaatctgaaatcgcacgtactgctgcaagccggaatgaagctttaaaagaggagattttcaaacttcaggaggaattggaacatggaagagcatacaaccaggctctgatgtcagatattttggagaaaagcgaggaactcgctacgctcacatattattctaacctgcttgagtcagagaagacatatctagaaaaccaagtcgaccatcttaacgaggagttgaagtgtactaggaaagagcatgcagcatatgtccgtaaggtcttggacgcagcaagagccatccctaacgacttggagccgatcaactcggcaactccgatgctctgccgagatcgcggtgcacgtcggggatctgttagccagccacaggctggccatggctaacggccagcccccacaggcagctgatccttaagagtttggacctaatcttatttctgatagccctttaggacttctttgactgaacctgtgggcggtgttgagcgacttcccagctcgctgtccaggtggtgataattggcgttttattttgtctagcttcaggtgatgttttggactgtttcttcctcaggttgcagcagtacagtatagtgtcgcttccttctgttcagttgtagcttgcttcttagaaggtggtcggttcgtccgttctgttgtgtactctgctccgttgggcgtatcaagataaatgtaaattccattctgcttg

SEQ ID NO: 16402 - DNA, 1278 bp, Zea mays
  Clone ID: LIB3062-055-E6_FLI
atctggccgccctgaagcgcgcggctaaccagcacggcgatgcggaacagcggctgattgccatgatggtggccgccctgtcctcccgcattgctccggccgcctccgccccatctcaactcctcgccgacctctgcagcgtcgagcagcgcgccgggtcccaactcctacaggacctctccccgtgcttccgcgtcgccctccacgccgccagcgccgccatcgtcgaagcggtgggcgaccaccgcgccatccacctcgtcgacttcgacgtcagcttcccgcagcacgcggctctcatccagtacctcgccgaccgacgcgtgcagggcaggtccctgaaggtcaccgccgtcaccgacccgagctcgccgttcacgcagtctctaaccgcatcgctaccagccatcgaggagcggctgaagaagctcgccgagcgagctggcgtggagtaccgctttacagtggtcagctgcagagcagcagagctggatgcgtccaggctgtgctgcgagccgggggaggcggtcgcggtcaacctcgccttcgcactctcccacgtgcccgacgagagcgtctctccggccaacccccgcgacgagctgctccgccgcgtgcgcgcgctgggcccgcaggtggtgaccctcgtcgagcaggaactgaacaccaatacggcaccgctggcggcgcgcttcactgacgcgtgcgcgcactacggcgccatcctggagtcgctggacgcgacgctggcgcgggagattgcggagaaggccagggccgaggcggccctgtcgaagaaggcggcgaacgcggtcggccgggatggccccgaccggctggagcggtgcgaggtcttcggcaagtggcgcgccaggttcggcatggcgggcttccgcccggtgtcgctcggctcgagcattgccgaagagctggtcggcgcccgcgtcggccatgtaccgcccgggttcacagtcaaggcggagaacggcgtgctccggttctgttggatggggcgcgcggtgaccgtcgcctccgcgtggcgctagaccacggcgggcggccgaccgcccgcccgggccattattgccgtcactaaattgtcagttacataattcgagctattgctttcctcgttctcccttcttcctttttttttaccttgattgggtgaggagtgatgagtttgccatgatctggtaaaaatccttcctagctgtagcgactcataattcttataactgctcatagtagtatatggaaaagagtaagttatatcgc

SEQ ID NO: 16403 - DNA, 1486 bp, Zea mays
  Clone ID: LIB3062-055-F3_FLI
ccaagttccgtcccctcatggcgacggcggcgaaggcaagggctccgccggccgtgacggcttccaaagcggcggcggcagcggtggagctggaggagcacgtgcactacaagcacactgatgcgtgccaccaactccggtggacagccaaggaaagctatgagtacatgtacgcgcggccgtggagcagggtggtcgacttttatgccgagctcgtgcgcgccggcgccggcgcagcggggctcgccaaattatttgggaatgatgagaaagattacacactttatactgctggagaaaattatctaacaccatcagaaaaaccaacgacaactaccttctccaaaggtcgtggaggaagatgggaaagagtaacatttaaagttgttatttcataccatggggggtcgttcgatggctggcagaaacagcctggccttaatactgttcaagggttagtggagaaacatctcggacaatttgttgatgagcgaaaagctaaacagcttgaagcaagatctttgccgatagaaggctgtgcaattgttgctggacgcactgacaaaggggtgactgctcttcagcaagtttgctcattttacacctggagaaaggatgtgaaatctggagatataaaaggtgcaataaatgaggctgctccagataaactaaaacctctgcatgtgtcagaggtttcgcgtgagtttcatcctaattttgcagcgaaatggaggaggtacatgtatattttccctcttgatgaggatgctgacttgattttaggggaagcacagtcctcaaaaacactagagaattctgaacacaacataaagcctcaaagctttgatgtgtccaaggttgatgaaattctcaaaccacttgctggaaagacattatcctacaagatgtttgcacgtgatacacaggcttcacgaagtgttggcccacctacagaatgtttcatgttccattcccgagctgcagtggccaaactacattctgctaatgaggatcacaaaggaggcatggtggtcatgtgcgtcgagctagtcgcaaacaggttcctgcgcaagatggtcagggttcttgtggccactgccataagagaggctgctgccggtgctggcgccgatgctttgctgaacctaatggaagccacggacaggcgtgccacggcgcccccggcaccgccagaaggcctgtgcctcgtagacgttggttatgaagattttgataagcagaggtgcttcatagtcgattgaaagaagtattctttgtaggggtgcgtgtttgggtccgtgccgtttctcagagaaggggggaaaagagagaaagttattccgtatctttttgttagaaaaaaatacaagatgcatgattcagcaattgaggggtctgtttagagaaacatacttcatgtcatgaagtgaccaagccatgcagctgctattagtcggctatttttggttgctatgagtcgcctatt

SEQ ID NO: 16404 - DNA, 1892 bp, Zea mays
  Clone ID: LIB3062-056-B9_FLI
tcgaccacgaccagaacccgctcccccacggcaagcaccgcgtcgccgtctccgccgacgtctccgtcggcgaccccgcccgccccgagcagctgcacctcgcgtttgcggaggaggtcgacgagatgcgggtcctgttcgtgtgcggcgaccgcggggagagggtcgtcaggtacgggctgcagaaggaggacgacaaggagtggaaggaggtgggcacggatgtgagcacgtacgagcagaggcacatgtgcgattggccggccaacagcagcgtcgcctggagggatccgggattcgtcttcgacggcctcatgaagggattggagcccggaaggaggtacttttacaaggttggtagtgacacaggaggatggagtgagatatacagcttcatttcacgtgacagtgaagccagtgagaccaatgcttttctatttggtgacatgggaacttatgtgccttataacacctacattcgcacacaatctgagagcttgtccactgtaaagtggatccttcgtgatattgaagcccttggagataaacccgcctttatttcacacattggggacatcagctatgctagaggttattcttgggtctgggatcatttcttcagccagatcgagcctattgctgccaatactccataccatgtctgtataggaaatcatgagtatgattggccatcacaaccctggaaaccatggtgggctacatatggaacggacggtggaggcgaatgtggaataccttatagtgtcaggttcagaatgccaggcaattctattctacctacaggtaatggtggcccagacaccaggaatctttattactccttcgactcaggcgtggtgcatttcgtctacatgtcgaccgaaacaaattttgttcagggaagtgagcagcacaacttcttgaaagcggaccttgagaaggtgaaccgaagtagaacaccctttgttgtttttcagggccaccgccccatgtacacctcgagcgatgaaaccagggacgcggctttgaaacagcagatgctccagaatctggaaccgctgctggtgacatacaatgtgaccctcgcgctatggggacatgtccacaggtacgagaggttctgcccgatgatgaattcccaatgtgtcaacacttcatcaagcttccagtactctggcgctcctgtgcatcttgtgatcgggatgggcggccaagactggcaacctgtatggcaaccgaggcctgatcacccagacgtccctatctttcctcagcctgagcgctccatgtaccgcggtggcgagtttggatacgccagacttgtggcaacaagggagaagctaacactgacttatgtggggaaccatgatgggcaggtccatgatatggtggagatattttctggcctggtatcccccagtaacagtagtgttgctgaggcggtggatggaaccaaacttggcacaggagtcagcaccgtgcggaaaatttctccgctgtacttggaaattggaggcagtgtgatgtttgcgctgctcctgggattttcctttgggatacttgtcaggagaaagaaagaagctgcacagtggactcaagtaaagaatgaggaatcatagtagtgttgccaataccgtgagcctggtgcagtggtggtgaatccaaacttgtgtgggtgtaattactggagtagaacctaacaaagtgaagccatttctgacttcttggggggctccgcgtcctcttggtacaattagtgtattgatagtcttgggaaatgaaggttctgatcgcatatctgttgttgtaatagtccaatgtataagcatgtaataagtgatataatgttcacattgctttggttgacacgagtgtttaacatgtactaccac

SEQ ID NO: 16405 - DNA, 1091 bp, Zea mays
  Clone ID: LIB3062-056-C10_FLI
caaccattattcttgttccactgaccactgcatcaggtccaagtccaactctccaagcggcaagcgccatgccttcttccgcgcaggttctgctctgcctcgccgccgtgctcgcggcggcggcggccaccaccgccgaggcgcactcgcagtgcctggacaacccgccggaccggtccatccacggccgccagctggccgaggccggcgaggtcgtccacgacctccccggtggcctcagggcctacgtcagcggcgccgcgagctcgagcagcgccgtcgtcctcgcctccgacgtcttcgggtacgaggcgccattgctcagacagatagcagacaaggttgcaaaggcagggtacttcgtcgtcgtgcccgatttcttgaagggagactacttagacgacaagaaaaactttacagaatggctcgaggctcactctccggtgaaagctgcggaagacgctaagccactgttcgccgctttgaagaaggaagggaagtccgtcgcggtgggaggctactgctggggagggaagctgagcgtggaggtggggaagaccagcgacgtcaaagctgtgtgcctttcgcacccgtacagcgtcactgccgacgacatgaaagaggtgaaatggccgatcgagatcctgggggcccagaacgacacgaccacgccgccgaaagaagtgtaccggttcgtgcatgtgctgcgtgaaagacacgaggttccctactacgccaagatcttccagggagtcgagcacgggttcgcctgcaggtacaacaccaccgaccctttcgccgtcaagaccgcagagacggccctcgcctacatggtcagctggttcaacaagcacctcaactgaatcaagcctgcactgcacccaccagactaaattcaataaaccacagcagtgctgtgatattttgtttggattcatggctccccagattgatttgtcatggctaagacctctactactgtaatttccctcattttttgtctcttcaaactctctgtattcttttttttttttttgcttttttatgatcgcaataaagttcagtaggggtatacccctcgtgtttgcttc

SEQ ID NO: 16406 - DNA, 1357 bp, Zea mays
  Clone ID: LIB3062-056-D10_FLI
gacttgttagctccccgctcccacggtagctaaagctagctaggtgggtggtagcaccaccatggcctcgcccaagcattcccatcgccatcatcgtgcggcggcgacgaagcatcgtcggccgctggcgctgcggcgtgcgatgctgcattcgtgcgtgtgcttcctggtgggtctcgtgaccggcctggccccttccgactggacggacgccgcctcgcgcgcggccgtgcacgcgaacggcgcggccacggcgcaggtgttccgcgcgctgcacgccatgaaccagacggcggcggcgggggcactgggccagctgctggcgctgcagcactaccagcagcagccagtggtggagaaggagaaggagaaggagaagaagcctctggatctggtggtggtggtgacgactacgacgacgtcgacggggttgtcggagcgcgagcggcggtcggcgggtctgacgcgcacggcgcacgcgctgcgtctggtgtcccctcccctggtgtggctggtggtggaggcggcccgggaggctggtcccacggcacggctgctgcggcgcacgggggtggtgtaccggcacctgacctacgcggagaacttcacatcggaggcctgggaggaggagcggcaccaccagaggaaccaggcgctagcgcacatcgagcggcaccgcctgcgcggcgtcgtcctcttcgcggggctcgccgacgtgtacgacggccgcctcctggagcagctcaggcggcacatcaggacaaggagtgtgggcgcgtgggcagtggcgacagtatgggagcaggagaagagggtggccgtggaagggcccgtcgtcgtctgcaacaccaccaccaccaccaccagcgcagcatccacagcatgtgcatggttctccgcctccgactccacattattggcggcagcggcagcagcagcgcccccagtgacggccgacgactccgtccacggctttgccttcgccagcgacctcctctgggacccttccaggtgggaccgcttccccacatccgagcccgaccagtcgcaggattcgatcaagttcgtgcaaaggttggtgatggcggagtacaacaaaacgagggccatcatccctgcagacgacgattactcctccaaccgttctcaaatcatggtgtggcgtgtcgacacaacgctgctctagctagccctcttgccacgctaagagcgatagataaagatgcatgcatgcttaaaataaacattccatgacttattacatagtaatgccatacacgtacgtatgtatatgtaaacttttgctgcattagaattatatatatagggaaaagaatggcaagcagcagtctgcatc

SEQ ID NO: 16407 - DNA, 1140 bp, Zea mays
  Clone ID: LIB3062-056-G9_FLI
gccagctccgcctcagcggcggcggcggcggcggctcgccgaggtcggcgccttccggcgggtcgttcttggcaggcggctacccgttcgggtccccgaagtcgccggccggtctgtacagtctcccgtccacaccaccaaccaggccgtgcccggtgatggtgaccaccgcctccggcgccaccatcatgaccgtggaacgcctcaacctcgggctcctcgtggatgaggagccggtcatggagcgggttgagtccgggagagccctccgcgagaaggtgttcgaacggctcagcaaagaaaccgccgtgcccaacgacaccgctgcctccgtcaacgtagagggagcggctccggacgtcggctgggtctccgacctcatcaactgagggaaagttctgaaactatcctctgaacggtgcttatccatggtaagtgcgtgagggaagcttattagaggcgccactgctacacagcagcaggaggagaaagtttgtgggaaaaacaaaaaaaaaggaattttatttttctagatttgtactaagatgatccttgtacatattttcctccatgtgtgaatattctcggatggctgttggagggaggggaggcagggaaaggttgatttgttgtggggtttcagatgatgacatgccagtggggaggtagaagggatggccagtaaaacacaaaaggatcaaaggagacatggtatgcgaccagaccatgcatgaggtgtctagatgtacatagcgtctgtgtagtgtacctgtgtgttgtgtgtgtgtggaggtagagcgtggagaggcgaccatgtcggcgatccaagactggaagtaaagatgactggatttttttctatggccgcactgcaccggcggcggctcccggtgacgtttccggcaagaaggcctggagcggttccagaacaacatcatcgtctcgactctcgagtacttgtcattccaccgttcattctgttatttattatctggtattactgctctgtaattttctcaatgtatttccttattgatctcgtctgctctagctaggggccgggagcatctatgtaccttgcactactatgtgctactgtttctgctgataaggaaataattaagaccggccttgttaatt

SEQ ID NO: 16408 - DNA, 753 bp, Zea mays
  Clone ID: LIB3062-057-B12_FLI
gcctttacactggactattctgtgccaatacgagatgctgaacgatgaaatagctaggaaggggaagagcaaccgaggaaggaaggcaaagaatgcacctaggagaaggcaggaagtgtgaaatagatggtaagccccacttcctgccttttacactggactattctgtgccaatacgagatgctgaacgatgaaatagctaggaaggggaagagcaaccgaggaaggaaggcaaagaatgcacctaggagaagcaaaataacgtccatagtttgcccagaatgtcagggtactggaattcacgtcaacggagatgaacttgagaagccaagcatttctttatcagagatgtttcgcttcaagatgaaagcaatcgaagctcacaaagcatggctgaagagacctgaagtgcttgaaaactgttccactgggcttcatttcccctcagaacatgtggagaactctgaggagaaggtgatgccactcaagtcacttcccttctatgccgctgatgggtagaaagatagttgatggcagctactggaggatgctgcagttgttgatgtaaataagctcgcttgacagttgtggaacagtgttgttagatgctcacatacgtgcattatctcagttaacctgtgtccgccagatgataactaagacatttaaactggcaactggctgaactattgtttttagctggattcactaaacatgtacgcagcccatttcgttgggttgggtttgctgctt

SEQ ID NO: 16409 - DNA, 591 bp, Zea mays
  Clone ID: LIB3062-057-C5_FLI
agaagaacccggagaagttcttcgtgcgctccatcaccgcccaattccaggccgtcgtcggcatctcgctgctggagatcctgtccagccactcctccgacgaggtgtacctcggccagcgcgacaccaaggagtggacgtcggacgccaaggcgcaggaggcgttcaagcggttcggcgcgcggctgaccgagatcgagaaacgcgtggaggccatgaacaaggacccgcgcttcaagaaccgctacagcgcggcccagttcccctacaccctgctcttccccaacacctccgacaagggcgataacaccggcgtcaccgccaagggcatccccaacagcatttccatctgattcgatcgagtcctggccagcgtttcacccaaaaaagcagagctagcggtgattcccgtatgtcatccgtttcattttttacatgaatgagaagcgtggtaataaaaaggtttgtagttgcgtgcgcgccgtgtattccttggtgtactggtgctggcggtaaccacttattaccagggatccttgtaatttttcctgttggtttcccaataataatgtgaatatattggtcacatgc

SEQ ID NO: 16410 - DNA, 1354 bp, Zea mays
  Clone ID: LIB3062-057-D1_FLI
gcagctgttgatgcagttaaagaaccattggaagcacaactgtgttcaacaaatactgaagcagagaagctaagagatgttgtcaaagcacttgaggatcaagtagaaaaagagaaggcattgtgcgaagagcttgcagcaaaggtagagttgaaaactaaagcagcaagaactgctgaggctgttcaagaatccttggaggcacaactgtcttcagcaaatgctgaaatacagaaactggaagagatcacgaaacaactacagagtgagttagaaaaggagaagacacttcatgaggagttctcagcacagttagagatgaagattgaagcggagagaactcgttctatggagtctgctaaagaatcattagaggaacaattccagttagtgaactcagaaacagcaaaactacgtgacacggtgcatgcgcttgagcacgatgtggaaaaggagaaggtattttctgcagagctccagatgcagctagaagctctagaggctgtaaagaaggtgttggagtcagaagcggagtcagcacatcaggatgccaaaattctcagccagaaggtggagtcattggaagcaaaactcacggagcatatgttggtaaccgacgaattcactgccaatgtagagtctttgcagtcagataggattgcaatggagcataaacttaaaacagcagatagggaactcataaaattgacaaacaaggtgagcttgctccatagggagatcgagcaggagagattgatgtcagaagagtacgaacagaaatgccaaaagctggaggatcaactgtcgagagatagccgtgacgcaaagctctggcgactcgcaaactcgaatggagatctgaaggttaagaaggagaaagagctcgctaacgcagctgggaagctcgcagagtgccagaagacaattgcttctctggagcgccaaatcaaatcactgacagacctcgacggcgtcgtgctggagcctgaaaggcttgaatccagcagggacatgccattgccactggacttcagaaacagtgatgctgaatttgctatgtttacggatgatttatacgactttgaccttccaaacgacagcaaaagcttcttctctccactcccgtcgatccagacctcgtctccgccctcggagatgtcagtattcgcaggggggctctcgactcttagcagttacaggagcaaaagagcaagtagaaggtgatgaaaaactaggctgcgcccagatgtcgtactaacaaatagttcatggatgctgccatatgtaggtaggtaggtcgatgtacattacaggaactgattgttagatttgtgtgatgaacatcccttccagc

SEQ ID NO: 16411 - DNA, 1266 bp, Zea mays
  Clone ID: LIB3062-057-F6_FLI
cggcgtcgccgtgggctcggtctcgctcgccgcatacggccgcagccagacagccaacgtactcggggcggttgccgggccggggtccgcgatcgatggctgcgcggcggagcaggggctgggcgcgcggcgcggcggcgttcgcggccgtggcgctggcggtgggcgcggggcggaggtacgggtgggacggtgcctccgcggtggcggcgttccgcgaggcccagggcgcgctggggcactgggcggcgccggcctacgtggccgcgcacgcgctcacgcttgcgctctgtccgccttacgccatcttcttcgagggcggcgccgcgctcatcttcggcttcctgccaggcgtcgcatgcgtcttctccgccaaggtcctcggggcctcgctctccttctggatcggcagggcaattttcagatacttcacttcagcaatggaatggctacagaggaacaagtactttcatgttgtggttaagggggttgagcgtgacggctggaaatttgtattgcttgctagattctctcctttgccttcctacatcatcaactacgcgctatcagccacggacgttggttttttcagagattttctctttcccacagttatcggctgcttaccaatgatactacagaatgtttccatcgtaagccttgctggtgcagcagtggcgtcgaccacaggatcaaataagtcccatatatactcttacctgtttccagcaataggcattgtgtccagtgttctcatttcatggaggattaagcagtattcctcagcccttgctgttcctgaagagctgcaaagttcacctactaatggagatcacaatggtgacgctatgctggcttccgcgccatctaaaaataccggatctgggaaaactaggaagagaaggtaactgacagtatccccctgtattcactgtttactacattgtgatcaagtaccaagcagctacagccaatgctagtcaaacatttggatttccacattggtttaccactacagtaagctgtcttgtctgttccatgccatgatcttttggggggtatataacagatgcgcaggcagctaccttcttgtttgtcaattgtcattcagcttctgttcttgtggcagataatatcataaaatgttgtaacagatgcgcaggctcacatagtcacatgttgtacacccgaataacttggtggtttagatttggctcgtcctgagttcaattgtatcctggggatcaatattggttttccctccct

SEQ ID NO: 16412 - DNA, 731 bp, Zea mays
  Clone ID: LIB3062-057-G7_FLI
gcaagtgaagaagtacagtggtggcatgaggaggcgccttagtgtcgccatctcgttgatcggagatgctaaagttgtgtacatggatgagccaagcaccggattagacccagcttcgaggaagagtctgtggagcgcagtgaagcaagcaaagcaggatagagcaatcattctcaccacgcattccatggaagaagctgaaactctttgtgacagactgtgtatcatggtcgatggaaagctccagtgcataggcactcccaaagagctcatagctagatacggagggtactacgtgctgacgatgacgacactgccggagttcgaacaagaggtcgaagatctggtgcgcaggctctcgccaagctccaggaaggtgtaccatctgtcggggacgcagaagcacgagctgccgaagcaggaagcgaggatctcagacgtgttcatggccgtagagagcttcaagaagagggtggaagtccaggcctggggcctcgcggacaccaccatggaggacgtgttcgtcaaggtcgccaaaggggcccagtccagcgaagaactctcctagagtcgtagtctacatgtaatggtgcaagggcaggagcctgctgttgatgctaggtgtatatatatgtacagcacgtaaaatttcttccgttgcaaagcaaatggtttggtttgctcacctttgattttggaattttgataacaaggattatttggattgaatt

SEQ ID NO: 16413 - DNA, 1349 bp, Zea mays
  Clone ID: LIB3062-058-E3_FLI
gatcaatcccatcttgtaaactgcttgaagaagtatgcaagaggaattttgctacgcattttgattattgcacaactgcttgcacggactttgtgtcattagatgaggcaacatttaaggatattcttgagcatggtgatatgacagtaacgtcggaagagagggttctggatgtcattttaacatggtgcatgggagcttgtgaaacttttcactggacttcagtagatgagctgttgagaacttcaacaccagagcagctctttggggagaggctttccgccatcaatactttgctaccattagtgaggttccctttgatgcacctgtctatactaaagaggatggagagaagtaatctagcaaaccacatacaagcattcagacagttggttgcagaggccattgaattctctcatgctggacaattgatgcctacagcatgcgaatgtgagagatttcagcatagacggtcaagctataaagagctgcagtatatctctgatggtgatagcaatggtgttatctactatgctggaacatcatttggaaaacatcagtggatgaatcctgtgttaaccaagaatatcactgtggtggcaagcagtccaaattcaaggcacacagatccaaaggctttggtttcaaagaattaccaggggacatgttttgctgggccttgtgttgaaaatggcaagagggtttcttggtggatggtagacatcggacaggagcaccaggttggttcatatattcctggcatctgatctgatggttgccaatgcagtagataatgggatggcgaattgccttacagttgatgtgcaactactacacggtgaggcaggatggctccacagcattcatgaggtcttgggctttccaggtatatactaactaactaatgcttggtgttgcatggagcgaggctgaacctatgaagctggcagggatccatggacggccggaactggacaagcctccgtgtccacgacagcgaccctaccgtctgctatccaggccagttcgcctcttggcccatcgttggcccggcggcccttctgcccttccgattcttcagggtcgccctgacaggccctgccgtcggctgtacgtggaacctctgcatttgcttcctcgagctctacggctacttccattagatcttcttcttcctcttcttcttaataaaaaatatagatgccggagtttttatgcaaacacaagtaatattacctgcgatgccacaattgctggtcattgcacatcatgaaacaagtattcacagttgaaaaagaaatttgttagaacgataggcctaagactccgatggcctatcgccctatctt

SEQ ID NO: 16414 - DNA, 810 bp, Zea mays
  Clone ID: LIB3062-058-E4_FLI
aaaaagaaaaggcaaaggcaaaggaatcccaatcaggcaagcaaaaggaagaaccagctgctgcggagtgcggagatgtcgtcgcagctgatcgaggagcaccggtcgggcgcggaggtgcacgtcgggcacgagctgtgcgagcgcaagtcgcgcgagttcatggtggagctgggcctccccgacgggctcctcccgctgcccagcctggacgaggtgggctacaaccggtcgacggggttcgtgtggctgcggcaggccgccggcctgacccacaccttcgggtccatcggcaagcaggtgtggtacgacagggaggtgacggcgttcgtggagccggggcggatgcacggcctcgccggggtgaagagcaaggagctcctcatctgggtcaccatctccgagatcgtcctcagcccctccggcaccaagatcgtgttccgcacccccgcggggctcggccgcgccttccctgtcaccgccttccagctcgagcccgagggggaccacaaggccgaggacgccgccgccgccgccgccaactgatctgctctagcttccggcggcggcggccgtgcgtgggctgctcgatccggtagtggcagtggctttgtgagacagtcgagtcgattgtggtttcccctcctccgccatgtgcgtgtagtggatgatgatgcaggaataaacggtgtccctggatccagaactcacggttcgatccatccagtttatctcatgcttgtgtatctctatgtatgcattgcctgtttgttcgctggaatctactacttgcagcggcctcgtctcttc

SEQ ID NO: 16415 - DNA, 1411 bp, Zea mays
  Clone ID: LIB3062-058-F5_FLI
gtgacgaggtgggctgatgccgcaacagctaagtcccaacctacgccattaacgtcctctatataagcaagcagcgaacctctgcaaacatggtcatcagcgaagcacaaagcgcagatcgtcgatctagcgagctcggagtcggagcacgcctagacaccaaagcaatggcggctcggcggctcctcgtcgcgttccttgccttgtgctctggcttctcggccgtccacgggcagaagttcaacgccatcttcagcttcggcgactccatgtccgacaccggcaacctgtgcgtgaacggtccccccgccggcctgacgctcacccagccgccctacggcgagaccttcttcggccgcgccacctgccgctgctccgacggccgcctcgtcgtcgacttcctggccgagaagttcgggctgcccttgctgaagccgtcgaagcagggcggcgcgaacttcaagcagggcgccaacatggcgatcatcggcgcgaccaccatggattctggcttcttccagtcgctgggcatcgccggcaagatctggaacaacgggcccctcaacacccagatccaatggttccagcagctgatgccgtccatctgcggttcaaggcaggcctgcaagtcgtacctgtccaagtccctgttcgtgctgggcgagttcggcggcaacgactacaacgcgcagctcttcggcggctactccccggagcaggcgagcaggcagagcggcaccatcgtggacgccatcgggcggggcgtggagcagctcatccgcctgggcgcgacgcacgtggtggtccccggcgtgctgcccgtgggctgcttcccgatctacctcacgctgtaccggacctccaacgccggcgactacgaccggcacggctgcctgaggcgcttcaacgcgctgtccgcgcggcacaacgcgctgctgcagcgcaaggtgtcgggcctgcggggcaggtaccccggcgcgcggatcatgtacgccgacttctacgcccacgtctacgacatggtcaggaggcccgccagctacgggttcagcgcgaacctcagggcgtgctgcggcgccggcggcggcaagtacaactaccagaacggcgcgcgctgcggcatgcccggcgcgcacgcgtgctccaacccgtcgtcgtcgctcagctgggacggcatccacctgacggaggcggcgtacaggaagatcgccgacggctgggtcagcggggcctactgccacccgcccatctcggcgtaattgtttgtttagaccttattcgtttgtttgtaagtggatcagagcggtttggaagcaagatgatggaggcgataagcaaaaaaaatcgattatacaccgtgtagcttcaatgcaccctgttttatgtgcaatgaaatgatgggacaacctta

SEQ ID NO: 16416 - DNA, 806 bp, Zea mays
  Clone ID: LIB3062-059-D6_FLI
ccggtgtgcctcctggaaccacacctgaaacatgtctatcttgcaggggttcaggatttatattcatgcaaaccgggccattcaggatgcaatcaacctgcacaaaatgtggtggttctgggaaaactgtgaaggaattctgcaaggcatgcagaggaaacaaagttgtgcctggaaggaaatcagtccgccttgacatactgcctggttcggataatgaggacaccataaaggtggttcgatcaggtggagaagacccagatggccgtccaggtgatctttatgtgacccttgaggttcgtgaggatcctgttttccgaagagagaaaggtgatattcatgttgatgctgtcctgaatgtgactcaggcaattttgggagggacagttcaagtcccaactctcagtggagacgttgttctaaagatcaagcccggtactcaacctggtcagaaggtagttctgagaggaaaagggatcaagacaagaaactcaccgtaccacggagatcaatatgtccatttcaatgtcaacatccccgaaaatttgacgtctagacagcgggagctgatcgaggaattcgcgaaggaggagcaaggcgaagacgagaaggacgccaaggcagcagctggagcatcggggggatagccggttttaggagccacagtagtgccttttagctggtatttataccgtgaccgtagacctgtctcaaattcgcagcggaaagatatatagataggtctttgtttcggattttgtagctggaataaatgaataatacgtctagaactgattttctgtctt

SEQ ID NO: 16417 - DNA, 1209 bp, Zea mays
  Clone ID: LIB3062-059-E4_FLI
ctccatcttccgttccttcccttactcgcgctcggcacgcaggcgacggcggcggcggcggcgctcaggctcgggctcgggctctcagcgacggcgtcagcggcttcccctcccgcctctcgctagtcgactcgcgccctcgcatccgttcctccgcacaccggccggtgaccctgcgtttcgttcttgttaactattcaagaagtaggaaatgatgagcaacttccaagccactacttgcaagcctcacagtaggatcattgtgaagaaacctatagcaagtcttggaagcacatgtcagtatccattatattcacatgctctcggattccacacgttgcaagagaaggtgtacccaaggctagttctcatttctgctagccacaaaaggcttacttctgtatgtgccttaagtggaaagggaagctctggcactgctgatgaccctttgatggaatctttgaagaaagctgtggctgatgcaaaaaagccccgttccatacaagacttactgaaggagcaggtggctaaactgagagaacaagcgtctggtggaggcagagggaatgggaatcgccgtggaggcagtggtggttctggtggcccagatgatgaatcgttcaaggaaacattggatgaagtagtgcaagttatcttagccactgttgctttcatacttgtgtacatccacataatcagaggggaggagctttaccgtcttgccagggactacaccagatatctcgtcaccggtaagaggactgcccgactgaagcgtgccatgcaaaggtggcgcaacttctcggagagcttcatgcagaaggcaggctcagaagacgaccaatatgagagaccagctgtgtcaaaacctgcatggtggcaacagcctcagaaatttgtgcattttgtggaggacctttgcaggggaaactggcgtccccatgctcaggagtcttagttgatggagtaccccccgacccattgcagaatgcatacttggctgtgattggagcaaggtcgcctgtcaggctgtcacctggggcaggttttttttttgttatttatcggatatttgccactggtttcttaggagtatgtagaaagtcgctgaattgttggcaattttgcagttgatagaacctcgttttgagactctaacctgccaagtcgggtgtggaattgtttattaataagctgtttggtttgagg

SEQ ID NO: 16418 - DNA, 3447 bp, Homo sapiens
  Clone ID: LIB3063-009-H1_FLI
ctgtgtttggggaaggccaggcttgcgctcctcgccgggttccgcgaaggttaaccttggctgacttggctcgcgagcaaagggcagcgtctgagctcccggcgttccaggagtggcctcttttgtaggagcacctgaaatgcagcgtctggtgcactaagccgtagcggcagcagcagccacagcgacagcgctggggccctgtgtagaagctccatcccccttgtctttgtgcttgcctgcgtccccagactcagagattatcttagaagacctaggactccaaaaatgtttcccctgaaggacgctgaaatgggagcctttaccttctttgcctcggctctgccacatgatgtttgtggaagcaatggacttcctctcacaccaaattccatcaaaattttagggcgctttcaaatccttaaaaccatcacccatcccagactctgccagtatgtggatatttctaggggaaagcatgaacgactagtggtcgtggctgaacattgtgaacgtagtctggaagacttgcttcgagaaaggaaacctgtgagctgttcaacggttttgtgtatagcatttgaggttcttcagggcttgcagtatatgaacaaacatggtatagtacacagggcattgtctcctcataatatcctgttggaccgaaagggacatattaaattggctaaatttggactttatcacatgacagctcatggtgatgatgttgatttcccaatagggtatccctcgtacttggcccctgaggtaattgcacagggaattttcaaaaccactgatcacatgccaagtaaaaaaccattgccttctggccccaaatcagatgtatggtctcttggaatcattttatttgagctttgtgtgggaagaaaattatttcagagcttggatatttctgaaagactaaaatttttgcttactttggattgtgtgatgacactttaatagttctggctgaagagcatggttgtttggacattataaaggagcttcctgaaactgtgatagatcttttgaataagtgccttaccttccatccttctaagaggccaaccccagatgaattaatgaaggacaaagtattcagtgaggtatcacctttatataccccctttaccaaacctgccagtctgttttcatcttctctgagatgtgctgatttaactctgcctgaggatatcagtcagttgtgtaaagatataaataatgattacctggcagaaagatctattgaagaagtgtattacctttggtgtttggctggaggtgacttggagaaagagcttgtcaacaaggaaatcattcgatccaaaccacctatctgcacactccccaattttctctttgaggatggtgaaagctttggacaaggtcgagatagaagctcgcttttagatgataccactgtgacattgtcgttatgccagctaagaaatagattgaaagatgttggtggagaagcattttacccattacttgaagatgaccagtctaatttacctcattcaaacagcaataatgagttgtctgcagctgccacgctccctttaatcatcagagagaaggatacagagtaccaactaaatagaattattctcttcgacaggctgctaaaggcttatccatataaaaaaaaccaaatctggaaagaagcaagagttgacattcctcctcttatgagaggtttaacctgggctgctcttctgggagttgagggagctattcatgccaagtacgatgcaattgataaagacactccaattcctacagatagacaaattgaagtggatattcctcgctgtcatcagtacgatgaactgttatcatcaccagaaggtcatgcaaaatttaggcgtgtattaaaagcctgggtagtgtctcatcctgatcttgtgtattggcaaggtcttgactcactttgtgctccattcctatatctaaacttcaataatgaagccttggcttatgcatgtatgtctgcttttattcccaaatacctgtataacttcttcttaaaagacaactcacatgtaatacaagagtatctgactgtcttctctcagatgattgcatttcatgatccagagctgagtaatcatctcaatgagattggtttcattccagatctctatgccatcccttggtttcttaccatgtttactcatgtatttccactacacaaaattttccacctctgggataccttactacttgggaattcctctttcccattctgtattggagtagcaattcttcagcagctgcgggaccggcttttggctaatggctttaatgagtgtattcttctcttctccgatttaccagaaattgacattgaacgctgtgtgagagaatctatcaacctgttttgttggactcctaaaagtgctacttacagacagcatgctcaacctccaaagccatcttctgacagcagtggaggcagaagttcggcaccttatttctctgctgagtgtccagatcctccaaagacagatctgtcaagagaatccatcccattaaatgacctgaagtcagaagtatcaccacggatttcagcagaggacctgattgacttgtgtgagctcacagtgacaggccacttcaaaacacccagcaagaaaacaaagtccagtaaaccaaagctcctggtggttgacatccggaatagtgaagactttattcgtggtcacatttcaggcagcatcaacattccattcagtgctgccttcactgcagaaggggagcttacccagggcccttacactgctatgctccagaacttcaaagggaaggtcattgtcatcgtggggcatgtggcaaaacacacagctgagtttgcagctcaccttgtgaagatgaaatatccaagaatctgtattctagatggtggcattaataaaataaagccaacaggcctcctcaccatcccatctcctcaaatatgaagaaccaagagtgtgactgccaaaacttagtgtggcatcagcaccaacagcacagttcttcatatccacgccactctcagacaaaactagatgtccagattgttgcatttccgtaaagtttgtcacgagacattttttaaaatctcataacccacatgttcagttatccatgcaagaaacttgactctacatgtattgctgaaagaattttcttaacagtgaaatctgatcatatatttttaccacactgccacataaagcccaagaaattcagctgacaagacagatttagcattatcaagaaatcccatttgccctgaaaaagctgtcctccattgtactgaacagacagtcctgtcgattgtgttatttagaaacatacactgaatgtgggctgaaatcatcatctttccataatgaaaactgagaaactattcacaatgcattccttataaataaatgctacatttagtaactc

SEQ ID NO: 16419 - DNA, 1767 bp, Homo sapiens
  Clone ID: LIB3063-047-F10_FLI
tctggaaggaagattccggattccgtatttcatgtcagaagattgcgagcaccttatccgaaggatgttggtcctagacccatccaaacggctaaccatagcccaaatcaaggagcataaatggatgctcatagaagttcctgtccagagacctgttctctatccacaagagcaagaaaatgagccatccatcggggagtttaatgagcaggttctgcgactgatgcacagccttggaatagatcagcagaaaaccattgagtctttgcagaacaagagctataaccactttgctgccatttatttcttgttggtggagcgcctgaaatcacatcggagcagtttcccagtggagcagagacttgatggccgccagcgtcggcctagcaccattgctgagcaaacagttgccaaggcacagactgtggggctcccagtgaccatgcattcaccgaacatgaggctgctgcgatctgccctcctcccccaggcatccaacgtggaggccttttcatttccagcatctggctgtcaggcggaagctgcattcatggaagaagagtgtgtggacactccaaaggtcaatggctgtctgcttgaccctgtgcctcctgtcctggtgcggaagggatgccagtcactgcccagcaacatgatggagacctccattgacgaagggctggagacagaaggagaggccgaggaagaccccgctcatgcctttgaggcatttcagtccacacgcagcgggcagagacggcacactctgtcagaagtgaccaatcaactggtcgtgatgcctggggcagggaaaattttctccatgaatgacagcccctcccttgacagtgtggactctgagtatgatatggggtctgttcagagggacctgaactttctggaagacaacccttcccttaaggacatcatgttagccaatcagccttcaccccgcatgacatctcccttcataagcctgagacctaccaacccagccatgcaggctctgagctcccagaaacgagaggtccacaacaggtctccagtgagcttcagagagggccgcagagcatcagatacctccctcacccagggaattgtagcatttagacaacatcttcagaatctggctagaaccaaaggaattctagagttgaacaaagtgcagttgttgtatgaacaaataggaccggaggcagaccctaacctggcgccggcggctcctcagctccaggaccttgctagcagctgccctcaggaagaagtttctcagcagcaggaaagcgtctccactctccctgccagcgtgcatccccagctgtccccacggcagagcctggagacccagtacctgcagcacagactccagaagcccagccttctgtcaaaggcccagaacacctgtcagctttattgcaaagaaccaccgcggagccttgagcagcagctgcaggaacataggctccagcagaagcgactctttcttcagaagcagtctcaactgcaggcctattttaatcagatgcagatagcagagagctcctacccacagccaagtcagcagctgccccttccccgccaggagactccaccgccttctcagcaggccccaccgttcagcctgacccagcccctgagccccgtcctggagccttcctccgagcagatgcaatacagccctttcctcagccagtaccaagagatgcagcttcagcccctgccctccacttccggtacccgggctgctcctcctctgcccacgcaggc

SEQ ID NO: 16420 - DNA, 2484 bp, Homo sapiens
  Clone ID: LIB3063-070-A3_FLI
gcgctcggtgggtgtggttgcccctagtttgaggcctgcccgattacccgcaagacttgggcagccccgggcgccgctccgaccacgacagggaaaggaaccttaatctcatctttaaaataaggagaattactgagtgacctgaaggacccttttcagctggaaagtctgaactgaccaacactggatgaatttgaccatttcttaggagactggaatgttaagtttctataaatgaatgaaccagttctctcttgtttggagcaatgctgaaattccaagaggcagctaagtgtgtgagtggatcaacagccatttccacttatccaaagaccttgattgcaagaagatacgtgcttcaacaaaaacttggcagtggaagttttggaactgtctatctggtttcagacaagaaagccaaacgaggagaggaattaaaggtacttaaggaaatatctgttggagaactaaatccaaatgaaactgtacaggccaatttggaagcccaactcctctccaagctggaccacccagccattgtcaagttccatgcaagttttgtggagcaagataatttctgcattatcacggagtactgtgagggccgagatctggacgataaaattcaggaatataaacaagctggaaaaatctttccagaaaatcaaataatagaatggtttatccagctgctgctgggagttgactacatgcatgagaggaggatacttcatcgagacttaaagtcaaagaatgtatttctgaaaaataatctccttaaaattggagattttggagtttctcgacttctaatgggatcctgtgacctggccacaactttaactggaactccccattatatgagtcctgaggctctgaaacaccaaggctatgacacaaagtcggacatctggcaaaaaaggatccacctgcagactctgagggcactgtcagaagtacagaaaatgacgccaagagaaaggatgcggctgaggaagctccaggcggctgatgagaaagccaggaagctgaaaaagattgtggaagaaaaatatgaagaaaatagcaaacgaatgcaagaattgagatctcggaactttcagcagctgagtgttgatgtactccatgaaaaaacacatttaaaaggaatggaagaaaaggaggagcaacctgagggaagactttcttgttcaccccaggacgaggatgaagagaggtggcaaggcagggaagaggaatctgatgaaccaactttagagaacctgcctgagtctcagcctattccttccatggacctccacgaacttgaatcaattgtagaggatgccacatctgaccttggataccatgagatcccagaagacccacttgtggctgaagagtactacgctgatgcatttgattcctattgtgtagagagtgatgaggaggaagaagaaatagcgttagaaagaccagagaaagaaatcaggaatgagggatcccagcctgcttacagaacaaaccaacaggacagtgatatcgaagcgttggccaggtgtttggaaaatgtcctgggttgcacttctctagatcagccatgcagaagctggggacagaagtatttgaagaggtctataattacctcaagagagcaaggcatcagaatgctagcgaagcagagatccgcgagtgtttggaaaaagtggtgcctcaagccagcgactgttttgaagtggaccagctcctgtactttgaagagcagttgctgatcacgatgggaaaagaacctactctccagaaccatctctaggcaactatcaaaaagaagcagaagttcaagtggacaaatttatgtgaaaattcatttaacatataagctgaactctattatggggaatggatacaaaagcagagctcccatcttgactttcaattcctcatcagaagtactggcttctttagagagtagtaagcatggctgcctatgcttggagtcataagtgttatttggactataccctgagataagcttatagatcaagtttggctcccttgaaaagcatttctctcatgtgcgccctcagggcttccagcaggattgagtcaccctgacgatgaccggggagaagccgtgtgctcttcattattttcagctggaggacagagctcagtgcctgactgcctagggtctcatggactgtaggcagcctgccagtgaaggtcactggactctagcctacaacatgctgagctacagcccagaagccagacatgcctgtcttagctgacctgtttttggtccacttttgcccttccatgactaataaggaagatatgtgtgtatttcatacacacacaaggacctggattaaaaatccaaaaagtgattctcttctatgatttatttcaaactcatccatagataattcaagatttgtattcaaaataaacatagttttcacagttacaaaataaatcacctattttatcttttccttatgt

SEQ ID NO: 16421 - DNA, 2234 bp, Homo sapiens
  Clone ID: LIB3063-072-D3_FLI
gccgcgggcacctacgcctggatggctcctgaggttatcaaggcctccaccttctctaagggcagtgacgtctggagttttggggtgctgctgtgggaactgctgaccggggaggtgccataccgtggcattgactgccttgctgtggcctatggcgtagctgttaacaagctcacactgcccatcccatccacctgccccgagcccttcgcacagcttatggccgactgctgggcgcaggacccccaccgcaggcccgacttcgcctccatcctgcagcagttggaggcgctggaggcacaggtcctacgggaaatgccgcgggactccttccattccatgcaggaaggctggaagcgcgagatccagggtctcttcgacgagctgcgagccaaggaaaaggaactactgagccgcgaggaggagctgacgcgagcggcgcgcgagcagcggtcacaggcggagcagctgcggcggcgcgagcacctgctggcccagtgggagctagaggtgttcgagcgcgagctgacgctgctgctgcagcaggtggaccgcgagcgaccgcacgtgcgccgccgccgcgggacattcaagcgcagcaagctccgggcgcgcgacggcggcgagcgtatcagcatgccactcgacttcaagcaccgcatcaccgtgcaggcctcacccggccttgaccggaggagaaacgtcttcgaggtcgggcctggggattcgcccacctttccccggttccgagccatccagttggagcctgcagagccaggccaggcatggggccgccagtccccccgacgtctggaggactcaagcaatggagagcggcgagcatgctgggcttggggtcccagttcccccaagcctggggaagcccagaatgggaggagaaggtcccgcatggacgaagccacatggtacctggattcagatgactcatcccccttaggatctccttccacacccccagcactcaatggtaaccccccgcggcctagcctggagcccgaggagcccaagaggcctgtccccgcagagcgcggtagcagctctgggacgcccaagctgatccagcgggcgctgctgcgcggcaccgccctgctcgcctcgctgggccttggccgcgacctgcagccgccgggaggcccaggacgcgagcgcggggagtccccgacaacaccccccacgccaacgcccgcgccctgcccgaccgagccgcccccttccccgctcatctgcttctcgctcaagacgcccgactccccgcccactcctgcacccctgttgctggacctgggtatccctgtgggccagcggtcagccaagagcccccgacgtgaggaggagccccgcggaggcactgtctcacccccaccggggacatcacgctctgctcctggcaccccaggcaccccacgttcaccacccctgggcctcatcagccgacctcggccctcgccccttcgcagccgcattgatccctggagctttgtgtcagctgggccacggccttctcccctgccatcaccacagcctgcaccccgccgagcaccctggaccttgttcccggactcagaccccttctgggactccccacctgccaaccccttccaggggggcccccaggactgcagggcacagaccaaagacatgggtgcccaggccccgtgggtgccggaagcggggccttgagtgggccaggccactcccccgagctccagctgccttaggaggagtcacagcatacactggaacaggagctgggtcagcctctgcagctgcctcagtttccccagggaccccacccccctttgggggtcaggaacactacactgcacaggaagccttcacactggaagggggacctgcgcccccacatctgaaacctgtaggtccccccagctcacctgccctactggggcccaacactgtacccagctggttgggaggaccagagcctgtctcagggaattgcctgctggggtgatgcagggaggaggggaggtgcagggaagaggggccggcctcagctgtcaccagcacttttgaccaagtcctgctactgcggcccctgccctagggcttagagcatggacctcctgccctgggggtcatctggggccagggctctctggatgccttcctgctgccccagccagggttggagtcttagcctcgggatccagtgaagccagaagccaaataaactcaaaagctgtctcccc

SEQ ID NO: 16422 - DNA, 2499 bp, Homo sapiens
  Clone ID: LIB3063-092-E4_FLI
caccgtggagaggccagggtgactctgctgccgtgcaaatcccaagtctctggaaacctgaggtcttggctcctctgtggcagagtcaccgtggagaggccagggtatcacaaacttatggattttgacaagaaaggagggaaaggggagacggaggagggccggagaatgtccaaggccggcgggggccggagcagccacggcatccggagctcggggaccagctcgggggtcctgatggtgggccccaacttccgcgtcggcaagaagatcggctgcggcaacttcggggagctccgcctaggaaagaatctctatacaaatgaatacgtggctatcaaattggagccgatcaagtcccgggccccgcagctgcacctggagtaccggttctacaagcagctcagcgccacagagggcgtccctcaggtctactacttcggtccgtgcgggaagtacaacgccatggtgctggagctgctggggcccagcctggaggacctgttcgacctgtgcgaccggaccttcacgctcaagacggtgctgatgatcgccatccagctgatcacgcgcatggagtatgtgcacaccaagagcctaatctaccgggacgtgaagcccgagaacttcctggtgggccgcccggggaccaagcggcagcatgccatccacatcatcgacttcgggctggccaaggagtacatcgaccccgagacaaagaagcacatcccgtaccgcgagcacaagagcctgacgggcacggcgcgctacatgagcatcaacacgcacctgggcaaggagcagagccgccgcgacgacctggaggcgctgggccacatgttcatgtacttcctgcgcggcagcctcccctggcaggggctcaaggccgacacgctcaaggagcggtaccagaagatcggggacaccaaacgcgccacgcccatcgaggtgctctgcgagaacttcccagaggagatggccacgtacctgcgctatgtgcggcgcctggacttcttcgagaagcccgactatgactacctgcggaagctcttcaccgacctcttcgaccgcagtggcttcgtgttcgactatgagtacgactgggccgggaagcccctgccgacccccatcggcaccgtccacaccgacctgccctcccagcctcagctccgggacaaaacccagccgcacagcaaaaaccaggcgttgaactccaccaacggggagctgaatgcggacgaccccacggccggccactccaacgccccgatcacagcgcctgcagaggtggaggtggccgatgaaaccaaatgctgctgtttcttcaagaggagaaagagaaaatcgctgcagcgacacaagtgaccctgggcgcgtgcagccccctgaatcttctccgtgcagccccttggggcgcgaccttgtgcgaggccctcggggcccacccacagcggcccagggccagaccctggctggaagccagaacgcagactgcaggggccgcgcctggctcaggcggccccaccccccgggacgtggggtcacttccttcatgtaagactttggccgaaatttctacacctgtgtctagtcctcccctccaagagcattaactatttaaaacaaggaaaagaggaaaaaaaaaacagaggcccgccctaccccactcctgcccctccgtttctttgctgaagtgagtagtgtgatcctggaggcccccccggcctggccccgccccgccagccgcccccgttagcgtcataaagtccagcttgtctccctcgatccaaaggccgttttctcgaggggagggcaggcccggcctggaggggtgctgtggagctgtcttgcccaggccctcctgggagggggacaggcattgttgccaggggtgaggccgtgccccaggcctccccgaaaccaaaggggaaggcaggggtggggccgtggctgaagccggctccccaaccaaaatgctgcaccaaagctcgggcgccgcgggcacggctgctgcagtctcttcccagcctggccctggcaaggggcgggtgggcgctgccaggcgggtgcttctcgacgcacttgctcccggaggctgcgccccggcgcctggaacccgaggtgggaggaccggttggtgtcaccctgctcggccctcagccctgccgcgtggggcgcgtgggcacggagcttcctgcctctctgctccgacacccggcaagcagccggagacaaaacgccttaaagcccccggcccagccctgcaggtatattgcaggggcctgggggcggccctggactggcgggcggttccccagtggggtgccctggaggctgccgggcagagtggagcagcttggggccgtgcccagggcggtggctgtgagtctagtttttgctttaccaagtgtacagaaatggcatttacgtttctctgatgctcccttgaagccatagaatttaggggcttttttaaaaaaataaaagaaaaatgaaacc

SEQ ID NO: 16423 - DNA, 1460 bp, Homo sapiens
  Clone ID: LIB3063-117-E9_FLI
gccggtgctgccggcgctcaccatcaaccctaccatcgccgagggcccatcccctaccagcgagggcgcctccgaggcaaacctggtggacctgcagaagaagctggaggagctggaacttgacgagcagcagaagaagcggctggaagcctttctcacccagaaagccaaggtcggcgaactcaaagacgatgacttcgaaaggatctcagagctgggcgcgggcaacggcggggtggtcaccaaagtccagcacagaccctcgggcctcatcatggccaggaagctgatccaccttgagatcaagccggccatccggaaccagatcatccgcgagctgcaggtcctgcacgaatgcaactcgccgtacatcgtgggcttctacggggccttctacagtgacggggagatcagcatttgcatggaacacatggacggcggctccctggaccaggtgctgaaagaggccaagaggattcccgaggagatcctggggaaagtcagcatcgcggttctccggggcttggcgtacctccgagagaagcaccagatcatgcaccgagatgtgaagccctccaacatcctcgtgaactctagaggggagatcaagctgtgtgacttcggggtgagcggccagctcatagactccatggccaactccttcgtgggcacgcgctcctacatggctccggagcggttgcagggcacacattactcggtgcagtcggacatctggagcatgggcctgtccctggtggagctggccgtcggaaggtaccccatccccccgcccgacgccaaagagctggaggccatctttggccggcccgtggtcgacggggaagaaggagagcctcacagcatctcgcctcggccgaggccccccgggcgccccgtcagcggtcacgggatggatagccggcctgccatggccatctttgaactcctggactatattgtgaacgagccacctcctaagctgcccaacggtgtgttcacccccgacttccaggagtttgtcaataaatgcctcatcaagaacccagcggagcgggcggacctgaagatgctcacaaaccacaccttcatcaagcggtccgaggtggaagaagtggattttgccggctggttgtgtaaaaccctgcggctgaaccagcccggcacacccacgcgcaccgccgtgtgacagtggccgggctccctgcgtcccgctggtgacctgcccaccgtccctgtccatgccccgcccttccagctgaggacaggctggcgcctccacccaccctcctgcctcacccctgcggagagcaccgtggcggggcgacagcgcatgcaggaacgggggtctcctctcctgcccgtcctggccggggtgcctctggggacgggcgacgctgctgtgtgtggtctcagaggctctgcttccttaggttacaaaacaaaacagggagagaaaaagc

SEQ ID NO: 16424 - DNA, 3699 bp, Homo sapiens
  Clone ID: LIB3063-134-E5_FLI
ttgaatcccagtcctaacagaagtactgcgaatcttgtggcctcattctgaacaaaagggattagagaagaaaaatctcttgatataaggcttgaaagcaagggcaggcaatcttggttgtgaatattttctgatttttccagaaatcaagcagaagattgagctgctgatgtcagttaactctgagaagtcgtcctcttcagaaaggccggagcctcaacagaaagctcctttagttcctcctccttcaccgccaccaccaccaccaccgccacctttgccagaccccacacccccggagccagaggaggagatcctgggatcagatgatgaggagcaagaggaccctgcggactactgcaaaggtggatatcatccagtgaaaattggagacctcttcaatggccggtatcatgttattagaaagcttggatgggggcacttctctactgtctggctgtgctgggatatgcaggggaaaagatttgttgcaatgaaagttgtaaaaagtgcccagcattatacggagacagccttggatgaaataaaattgctcaaatgtgttcgagaaagtgatcccagtgacccaaacaaagacatggtggtccagctcattgacgacttcaagatttcaggcatgaatgggatacatgtctgcatggtcttcgaagtacttggccaccatctcctcaagtggatcatcaaatccaactatcaaggcctcccagtacgttgtgtgaagagtatcattcgacaggtccttcaagggttagattacttacacagtaagtgcaagatcattcatactgacataaagccggaaaatatctttatgtgtgtggatgatgcatatgtgagaagaatggcagctgaggccactgagtggcagaaagcaggtgctcctcctccttcagggtctgcagtgagtacggctccacagcagaaacctataggaaaaatatctaaaaacaaaaagaaaaaactgaaaaagaaacagaagaggcaggctgagttattggagaagcgcctgcaggagatagaagaattggagcgagaagctgaaaggaaaataatagaagaaaacatcacctcagctgcaccttccaatgaccaggatggcgaatactgcccagaggtgaaactaaaaacaacaggattagaggaggcggctgaggcagagactgcaaaggacaatggtgaagctgaggaccaggaagagaaagaagatgctgagaaagaaaacattgaaaaagatgaagatgatgtagatcaggaacttgcgaacatagaccctacgtggatagaatcacctaaaaccaatggccatattgagaatggcccattctcactggagcagcaactggacgatgaagatgatgatgaagaagactgcccaaatcctgaggaatataatcttgatgagccaaatgcagaaagtgattacacatatagcagctcctatgaacaattcaatggtgaattgccaaatggacgacataaaattcccgagtcacagttcccagagttttccacctcgttgttctctggatccttagaacctgtggcctgcggctctgtgctttctgagggatcaccacttactgagcaagaggagagcagtccatcccatgacagaagcagaacggtttcagcctccagtactggggatttgccaaaagcaaaaacccgggcagctgacttgttggtgaatcccctggatccgcggaatgcagataaaattagagtaaaaattgctgacctgggaaatgcttgttgggtgcataaacacttcacggaagacatccagacgcgtcagtaccgctccatagaggttttaataggagcggggtacagcacccctgcggacatctggagcacggcgtgtatggcatttgagctggcaacgggagattatttgtttgaaccacattctggggaagactattccagagacgaagaccacatagcccacatcatagagctgctaggcagtattccaaggcactttgctctatctggaaaatattctcgggaattcttcaatcgcagaggagaactgcgacacatcaccaagctgaagccctggagcctttttgatgtacttgtggaaaagtatggctggccccatgaagatgctgcacagtttacagatttcctgatcccgatgttagaaatggttccagaaaaacgagcctcagctggcgaatgccttcggcatccttggttgaattcttagcaaattctaccaatattgcattctgagctagcaaatgttcccagtacattggacctaaacggtgactctcattctttaacaggattacaagtgagctggcttcatcctcagacctttattttgctttgaggtactgttgtttgacattttgctttttgtgcactgtgatcctggggaagggtagtcttttgtcttcagctaagtagtttactgaccattttcttctggaaacaataacatgtctctaagcattgtttcttgtgttgtgtgacattcaaatgtcatttttttgaatgaaaaatactttcccctttgtgttttggcaggttttgtaactatttatgaagaaatattttagctgagtactatataatttacaatcttaagaaattatcaagttggaaccaagaaatagcaaggaaatgtacaattttatcttctggcaaagggacatcattcctgtattatagtgtatgtaaatgcaccctgtaaatgttactttccattaaatatgggagggggactcaaatttcagaaaagctaccaagtcttgagtgctttgtagcctatgttgcatgtagcggactttaactgctccaaggagttgtgcaaacttttcattccataacagtcttttcacattggattttaaacaaagtggctctgggttataagatgtcattctctatatggcactttaaaggaagaaaagatatgtttctcattctaaaatatgcattataatttagcagtcccatttgtgattttgcatatttttaaaagtacttttaaagaagagcaatttccctttaaaaatgtgatggctcagtaccatgtcatgttgcctcctctgggcgctgtaagttaagctctacatagattaaattggagaaacgtgttaattgtgtggaatgaaaaaatacatatatttttggaaaagcatgatcatgcttgtctagaacacaaggtatggtatatacaatttgcagtgcagtgggcagaatacttctcacagctcaaagataacagtgatcacattcattccataggtagctttacgtgtggctacaacaaattttactagctttttcattgtctttccatgaaacgaagttgagaaaatgattttccctttgcaggttgcacacagttttgtttatgcatttccttaaaattaattgtagactccaggatacaaaccatagtaggcaatacaattttagaatgtaatatatagaggtatatttagcctcttttagaagtcagtggattgaatgtctttttattttaaattttacattcattaaggtgcctcgtttttgactttgtccattaacatttatccatatgcctttgcaataactagattgtgaaaagctaacaagtgttgtaacaataatccattgtttgaggtgcttgcagttgtcttaaaaattaaagtgttttggtttttttttttccag

SEQ ID NO: 16425 - DNA, 706 bp, Homo sapiens
  Clone ID: LIB3064-052-C6_FLI
cgagaaatggagatcaatggcatgaaatcagacagggtagattacctcggataccacaagtgctttcccaagaatttacagagttgctaaaagttatgattcatccagatccagagagaagaccttcagcaatggcactggtaaagcattcagtattgctgtccgcttctagaaagagtgcagaacaattacgaatagaattgaatgccgaaaagttcaaaaattcacttttacaaaaagaactcaagaaagcacagatggcaaaagctgcagctgaggaaagagcactcttcactgaccggatggccactaggtccaccacctagagtaatagaacatctcgacttattggaaagaaaatgaaccgctctgtcagccttactatatactgagctactcctttcccacctccccctgaacactgtgacaagaggaagctaggttgaaatcactgatagaatccagtttgcaattactttctcgattggtgtcagtagttttactgattaggacttttattgtgaattacagttgaaagctgtattttgatgattgctatgtcaggctttcatctaatcttaccagtctgtcttctgtaggatgtgtcactgttggatgttacaccagcctttccagggttaaccactgtggtggtgtgctgcttatagtttgctgttgcattgtaataaaaggtgtctttccctgt

SEQ ID NO: 16426 - DNA, 1372 bp, Homo sapiens
  Clone ID: LIB3064-055-A1_FLI
cccctctgctgattctgggccccgaaccccggtaaaggcctccgtgttccgtttcctgccgccctcctccgtagccttgcctagtgtaggagccccgaggcctccgtcctcttcccagaggtgtcggggcttggccccagcctccatcttcgtctctcaggatggcgagtagcagcggctccaaggctgaattcattgtcggagggaaatataaactggtacggaagatcgggtctggctccttcggggacatctatttggcgatcaacatcaccaacggcgaggaagtggcagtgaagctagaatctcagaaggccaggcatccccagttgctgtacgagagcaagctctataagattcttcaaggtggggttggcatcccccacatacggtggtatggtcaggaaaaagactacaatgtactagtcatggatcttctgggacctagcctcgaagacctcttcaatttctgttcaagaaggttcacaatgaaaactgtacttatgttagctgaccagatgatcagtagaattgaatatgtgcatacaaagaattttatacacagagacattaaaccagataacttcctaatgggtattgggcgtcactgtaataagttattccttattgattttggtttggccaaaaagtacagagacaacaggacaaggcaacacataccatacagagaagataaaaacctcactggcactgcccgatatgctagcatcaatgcacatcttggtattgagcagagtcgccgagatgacatggaatcattaggatatgttttgatgtattttaatagaaccagcctgccatggcaagggctaaaggctgcaacaaagaaacaaaaatatgaaaagattagtgaaaagaagatgtccacgcctgttgaagttttatgtaaggggtttcctgcagaatttgcgatgtacttaaactattgtcgtgggctacgctttgaggaagccccagattacatgtatctgaggcagctattccgcattcttttcaggaccctgaaccatcaatatgactacacatttgattggacaatgttaaagcagaaagcagcacagcaggcagcctcttccagtgggcagggtcagcaggcccaaacccccacaggcaagcaaactgacaaaaccaagagtaacatgaaaggttagtagccaagaaccaagtgacgttagcattacccccaacctcattttagttgcctaagcattgcctggccttcctgtctagtctctcctgtaagccaaagaaatgaacattccaaggagttggaagtgaagtctatgatgtgaaacactttgcctcctgtgtactgtgtcataaacagatgaataaactgaatttgtacttt

SEQ ID NO: 16427 - DNA, 1467 bp, Homo sapiens
  Clone ID: LIB3064-097-F3_FLI
gttgattaccggacagtgacaatcaatactgaacaaaaagtatctgacttctacgacattgaggagagattaggatctgggaaatttggacaggtctttcgacttgtagaaaagaaaactcgaaaagtctgggcagggaagttcttcaaggcatattcagcaaaagagaaagagaatatccggcaggagattagcatcatgaactgcctccaccaccctaagctggtccagtgtgtggatgcctttgaagaaaaggccaacatcgtcatggtcctggagatcgtgtcaggaggggagctgtttgagcgcatcattgacgaggactttgagctgacggagcgtgagtgcatcaagtacatgcggcagatctcggagggagtggagtacatccacaagcagggcatcgtgcacctggacctcaagccggagaacatcatgtgtgtcaacaagacgggcaccaggatcaagctcatcgactttggtctggccaggaggctggagaacgcggggtctctgaaggtcctctttggcaccccagaatttgtggctcctgaagtgatcaactatgagcccatcggctacgccacagacatgtggagcatcggggtcatctgctacatcctagtcagtggcctttcccccttcatgggagacaacgataacgaaaccttggccaacgttacctcagccacctgggacttcgacgacgaggcattcgatgagatctccgacgatgccaaggatttcatcagcaatctgctgaagaaagatatgaaaaaccgcctggactgcacgcagtgccttcagcatccatggctaatgaaagataccaagaacatggaggccaagaaactctccaaggaccggatgaagaagtacatggcaagaaggaaatggcagaaaacgggcaatgctgtgagagccattggaatactgtcctctatggcaatgatctcagggctcagtggcaggaaatcctcaacagggtcaccaaccagcccgctcaatgcagaaaaactagaatctgaagaagatgtgtcccaagctttccttgaggctgttgctgaggaaaagcctcatgtaaaaccctatttctctaagaccattcgcgatttagaagttgtggagggaagtgctgctagatttgactgcaagattgaaggatacccagaccccgaggttgtctggttcaaagatgaccagtcaatcagggagtcccgccacttccagatagactacgatgaggacgggaactgctctttaattattagtgatgtttgcggggatgacgatgccaagtacacctgcaaggctgtcaacagtcttggagaagccacctgcacagcagagctcattgtggaaacgatggaggaaggtgaaggggaaggggaagaggaagaagagtgaaacaaagccagagaaaagcagtttctaagtcatattaaaaggactatttctctaaaactc

SEQ ID NO: 16428 - DNA, 1720 bp, Zea mays
  Clone ID: LIB3066-018-C9_FLI
gaggtggagtcttcagacaccatctcgagggtgatagttttgccggtcagggtcttcacgaagatctgcatgcctcccctgaggcgcagcaccaagtggagggtgctctccttctggatgttgtagtcggcaagcgtgcgcccgtcctcaagctgcttcccagcaaagatgagccgctgctggtctggagggatgccctccttgtcctggatcttggccttgacgttgtcaatggtgtcagaggacctgcgcggcatgctcaacatcgggttccagctgatgaccaccatcggcatcctggcggcgaacctgatcaacttctggacggcgggcatcgagggcgggtggggctggcgcatcgggctggggctcgcgggcgtgccggcgctcatcatcaccctgggcgcgctggtgctccccgacacgcccaactcccttatcgcccgcgggttcaacgacgacgccaaggcggtgctggtgaagatccgcggcacggacgacgtgcaggacgagtacgacgacatggtggcggcgagcgaggaggcgaacgccatcgagcacccgtggcgcaacatcctggagcgcaggtaccggccgcagctgacggtggcagcgctgatccccttcttccagcagctgacgggcatcaacgtgatcatgttctacgcgccggtgctgttcctgaccatcggcttcggcgacgacgcgtcgctgatggcggccgtcatcacggggctggtcaacatgttcgccaccgtggtgtccatcgtgtgcgtggaccgcctgggccggcgcgcgctgttcctgcagggcggcacgcagatgttcgtctcccagatcgtggtgggcacgctgatcgcgctccagttcggcaccgccggcgtgggcgagatgtcccgctccaacgcctggctgctggtgctcttcatctgcctctacgtcgccgggttcgcctggtcgtgggggccgctgggctggctcgtcccctcggaggtgttcgcgctggaggtccggtcggcggggcagagcatcgccgtgtgcgtcaacatgctgctcaccttcatcatcggccaggccttcctcagcatgctgtgctcgctcaagttcgggctcttctacttcttcgccgggtggatgttcatcatgaccaccttcatcgccctcttcctgccggagaccaagggggtgcccatcgaggagatgaacctcgtctggagccgccactggttctggggcaagtacgtcaacgtcgacacacaacacggcggcgccagcccgagatccaacggcgtctgatctgagcaagctgcagcaacacctcggcacctgacctggccatgcatgcacacgtatactataatctaacaacgtagctgacctgggcaaattgccagcctgacaggggccagggtgctcgaatgtctcactctcaccgccgactaactttccatcaaaattgattcttgttcatactccatagcatgcacagattgattgaactgctacttgagattcttgtcattgttattagagagagagacagagacagaacgattggcatagcatgcagaattgtttggaagaagctagcaaagcagttccttgtttgtatcctctgtaccagaagatgagtttgatctaggattaatccctgcaaggcaaggtaaagtaaattcatgttgtactcaaaactaacttctcccatatctgtacgtcgtat

SEQ ID NO: 16429 - DNA, 1405 bp, Zea mays
  Clone ID: LIB3066-032-A12_FLI
ccgtgctggggagcggcggagagctatccacctcgtctcaggcaccctctggcgtccccctccccccgccgcgtgccggcgagccgcggagatccggggttctgacctcgcctccttctgctgacttgtgaacgaggcagcatcatagttcagtttggaaacatgtcatcgaagaagatagagttggatcacaaggacatggtccatgattctgccatcgactactatggcaagcgccttgccactgcctcttcagacttcaccgtgaagatcgtcaacattggtgctgcaaatgccccatcccaggtccttgcaacgctaagtggccactatggtcctgtgtggcgtgttgcttgggcccatccaaagtatggtgcaatccttgcatcgtgcagttatgatggccgtgtcattatttggaaggaggatgcacgaggcaattggtctcaagtccacgtcttcagtgacaacaagtcatctgtcaactccattgcttgggctccgtatgaggttggcctctgccttgcctgtgcatcttctggtggaagaatatccatcttgacgatgcaagctgacgggggttgggatactgcaaccattgagcgagcacatcctgtcggtgcgactgccatatcctgggcccctgcaacagcgtcactagctggtgcaggggagcttgtttacaagcttgtctcaggagggtttgactctgttgttaaggtctggggattcaacaatggtagttggaagctggagagtgctcttatctctgacatgcacacagattgtgtgagggatgtcgcctgggcaccagttttgggattgtccaagtcgaccattgccagtggttcacaagacgggaaggttgtcatctggaccaagggaaaggatggagacaagtgggagggaaagctcatgcgtgacttcggttcccctgtctggagggtgtcgtggtccttgactggcaacatattatgcatagctgctggcgagaacaacataaccctctggaaggaagggtcagatgggcagtgggaggaggcgatgaaggttgaaccataggatgaccggcaaggtttctgaatttcttgtagatccatgtttcgacaaagacaaagcttgctactgttttactagtgtttcgacaaagtttaagtttgccattgtgttttactagtgtttcctgcggatccatgtttcgataaagacaaagcttgacattgtgtttccatagacactcaaattcacatattttagtaattcctgatgagcaattatgctcttggatggatctggtgcgctttagactgacaaattttttattcaggaaacactagtaatgttacctattaaacattgtagcaatttttatttttaattgtgctgtcttggatcttggtccacc

SEQ ID NO: 16430 - DNA, 815 bp, Zea mays
  Clone ID: LIB3066-037-D11_FLI
ctccctctccgtcccccaagcaaagaaaagaagctagctagctaggcgtagaacgaatgacgacgcagggcggcaacaggtcgacgacgacgctggtcgccgccgtggccgtagttctggccgtggcggcggcgtcgtccctggccggcgtggcgtccgcggagaaggcgggcgggttcgtggtgacggggcgcgtgtactgcgacccctgccgcgccgggttcgagacgaacgtgtccaggagcgtggccggcgcgacggtggaggtggtgtgccggcacttcggcgcgtccaaggagacgctcaaggcggaggcgacgacggacgacagcgggtggtacaagctggagatcgaccaggaccaccaggaggagatctgcgaggtggtgctggcccggagccccgacccggggtgcgcggagatcgaggagttccgcgaccgcgcccgcgtcccgctcacctccaacaacggcatcaagcagcagggcgtccgctacgccaaccccatcgccttcttccgcaaggacccgctcaaggagtgcggcgccctcctcgagaagtacgatctcaaggacgcctccgagacgccatgatcgtcctccgtcctgtgcatgcctgcatccattgctgccctgcccgctcgcccaagaattgaagatggtagctgccttccgcgttttttgtattgtgtatgtctatgcactgcattcgagggcagcgataatgggcctggcctcgtaagcaaacgtacgatccgcttcttttgatgggcctaaatctgcatgcatgcagatgtactgctacttctgctcttt

SEQ ID NO: 16431 - DNA, 1189 bp, Zea mays
  Clone ID: LIB3066-037-E12_FLI
gaaccactcaagcaagctgagctgaaagcagttagaaacgagataaaaccagatcctatgtccacgatgagggcaccccaagttccttccatgctaccttttaacaatcttgcttttggcgcaacatttggtggtccagctagtctgaagcccatgacaatggctccaatgccaatggccatgcctatgtcaccagctcctctcacaaagaagccaactccagcagcagcaactcctctttgtggtaaaagtgataccgataacttgaagatggctaaacaggtgctgaatgaagatatctcaaagttgcaatctcaggttaataaactgaaacaaaaatgtgatgcccaagaagagcaactgcagaaagcggaaaggagagctgaacattctgcctctacagctgcagaagagtcttcaaggcgtaatggtgtcttggagttcattaggttccttgacaatgagctcaagagcatcgcagatagggtgcccagcgacgctgccgacggcttaaaagccttgcaaaaccattcggagaggtttctcacagaacaaggtgttcgtccactggaagccacaggtatgcatcgtaagtgcgcaagcataggcaacctcgtaatgtctcaggacggcagtgctggaaacgcgagcagctcggctgcttccttggcgagcgagtctccatgccaccgtatcatggagaacagctcgagagctaacggtgacttagcaccgaagctcggtgtacccatggagaagtgcagctgattgagcagtttgaaccgggggtgtatgtgacgctcatccagcttagagatggcactaaggtgttcaagcgtgtccggttcagcaagaggaggtttgcggagcagcaggccgaggaatggtggagggagaaccaggagagagtgttcaggaaatacaaccacccggccaactaaccagcctcaccagacttaaccattggacacttcaagaagaaggcaaagttttcttcatgttgcttggggcattgctcctgcggctgtgtgccgtgggcctgtggcgatgtagaattaggttgtggatggggaagatgctgatgtagattctcattctgttgttgtttacctcccacagtttaccctttctctagctcacctcctacagtttactgtttcgcagttttgatatctcaaattattcattc

SEQ ID NO: 16432 - DNA, 827 bp, Zea mays
  Clone ID: LIB3066-037-E8_FLI
tctcttcctcctctctcatctaagccggtggccagggggcataacccagccgacggggtacggcggcgtgggggtataacccggccggcgaccacggaccgcgactacgatcttcatagtcgaggccctgctaccttgggccccgaggtccttgacatttcaatgtggagaaaaggatataccgtgcctttattttgaataatagttatccaagaatttgttctaggcgaattcgatgacgacgcgactgctgcataccatgaaaatatcacttctgagttagttgacgatgaccatcatgtgaaagatatatctcagaggtatcatgttcacttgtatacaaatgggactgtatgcgatctcacagatattccgcgggagacagaggttagatttgtctgctcggagcctactgtactgattagttcagtcaaggagatctcttcctgcagatatgttgtaacgattcaaagtcccatgctttgcaaaaacccgttattccaggaagaaaaacgaaccctctccatccactgcaatgagttgcctgctagagcggaatccagcgcggaggatgactcgcttccaaaagaagctcagatttccatcatccccgatcaggatgagctacatgatttcccagcctatgctacttgatttgcctccaataattatgtttgatgtagaaaaaaacaccattttggaggcgcaggggcaactgagcaacactatgtattaactatctcgtagatactacagcagaggctccttgtaaagcaggttgagacgatcattctgcagttcttattatataggatgattacgaaggt

SEQ ID NO: 16433 - DNA, 453 bp, Zea mays
  Clone ID: LIB3066-037-F6_FLI
cgaatcgccggaccggtcggcgacggagacgacagagcccaagtcgaagcgatccgattttgccggcggcagcgaccggagtatggggctgggaggccggggcgtggtgggagacaggtggtcgcaacgcatcctctggatttgcgccctgggcagcgccgtgagcctctacttcgtggcggtggagaggcaggctcagaatcgtgcgcgggcggtggcggagggcctcaaggcgctcgacggcgccggggatgacgtgtgacagcggtggacgctgccgtgcagagggcctcctttggttcacatgttcacagaacctcatagcgttgcaataatgtactaaacatctgtgctcagtctttgtagaattaaatgtggatcaatgtgagtgttctcctatttcacataattcatctgagcctttgttgctgcacagaaatgttgatccgtgcc

SEQ ID NO: 16434 - DNA, 559 bp, Zea mays
  Clone ID: LIB3066-038-A8_FLI
cggacgtggtgcacgctcaccttccaggttggcaagggatccaagcctggccacctgatcctcacccccaatgttgcaaccatatctgacgtggagatcaaagagcacgggggcgatgacttctcctttacgctcaaggagggcccgaccggcacctggacgctcgacaccaaggccccgctcaagtaccccctttgcatccgctttgctgtcaagtccggtggctaccgcatcgccgacgacgtcatccccgccgatttcaaggccggcaccacctataagaccacactcagcatctaatcagcctctgatgatgaattatatttcaaaagagctcacctggcgctcacgttagcaagacaatattttttctatggttattttgtggcgccaaaccacccaagaaatatgtgatgctacatgtcccttatgatgccttgttgtgttgggttgatattattacataaactaaataaattattcatttaagattttaggagaaatatgttgatatggtctacctccaattaatcagctaagggcatcccattccaccctc

SEQ ID NO: 16435 - DNA, 712 bp, Zea mays
  Clone ID: LIB3066-038-C6_FLI
cccacgcgccgccctccccttcccctgctcctcgaccacctcaacgagcttctgctccgacgacgacgacgtgccgccacatccacatggcggacgacgccgtcgccggcggagcggccgttcgctgcgcagggccggcgccggcctcgctgtcttctagcaggaagcagcagcagcagcccgacgacgccggctgcggcagcagcgacgaccactaccagcacgacgtgatcatgctgaggcggacgaggagcgggcgggcgttcccgccgccgatctccgtgatcggcaagggcgggcggccgtggctctgcctgcgggcgcaccgcgagggtggacgcctcgtgctgcggcagatgcgcctgccgtcgcaggagctgctgcagccctgcaaggaggacggcaggttcaagctcctcatgcacccggaggcccgcgcgcggccgtgcgggggcggcacactgcaggaacggcaagggaatgatagctagcgctcttaattgatcagctgatcagatgatctgccgccacgcacacgtcgtcttgtatgggctggctgctacaatgcaaccggtagatctccctgcttagtttcttgagatcgagggctccagttcttgctttgcattctgcaaccgttgtccaaatgtccacaatctttgccttccgtcaaattttaatacatggtcggaacattgaggcattttgtctt

SEQ ID NO: 16436 - DNA, 1056 bp, Zea mays
  Clone ID: LIB3066-038-D6_FLI
gcgccggctccagcggcgccccgccggcgcccaacatgaccgagccaccggccggctgggcctggtccatcaaccaggccaggtcgttccgctggaacctgacggccagcgccgcgcgccccaacccgcagggctcctaccactacggccagatcaacatcacccgcaccatcaaggtcatggtctcccgcggccacatcgacggcaagctccgctacggcttcaacggcatctcccacagggacaccgagacccccctcaagctcgccgagtacttcaacgtcaccgacggggtgttcagctacaaccagatgggcgacgtgccccccgccgttaacgggccactccatgtcatccccaacgtcatcaccgccgagttccggaccttcatcgagatcgtcttcgagaaccccgagaagagcatagactccctccacctcgacggctacgccttcttcggcgtcgggatggggcctgggacgtggtcgccggagatgaggaagacgtacaacctactggacacggtgagccggcacacgatccaggtgtacccgcggtcatggacggcgatcatgctgacattcgacaacgcgggcatgtggagcgtccggtccaacgtctgggagcggtactacctcggggagcagttctacatcagcgtcatctcgccggcgcggtcgctgcgcgacgagtacaacatgcccgacaacgccctccgctgcggcaaggtcgtggggctgccgctgccgccatcctacgcccccgcgcgctaaagacgacgaaggcgccgttttcacctcgtgttctgaccatccagtctaactaatccattcctgtgctgctcggcgaaataaaatcatcaaaaagaacaaagacgaaggaagcctagggaagggagaagggacgttgggtgggggtgagccaaatgagaacgcacggatatatctattgatgtaatcttgagatgccctctcaaatcactgtaatggggtttaaaaaacaatcattgtaatgggagttatatatacttttatcttaacatttatttacaccagc

SEQ ID NO: 16437 - DNA, 1734 bp, Zea mays
  Clone ID: LIB3066-048-F1_FLI
cgctcggccaccagctttgaccgcctcccctcccctcgtctcctgtgttcctccataccccactccccccgcaggagcggcgcggcggcggcaaaggcaaaggcaaaggcaagatgttcgggcgcgcgccgaagaagagcgacaacaccaagtactatgagatcctcggggtgcccaagtcggcgtcccaggacgacctcaagaaggcctaccgcaaggccgctatcaagaaccaccccgacaagggcggtgaccccgagaagttcaaggagctcgcacaagcctatgaggttttgagtgatccagagaaacgtgagatttatgatcagtatggtgaagatgcccttaaggaaggaatgggtggtggtggatcccatgctgatccatttgacattttctcatcattctttggaccctcttttggaggaggtggtggaagcagcaggggaagaaggcaaaggaggggagaagatgtagtccactcacttaaagtttctctggaagatctttacaatggaatctcaaagaagctctctctttcgcgcaatgtcatctgctccaagtgcaagggcaagggctcgaagtctggtgcttcaatgaggtgccctgggtgccagggctcaggtatgaaagtcaccattcgtcagctggggccttccatgatacagcagatgcagcagccttgcaacgagtgcaaggggactggggagagcatcaacgagaaggaccgctgcccagggtgtaagggtgagaaggtcgttcaggagaagaaggttcttgaggttcatgttgagaagggaatgcaacacagccagaagatcaccttccctggtgaagctgatgaagcgcctgataccgttactggagacattgtattcgtcctccagcagaaggaccactccaagttcaaaagaaagggtgaagatctcttttatgagcacaccctgtctctgaccgaagctctatgtgggttccaatttgttcttacacatctggacaacaggcagcttctgatcaaatcaaaccccggcgaagttgttaaacctgaccaattcaaggcaataaacgacgaggggatgccgatttaccagaggcccttcatgaaggggaagctctacattcatttcacggtggagttccccgactcgctggcaccagagcagtgcaaggctctcgagtcggtacttccgccaaagccttcgtccaagctgacagacatggagatcgatgaatgcgaggagacaaccatgcatgatgtgaacaacatcgaggaagagatgcgcaggaagcaggctcatgctgctcaggaggcgtacgaggaggacgatgagatgcctggtggagcccaaagagtgcagtgcgctcaacagtaagcagactaccataatgggattcaaggcactttggttgctcttcaattatgcgagtgcgcctgtggactgtatggttctatggttttgctgtcgctgagctacgaagtaggaagctgatgcgcccctggctctgcaagcgggggaatgtatcctttttttgctgcaactggaaaatgctacccaggcatagctggctaccttataacttttgcttgtgagatttgctagagtgacgattttaatttataggtggacttaatgtttgtgtaaggctaggcataacatcatgtctcaatggacgttgccgttgcacattggtgcattttattttaatgtgacgcctgtgcttgtgctgttgaac

SEQ ID NO: 16438 - DNA, 1007 bp, Zea mays
  Clone ID: LIB3066-048-F10_FLI
gcctttgaaagaagctagcatcaggttcgacgtacaaggggcacaaataatctaccagtgcgtgtgctcatccgtgcacgccggcaatggtgtcctccgcccgtgcgctcatcggcctcctcgtcgccgcggcctccctcgccgtcgcgctctcggatggcggcgggatggcggcgcctgtgtacgggtacgcggcggggagccccaacgggccggagaactgggggaagctgagccccgcgtacaagctgtgcggggaggggaagcagcagtccccgatcgacatcgtcaccaagcaggccgtccccgccgccagcctcgacaccctcaatcgcacctacggcgccaccaacgccacgctcatcaacgatggccacgacatcacgctggcgctggagggcaaggttgggacggtgacggtgaacggcaaggcgtacagcttcgagaagctgcactggcactcgccctccgaccacaccatcaacggccagaggttcccgctggagctgcacctggtccacaggagcgccgacggcgcgctggcggtcatcgggatcctctaccagctgggcgccccggactccttctactaccagctgaagcggcagctgggcgagatggcccaggaccggtgcgacttcgccgaggaggaggagtcgcgggtggaggccggcctcatccacctgcgctcgctgcagaagcgcaccggcagctacttccgctacacgggctccctcaccgtgccgccatgcaccgagaacgtcgtctggagcgtcctcggcaaggtgcgccagatcagccaggaccagctgcagctgcttaaggcgccgctgcccgggagcgacgcgcgccccacgcagccgctcaacggcaggaccgtccagttctacaacccgcccaacagcaccatctccttccagatctaacactaaaaagtactttggaatctttaatatagcgtaactctgtttatgataaatcaatattctatcatttgtattcgttcc

SEQ ID NO: 16439 - DNA, 848 bp, Zea mays
  Clone ID: LIB3067-025-F12_FLI
tgccaagatctctcaactggaactttcattcaaggagattattttcggctacaggaaacaacctcagtgcaagccacaagttttccgaagcgtctatgttcattggcccccaagaagccgtaacgggaaaacaggagaagaccacgttgacatcatcactttctacaacgaagtattcattcctgccgtcaagtccttgttggtggaggtagggcctggcgccagtccaaagaagaaagaagaggaaaaaggtcctgctgatgtaggtccattcccagaatctccccggctggctcggttcccgaacctccccgacatgtctccaaagaaggtttctgctacccataacgtgtacgtctcaccgctacggtcatcgaagatggacactctgctgtccccgagctccaagagctactacgcgtgcgtcggcgagagcacctacgcgttccagagcccctccaaggacctgaaggctatcaacaaccgcctaaacagtgtgtccggcgggaagaaagtcagcggccggctgaacttcgacgtcgtcagcgatctggtcgtggccagtagcctcggcagtgaccgtgacgccaagcctgcggccgatcctgccaagacgacgccggtgaagtgcgagccatctgactcgtgatcgtcgtcgactctgacgaggcccttgttatagattgttatgtttcagatactcgtgagttagtagatggtaactagacgaggaggcccttgtttctgtttgcgtcttttctttttttgacgtgggaaacatctctgcgagcagctctacgttgtgtaaaatatataaagaaagctgccccgatggctccccttaaccc

SEQ ID NO: 16440 - DNA, 663 bp, Zea mays
  Clone ID: LIB3067-025-F3_FLI
aacatcaatggtcttttacaaagcatgagccaaattcccggaataatgagcaagatgcccccattgcctatttcggtggatgaaaggctagctagctacatactccctcgtgctcctacggctcaagttcttggcagcagccatttgaaagaagaacgaagagtatggtaggccactgctagacagggaagcagctcaattttcagcagcagtttgaccaaaaatatctgaagagccatgtgcttgggagtctgcatggagaagcataggtgaaagaacgatctggcttttctgatggtctcaaagctacagaagcaacatgatccaccacttcaccacatggccttaaagaacgctgtctagcttgccttgtcaggatgctctgtattagtgatcaacaaatttgagatagggagagttttccgtaatctgcagttttcctcaccttggttgcacatatcgattctttttgggttttgtcctggtgatcgaggttaacagaagtgtagcgtagaaattgaactttggtatgaataattagcaggaaaagcgtagcctttttgtcagttactacaatggtaaccaacctcctgtgtatctagtattctagttctagtatgatgcatatgcaagcctggttctctaaacgtgtgattgattgcc

SEQ ID NO: 16441 - DNA, 1696 bp, Zea mays
  Clone ID: LIB3067-025-F8_FLI
atctgcttatggattatcataatttaagtatctagattatataattcacctaataatttgtgttgtttgtttgtcttttaacttatttaagctggattatataatctagagggtaaacaaacagggcaagtttatcatgtgattctattagtcattgaacacatttttacagatagacagtgaattaagcaaagagatagaacaatggaatgacatgctgaggactgaagtagtaaagttgtgtcaagacaacaattttcaaacaggtttttttgaaggcactgataatagcactgttgttgatgcttacgagttgaaggtaaatctaaatgtacactctgtactaactacgtgtacacattaattgaacctatcgagcaattctgttgttaggttcgacttgagcacattctcgagaggatatctttgatctctgatgctgcaagtactgagcgtccatcacagatcacagattatctgtatattggtggtgctcttgctgctcggtcaacacacacacttaaacaccttggcatcacccatatattgtgcttgtgtgcaaatgaaattggacagtcagaatcgcagaagcctgacctttttgagtataggaatttctcgataaacgatgatgacaatgcagacattggtgatctctttcaagatggttctgatttcatcagttatgtggatcacttgcgtggcaaagtacttgtgcattgctttgagggaaaaagtcgaagtgcgactgttgttcttgcctacctgatgctgaggaagtaagactgcacagtaattactatatcatcactatcatgcttctctgttaaaaccaataactcaccacgactaaaacaatctattaacagatttactatttttcatgtgatcttaaggtctatcaacccagaattgacatctgtaaggataggaagattggaattgcatctttccttattttttattgttctggacgcagtcatcatctcgtaatttcccctttttctcttaagaaactgtactctcctggaagcatggaacatgctgaagaaggtgcaccgacgcgcgcatcccaatgatgggtttgctaagatcttgctggatcttgacaagaaactgcacgggaaaatctccatggaatggcaacacaagaggcctgcaatgaaagtgtgtcctatctgtggcaagaatgctggtctcagcagcagttcactcaagctccacttgcagaaggcacacaagaagatatcctctgggagcgtagacagtgcaatgactctggagatacaaaaagcattagaggcaatcaaagctggctggggcggcagtgacagcccagtgcataaatcacaatcacacatagaaggattttgacgtttaatcttacgttcctacggtcctattaatatatcaacaaggctggtagtcggcgaccgctttaagagtgaagcctcagctctagacttcatgacacttgtaagtagcacatttttggaacatttggtttttattctatagttcatgagcttggattgacaagaaccatccatagagggaatgtagtttctgttataaaattgtgcgattcttttttcatgaaacttgtacgagatgagcattcagattctttggctatcaaattttgaatctgttgtcctgtataatcagtttgttcaaatggacaagctcttctttt

SEQ ID NO: 16442 - DNA, 1394 bp, Zea mays
  Clone ID: LIB3067-028-E4_FLI
atgttttgtgttcgttccacgtgtctgtgcacaggcctagctctggaaccgctctcgggagccctggcggccggcaacgccgtggtggtgaagccgtcggagctcgcgccggccacctcggcgttcctcgcggccaacatacccaagtacctggactccaaggccgtgaaggtggtggagggcgggccggaggtgggggagaagctcatggagcaccgatgggacaaggttctcttcactggtaatgaactacgtacgtaatgcatgagcgtgtatctgcgttaccacctggtgtctctctcactctcaggcagcagccgcgttgggcgccttatcatggcccaggccgccaagcacctcaccccggtggcgctggagctcggctccaagtgcccctgcatcgtcgactggcttgacagcgacagggacagccaggtagctgtgaatcgcatcatcggagcgaaatggtccacctgttccggccaagcctgcatcgccatcgactacctgctggtggaggaggagtttgctccgattctgatcgagatgctcaagtcgacgctggagaggttcttcaccaagccagagtacatggcgcgcatcctgaacgagaagcagttccagaggctgagcggcttcctggccgaccgcagggtggcgtcttccgtggtccacggcggccacttcaaccccaagacgctgagcatggagcccacgcttctgctgaaccctccgctcgactccgacatcatgacggaggagatattcggcccgctgctcccgatcatcacggtgaagaagatcgaagacagcatcaagttcctcaggtccaagcccaagccgctggcgatctacgccttcaccaggaacgagaagctgaagcaacgcatcatagacgagacgtcgtcggggagcatcacgttcaacgacgccatcgtgcagtatggcctggacagcatcccgttcggtggcgtggggcacagcgggttcggccagtaccacggcaagtactcgtttgacatgttcagccacaagaaggcggtgctcaagaggagcttcctcgtcgagttcatgttccgctacccgccgtgggacgagaccaagatcggaatgctcaggcgcgtctaccgcttcgactacgtctcgctcttcctcgcgctcatcggcctcaggagatgaagcagccggcggagagtgcgtgaacaatcgagccaacagaatttgcacccacacccaacacacagttgctagtggtcaattgtcgttcatactgatcgatgaatatgtaattgtcccttctgtacaccaaaacgtctgtagtgtcgtttactcgttttatacgtgtctgtctatttatcgcaccaaaagatatttaataataatggattattatc

SEQ ID NO: 16443 - DNA, 1475 bp, Homo sapiens
  Clone ID: LIB3064-064-A2_FLI
gttgaaataaaaattatttaattttaattaatataaataattcagtaggtctggggtgaggcctgaggttttacatttccaacaagctgccaggtaaagccaatacatctgtccaggaatcacactttgcgtatcaaaggtctagatgacattatcattccaaagagtttcttttacaggctctcagatcagtgttcatccactacctgactactgtcattcacaggcattctgttccacagcaggccagctaacgtggtatttacaaagctcactcctcttatacaacaatccaagtgtttcttttgtcagttgtctgtgccccaggagatccctctctgccttgccttgccctctgcctttggagaccagcacctcatactcagtgaaggcctggagtgcttaagagggatttcttccagctctcttgccctggtcttcagtgtattagatgtattacctccatgctctcagtagaggcccataggaaagagtaggtaggttatgccagctcacacgcatcctttaaaaatggtttagaagtttagctggtttcttattactcctgtctatggatgtttccttctgtcactctactagggatgaaacagctaatcatgttcaatagttacatttagattggtttttaaaaactatgattgtattagttcgtttccatgctgctgataaagacatatctgagactggaaacaaaaagggtttaattggacttacagttccacatggctggggaggcctcaaaatcaggtgggaggcaaaaggtacttcttacgtggtggcatcaagagcaaaatgaggaagaagcaaaagcagaaactcttcataaacccaccagatcttgtgggacttattatcacgagaatagcacagaaaagactggcctccatgattcaattacctcccactgcgtccctcccacaacatgtgggaattctgggagatacaattcaagttgagatttgggtggggacacagccaaaccatatcattcctccctgggctcctccaaatttcataatcctcacatttcaaaaccaatcattccttcccaacagttccccaaagtcttaactcatttcagcattaacccaaaagtccacagtccaaagtctcatctgagacaaggcaagtcccttccacttacaagcctgtaaaagcaagctagttacctcctagatacaatggggggtacaggtattgggtaaatacagctgttccaaatgagagaaattggccaaaacaaaggggttacagggtccatgcaagtctgaaatccagtggggcagtcaaattttaaagctccataatgatctcctttgactccatgtctcacattcaggtcatgctgatgcaagagataggttcccatggtcttgtgcagctccgcccctgtggctttgcagagtacagcctccctcctggctgctttctcaggctgatgttgagtgtctgta

SEQ ID NO: 16444 - DNA, 1598 bp, Homo sapiens
  Clone ID: LIB3064-079-C3_FLI
ctgggctgggcagggcgccacatggaagctggaggagcaacgggagcgctgggcgtggggtgcaaattgcccggtgccttctgtttcccaggcagctctgtggccatggatatgttccagaaggtagagaagatcggagagggcacctatggggtggtgtacaaggccaagaacagggagacagggcagctggtggccctgaagaagatcagactggatttggagatggagggggtcccaagcactgccatcagggagatctcgctgctcaaggaactgaagcaccccaacatcgtccgactgctggacgtggtgcacaacgagaggaagctctatctggtgtttgagttcctcagccaggacctgaagaagtacatggactccaccccaggctcagagctccccctgcacctcatcaagagctacctcttccagctgctgcagggggtgagttttctgccactcacatcgggtcatccaccgagacctgaagccccagaacctgctcatcaatgagttgggtgccatcaagctggctgacttcggcctggctcgcgccttcggggtgcccctgcgcacctacacccatgaggtggtgacactgtggtatcgcgcccccgagattctcttgggcagcaagttctataccacagctgtggatatctggagcattggttgcatctttgcagagatggtgactcgaaaagccctgtttcctggtgactctgagattgaccagctctttcgtatctttcgtatgctggggacacccagcgaagacacatggcccggggtcacccagctgcctgactataagggcagcttccctaagtggaccaggaagggactggaagagattgtgcccaatctggagccagagggcagggacctgctcatgcaactcctgcagtatgaccccagccagcggatcacagccaagactgccctggcccacccgtacttctcatcccctgagccctccccagctgcccgccagtatgtgctgcagcgattccgccattgagaatgtcaaggccacactcagatcctttctcgagcagctgctgccccagctgcctcctacccattgccaagagaggatgcatctggggagagcaaagcactaaggaattcagcatcagcctgcagagggctgagtctgggttagtcctgcccgcaggttagcgagatcctgtgttgttttttgggttggacggtgccgtttcaaaatagaggcacagatgctccatgcacgaggggtccccgggcactggaacaagtgccaagttgaaggcagggggcctgccagagctgggtgtgggtattcaggccctcacctgccctgcctgcagggccagaccctgaggaaagggcgccccctgctggtctttttggatttaaaatgtttgggggaagagttgagttccagttcagtcccaagttaaacaggagggagtgagggagaggagagagggcgttccccggatcccaggagagctgggctatgactgcaataaggagttgttccttcacctgagatgtgcttcttttggttcatttctggcttgacaacaataaataaacgtggtatgttcctg

SEQ ID NO: 16445 - DNA, 1201 bp, Homo sapiens
  Clone ID: LIB3064-101-H9_FLI
cgcacctctgggcagcagcggcagccgagactcacggtcaagctaaggcgaagagtgggtggctgaagccatactattttatagaattaatggaaagcagaaaagacatcacaaaccaagaagaactttggaaaatgaagcctaggagaaatttagaagaagacgattatttgcataaggacacgggagagaccagcatgctaaaaagacctgtgcttttgcatttgcaccaaacagcccatgctgatgaatttgactgcccttcagaacttcagcacacacaggaactctttccacagtggcacttgccaattaaaatagctgctattatagcatctctgacttttctttacactcttctgagggaagtaattcaccctttagcaacttcccatcaacaatatttttataaaattccaatcctggtcatcaacaaagtcttgccaatggtttccatcactctcttggcattggtttacctgccaggtgtgatagcagcaattgtccaacttcataatggaaccaagtataagaagtttccacattggttggataagtggatgttaacaagaaagcagtttgggcttctcagtttcttttttgctgtactgcatgcaatttatagtctgtcttacccaatgaggcgatcctacagatacaagttgctaaactgggcatatcaacaggtccaacaaaataaagaagatgcctggattgagcatgatgtttggagaatggagatttatgtgtctctgggaattgtgggattggcaatactggctctgttggctgtgacatctattccatctgtgagtgactctttgacatggagagaatttcactatattcagagcaagctaggaattgtttcccttctactgggcacaatacacgcattgatttttgcctggaataagtggatagatataaaacaatttgtatggtatacacctccaacttttatgatagctgttttccttccaattgttgtcctgatatttaaaagcatactattcctgccatgcttgaggaagaagatactgaagattagacatggttgggaagacgtcaccaaaattaacaaaactgagatatgttcccagttgtagaattactgtttacacacatttttgttcaatattgatatattttatcaccaacatttcaagtttgtatttgttaataaaatgattattcaagg

SEQ ID NO: 16446 - DNA, 690 bp, Glycine max
  Clone ID: LIB3065-004-F11_FLI
gccaccctcggcgcccacgtgactctcacggaccttcctcacgtggttcccaatctccgattcaatgcggacgccaacgccgcggttgtggggcccaccggaggggtaataaccgtcgcgccgctccgttggggccacgctgctgacgtggaagcgattgggcgggagtttgatctcgttctggcgtcggatgtggtgtatcacgatcacctgtacgagccactgctcgaaacgctgcgtttaatgatgctaagtgaaaggaatgggaagatggtgtttgtgatggctcacatgaggaggtggaagaaggagtctgcgttttttaagaaggcgaggaagcacttcaacgtcgacgttttgcacactgacacgccttgtgatgggtctagggttggtgttgttgtttaccgttttgttgccaagggataatagggtttgctgagagacatcaattcatatagaattattctaactttttaatttaatgtatcttgcaaagaatatcaaatcatttccatttcaacagtatgataaatacaaccaggaatatattagagaaagcatgagctatagatgctctagctaacttaggtggttttctcttgacatgatgaagtttaaaacctgaattagttgtaaggatgtccccagtatgatgtagcaaaattcatatatcatgacacattttgc

SEQ ID NO: 16447 - DNA, 1032 bp, Glycine max
  Clone ID: LIB3065-012-E8_FLI
tttttattctacctaacaccacatggatacgttgccggaggattgtgtttccaaaattctgtcttacacatctccaccagacgcatgtagattctctatggtctcttcaaccctacgctcttccgctgactctgaccttctctggcgaactttctttccttctgattactctgacattgtctcaagggctctcaaccccctctcccttaattcctcttcttcatacaaacaccttttctatgctctttgtcatccactcctcctagatggaggcaacatgagcttcaaattagacaagtcttcgggtaagaaatcttatatcctatctgcaaggcagctttctataacgtggagcaatgaccctttgtattggagctggagaccagttcctgaatcaaggttcaaagaggtggccgagctgagaacggtgagctggttagaaatccaaggcaaaattgggacgaggattctaacgccaaacacgtcacatgtggtttatctgataatgaagacatcccaccgagaatacgggcttgattcggtggcgtgtgaggtatcaattgcggtggacaacaaagtgaagcagagtgggagggtatatttgtgtcagaatgagaaagatgagaacaatttgaagaaggagagtattggaattccaatgagaagagaagatgggtggatggaaattgagatgggtgagttcttctgtggtgaagctgatgaagaggttctgatgagtttgatggaggtgggttatcagttgaagggagggcttatcgttgaaggcgttgaaatcagaccaaaaattattgtttgactaaaaacagggacaactaaactgtcataattgacaaatatacctcgtctacacgccaatgccacgggttgcatgcacaacttcagtccattttgttctgtttcttttttaaatttctctatgtattttttttttttacaaatcctcaatgaatattttctgaccaacttttattgctccaagagtataaaaaaatacaaataagctgttggtcc

SEQ ID NO: 16448 - DNA, 1927 bp, Glycine max
  Clone ID: LIB3065-013-A3_FLI
cgctgctctttctaactttcctttcccgatctccggccataccccatgccgcacgcagattagggaatcgaacttgtgaatggaactgagttgattttctaagatggaaaaggaaaataaggtgaaggacactgcaagtgatgacggttattgttggtggtggttggttcagaaaggaacaacagctgtattcatcactgttgggttgtttgcattgttggtccgtgtggctgtgtcactgcacccttactccggcgctggcaaccctccgaaatttggggactatgaggctcagagacattggatggagatcaccattaaccttccaattaaggaatggtataggaacagctccaacaatgatttgagatattggggacttgactacccgcctctgaccgcgtaccagagtttcatccatgggctttttcttaaattcttccaccctgactccgttgctcctttcgcttccagaggtcatgagtcctatcttggaaaactactcatgaggtggacagtgttatcatctgatgccctgatattctttccagctgccctgtactttattattgtttattacaatcaatcttcaaggacccgtaaaagtgaattagcatggcatactgctgtgctattgttaagcccatgtttgatcttaattgatcatggccattttcagtacaactgcatcagcttgggctttaccattggtgctgttgctgctatcctctctgggaatgatcttgtggcttctgttctttattgtctagctctaaatcataaacagatgagtgcatattttgcaccttcttttttcagccatctccttggcaaatgcttgaggcgtaaatatccaatccttgaggtgtcaaaactggggttgttggttttaggaacatttgcagccgtgtggtggccttatctttattcaacacaatccattttggaggtcctctcccgtcttgctccatttgaaaggggaatatttgaggattatgtggccaacttttggtgtgcctcttcaattctcatcaagtggaagagattgtttacaacagagtctctgaagcttctcagcctcactgcaacagttataacctgtcttccttcaatggttcaacaaataaagtctcctagcaaacgaggtttcctttatgcgctgctgaacagttctttctcattttacttgttttcttttcaagtgcatgagaagtctattttgctgccacttcttccagcaaccctgctggctgttgaagagccttttatttttaggtggttcacgcaatttgccatgctctccatgtttcctctgatatgtcgcgacaacttggttgttccatatttggctttacttgctctctttgtcctgataatgaatgcacctggccaacacagagttagagagagtaattatttgggctcggcaaccatgttccttattttatgttgctattttgttcttcacatagtttacttgaccatgcatcctcctgagaagtatcctttcctttttgaagcaataattatgaatctgtgcttctctcagtttgttcttgtaactcttggctgcaatataaagcagtggctgttaaatagacctgccaaattagaagaaacagaaaagaagcaaatttgacattggtttcacttttttaaagttggatgggttgttcttgttagacagttggaagcggatgtgacattttttatgcatttgagcgatgatttatagaaagggaattgattgagagcttgagctgcattgacctcaactgtaatgattttataatctttagtctttagtgttcgctgctctctttggttgattgttctatttccgtcaccaaatttacttggattttgattttattggtgctacagaaaaaccttttatatgtatatcgctctgccattatctattgtt

SEQ ID NO: 16449 - DNA, 1095 bp, Glycine max
  Clone ID: LIB3065-013-B12_FLI
tgagaagataaggaagtcactccacaacagtgatgcagtagttcaacttataaaaagctgcttcacggctacccttggcatgaatagctctcctatctcaagcagtggtggtgttggagcccttcttggacaaggatttaagtatcatttatgtggagggctttgccctgttgctccaggaattctctatttacgtgcgtatcggtcaatcagagatattgttttcttgacagaagaaattgtttccatcttgatgcactctgtgagggaaatagtatgcagtggcctgccaagggagcgattggaaaagttgaaagcaaccaaagacggcataaaatatggacaggcttcacttgctgcatcaatgactcgggtgaagcttgccgctgccctcggggcctctttagtatggatatcaggaggcttgatgttggttcaattattaataaaagaaactttgccatcctggtttatatctgttcacagattagaccaggaagaaaagtctggtggaatggttgcaatgcttggtggatatgcacttgcttactttgcggttctttgtggtgcttttgcttggggagttgattcatcatcagcagcttcaaagcgacgtccaaaggttttaggtacccacatggagtttctggcaagtgcacttgatggtaagatatcactaggctgtgattcagctacttggcgtgcctatgtgtcaggttttgtgagcttgatggtaggttgcacacctaactgggtgctggaagtagatgtgcacgtgttgaagagactgagcaatgggttgagacagttgaacgaggaggagcttgctcttgctttgttgggtgttggtggggtaggtacaatgggtgctgcagctgagctcattattgacactgaaatataaacattttcgctattctgagggcaccttttccttttaggatgacttgtacattagttaactttcatgtttataaagttgtgcagcatgttgaattaacagtttagtttggaaagtaccaagcattagaatgggaaattttgtatgtataacgttcatctaatgttagtatatccagcagccctaatcgatgc

SEQ ID NO: 16450 - DNA, 1549 bp, Glycine max
  Clone ID: LIB3065-013-H3_FLI
accacactaccattattcatatctcattctctaacctttcactctgccttactcactctctactttgctcatcatcgtagatgaaccaacacttctagtctctcttactttataaccatgtaaaaatgagtcacctaatgaaaaattagtagcttcttgttgtgctttttattttgtttgtgttgagataaatttgtttgtttgtttggtattgttttgtgttttatgaattatttgatgggtgaagaaggagaagtggtgagaaagcaaggacaaaggggtgttggtggagataagtggtacttgtatagctgcttacaagactgtaaatattggtgctgtttaatacacgagactagttctctttcgatggtcccttttgagtgaaaaaccttgtcttctcagctttctttcgagagatcttaaagacattgactaacaacaataaagtggatcaatcaaaagacttacttcttcttctaacaacaataagatcacatctttcccactcatgaagagacttagcagctcagattcttccagtgccctcatgacaatttgtccatcaacagaggaacatagtccgaggaacagccaacacatgtatggtagggagttccaatcgatgttggacggactcgacgaggaagggtgtgttgaagaaccggggtatcaatctgagaagaagcgtcgtctaagtgtggatcaagtgaaggctttggagaagaactttgaggttgaaaacaagcttgaacctgagaggaaggtgaagcttgcccaagaacttgggttgcaacctagacaggtagccgtatggttccaaaaccgtcgagccagatggaaaaccaaacaattggagagagattatggtgtactcaaagccaattatgatgctcttaagcttaactttgacaccctcgatcaggacaacgaagccttacgaaagcaggttaaggaattgaaatcgaggctgctgcaagaagagaacacaggaggaagcggtgtttcggtgaaggaagagataataacgaggcctgcagactcagaagacaaaacgatggaacaaagtaagagtgacccatcttctgaaacctcaaatattaatcctagttcggagtcggaggaggatcacttgaactacgagtgtttcaacaacaacgacgactgcgtcggaggaaccgccgcatcgctcttgcaagtggacttcaaagacggttcttccgacagcgacggatcaagcgcgattttgaacgaagacaacatgtactctcccttgaaattcaacaattgctccatatcaacctcgccgtcatcgtcttcgatgatgaactgttttcagttccagaaaccgtatcatcaccacgcgcagtacgtgaagatggaggagcacaatttcctcagcgcggatgaggcctgcaatttcttctcggatgaacaagcaccgacccttcaatggtactgtccagaacagtggagctgagaaaagaaacatggaaattaaaccgcttttagaaatttttgtttgaaggtagaaaatgaaatactgtgc

SEQ ID NO: 16451 - DNA, 1636 bp, Glycine max
  Clone ID: LIB3065-022-H5_FLI
ggaagaactaacaagaggcgtaagcgtaaacttgtccgaagaataacaccgggaaagaaagagagtgaagaagggtataagcgtccttgtgaaggcactagggtgttctgaactgatcctctccctgggtctggcactgtaaaattcaacgtcaaccccataatatacttgaagaaacgcttccatcttctctctatttgtttcaacttcagttatgcgtttctctctctagccagccatcatcactatgtcatccccaaactccgtccctcagtcccacgcgccgctccttctcccgcgccccgatgccgccgcccgcctccccatcctagcgctcctcctcggccgccgcggccactccgccgtggtccgggagacggcggcgcgtgagctggaggagcgccgcgccgactggacctactcgaagccggtggtggcgctcgacatgacgtggaacatggcattcgtgctggtctcggcggtgatgctcgcctgcaccgtcaaggagaaccccaacacgccgatccgctggtggatctgcggctacgcgctgcagtgcctcgtccacgtggccctcgtgtggctcgagtaccgcaggaggaacgacgctcccagggacgaggaatctgctgccagcctccaatacgacgacgtcaacgatagcgacgaggacgatgttggaacctccgggagttcctcttcctccggattcacaaaacgatgtgcgtcattgaataccatgatttcattactttggtggatggtgggcttttattgggttgtctctggtggtgatattctgctgcaagatgctccacgtttatactggttgtctgttgtctttttggcatttgatgtcttctttgctatcttttgtgttgttttggcatgcttgattggaattgccctctgttgttgtttgccctgtattattgctattctctatgctgttgcaggacaggagggtgcatcagaatcagatctcagtatacttccaaaatacagatttcaattgttaagcaatgaggaaacacctggtgagggaggaggatcaatgattcctatggagaccagcamcggttattcggtgaatgaacgaacactttcaccagaggatgcagaatgctgtatatgcatctcttcttatgaggatggagctgaacttcatgttcttccttgtaaccatcatttccattctacatgcatagtgaaatggttaaagatgaatgcaacttgtcctctttgcaagtataatattctcaagggaaatgaacaggtgtgacaatactaaaggcgatcaaagatatattatatcaagctgagttttattatataacagctcagggttttcaaccgctgatgcgtatatgtagataatatcaagacatgaaaaaatagaacgtctcccaatttgctcggtttagctgtcattgttttgttgcttaattgcttcagtagagaaaaaggtagaggtaagaaggaaaggtgccgtatagagatcttttaaataagttaacgatttcatttgatccttatttctcctttattagtcatttgaaaatcgtcatatttcttgtatcaaatttgtttatatggaagaaaacaatggaaagtgtggcagtctaactttcagctt

SEQ ID NO: 16452 - DNA, 710 bp, Zea mays
  Clone ID: LIB3066-001-A7_FLI
aacaatccttgcacccctcccctccgtcaccccaccacatccggccagcccaacgaaaatgtcgcgcgccacagctgcggtcctcttctacatcctcgccgtcgctgccctcagcgcggccgaggcaccggcagagtcaccgaaggcaggcagtcctgccaaggcaccggccgagtcaccgaaggcaggcagtcctgcagctcctgccaaggcacccgagtctgctgccacgagaactgcccccgctaaggcacctcaagccgcctccacccccgccgctgccgctgccccatcgtcgtcgtcgtctaggaagtctggtccagctgccgcgccgaccaccgccgcctctacaccgtcttcttccacggacgaggagttgagcccttcgccgtcggcatccaccgccgaggtggcgtcccctgccgctgatgggcctgctgagggaccggcggctgctgatgcctccggtgctgctacccttggaagcggagctgccatcgctggtgtcgccgctgctgtcgctaccatgatcttctactgagttcaccagctgggaccgtgtcgtcgagggtgggcacgtagttggctgtgcggtaattgctcgtctggtcgggagggaccaataacgcaagtgttgctttgctttgctcacttcgtttgctcttgtaactttatggggtcaaccgttatataactgaaacgatttgatt

SEQ ID NO: 16453 - DNA, 726 bp, Zea mays
  Clone ID: LIB3066-001-D6_FLI
tcgtgtaccacctcttgctgctcgtccactgtcacggactcgtcctcgtcgcccccgtcaccggcggcggccaatgccgcgcccgcgccacggaaggcggaggccgagactggcggggacgaggacggttgtgctggtaaggcggcgccggcgaagaagcgggagcggagcagcgaggggaagcacccgacgtaccgcggcgtgcggatgcgggcgtggggcaagtgggtgtcagagatccgcgagccgcgcaagaagtcgcgcatatggctcggcacgttcccgaccgccgagatggccgcgcgcgcccacgacgccgccgcgctcgccatcaagggccgcgccacgcgaagtgcccgccacaagagcggcagctgttcgacttgccggacctgctcctcgacgtccgggacgggttcgggcgcttcccgccgatgtgggccccgttccatgacgtgttggaggtcaatgcggaggaggagccgctgctttgggaatagcagtcttgcaattacaaagagggtctaaacaatagtaccagtggtatcccatttcctcatctttgttctccccctctctttctttcttttttctttggaaaagcagctagttttttttcttcttatctttaatttggttaaataagtataaacatatataaacaagagagatataagctgtgtacttataagtgtaagacgagtaagtaccgaacagttaattatt

SEQ ID NO: 16454 - DNA, 1273 bp, Zea mays
  Clone ID: LIB3066-002-B8_FLI
attacaaaaaacttcagcagtgatgccctcattggcgagggctcgtatgccagagtctattttggtgtgctgaaagatgggacgaaatctgcagtgaagaagcttgactccagcaaacagcctgatcaagaattccttgtgcaggtttcagctgtctcaaggttgaaacatgagaatgttgtccaactcgtcggatactgcgccgaagggagcacccgcgttcttgcttatgagtatgcaactaggggatcattgcatgatatcctccatggtaaaaagggtgtcaaaggagcccagccagggccagtcctgtcatggatgcagcgagctaggattgccgtatgtgctgctcgaggtctcgagtttctccacgagaaggccgatcctcgagtggtccaccgagacatcaagtcaagcaacatactgctctttgaccatgatgttgcgaagatcggggacttcgacatctcaaaccaggcccctgacatggctgcgcgcctccactctactcgcgttcttggcacctttggctaccatgcaccagaatatgccatgactggacagcttagcacgaagagtgatgtctacagctttggagttgtgctgctggagcttttaaccggtcgcaagccagttgaccacacactgccccgtggccagcagagccttgtgacatgggctacaccgaggcttagtgaagacaaggtgaggcaatgcgtcgatccaagactcggagatgaataccctccaaaggctgtagccaagatggctgctgtggccgccctctgcgtgcaatacgagggtgaattccgtcccaacatgagcatcgtcgtcaaggctctgaaccccttgctgcacagccggtctggcaaccgccctactgcctcgtcggcctcccacgctgccgcagcagcagagcgatccggactgtgatttctcatcgctgcgacaactttgggttcacgaaaaaggaccgtcttgtggagcgttggtgttgctgtgtcgtgactgccaacgccttggcgcagagaagagctttgccatgcagctgtgtattgtaaattgttttgtaagcgatgcgcctcctggtttgtgtgccctgtcatcatcctattctattctagaaaatggtgtacgatggatcatggatgataccaactatttggtctcttttggaatgcgaaaatgcagcacttggcttcctatgtgtgtagatcaggtttgttgttctattgctacaaaccaggaatactacagtatgaatattacaact

SEQ ID NO: 16455 - DNA, 352 bp, Zea mays
  Clone ID: LIB3066-002-C2_FLI
caccggcaaagccagcgagcatcagtccgggagcaggagcgccaacgagctgctcccgcccagcgccagtttcgtgaagctgtcggacatgagccctaaacagtggagcgcattcctcgacaagttccaggagctgctcccaggtgccctgagcgcccggaagcacgctgccggtgtcgtcggccagcgctcgatgccgaggctgggcacgtcttgccagttttgagagtagcagaagagaagcgcctgctctctgctctgtctttgccgctgtaccattttggaggcgcttaccatattatgaactttgaactatgatatgatgttcgcataaatatcacatgttctctgt

SEQ ID NO: 16456 - DNA, 918 bp, Zea mays
  Clone ID: LIB3066-002-C5_FLI
cgcgcgacagggtccagtcgagggccggggaatcgccggagaatggaggtgggcagggctccgcgacgacggctgtgcccagcggcggcggctgtgccttcgctgcttctgttcgccgttctattcgcgggccgggcggcggcggcgttcggccacctgcaaggcgccggcgccggcgcgacggcgctgtacaagcacgcgtcgttcttcgaccgcgacggcgacggcgtcgtctccttctcggagacgtacggcgcgtttcgggcactcgggtttggattcggcctgtccagcgtcagcgctgcgctcatcaacggcgctcttggtagcaagtgcagacctcaaaatgcaacgtcatcgaagttggatatctacatagaggacatccagaaagggaaacatggaagcgattcagggtcatacgacgccgaaggaaggtttgttcctgacaagttcgaagagatattcgccaagcacgccaagactgtccccgacgccctgacgtcggacgagatcgaccagctgctgcaggcgaacagagagcccggggactacagcggatgggctggcgcagaagcggagtggaagaccctctacagcctcggcaaggacaaggacggcctcctccgcaaggacgtcgcgagaagcgtctacgacgggacactgttccacatgctcgcgcccaactggaaatctcccgacgaggaggaggaacaggaactaagcgtgatccgggagagctgaaccgagaggtacaagcaaagtctggttgagagataaggactctgggaccctctgaacatgctgtcaagcaacatgtactactagcggtgtgaacgggtggtgtgaacactcttttcatatctctactacctattaagacggtaaggggtaggctgccccattccgtgttctgcc

SEQ ID NO: 16457 - DNA, 1495 bp, Zea mays
  Clone ID: LIB3066-002-D7_FLI
attgcaaatagggcatctgagatccttggacacaagcgcggtgagaagtttgtgcacccaaatgaccatgtgaataggtcacaatcttcaaatgatacatttcccactgtaatgcatatagcgacggccgttgagatacattcgaggtttatcccaagtttgcaacagttgcatgattcacttcattcgaaaactattgagtttaaagacataattaaaattggacgtacacatacccaagatgccaccccattgactcttggccaagaattcagtggctacactacacaggtcaaatatggaattgaccgcattaattgtacattacctcggatgtaccagcttgctcaaggtggaactgcagttggaactggcttgaacaccaagaaaggatttgatgccaaaatagctgctgcagtggctgaggaaacaaacctaccctttgtgacagcagagaacaagtttgaagctttggcagcacatgacgcttttgttgagagcagtggtgtcgtaaatacaatttctgcatctcttatgaagatagcaaacgacatacgtttgctaggaagtggtcctcggtgtggtcttggtgaactaatcctaccagaaaatgagcctgggagcagcattatgcctgggaaagttaatccaacccagtgtgaggctctgacaatggtttgtgcacaggttatgggtaatcatgttggtgttacaattggtggtgccaatgggcattttgaactgaatgtttttaagccaatgatcgcagccggattacttcgatcattgaggttgttaggggatgcatccgtgtcctttgagaaaaattgtgtcaggggaattcaagcaaaccacaagagaatttcacaacttttgcatgagtctctgatgttagtgacatctttgaaccctaaaattggctatgacaatgctgcagctgttgctaagaaagcccacaaagaaggaaccacgttgaaggaagctgcattagaccttggagtattaacggagcaagaattccatgagcttgtcgtcccggagaaaatgattggtccttctgattgataaccccatgttcactatgtttctttgaagcattcaggttgccacatccgcgagttctggtggccctgtgtttccaagttaatgattctagcgcacccataaataaagcaaataatttttcatatggtcattaggtcctcaccgtaccgcactagagaaatgatttttgcatggcggatggtatctgagaaaacagttgtattcttgttcaaatagggagcagtgcactttgattcatgaggcgccttccattatcttggcatcagtcaaccttttcttgccaagtagctagtgctatgtaacaagtgacatggcaaccatgtatagaaattatttgcatgggtttgtgttcttgccaggtagctaatgttatgtaataagtgacaaggaaacaatgtcatgaattatttgcattgggttttgacgagtg

SEQ ID NO: 16458 - DNA, 744 bp, Zea mays
  Clone ID: LIB3066-002-E9_FLI
cttcccctaggccaccacgcactccgcctacaacgactcctcttccacgtccatggttgggggcaccttctcctgcccgtgttcctcgtcctccacggctcggagcaccccctcgtactcctgttcttccgtctcctcgagtaggtgctccatctcccgcacctcctcctgttcgtcctccacagttgggagctccccttcctacccctgttgctcctactcctcagttggaggatccctctagaggtcctattcttcctcgaccgcctctcaagggtgttccaccttctactcctccacttgtggcaccacggttaggggcacccctcccatcccctcctgttccttcagctcggaagggcactccacctcctccaccacagtttagggtacctattcgatctcctgttattcctcctcctcagaagggcattccaccttccgctcctctaattcccgcaccacgattaggggtacctcttccatctcctcctgttcagcagccccctcggactcctattctaccaccctctcgaaagggtgctccaccatctatccctccactttctccaccaaagttaggagcaccacttccgtctccacttcttcctccgcctcgactaggagctccccctcgcactcctattcttgctcctcctcctcaagttcgtgccgtatttcctagtcctcgtagccctcctccgcgtttgggtgcacctcttccaactcctcttctacctcctc

SEQ ID NO: 16459 - DNA, 524 bp, Zea mays
  Clone ID: LIB3066-002-F4_FLI
cttgcttgggaacaggctctatcctcttgttgagaggcatcagcccgaactcgcgagcaaaatcactgggatgctcttggagctcgacaactctgaagtggtcacgttgctttgctcgtcggagatgttgtcggtcaaggtcgacgagtgtgtccagctgttgcaggcaaccaagcctaaggctgaggatcatgaggcgctgcacccaggattcatgctggagcctcggcctcctactgtaaatgccagttgatgaggttctgattgcgcggatgagcttctggatgcgcttgtgtttagggatatggtaacaagctagtcgctagctgctgtgttcgttctctccttctagtttgcgaagttttggtgtttggattaatctactgagccgttattgctttctatatatagaacttaatagtaataaggactatatatattcagttagaaattttttatctggacatgttatatgaatgtatgttagaacctttattcctatccaacattaggaatagttgtcc

SEQ ID NO: 16460 - DNA, 476 bp, Zea mays
  Clone ID: LIB3066-002-G2_FLI
agataagaacctgttgcaagttgcaactctgattcagaattgtgtgaatacatcacacaactcgcaatatggaaagtcgttttctataggtgtatcggacaccgctcgtgcgtgtggcacggcgaaacgaactccgttacataattcgtacgtgtccccgaaaaaaaatctcgggacacaccgggaggcgcgagtaaagccatcgcccatagccgtaggtagtagtagttctccgtactcctgtcctgctcctcgtatcgtatcagcagttcagcacaccaagggggcgagaaggcacacccgctctccctcggtccgcagcctaccagaccagaccgcgtcatcacccaccgtccggaggcgaggcgtcctcggcctgcaggtcctccgcgctcagcagatgatcaaaaagccgctcgcgtcctacggccagcaccgcaacgcgccggcggcgtcagaccctggggctcagccac

SEQ ID NO: 16461 - DNA, 1385 bp, Zea mays
  Clone ID: LIB3066-003-A11_FLI
gtgaaaatgtgacatgcatccagttcaaccctgttgatgatagatacttcattagtggttcactggatgaaaaagttcgcatatggagcattcaaaaccgtgaaattgttgattggaaagatttgcatgaaatggtcactgctgcttgctataccccagatggacagagtgcactaattggttcccataaaggcagctgccatatttatgatacatctgataataagcttctccaaaagaaacaaattgacctgcaaattaagaaaaagaagtccagtcagaagaaaataactggatttcagttccttgaatagtttctcccagggagtacttcaagggtccttattacatctgcagattcaagaatcagggttgttgatggccttaatctagttcacaagtacaaaggtttccgaaacactaacagccagatttcagcatgtttagctgctaatgggaggtatgtgatctcagcaagtgaggattcccatgtgtacatatggagaaacgatggtagccttgaaaaaggcagaagcaaggcgaatgttactgtcaccaattcctatgaacatttccactgccaggatgtgacagttgctgttgcaccgccatctaatggctcagcagtggtatccagatcaaactccacgaagcacgatgagcgggattctgtattggagcatcctatgctgcatgctgtccctgaaaaactgcaagattcctccgatttgcagcttcaaagtggcaatatcctaagcaccagttcaaatcacagcggtgatagagcaacttggcctgaagaactgatgacgccaacaaagcagagccctcagtctagtgccagtcttctcagcggtgctgatcaagctccaagctggtcagcctggggaactgtaattgtcacagcaggccgtggaggtcagatcagagcatttcagaactttgggtttcctgctcgagtatagtactgtagctatgagaccgctgcctggtcttggcgtctgccctgcagcaagacgggtgatttttgtgtatagataggtgaaagtttgggtgatctgcacgcagtctgggactggattctgttgctgctcctaggtgcacctgcctgcgaacttcaactaacctacgacctggtactcaaggtacggcgaattcgtttgcccggaattgtatatgagaatggagcccgggaaggacgagcgggcgtcggccggttggagctagatctttgggatctttttgccagccatcttttcatctgttttctccattgagtccagtttagctttttcatttttttttactttatgtttaccagctattatatatttttgtaagaaatcttagttctacagaaatagaaaagcaaaaaagagttgcat

SEQ ID NO: 16462 - DNA, 2053 bp, Zea mays
  Clone ID: LIB3066-003-B1_FLI
tgccttttgctctccccttccaccccgtctgcccgcgcgcgctgtctcgtggcgacaactgggcgaccgccgccgccgtcgctgccgccgctacgccaagaagctaggtcttcatcggtcccttcgtcgagattttctccggcgacaagcacccagcaggggactacaagattgattttgatggattatgacaagtctagaagaagtaactccaaaaagaggacacattccaattctgatgacggaaagaggaaacggttgagctctaggcatgatgacacatctatgtcctctgagccaattgaaaccatctacaggatattgtgcccggcaaaaaagataggcagtgtcttgggaagaggtggtgacattgttaaggcccttagagaggaaactaaagccaagataagggttgccgattccattcctggtgcagatgagagagtaattatcatcttcaattaccaaaatcaacctgaacttactgatgaagcagctgaaaaacaaattagtgatggcttagggaacatgaaaccccattgctttgcccaagatgccttattgaagatacatgataagattgtggctgatgaaatttatgatgaagtcgctcatgatgaaagttctgaaagtgctgatgatgtcactgctcgaattttggttcaaggcaatcaagttggctgccttctaggaaaaggtggctccattatacaacaactacgaagtgatactggtgctgggatccgtgtcttgtcatctgaaaaccttccccagtgtgcacttcaaagtgatgaactggtgcagatatctggagcaccatctcttgtaagaaaagctctatatgaaatatctactcgtctccatcagcatcctcgtaaggaaaatagacctcttgaacaaataatagatgcaagcacacaaaggaaacacgagtctccaacactgcaacatgaaaatccaatgttgccgcacctgcatagtcatcatccacctccaatacccctgcttgacccatacagaagtggacctcagtatcctgttagtgaaactgaagagttttctatcagaatcctatgtgcttctgagctcattggttcagttattgggaaaagtggggctaatgttaggcgggtagagcagcagactggtgctcgcattaaagttcaagagattgacaaagatgcttctggagaaaggctgatcattgtttcatctaacgagataccaactgaaccaatatccccaacaattgaggcactcattttgctccacgataaagtaagtgcatcctctgagaaacaccattcaagtacaaggcttgttgtaccatcaaacaaagttggctgtattcttggggaaggtgggcaggtgattactgaaatgagaagacgaactggggctgaaattcgagtttactcgaaggcagataaaccaaaatacttgtcttttggtgatgaacttgtgcaggctgctggacaaattcatggactggaggactatagaggactgccaagtgcttctggaaggttctcgagcactattgaactaaggattccaaatagttctttggagtctattgttggtgttggcggggtcaatttagcagagatacgtcagatttctggtgcaagactgaggctacatgaggctcatgctggttcttctgagtctgtggtggagatccagggcacactggaccaagcaaaagctgcgcagagcctcctggagggctttatcagcgcgaacagcaggcagcagcaatcccattcttctcgcatgccactttacccaagatggggatagcttctggttgtggcaggggaaaaccgagtcagcagggttggctggagttatctcagactgcagattagatgcatcgatgatgttaatggtagctgtttaaattgaccgtgcaagcatgataacttatattatgccataggacaagtaatgctgattctctcatgaaatactaagtgacaagctgtctctgtagttgtatttgattctgaatgtttgaaccctactgttacaacggctgctattttaggtc

SEQ ID NO: 16463 - DNA, 926 bp, Zea mays
  Clone ID: LIB3066-003-B11_FLI
tcaaattgcagctgatcaacagctctatgcaatggtccttcctggtttttggatggatgttggtcagccaagagactacattactggattgcgtctttatctagactcgcttaggaagaaatcggctgccaggctagctgctggagcacatgttgttggcaacgtgctggtgcatgagagcgccaagattggagaaggttgcctgatcggtcctgatgtcgcaattggacctggatgtgtcgtggaggatggcgtgaggctttcccgctgcactgtcatgcgtggtgtgcgtatcaagaagcatgcctgcatctcgaacagcattatcgggtggcactcaactgttggacaatgggcacggatagagaatatgaccatcctgggcgaggatgttcatgtgtgtgacgaggtatacagcaatggcggtgttgttctcccacataaagagatcaagtcaagcattttgaagcctgagatcgtcatgtgagagttctccagttttaactacagtacattcttaagttcttcgactaagtgaggattgcagatccccttttataagtgatatctattggtatctttggcctaattcaaacagcttcagacatgttcgcttgctaaactgttgacaatgtatccttgttctttgttgaaaagttttgtacttgtagtgtcaatcatatttcacaagtggttgtcatataatactgagggaggttttggacccttgatctgcagaagttcaataccatagtagcaagaataagtttatttttaaatgttgtccaatgtaactttcagcagtaatgtttgtgtgctaaatgctctcccggagaaatgtacacgctgcccacgtgtgatgtaacttaatatgttcacgtatttaatcttgtaccaatgaatatattgtcgatccctttaaaatc

SEQ ID NO: 16464 - DNA, 723 bp, Zea mays
  Clone ID: LIB3066-003-B6_FLI
gtctttgcctcgacagcgattcaatcatccgaagtacttctcaaatgatgttatggccaacagcttgcccatccatcaaagtgacccggtttcaacaatgaatgattcttttagcaactatttggcctccgctcctcccgcggaacaaaagaacttgcttgggaacaggctctatcctcttgttgagaggcatcagcccgaactcgcgagcaaaatcactgggatgctcttggagctcgacaactctgaagtggtcacgttgctttgctcgtcggagatgttgtcggtcaaggtcgacgagtgtgtccagctgttgcaggcaaccaagcctaaggctgaggatcatgaggcgctgcacccaggattcatgctggagcctcggcctcctactgtaaatgccagttgatgaggttctgattgcgcggatgagcttctggatgcgcttgtgtttagggatatggtaacaagctagtcgctagctgctgtgttcgttctctccttctagtttgcgaagttttggtgtttggattaatctactgagccgttattgctttctatatatagaacttaatagtaataaggactatatatattcagttagaaattttttatctggacatgttatatgaatgtatgttagaacctttattcctatccaacattaggaatagttgtccatgcgtctcctatacctttcatatgatattctcatttggacatgtt

SEQ ID NO: 16465 - DNA, 1047 bp, Zea mays
  Clone ID: LIB3066-003-F8_FLI
gtccaggccgtgctctctctgtatgccagtggccgtaccacaggtatcgtgctcgactcgggagatggtgtgagccacaccgtccccatctacgagggatacgccctcccccacgccatccttcgtcttgacctggccggtcgcgacctcaccgactacctgatgaagatcctgactgagcgcggctactccttcaccaccaccgctgagcgggaaatcgtgagggacatgaaggagaagctcgcctacatcgccctggactacgaccaggagatggagaccgccaagaccagctcttccgtggagaagagctacgagctccccgacggacaggtcatcaccatcggcgccgagcgcttccgctgccccgaggtcctcttccagccatccttcatcgggatggaagctgccggcatccacgagaccacctacaactccatcatgaagtgcgacgtggatattaggaaggatctgtacggcaacatcgtcctctccggtggcaccaccatgttccctgggatcgctgacaggatgagcaaggagatcactgccctggctcccagcagcatgaagatcaaggtggtcgctcctccagagaggaagtacagtgtctggatcggaggatccatcctggcatccctcagcaccttccagcagatgtggatcgccaaggccgagtacgacgagtccggcccatccatcgtccacaggaaatgcttctaattctttgggcccgagaaatgcaagccgtgggggagccgttaccgccgccagcctctcctgcccccgttttcgttgccgtttcttcattagcgcgaacaaagttttgtgccggtctatcggccgccgctttcctcccctattcatcaagactgcaataactgtcgctacctatgcttctcacctgtgatttttggacacaatatgttaaggtccattcaattctaatgagacgcctgatgaggctactagcaaacaacaccatgtgttcggattgtcattggttattgatgtcttgtgaatgaataatataaattttttttggtc

SEQ ID NO: 16466 - DNA, 1614 bp, Zea mays
  Clone ID: LIB3066-003-H5_FLI
ctcctcctcagaaacccaccaaccccgtccagccgccggctgtctcggccgtcgccgccgccgccgccgccctatcccggtccttcaggtgaaccaggttggccatggccttcaacaagatcaaggtcgccaaccccatcgtcgagatggacggcgatgagatgaccagggtgttctggaaatctatcaaggacaagcttatattccctttcgtagacctcgacatcaaatattttgacctcgggcttccacaccgtgatgctaccgacgacaaagtcacagtggaggctgcggaggccacactcaagtacaatgtggctatcaagtgtgccaccattacaccagatgaagcaagggtaaaggagtttggcttgaaggctatgtggaagagcccaaatggcacaattaggaatattctgaatggcactgtgttcagagaaccaatcatctgcaaaaacatcccacggcttgttccagggtggacaaagcccatttgcattgggaggcatgcattcggcgatcagtaccgggcaactgatgcagttatcaaggggccggggaagcttaaattagtttttgagggaaaagaagagcaagttgagctggaggtgttcaacttcactggtgccggaggagttgccttatcaatgtacaacactgacgagtccatccatgcctttgctgacgcttctatggccactgcttatgaaaagaaatggccattgtatcttagcaccaaaaacactattttgaagaaatatgatggcaggttcaaggacattttccaggaggtgtatgaagctggttggaaaaccaaatttgaagctgccggcatatggtatgagcaccgccttatcgatgacatggtagcatacgcacttaagagtgaaggagggtatgtctgggcttgcaagaattatgatggagatgtgcagagcgatttcttagctcaaggttttggctcattgggtttgatgacttcggtactggtgtgccctgatggaaagacgatcgaagctgaagctgcccatggtactgttacccgtcattaccgtgttcaccagaaaggaggtgaaaccagtacgaacagtattgcctcaatctttgcgtggacaagaggacttgcacacagggcaaagcttgatgacaatgctagactacttgacttcacccagaagcttgaggctgcctgcgttggagccgtcgagtctgggaagatgaccaaggaccttgcccttctcgttcacggatcttcaaatatcacgaggagccattacctgaacacggaggagttcattgacgctgttgctgacgagctcagatcaaggctggcggccaactcgaacctttgaaatccttgccgaagttgtggtgctttcctgcgcgacgctttcgaaccgtttttattatgtcgccattttctttccctgtgccaccaccctgaatgaagaaggcctgagctaggcgaacatctgcaggccgcagcagtatgccaaatcattatcattaccgttgccattaccaattggagattgccgtagatttccgcgattatgggaactcatttacctgattatctgatacgtttgaaataaaaggtcgccattcagaatg

SEQ ID NO: 16467 - DNA, 298 bp, Zea mays
  Clone ID: LIB3066-004-A11_FLI
ggagcaagcttgcaatgaagctctaatcctcctgctgtgcgacatgcctgccctgcaggaggagcaagcttgcaatgaagctctaatcctccatcctcatgatgcagcgcaggcatgtcgcacagcaaatgggcatgaaaagttgaaggcgctccagtcctccagcttgtgtagtacacagtagcaataaaacgttagtgtttgtcctgtgcccatcctgtattattctgttccagggtttcacctttatcgtcagtgtgtggtcaggtttcaacccttctcagaacaaccccctccc

SEQ ID NO: 16468 - DNA, 1489 bp, Zea mays
  Clone ID: LIB3066-004-A3_FLI
cacgatccttttttacagcctagaagagaagaattgcatcactacgctattccatccctcttgcatcaatcgaccccccttcaattcgatccatcgatctgatgttctgcagtttcaagctgaggagcctcctcttcctttggcgagctctaacgctggcgttggtctccttcatctcccaattcctctggtgaaccatcgctgcgacggcttggatttggttctgggttcgcagtctgcctcttgtgatgcatcaccatcgccggtggagggccgacgacgatgggatcaagggattactatgagatcctcaacgtcgaccggagcgccaccgatgacgacctccgcagggcctaccggcggctggccatgcggtggcaccccgataagaaccccgccggcaaggcagaggccgagacccggttcaaggagatcaccgaggcgtacaacgtgctcagcgacgcagacaagagggcggtgtacgaccagtacggggaggagggcctccggggagatgtgccgcagcccggcggcggcggaggcaccgacgacatcttcgcggagttcttcgggagcacgccgttcacgtactgcagcacggccagcagcgggaggcagcccccaccgcccccgaagtgggacagcgggttcggcagggcgttccggcgcgcccagggtggtggtggtggtgccgcgtcgtcgagaatggcgccgccgccgccgcccgtggagagcaggctggcgtgcaccctggaagagctctgcatgggcggcaccaagaagatgaggatctcccggaacttggtcgatgccagcgggaagacgaagacagagtccgagattttgtggatcgaggtgaagcccggttggaagaagggcaccaagatcacgttcgccggtaagggcaaccagcagtggaaccagctccccgccgatctggtcttcgtggtcgacgagaagccccaccccgtgtaccggcgtgacggcaacgacctgttggccgaggtccgtgtgacgctcgcccaggcgctgggcggcacggtcgtcgtcctcaccgcgctcgacggccgcgagctcgccgtcgacgtgggcggcggcggcgaggacgaggacgatgaggacgacgcgcccgtggtgtgccccggctacgagctggtgctgcctggcgaaggcatgcccatcgcgcgcgagcccgggcgccgaggcaacttaaggatccggttcgacgtcgcgttcccggagcggctcacgcgccggcagcgggcagagatcaagcgcgcgctcgaggacagtaccggtgtctgctagcaagtagcaatacaggtgtgatgtgtccgctgtccgcttggcgatgacagtgtggcgttgtgctcctgctgctgcgtgcgcctcgaacccttgaatatgggaaacagattcgtggcctcgtgggtgttgacgtccattttataaacactacactggaatgaactatttggtggtgctctct

SEQ ID NO: 16469 - DNA, 668 bp, Zea mays
  Clone ID: LIB3066-004-A7_FLI
gggacgactgcgcataacagaggtgttcctcgcggcggcggtggtgacggcggcggcggtgacaactagtggtggcatggtcgccgcggtgcgggacgacgacttcttcgtggacggctcggtgtaatgcgacacctgccgggcggggttcgagacgaacgcgacgacgccgatcgcgggcgccaaggtgcggctggagtgccggcactacatgagcgcgagcggcgcggtggagcggtcagcggagggcaccacggacgcggcagggaagtaccgcatcgagctggtggacaaccgcggcgccgaggaggtgtgttcggtggcgctggtcagcagccccgtgcccgggtgcgccgagaaggaggttggccgcgaccgcgcccaggtgtcgctgttcacggacgccggggccggcctcgccaccaccgtgcgccgcgccaacccgctgggcttcctcaaggataagccactcgccaactgcggccagatactcagcagctacgcgctgggctccgcgcctagctactgacggcccttggctttgggaccaattcgcacgctgcctgctttctattgcatttgatttgcacgtgtctatttttagtagtatttagtaaacattacgaataatcttcatcggctagcaatacaaatcaattaattagagt

SEQ ID NO: 16470 - DNA, 342 bp, Zea mays
  Clone ID: LIB3066-004-B9_FLI
cccagaagcagaggcgccgcacctaccgtgctcacgggcgcatcaatccctacatgtcctcaccttgccacattgagctgatcttgtcagagaaggaagagcctgtgaagaaagaggctgacaacattgtcgcagcaaggaagcagtgaagtatatcagcatgctgatcgaggccattttgtcgaagtattatagccgtagctcttttatgtaccttttcaggcagccttgcctctcgagacgtttccggcaccgatgttttaaatctggattatctatgttctgtactgaactactgtgttggactgtaagttcagctcgtaatacaatagctcttaagat

SEQ ID NO: 16471 - DNA, 403 bp, Zea mays
  Clone ID: LIB3066-004-E2_FLI
agcggaagatcggcgtggcgatggacttctcgccgagcagcaagaaggcgctgcgttgggcgatcgacaacctggtccgcaagggcgacaccctcgtgctcctccacgtccggcaccacggccgtgaggagggcaagaacgtcctctggtcccgcaccggatcgccgctggtcccgctggaggagctcatggagccgcccgtgaggcagcgctacgacgtgccgtatgacgcggaggtgttcgacatgctcaacgccgcggcccggcagaaagagatgtacactgttgttttggtgaaaaaggctgccagataaactgcccagcttgtatcactacatgagaaagtcactggacagcatcactattaccattttttttaacaagggatagaatggttctgctt

SEQ ID NO: 16472 - DNA, 821 bp, Zea mays
  Clone ID: LIB3066-004-E5_FLI
caactgaaaacagccgagcgatctcctctccctctccctctccgatccattctccagcgcagcgaagtaaacatgtctgaccgggcaaagatgtcgtggcaggcgtacgtggacgagcacctgatgtgcgagatcgagggccaccacctcgcggcggcggccatcgtcggccacgacggtgccgcctgggcgcagagcacggcgttccccgagttcaagaccgaggacatggccaacatcatgaaggacttcgacgagccagggcacctcgcgccgacaggcctgttcctcggacctaccaagtacatggtcatccaaggcgagcctggtgccgtcatccgtggcaagaagggatcaggaggcatcaccgtgaagaagacagggcaggcactcgtcgttggcatctacgacgagccgatgacgcctgggcagtgcaacatggtggtggaaaggctgggcgactacctgcttgaacagggcatgtaactactacgtaccagctggaatgcatgtcgacgacgatggtttcgagtttcgacttccaataatagtaacaacaaagcaaaggccttcctcccggcgtatttgctttggctcttctcctccacgccataagatatctagcaattggtcactcgccttaattagttcgctttgcttttgaggttgattcgaccattttgctgtagcgtgaattgcatgcatggacatgcaacgctccaatggcctttggaatgtggaatttttttccccattttctgtatttttcctataaaaaatgaactggttcttatataattcctctcagatccctgttgttc

SEQ ID NO: 16473 - DNA, 1620 bp, Zea mays
  Clone ID: LIB3066-004-F9_FLI
ccagaaatctggccaccctcctcgcgcggaacgacccgagggtgccccgtccactctcgtgtcggtcccgcgatgggcatgttcgcatcggccgcaaagagatacagcaacggcaagaattttctccgcagcgcgggcgtgtgctgttgttcgccgtccgcctccgcccagcttggtggtgtgcgcggcaaggaagagacatcgacgtcggcgccagctttcgcgccggatagcaacaagaaaaggtggaggaagaggaggttctggagaaagaagatgaaggccaggaaggagatcggcgggctggtggacctcgtcaacgatatttcggccaagtcagaggagagcctaggggttagcaaccaaaacatgcccagcagggcgctgacgttcagtcagctgagcgccgcaacggacgggttcagttcgcagaacctgctcggagaaggcggctttggacgggtgtacaaagggctcctcgaggacaccggagaggttatcgccgtgaagcagctgaacagggacgggctccagggcaacggcgagttcctcgtcgaggtgctgatgctcagcctcctgcaccacccgaacctcgtcaagctgctgggctacagcaccgactccaaccagcggatcctggtctacgagtacatgcccaggggctcgctggaggaccatctcctggacttgcccccgagctggaagcccctgccgtggcacacgcggatgcggatcgcggtgggcgcggcgaagggcatccagtacctgcacgaggtggcaaacccgccggtgatctaccgcgacctcaaggcctccaacatcctcctggacgcggacttcaacgccaagctctccgacttcggcctcgccaagctgggccccatgggcgaccagagccacgtcagcaccagagtcatgggcacctacggctactgcgcccccgagtacgccatgaccggcaagctcaccaagatgtcggacatctacagcttcggcgtcgtgctgctcgagctcatcaccggccgccgcgccatcgacatggccaggccgtccgaggagcaggtcctacttaactgggcttcgcctctgctgagagacaagaggaggttcgtgaagctggccgacccgttgctgggcaacaggtacccagtgaaggcgctgtaccaggcgctcgccgtcgcgtccatgtgcctgcaggaggacgctgccagccggccggggatcagcgacgtcgtcgcggcgctctccttcctcgccgacccgcaatactaccctcccggaggcacggaagctgaacacaagagcacgcatagcgggacagacaatgatagcagtcctcctaggaccgaaatggtcagggcagacgacgacatgaagcatagatgaccgtagagggggagctaattaacgggaaacatggcaaagggaggatttgcagagctgtctgtctgctctcttcaatcttcctttcgtaaaaggtacaccacgtaggcaggatgtaacatcattcaaggagttattgaccgatgctgatttttagcagcaatgcagcatgaagttgagctaactgtatgacacagattactcaggtgagagataagcgggtatttgtgatgttgt

SEQ ID NO: 16474 - DNA, 943 bp, Zea mays
  Clone ID: LIB3066-004-G3_FLI
aaagggccatccgctgcggtcagtgtaggtttctgaatcatagcttggcgatgcctgaggctagacaaatactgagctagccttcagaaaaaaaaagaaaagaaagagattgagaagcagggagaaaaaatggcactggcccattgaggaagcttgagaaccagttaacaagaattgccaacatattcttggacaatcttgttaacagagttttaaggtttcccagcagagaagagcgcgtgcaaccaccacattcatataattaataagcaaggtttagagaagaggcaacatgggcacaaagatgaagaaggggatcctgaagccgttccgctatatctcaaccatcatggatggtaaggaggctgaaatgcaaattgggttcccgacggatgtaaaacacgtggcacacatcggttgggatggtcctggctccaccaacaacaataacaacaacagcaacaacaatagtggcggagcacctagctggatgaaggattaccactcggcaccgcttgactcgtcctcttttaggagtgagagtgggggcacggctgctgcaaatccctgggcttctcaagagatagtcatggatggagcaagcgtcggagaaacctccttcagggacacgaaaagcgaggcaggcgtcgacgtcggcgggggcgactccccaccgtcccccgccacccgccggtcgagacggcaccgctctcggggctccggcaactcatccatggacgccaccggcggcgagggcgaggagaagactaaggagaagagcaagaagggcacccgaaagaaccgcaagaagcaggacaagtcggccggcgacgacgcctcgggcacatgccaggacctccccgccgttcccaagaagtccaaccgccggaaaaacaagggaagctccgaggggagcggtagcgccgcggccaaggacaccacc

SEQ ID NO: 16475 - DNA, 1775 bp, Zea mays
  Clone ID: LIB3066-005-A10_FLI
agccaccacaatttgtggctattttccagccaatggttattcttaagggtggtactagctctggttataagaaatttgtagaagagaagggtctgaaagatgaaacgtattgttctgatggcactgctctcattcaaatttctggaacagcggttcataacaataaaacgcttcaagttgatgcggtcgcaacatccttgagttccacagattgttttgttttgcaagctaaaaactcgatgtttatatggaatgggaatgcaagttcttttgaacaacaacagtgggctgctaaagttgctgaatttctgaagaccggtgttgctgtcaagcattgcaaggagggcactgagagctctattttctggtcttctattggtggaaagcagagttatacaaatagaaatgctgcacctgatgttgttattagagagcctcatttgtataccttctctctgaggaatgggaagctggaggttactgaaattttcaatttttcacaagatgatctgttgaccgaagacatgatgatacttgatacacactgtgaggtttttgtttggatgggtcagtgtgtggagacaaaagaaaaacagaaagcatttgacattggccagaaatacgtacgacatgccgtggcctttgaaggtatttctcctgatgtgcctctctataaagtcaatgaagggaatgaaccttgcttcttcaggacatacttctcctgggatagcgcacgatccgtgattcatggaaactcttttgagaagaaactttcagttcttttcggaatgcgttcagagggtggcaataagggctcaggtgatggtgggccaactcaaagggcatcagccttggccgctctttcatctgcattgaatccatcgtcgcaaggaaaacagtcagatgagaagcccacaagctcagatgacagcgagcatactcaacgagcttcagcaatggctgccttgtcctctgcccttaatccatcgacaaaacctagcagcacacaggcacaatctcattcaggtcaagggtctcaaagagccgctgctgttgcagcactgtccaatgttttgactgcagagggatctcatagcccccgccacagtaggtcgtccccaacatcagatgcagacaagactgaattagttcctacttctccccatcaattagaaacagggactgcagaagatgtccgaacagagcctgatgtctcacaggaacaaacagctaaagaaaatggaggccagacaacctttagctatgaacgattgatatcaaagtccactgaccctgttagtgggataaacaacaagcgcagagagacatatttggtggacagtgaattcgagaccgtatttggcatgactaaggaggagttctacgagcagccaaggtggaagcaggagttgcagaaaaagaaagccgatcttttctgagacaaggctggcttcgaactaataaaagcccttacgtcgcacaggattgtccagcattctcatcatgctcgttccgctgatgatgatcgatcaccagcagctttatccgtgagttgtataggctactcttttatctgcacatggtttgggagcattatatatatatcccccttgcccgtccattattctgaggtcgttcttgatgttgacctttcacgtgttttctttttttattgtattataaaaaatcaaactggtgtaaatggcattactagtgagatttttgtaagtaatggtgcatgggcaccaaggtgtatgcaacatatttttgttggt

SEQ ID NO: 16476 - DNA, 1113 bp, Zea mays
  Clone ID: LIB3066-005-A11_FLI
ttcacactatcctgacaaaggatggcaagaaccacttgatcaagaaggatgtgccttgtgagactgatcagttgactcatgtttacactttgatcatccgtcccgatgcaacatacagcattctcatcgataatgaagagaagcaaactggcagcatctatgagcactgggatattcttccccctaagcaaatcaaggacccagaggctaagaagcctgaggactgggatgacaaggaatacattcctgaccctgaggacaagaagccagagggctatgatgatattcccaaggaaattcctgaccctgatgctaagaagcctgaggactgggatgacgaggaagatggtgaatggactgcccctaccattcccaacccagaatacaaaggaccatggaaacaaaagaaaatcaagaaccctaactaccagggtaaatggaaggcacctatgattgacaacccagatttcaaggatgatccgtacatttatgcatttgacagcctgaaatacattggcattgagctgtggcaggttaaatcaggcactttgtttgacaacatcatcatcactgatgatcctgcgttggccaagacttttgcagaggagacatggggcaagcacaaggaggcagagaagactgctttcgatgaggctgagaaaaagaaggaagaagaggaagccgccaagggtggcgatgatgacgatgatgacctagaggatgaggcagacgatgacaaggcagacgatgacaaggccgactctgatgccgaggatgacaaggactctgaggagcacgacgagctctagatgatgagtatgatagaggtggccactgacattggtgccgttggcctggatttatcagctcttccattttgttctccttttctgttatcagaaactttaggacattgttaagaagctgagggacagtatgggtcgtagcgcttagtcatttttcccattaaaatcgatagcactgcaggaagatcttttcccacaattgttatatttcatcctgatgttagatgtcagctgtgttagtttattgagaactgtttaattagtcaaaaaagaagaataatacaagcatttggttctattttctcct

SEQ ID NO: 16477 - DNA, 743 bp, Zea mays
  Clone ID: LIB3066-005-B12_FLI
tgaccttcagcaaggagacttcatcgtgatctacaaggacgacgagaacaaccgctttgtcataggagcaaagaaggcaggagatgagcagaccgccactgtacctcaagtccatgaacacatgcacatctctgccgcactgccagctccacaagcgttccatgactatgcaggccccgtcgcagcagaagctggtatgctcgcgatcgtgccacagggtgacgagatattcgacggcatactgaactccctgccggagataccagtggcgaacgtgaggtactccgacttcttcgacccgttcggtgactccatggacatggcaaatccgctgagctcctccaataacccctcggtcaacctggctacgcacttccatgacgagaggatcgggagctgctcgtttccctacccaaaatccgggcctcagatgtgagatcctggcagaaaaactgccgcggtcaaaaccatcatcccctgcgtggaactcagagatcccctggttgacgccattgctgtacatccaaataaatggcgtcctcattttgtatgttcagtagtatatgattgggtacgcgtgttgtttatgtgtaaaagggtaactctgcaaaactgaactgagcgttacatcagatgcaacgctgtgacgactgacgaggaggcaggctctggtgtttcctgtcctgcaccctgtgaatgtgtgtgcaggtacataaacgaaagacatcctgtgcattagcatt

SEQ ID NO: 16478 - DNA, 558 bp, Zea mays
  Clone ID: LIB3066-005-B8_FLI
ccaataatagcaagtgtgatcatccgttgatccatcttgctaataaccctgcgtgcccttcgttctcgtctcgatcccgacgacgctcccttcggctccggcaaaccacatcaagtcgcgatggagatgaagaaggtcgcctgcgccgtcctcgccgccgccgcctccgccaccgtggtcctcgccgccgaggccccggcgcccgcgcccaccagcgcctcctcggctgcgttcccggccgtcggcgccgtgctgagcgcctccgtgctctccttcttcgcctactacctgcagtaaaattaaaggaggatcggagggagaggctgctggctgccattgcctgtattcggttggatcccgtttatatatatatatatatatttaagtactttaatttgggtctgaacatgtcgattgatccattcattttatttgctttgccatttctcccctttctgttaatttcgatatgtaaagaggggagaatgggagacactattcgtttggacatgacaatcggaaattaatcaatacccatttgttagttatgctgttgtc

SEQ ID NO: 16479 - DNA, 2107 bp, Zea mays
  Clone ID: LIB3066-005-C2_FLI
agccattgaagacaatgaagctcgggcattgatggctgcacaagccattatgtcatgtgaggatacgttggtgaatttacaggaccagaaaaacaaattgactgaagaggcggaggtggagctccgacgagccaatgaggcaattgaaaagctgaaaaccttcaagaacgaatgtggactgcctcatgtgcaaatggaatggcatgatcaccatgaaatagaactggtccatgcactgcccttcgaggattctgatgattctgcgctgaatgaaagcaggcttgacctccaggaaatatgtcaaagagtcaaagaaataattgaatcttaccctgagctatcagttgcggaattagcagataaagttgatcgacttgtggaaaaggtgatcagccttgaacttgccactacttcacagaatgctcagatcgatagaatgaagactgagatagatggccttcacgagcgcctgcatgctttggagcaagacaaggttgctttggttgttgattctagtaacttggctgacgggttgaggaaagctgaagaaatgctgcaagaagtacaaaaaatttggaagtccgtacaaaatggtttcgagaacatttgtaaacaaatgactgaagccgcccatgaactaactgaattcgtcgaaacattacatgctcctgagcaagaaagcagtgacttcgtggattcatcgcgagactccaaacacgatacttctctggaagattactcaggactaacaagtctgtctgtgcaaaacgagccatccaaatctttacatggcactacaaatgaaactgataaacatgaagaaaccttagaagatcaagcccaaaaagagctagttccaaaagaatctgaagttgagggtaagattctattagaagactatgcatctgtacttcagagctacaaagatacagagcagaagctttcagaaattgagaagataaatcaagattaccatcttgaggcaatgtcagaactgaaggaacttaagagtgccaatgcaacaaaagatgaggagatccagtcgcttaggcgcatgctacgttctttgcggaaaaagatgagtgcttctattattgagagtatagagaaggcagaagaaacatccaagataagcagcagtcctactacagaagacaaagagattgccaagtcagaagaaacatccaagataagcgccactccaagtacagaagacaaagagattgctgagatagaggaatacattaagcaatggcaaattaatgactcactggcttcttcggttgcagaggagaaatttagagcagaaattgatagggtattaggggagaacttggacttctggttgagatttagcacatcatatcatcaaatacggaatttccaaatatgctttgacatgttgaaaactgagatgtacagattgactgatgaacaggaagacgggggaaattacggctttgctggtagttatcaggtagcaaagctggaatcagcagtactagaaaagaaattcagggatctaaatacagatcttcaagtttggattgaaaagaacgtgctattgaaaggagaggtagaaaacagattttcgtcactatgctgcatacaagaagatatatcaaaggtcacaactctggataaatgtgatgaaattcacttcaacccttttcaagctgcaaaattccaaggagaggtgcttaatatgaaacaagagaacaacaaagttgctaaggagctagaagctgggctggatcatgtaagaggtctccaagtggaggttggaagggtgctcttgaagctcagagagaatctcgaggtatctctagaaagaagccatcgagcccaacaaaacttccggaacctgtcaacaaaagctggaattccccttagaacttttctgtttggctcaaagacaaggaaatcatcattcttttcgtgcatgagtcctggggtgcataagtaacacagtggttcaaaggttgggcgtagatgattactgacaaattgttttttgacatttaatcataaagagatcttagtgtacatgtcaattcatatgtgataattgcttttaggccttcaatgtaaaagatcctcatctcct

SEQ ID NO: 16480 - DNA, 755 bp, Zea mays
  Clone ID: LIB3066-005-D12_FLI
ctccttcacttcctcgctggcccataaatatatatctatctatcgccatcgagcaattataatctcacagaataataaacatcatggggcaagcctcacggctcgtcctcctcgccgtcgtggcgctgctgtccgccggcctcctcccgcaggcgctgggtaagggtaggggaggcaggggacacggtggcgccgtcaacccgcaggtcgccggcatctgctctcgcaccccgttcccggaggtgtgcacgtccaccgccgggcggcacgcgtccaagtacccggtcatcgacaacctggccgtgctgaacatgcaggtggacgcgttcgccaagcgcaccgcgcaggcgcgcaagcacgtcgcgaggtcggcccgcaccatcccgccgcagcagacgcaggcgctcacgttctgcgacaccatgtacatgaacacgcaggacaccatcggcgcggcgcagcgggccatcacgttcaaggacaccggcaccgccaagatcatgctgcagctcgccgtccaggacttcgactcgtgcgaccgccccttcacccaggccggcgtccccaaccccatggggaagtttgacaaggagctcaaccagatggccaacaactgcatggctcttgcaaacatgatatgaaccacgcatgcaaccccagcgtgaggtgccatcgcatgcagggaatgcttgcattcatttttcatttaattaagaattcattgaaattatgagttatatatattgagtaactct

SEQ ID NO: 16481 - DNA, 565 bp, Zea mays
  Clone ID: LIB3066-005-G9_FLI
gagctagctagccagccagccagcagccagcttgctcgccgcgcccgtccttcttcctcgcctccgttccgttccgttccgtcccgcccgccgccgccgccgcattcagggatggagatgaagaagatcgcctgcgccgtcctcgtcgccgcctcggcggccaccgtggcgctcgccgcggaggctccggctccgggccccaccagcggctcctccgccgtcgcgcccgccgtcggcgccgccctcggggccgccgtcgcctccttcttcgcctactacattcagtgagccggccgcggccggtcgcccggaggccgaggaagagacgaagcgggagagagagtgacatggctgcgcgcattccgatgcgtgggcatgtttttgattcgacacaccttttgtcctctttttctttgttccctctttctccttaatttaacgaattgatgcatgccgctgatgttcttccccctgagagagggattaacacttgtatcatcgcttgccatttgtttgaatccattcaacaattcgatttaatcaatcatcgcgtatatatttgccc

SEQ ID NO: 16482 - DNA, 1024 bp, Zea mays
  Clone ID: LIB3066-006-B1_FLI
gctcgaccatccctgcaaattaccgcgatggctcccaagatcctagtcatccttgtgttcctcgccgtggcctcaccggctgctctggccgccttcgatgtgatagagatgctggccgacaagcccacgtactccacgttcctgaagctcctgcaggacaccaaggtcgcgggcgaggcgaatcagctccggtcggcgacgctactggtcgtccccgacaaacttgccaagcctctggcgtcgctgcccgccgataaggtgcggccggcggtggagaaccacgtccttctcagttacttcgaccccatcaagctggacgagatgaagacacgcaccgccatcctccccacgctgctctccgtcaccgacaagaaactcggcgtcctcaactacaccagggccgacgacgggcagatgtacttcggcgctcccggcgccccctgcgtggccaagctcgtgaaggtcgtcgcagcgcggccgtactctgtgtccatcatggagatcagcgagcccattttgccggccgcgttgccctcccccgtcgcggcgcccggccgccgcggcaagggtggtaagcgcaagatcaagccatcagcggcaacccatgaggattccaacatgatcccgcgcaagcccgtcgaagcagtggtggtgggtaagggtaaggtggccaaggataccgtgtccgagtcacctgctccaagccccgcccccgtctccgccccttagttgcgtgttgggcgccgctgcccgccggcccccggccaccatgcgtcgtgtctgcgcgcgcacgcacgcattgaacgggagatagaatatggtatcgttcaatgcagattgccatgctatagctccagagtttatctacctggtagcaccatgacacgatggcccgttcgtattttctggcttgctcgtacttttcagttccatggttttacaacaccttttactcccagcagaaaatacataatatgcatgtactcctctttttttccgtatagtaatataaacaaattttcac

SEQ ID NO: 16483 - DNA, 572 bp, Zea mays
  Clone ID: LIB3066-006-B8_FLI
ctggagcatcctctacgtgctgaacgtgatctacagcctcctgacgggcaggctggtgcgcgagaaggtcgacccggcggtgcagcgggtggtccgcagccagatgaacgcggtggactcgtcgccgttcagggagtcgccggacctgttcgaggtggaggccaccaacggcatgccgcgggcgtccatcgacaagctccccgagtcgtggatcaccgaggagtacaggcgcgacgccgtcggcgacctctccggctgctccgtctgcctccaggatttccaggtcggggagaaggtgcggagcctgccggactgctggcacgtgttccacgtgccgtgcatcgacggctggctcatcaagcacggctcctgcctgctctgcaggaggaagctgtaggcggatcgaccggacgacgccatgaacgatgttcttctctgcgatcgagccgatgatgtgtgtgtgtgtgcccccgccgccaccaccgatagctgctgctaggatcggaggaggggaggaggaagaagagactgacatctatagaacccttaatttatagagagggcttttgctt

SEQ ID NO: 16484 - DNA, 1084 bp, Zea mays
  Clone ID: LIB3066-006-C7_FLI
gtgcgccaccgacgccgccgccctttccccggcggtcaccaccaagcaccggcgcgcggcggatgagaacatccgcgaggaggcggcgcggcacccggccccgaagcagggcctgtcggcgtggtacgagcccttcccgccggccccgaacggcgaccccaacgagcgctactccctggacgagatcgtgtaccggtccagctcggggggcctcctcgacgtgcggcacgacatggaggcgctggcccgcttctcgggcgcctactggcgcgacctcttcgactcccgcatcgggcgcaccacctggccgtacgggtccggcgtgtggtcgaagaaggagttcgtgctccccgagatcgagcccgaccacatcgtctccctgttcgagggcaactcgaacctgttctgggccgagcggctcgggcgcgaccacctcggcgggatgaacgacctgtgggtgaagcactgcggcatctcccacacggggtcgttcaaggacctcggcatgaccgtgctggtgagccaggtcaaccggctccggcgcgcgccgctgtcgcgccccatcgccggcgtcgggtgcgcgtccacgggggacacctcggccgcgctctccgcctactgcgccgccgcggggatcccggccatcgtcttcctccccgccaaccgcatctcgctggagcagctcatccagcccatcgccaacggcgccaccgtgctctcgctcgacaccgacttcgacgggtgcatgcggctcatcagggaggtgaccgccgagctgcctatctacctcgccaactcgctcaactccctccgcctcgaggggcagaagacggcggccatcgagatactgcagcagttcgactgggaggtgcccgactgggtgatcgtgccgggaggcaacctggggaacatatacgccttctacaaggggttcgagatgtgccgtgtcctcgggctcgtggaccgcgtgccgcgcctcgtctgcgcgcaggcggccaacgcgaacccgctctacggctactacaagacaggctggaccgagttccagccgcaggtggccaggccgacgttcgcgtcagcgatc

SEQ ID NO: 16485 - DNA, 591 bp, Zea mays
  Clone ID: LIB3066-006-D6_FLI
ctgctgctcgtggtggtggctgtgcaggtgcggagatcgtcgatcgatcgctgcggttcgtcggcggcggtgtcgagatgtcgatggacttcggtgccccggcggatgaccccaaggctttccgcaacatctgccgcgaccgtacgtctgcaccacgcgcgcgactttgattgatctccgctcttcctcacgtcgtctgctttacgaattgacgacccgactgctcggttccgctgttgctcgtttgtgctctcctcagggatactgaaggacctgcttaagcctgacaaggataaggagaccaaaagctcatggaaggtacataggcgtaatatttttgtcgtccgtgcgcatgcagcttgatctatgcacattctgttgttactgcttcatgtgctcagtttcctactatctttcattttttgaggaaacgctgcagattctgagattcatacttttgatgggagaccgtattgtgtacattaggacatgaattgggcgagaatagaatttatgccatattcatttcacatggctatggggattttttctgtgtaatgtttatcaattatgtatatgatcctttctcac

SEQ ID NO: 16486 - DNA, 1016 bp, Zea mays
  Clone ID: LIB3066-006-D8_FLI
caaaccacctcggccggtcggcccacgggccacgactcaaaaaaggatcaaggtgggagaaacaaaacacaaggcggcgtccgcagcttccccactccacgttccgtgtttccgactccggtgactccaccaccagcaacccgtgcagcgagcgcactccgaccatcgccatgtcgaggcgcggcgactgggtctacgagaacaacggcgggacctgcgtggccatcgccggcgctgattactgtgtcgtcgctgcggacacccgcctctctgtaggatacagtatcctcacgcgtgatcactccaagatctgcgacctggctgacaaatgtgtactggcatcttctggctttcaaggtgatattaaggctctgcagaagaacctagctgccagagaattgctgtaccaacaccagcataataaaaggatgagctgccccgccatggcacagctcctctccaataccctgtactacaagcgattcttcccatattacgccttcaatgtgctcggtgggcttgacagcgaggggaaaggatgcgttttcacctatgatgcagtaggttcctatgagagaaccggttacagtgctcagggaacgggatctactttgatcatgccagtcctggacaatcaactaaaatcaccaagtcctctattactccctgtcagggatgctgtcacaccattgtcggagtcagaggccatcgatctagttaaggacgtgttcgcatctgcaactgagagagacatctacactggagacaagttggaaattgtagtcattaacaaggccggtactatgcgcgagtatatcgacctgagaaaggattaagccaacacttcagttgtgctgcagctgtcatttgctttgaactttttttcctagtctggtgatttatgtctaaagctgttgcttcataggaacacttgtgtttacttgcatatgtaatgtacggtatgtaccaggattcagtgagttttttttctgttgaaacaaattgcttggatactg

SEQ ID NO: 16487 - DNA, 941 bp, Zea mays
  Clone ID: LIB3066-006-E11_FLI
agacaggatgcggccggaggacgtgggcctgagcccggacctgagcttcttcagagctcgagacgccacacgtggcggtggcaccccgaccataacgcacacgacgatatacaaatgcccgaatttctcgatggtcatcctcttcctgccgcgaaacgcggtgatcccgctccacaaccaccctgggatgacggtgttcagcaagctgctcctggggtcgatgcacgtcaagtcgtacgactggctcaacactgctgaccccgatccttcttccgccacgagcaccaccagcaccagttcttcgtcctccgatggcccatgcctgaggctagcggaactggtggtggacgacgtcttcacggcgccctgcgacacctccgtgctgtacccgacggcgggagggaacatgcaccggttcaccgccatggcgccctgcgcgatcctcgacgtcctcgggcccccctactccatagaggaggacagggactgcacgtactacgcggaattaccgtacgcaaaccactcgctggtggctgcgggcgacgacgtggagcggggccagggccaaggccatctggcgtggcttgaggagatcgacatgccgagagagctcaagatgtgcagcgtccactatggcggaccgccgatctccgacgagtgacgtcgccggccgtcgtctccctcactggttgtactatgtctaactgatcgcggcacggcagagccgtgccgccgtctgacgttgtgtatagcaggcagcagcaagccataggctgtagttacacaaagtcccgatcgagtacaatgcttctcgcttgcctgcatcgttgttctctagatgccctttctttcttgttatttttgtttctactactacaagtagacgatgttttgtcctgacgatgaatgatacagataagtcatatatatccacatatttc

SEQ ID NO: 16488 - DNA, 1154 bp, Zea mays
  Clone ID: LIB3066-006-E3_FLI
atgaagggggtgtttgcaactcgcgtttctggttctgcagatctctaccaggtgaacaatcggaagccttaccatagtgtgaactttgtaattgctcatgatggatttactttatgtgaccttgtttcatataactccaagcacaatgatgcaaatggagaaggtggtcgtgatgggtgcaatgacaactacagctggaactgtggcattgaaggagaaacaaatgatttgaatgtgctaagtcttcgttcaaggcaaatgaagaacttccatgtggcattaatgatttcccagggtactccaatgatgctgatgggagatgaatatggtcacacacgttatggaaacaacaatagctatggacatgatactcacataaataattttcagtggggccagttggaagaaaggaaggatggccatttcaggtttttctcagagatgatcaagtttcggcataaccatcctatattgagacgagacaggtttctcaacaaaaatgatgtcacttggcatgaaaatcgttgggagaaccaggacagcaaatttttggcatttacgatacatgatcacagttctggtggagacatctatttggcattcaatgctcatgagtattttgtggatgctgtaattcccccaccaccacaccataaatcttggagtcgtgtggtggataccaacctggaatcaccaaaggatattgtcccagaaggggtgccattcacaggttcagggtacaggattgctccctactcttccatcttgcttaaggcaaagccttagaatggcggaggcaagtcattctcaagtaagcacgaataatggtgttgtgatccctaactttccaagctcttagccaactgtactgcaagtatagcaaactttggtatgtgaagtcggaccaacccttgcggaaatcaacggaagccatggtttgctaaaggtatactcatggagaattggagatatggcaaacacatacgcaagtaacctccacacatctaagcaagaagagcctttcattaggggatgcatggctcgaggaaactatatttgcatttggttgattcatttttatttgttgcacatgtcagtatgtcacctgtgtgtgtcaagctcttatttgcttaaaaattggacattcctttgtt

SEQ ID NO: 16489 - DNA, 592 bp, Zea mays
  Clone ID: LIB3066-006-E5_FLI
aaggttccgggtggtgtggtcgtcagcgtcggaggaggacagcagccggccgcccaagcgtcaggccaggagaaggtggcggatacgcccggccccaagctccgcggaagccaggagactgtgaacccggccccggtggtgtccggcgccggcgccgaggaggccgacaagcaggagggggcggcggccctggaggagaagaagaagaggaacatggccaaactccgcggcggtgcctaggcccagcagagcacaaggatcggagcaggtgcctactgcctaggcccagtctgccaggccgcgctgcgctcctgtcatcatctattcatctcctcacccagattttgcttccctcgctcgctctctcattcgtttgtgcagctgattacgctaggtctatttacgcaactgtcctgtgtcgaattttaacagcgacggccatgcaccaaacccccaccccacacatcattttgtttcttcctttcttttgattcgacgacgcctgtgattcatgcatgctctcgatcgaggcaaagctgttgtatgttgttatggtgtactattctatttttttatttataaagttttgatt

SEQ ID NO: 16490 - DNA, 893 bp, Zea mays
  Clone ID: LIB3066-006-G1_FLI
ctgagagacgaaggaagagagcctaggactgactcactgacccgaacccgttcccggcgggacttcctctcgaatcgtcccagtcgagaccctagttgccccacgaaccgaggatccaagatgagtttcctgttcgggaagaggaagacgcccgccgagctgttaagagaaaacaagagaatgctagatcgatccatcagggaaattgagcgagagagacaaggattgcaggcccaggagaaaaagctcatcactgagatcaagaaaacagctaaagaaggccagatgggagctgtcaaagtaatggccaaagatcttattcgcacccggcatcagataacaaagttctaccaactcaaatctcaactccaaggagtttctctaagagttcagacactaaaatcaactcaagctatgggtgatgccatgaagggtgtcacaaaggcaatgtcccaaatgaacaggcagctaaatctaccaggattgcagaggataatgcaagagtttgagcgacagaacgagaggatggagatggtgagtgaagtgatgggagatgccatagatgatgctttggaaggagatgaggaagaagaagaaactgaggagcttgtgaatcaagtacttgatgaaattggcattgatatcaaccaagagcttgttggagctccgtcggccactgttgctcaacctgcttctgtgggaagggtcgcccaggctgaaagtgctgggaatgctgacagtggtatcgacgctgatttgcaggcaaggctagacaatctgaggagaatgtaggtgctacactagcaaaaagagtagtgccttcaagcactgttcctgcgaatgtgaatgaatacctgatcgatcaaagcggttacaagccaatgtgtatgttg

SEQ ID NO: 16491 - DNA, 1130 bp, Zea mays
  Clone ID: LIB3066-007-C4_FLI
ggtcgacaggcaccgacacgacccatgtcgtcaatgtggcgcgtttcccgccgcctcctccgcgccgccgcctcggcctctacctcggcgatcgggcgcggcgccgagccccgccggtgggtcccgccgccgttcgcgctgcagcgctgcggccacgcgtcgcttccggacgcggcgaggagggacggggaggaggaggtgacggcggcggaggcgaggcggctgatgcggctgaccaacgtggatgcgctcaagcggcggctcggggacggggaggtgatcccgtacgcggacctgctgcgcgcgtgccaggactccggcgcggcccggacgcgcgccgaggccgcggcgctcgcgggcgcgctcgacgaggccggcgtcgtcctgctcttccgcgacagggtctacctccagcccgacaagattgttgaccttgtaaggaaagctatgccccttgcactgacacctgagaacgatccggggaaggatgagctcaagcagctccaggtgcagctggaaaacatcaacaagctggcacacaagcaggtccggcgcatcctctggtctggtctgggtttcttgatcacccaggtgggcctcttcttcaggctcacgttttgggagttctcgtgggacgtgatggagcccatcacgttcttcacgaccactacaggcctggtcgtgggatacgcatactttctcatcacgtcaagggacccaacctaccgagacttcatggagaggatgttcgagtctcggcagaggaagctgatccagaggcagaacttcaacttggacaagtaccttgagctccagaggcgctgcaaggaccccctggagaaggcgtgcggcacgaccaacactgacatggctcatctccatgagctatccattcacaaatgacaaacaatttcaccattgcttcgttactcattttattctctgggggaaatgatccctagtagaaaaggtaaccggtgtttcttgcacttgtgagataccttttccacggtcttctctgcaaatgtgtaggtcattaatcagtataatccttttttagcgatgttgtagcacaagcacctgatagttgaaaaggcaagctcatctgcatggccggaagcttactcact

SEQ ID NO: 16492 - DNA, 2304 bp, Zea mays
  Clone ID: LIB3066-007-D6_FLI
ggcaaatgatttatgttctctgcgtttataaccagaaagagaaggagcatcaaatcacgatgggtgcacatgatattgaagatgcattggcctggaaaaagaaaatagagctcctcattgatcagcaaccagactctgcagttaaaacccataagtcgttcgctacaatagactttgacatggaccttggagggcagttctccttgtcagatcatgacagtgcagctgaagatgaagaggaacgacctactttagttcgcaggacaactatagggaatggtcctcccgattcaatacatgattggaccaaagatgctgattttggtatgtccggtcagaatgagcccactcaactctattctaagaagaattggcgactacttcgatgccaaaatgggttgcgcatttatgaagaacttctggaagttgaataccttgcaagaagctgtagccgagctatgagggctgttggagtagtggaagccacatgtgaagccatttttgggctgatgatgagcatggatgcaacaagatatgagtgggactgtagctttcgccagggtagtttagttgaagaggttgatggtcacactgcagtactatatcataggttgcaattgcattggtgtccaaggttgatctggcctagggatctgtgttacgttcgatattggcgacgtaatgatgatggaagctatgttgtgctatttcggtctacagaacatccaaactgcatccgtcagcgaggatttgtgagagcttttattgaaagtggagggttaagatttgtcctcttaagtgtcgcaatggaagaccccggactcaggttcagcaccttatgcagattgatctgaagggatggttcttgaactactctacttcctttcagtatcattctttgctgcagatactgaactgtgttgccgggctgcgtgaatatttttcccaaacagatgatattcatataactccaaggattcctgcaatggagagcatggctgatgtgaatttagcacaaaaggacgagaagcttaaagaagttgactccaaaactaaaccagaagatcaacaacaagcagaaaataaaaatatgggaacaattgatgaagaatcagatgacgatgaggactatcatgttcctgaagctgatatagaggaaatcactaacaaatctgacaatgaagctaaacacacagatgagcctccagaaaaaattgatttatcttgcttttctgggatacttcatcatgatccggatgagaaaagccgcaactgttggacagtacctgatagcaagcttttcaaagttcgtagcaagaatttcccaaatgacaaatcgaagatacctgctgcaagttatctcatggagcttgcagccattgattggtttaaggacaccaagcgtatggataatgttggcaggcagaaaaattgtgttgctcaggttgctgctgagaaagggatgcatacattcattgtcaacttacagattcccgggtcaactcactatagcatggtcatgtatttcgtcacaagttccttgaaaaagggatcattactgcagcgcttctttgatggcgatgatgacttccgtaacagcaggctgaagctcataccatcggttccaaagggctcatggatagtgcgacagagtgttggcagcaccccttgtttgttggggaaggctgtggattgtaactattttcgaagtcctgggtatttggaggtggacgtcgacattggttcttctgcagtagcaaacggagttttgggcttggtgtttggtgttgtcacaacattagtagttgatatggctttcctaatacaggcaaacacatatgaggagctcccagagcaagttataggcgcagctcgtctatctaacgtggaaccgtctacagcagtagttcctgaccttgaaaataacagcgacggcaacaaagataacagcagtaacgacgctacgtcctctgaggatgattcgtcaaagaagaccaactgattcgacctttctttaaagatttcgaaagaccaactgattcgacctttatttgaagatttcgatgagagccgcaggttgtctagttcattttttctccttttaacctctgtgctgtgcacgtatcttcgcgggcttgcaccagattgcagtctggtacatctcctttggcgccttcaattgagtccagaatttcacatgatctcctgtatccttctccattacagtccgctcttgccttatccatgtacatgctgctaccagacttggtgtagatagtactatgtgatgaacacgttcaactc

SEQ ID NO: 16493 - DNA, 1507 bp, Zea mays
  Clone ID: LIB3066-007-H12_FLI
gcactactgggcttccgtgacgtacaccgcggtgcccctcttcctcatggccgtgctgtggttcgtcggcttcggcatcgtgatgctcgtcatctcctgctgctgctgctgcttctgccggggcaagaacgacgcctactcgccggggtgctacctcagctccctggtgctcctcatcatcttcaccatggccacaatcgccgggtgcctgatcttgcacggcggcagcgacctgttccacgggagcaccatcaggaccgtcgagtacgtcttcgggcagggcaacctgacggtggaccacctgaggaacttcgccgacagcttggcggcggcgaaggacatcacgatcaaccagatcttcctcccggccgatgtccagcagaagatcgacgtcgtcgaggagaagctcaactcctccgcgggcgtcttctccactcgcctgcaggagaactccaggaagatcaagggagtgctgaaccacatggagcacgaactgtttgctgttgcagctgttatggctggcctatcaatactcggattcttgttctccgtactggggttgcggtttcttgtctccctactggtgatcgctgcttggatccttctcaccaataccatcatcagttctggtcttttcctcctcttgcacaacgtggtggcggacacgtgcgtcgcgatgggcgattgggtggcgcacccgcaggcgcacacggcgctggacgacatcctcccgtgcgtggacgtggccacggcgaacgagtcgctgtaccggagccaggaggtgacgtcgcagctggtggcgctggtgaacaacgtcgtcgtcaacatctctaaccggaacttcccgccggggctccgcccgctctacttcaaccagtcggggccgctcatgcccgtgctctgcaacccgttcaacccggacatgagcccccgccggtgcgcgcccggcgaggtcgacttcggcagcgcggcgcgggagtggaagcggttcgagtgccagaccacggggccgccggggtcggagctgtgcgccacgccggggcgcgtgacgcccgcggcgtacggccagatgacggcggcgacgagcgtcagcaaggggctctacgagttcagcccgttcctggtgcagctgcaggactgctccttcgtgcgagagacattcacgtccatcaccaactataactgccccggcctcgagcagtacagccgggacgtctacgtcggcctggtcgtcatctctgccggcgtcatgctgtccgtcgtcttctggatggttcacacacggcaccgacggcggcgcgccatgcgcaagcagctgtgactgagatcttgatggcgcgccaggccacgccacgattgagctttagctgttacaaccgtggtccacgcatccgtttcaaatttgtacaatactcactcggttctaaaattaatcgttgtcgtttaatttctaattctgaaggagtcaaatattttcagtttaattaaatatatacatattaatatc

SEQ ID NO: 16494 - DNA, 293 bp, Zea mays
  Clone ID: LIB3066-008-A2_FLI
cgcgcgcatcgccgccaaggtggccgccaaggcctacgagctcggcctcgccagccgcctgccccgacccgacgacctcgtcagctacgcggagagctgcatgtacacccccacctaccgcagctaccggtaaggaccacccatgccgccatgcgtggcatggagccatggccggcgctagaggagtgagttttacacgtacgtactttgattttttttatgtactgtatttctgtgtacggcaaaatacaccacacccacatatatacggaggtgaagttgattcttctgac

SEQ ID NO: 16495 - DNA, 1026 bp, Zea mays
  Clone ID: LIB3066-008-C6_FLI
agcacacacgggcgcatcagggcctagctcgagtccactacttgaaaaacaggaaaaaggttgcgtttgaggagatgacgaagctcgtggagatagccagccactgcgcgtcggcatatgaaaagcggtcggaatacggtgagcgcgaagctgcgaggagcgacctgaacatggcgacgcttcttgatcctaccaggacttatccttacagatacagagcagctgtactgatggacgagggcaaggaggaggaggcgatcgcggagctgtcaggagccatagctttcaagccggacctccagctgctgcacctccgcgcggcgttcttcgactccatgggcgagcgcgagagcgccctgcgggactgcgaggccgcgctctgcctggacccgacccacggcgacacattggagctgtacagcaaagcctccaccaccaaggccgaaccccagagctaggcagccagccggccggccggccggcaggccgccgctctcctcgtcgtcgattcagctgcggtttttgcgaggcaggatgatgagacgatctcttctctactctcatggggtggaagctgcagatcagtgaggcaggagcaccggaacatgcacatatctcttctaagagtatatacaagagccttagttctgttactgttagagttggacatggggaggcagcaccgcaggagattgagtgcgtgttgccttaagggtagactgcgcaggcgaggtgacaaagagcatgcactgcactgcaccacatatgtgcatcgaaggttgaagacgaccagcacctccggtcagaagagaggaaggagaggcggctggagaaagagagccaggtcagcagggtgttcaaaccgccggcggtaccaacgaatcttcctctttttcttcttttgcttgaatttatgccttgtgacgtgcatctggaggcacgactgattacaaaagaatacgagtttttttaaagtaacgcagcgcgaaagggaagattcttcctgctgcggattgcagtgggtgt

SEQ ID NO: 16496 - DNA, 551 bp, Zea mays
  Clone ID: LIB3066-008-D3_FLI
gcagctgttccgccgagcgaacgacccacaaccagaagccacccattggcgtacgcgaggcgatcggagcatcccgtcccaagaggagaaactccggccggcgacgcgggggaaaatggggaagacgccggtgcggatgaaggcggtggtgtacgcgctgtcgcccttccagcagaaggtgatgccggggctgtggaaggacatcaccaccaagatccaccacaaggtcaccgagaactggatctccgccacgctcctcctcacccccgtcgtcggcacctaccaatacgccatgtggtacaaagagcaggagaagctttcccacagatactaaatgggatgtcctccaagttgctgcggcttgtcgcagttgaattttccatgatgggttgtataatctgtcaatgtcatttctttgctcagttttagttcaacccattttcacctttccatatgcatatacggtatctgtgcctggcaaacatattttgaggctagctaaatatgaaccttttgtctcttaagttgttaaataaagcaaattatctgac

SEQ ID NO: 16497 - DNA, 1376 bp, Zea mays
  Clone ID: LIB3066-008-F6_FLI
tgccttcaaattctgccgtagtagtagttatcgccatctttcttgttgttatcctcggcgccagccacgcggtcaccggcgcccgtgtcggcaccatgatgatccggcagccttcttcgtcgtcctccgtcctgatgttcagggaggcgcccgcgttccggaacggccccgactgcggcgcggacggccgggtggacatcgccatgacgctggacgccaactacctccgcggcaccatggccgcggtgctgtccatcctgcagcacacggcgtgccccgagagcgtagcgttccacttcctcaccgccgacgccgacgccgacggccacggcctctccgccgcgctgcgcgcctcgtttccgttcctcgacctccgggtgtaccgcttcgacccgtcgcgcgtccgcgaccgcatctcgcgctcggtgcgccaggagctggaccagccgctcaactacgcgcgcgtctacctcgccgacacgctgccgcgcgacgtgcgccgcgtcacgtacctcgactccgacgtggtcgtggtggacgacgtccggacgctggcgtccgtggacctcgcgggccacgtggtggcggcgcccgagtactgccacgccaacttcagcaactacttcacggacgccttctggtcgcacccggcgctcaacggcaccttccacgggcgccgcccatgctacttcaacacgggcgtcatggtcatggacgtcgacaagtggcgcgccggcgggtacacgcgccgggtggaggagtggatggccgtgcagaagcggcggcggatctaccacctcggctcgctgccgccgttcctgctcgtcttcgccggccacatccgggcggtggaccaccggtggaaccagcacgggctcggcggcgacaacgtcgagggccgctgccggggtctccatccgggccctatcagcctccttcactggagcggcaagggcaagccgtggctccgcctcgacgcccgccggccgtgctctgtggactacctatgggcgccctacgacctctaccgttactcgtcgccggtgatcgacgagtggtgactggtgagccgtgacgtggtgtgagcatgcaccacctgaggagctactagcaaatggtaggacagttcgatcttgcagaggggaagaggcatcacaatgatgcatgcatgcatggctatctcttgatcttttaatttatataatactgtgcaattcaccctcttaattttgtatatatagatctatagatcctgttgtaaatttgtacagattattattagtatgcatggtggggaggctcatgctgacaaatgtatgtactattgtactgtatatctcgagttcatggtaatacaacacacagattctgcatgc

SEQ ID NO: 16498 - DNA, 1164 bp, Zea mays
  Clone ID: LIB3066-008-G3_FLI
gtcagggctcggcgggcaacacgccagggccaggcaaacagcagcgtagagctgggcctgggcagagcccccgagccgagcagttggtttggtggcgcgcctttactgccgctgccgctcactttcccagggaggggttaattgcctccgcgggcctcgctctcgcgtcgcgtccttcggatgccgcactgaccgccaccaagtcacgcagctcagccgcgcggcgcgatgggcgagaggaggaggcgtgcgagcactgcttccctcgggggtggaggtggaggcggagctggaggtagcggtgttgcgcccgcgcggaacgaggaggacaaggccgcggagcagcctccaccgacgttgtggttcgcgctcaagcggtcgctgcactgccgctccgagctgtcggaggtccacgtgccgcgcgccaacaaggccgccggtcccgtcgtcgcgggcagcggcggcggccacctgtcgtcgttcgtcggcacgctccgccccggcacgccgggccccgcgtgggccggagccgggcacggcctgccgtgcagcggctccgtgcggggcggtgtgcgctgcacgccgccgaggtccccgtgcgtgctgctcgagaggaacggttctgtggtcagcggccaccgcgcgtcctcctgcgaggagaccgcaaaggacggcggcgccggcaagggttccggcgggctcagctgccacaggtgcggcgagcagttcagcaagtgggaggcgctggaggagcaccacctctccaggcatgcagtgacggagctggtggaaggggactcgtcgcggaagatcgtggagatcatctgccggacgagcctgctaaagtcggagagcagctgcgtccggatcgagcgggtgttcaaggtgcacaacacgcagcggacgctgtcccgcttcgaggagtaccgcgaggccgtgaagctgagggcgagcaagctgcccaagaagcacccgcgctgcctcgccgacggcaacgagctgctgcgcttccacggcgccacgctctcgtgcgcgctcggcggcggcggctcttcgtcccgcctctgcgcctccgacaagtgcgccgtgtgccgcatcatccggcacggcttctccggcaggaaggagggcaagaccggcgtgggcgtgttcaccacgtccacc

SEQ ID NO: 16499 - DNA, 1211 bp, Zea mays
  Clone ID: LIB3066-008-H2_FLI
gattcctgtaatggaaaccatgttcgatgcggattcagaaccaaaaaatcgtaagcttcaagaatttgacactaaggcaaatagaaacatgggaatgattgacgaagaatcagatgatgacgatgattatcaagttcctgaagctaatatagaggaagacgtgaacaaatctcatcatgatatcaagcgcacagatgagcctacagaaaaaattgatttatcttgttttttgagtattcttcatcgtgatcccgaggagaaaagtcgcaattgttggacagtacctgatagcaagatcttcaaagttcgtagcaaaaacttcccacaagacaaatcaaagatacctgcagcaagttatctcatggagcttgcagccattgactggtttaaggacaccaaacgtatggataatgttgccaggcagaagggttgtgttgctcaggttgctgctgatcgagggatgcatacatttgttgtcaacatacaaattcctggatcaactcagtacagcttggtcatgtattttgtcacaaataccttgagaaagggatccttactacaacgcttttttgatggcgatgacgaattccgcaatagcagactaaagcttataccatccgtccctaagggctcctggatagtgcgacagagtgttggaagcaccccttgtttgttgggaaaggctgttgattgtagttatgttcgaggtcctgcgtacttggaggtggacgttgacattgggtcttcggcggtagcaaatggagttttgggtattgtgtttggtgtggtgacgacgttagtagttgatatggccttcctaatacaggccaacacatacgaggagctaccagagcaggtgataggcgcagctcggttggctcatgttgaaccggccacagcagtagttcctgatcttagcaacacatcaaacgacagtagcaacagcaacaatgacaacaacaacaacaacaacaacaatgggtcctcagaggatgatttgtccaagaaaacaaactaattttattttaatctagtatcagagtgttgtgttgaacatctctttaattaatcttctagctagtcactcagtggaatccagagagccaataatatatgcttctctttgtaccagctttcttgtttatatattagatccaagtattatatttgtagctagaggcaacaatatgaatagtaaccgtggttatcct

SEQ ID NO: 16500 - DNA, 798 bp, Zea mays
  Clone ID: LIB3066-009-A4_FLI
gaggaaggaatctgctgagagcacaatggtggcctataaggctgctcaggacattgctctggctgagctggcacctacccatccgataaggctgggacttgctcttaatttttcagtgttctattatgagattctgaactccccagacaaagcttgcaacctggcaaagcaggcgtttgatgaagctatctctgagttagacagccttggtgaggagtcatacaaggatagcactctgatcatgcaactcctgagggataacttgaccctttggacatccgacctcacggaggatggtgctgatgagggcaaagatgccccgaaaggcgatgcaggcgagggacagtaatcttcggaggggggtgcaaagttgttcgagccccaatgttttagatgctctgtgctgtcgaagctgtgccgtgctattattgtagctgatttcgtctccattcacttcttttttcttgttagtaggctggtagtggtcgaattagtaccccattgctttgtgttgccgctagtccatgtggactggtattgttcccctggatttatttggcaagcgtgtccgtgctcgctctagcgttttattgagcttttaaagtcatcgcattcttatttgattgcaatcagttattggctggatatgcggtggctgtttggatcagaagtagcgcttgggctctgcagccggagtttcttcaccggagcgtgtaacaatgtggaaattggaaaccacgcaaacgtctcttatttgtacccctgagtatacagggcttgtttggttcggtttttttt

SEQ ID NO: 16501 - DNA, 798 bp, Zea mays; identical to SEQ ID NO: 16500
  Clone ID: LIB3066-009-C10_FLI

SEQ ID NO: 16502 - DNA, 829 bp, Zea mays
  Clone ID: LIB3066-009-C7_FLI
cagaatagtaggagttggatgcgcatgcacttcacgacaaatgagtggcaaacaaatttcaaaaagttcatacaaactacatttggtggcactactagaggagaaactgcaccatgtccatgttcaagatgtcgatgcatgtcctacaaaacacaatctcaggttcagagtcacttggttattagagggtttgatgagagcttcatcgaagaaggaaaccaagcaaacgattcagatgagggcaatgctgcaacagttgtcaatgatgatgaaacaggtgacagtggttctgtgaccgaactagtttcaacgctaatcagtggtgctatacatgaagacatcataggaaatattaatgaagagccaaatgcaaaagcaaaggcattctttaatctattaacagaggcaaagaaggaattgtatccaggttgcaaggaggtcactaaggtatcttttatagtaaggctctttcagattaaatgcatgtttggtcttagtaaaagtgcattagcggttgtacttcagttgttccggcttgttctcccagaaggccactgtgttacggacacattggatacatcttgttgccacgagtcacttgtgtggcaccagtgttttgttgccatgaagcatcttgtggtaacaaagccatttgcaacagattcaaacgtggcattaacacttattaccatgaaatatgttgtggcaatatagtttttggcaactattataaatgttgcaatataacttatttgcaacataatagtccattgtaacaacaaacagttacaacacttgaacacgttgcaaaggatatagtaattgcaac

SEQ ID NO: 16503 - DNA, 1412 bp, Zea mays
  Clone ID: LIB3066-009-E9_FLI
gccggatcttgcgaagccgtgcaagtatcctgcttcgcggaggatttcagtcatccgcctgccgagggccgagctcttccgagtttctgcggagagtgggcaacttttctcggtcccgaatcgatttgcctgctactcgcggtaggcgaagggaaggattcaaatcaacataacatggccgcagccaccgccgccgcttccaccatgtcgctgctcccgatctcccagctcaggcagcagcacggcgcgggcgccatgaggcggcggccctgggtcgcgcggcggaggcgatacgtcgttccgacggcgaggctgttcgggccggcgatcttcgaggcgtcgaagctgaaggtgctgttcctgggcgtggacgacgaggccggcagcaagcagcacgggccgctgccgcggacgtacacgctgacgcacagcgacgtgacggccaggctgacgctcgccgtctcgcacaccatcaaccgcgcgcagctgcagggctggtacaaccgcctgcagcgcgacgaggtggtggccgagtggaagaaggtgcgcggccggatgtcgctgcacgtgcactgccacatctccggcggccacttcctgctcgacctcatcgcgggcctccgctacgtcattttccgcaaggagctccccgtggtgctcaaggcgttcgtgcacggcgacggcgacctgttcagccggcacccggagctggaggaggccacggtgtgggtctacttccactccaacctggctcgcttcaaccgcgtggagtgctggggtccgctccgcgacgccgccgcgcccgccgaggacgactccaccgcgccgcccgacgcctccaactccaaggaggccggccagatgatggccatgtgcgagtggccgcaccggtgtccccagcagtgcgactgctgcttcccgccgcacagcctcatcccctggccgaacgagcacgacatggccgccgcagatgcctccggctccgcccaacagcagtagcgaaactgcacttgtgctgtacctgtacggctgtacgtacggaggagggaccttcgctcctacgcaatgtaagccgtcgtagctagactactagaactagcgtgtttgtttggttgggtagctcgtagctgcaaccgcgcgcgtgcagtagagtggctccaacaccacaacacctgcatgcccggcccgcgctgcctattctttaattggtagcttagcttagctcgttcagctccacttctacaagctcttcgtctttggattggaagtcggggatgaacatggtcttgtacatatagctagaacacttgatctctggatggaaaacctgcacggtacacacatatgttgcaggcaaagtatcatccgaagtattcttgaactggaagtcctagatttgtgtagtggtgtac

SEQ ID NO: 16504 - DNA, 830 bp, Zea mays
  Clone ID: LIB3066-009-F6_FLI
cgccgttgtggatattgatgtgcactacgggaatggcaccgcggagggcttctatcggacagacaccgtgttgacgatgtctcttcacatgatgcatggttcttgggggccatcgcatccgcagagtggctccgtcgatgagattggtgagggcaaggggcttgggtacaatctcaatatacctttgcctaatggaagtggagatgctgggtatgaatatgcgatgaacgagttggttgttccatcgattgataagtttcagcctcaactgttgtttcttgtggtcggccaagattccagtgcgtttgatcccaatggaagacagtgcttgaccatggaaggctacaggaaaattggacaaataatgaggcgcctggctgatcgccattgcaatgggcaaatactggttgtccaggaagggggttaccacatcacttattcggcatattgtctgcatgctacactggaaggagttttggatctggaagccccgctgcttgatgacccaatcgcttattatccggaggatgataaatacactatgaaagtcgttgacatgataaagagctactggaaggaatcggttcctttcctaaaggaaatttagaggaaataatgttcgcgccctcaatgttcaaattgcaggaaactccacattcctggacatcttcaattgaattgggaagaacattgcacgtctacgttttcaggccgtttaagattatctgattgacagtttcacgcctaacattgtacaggatagattaagaacattgtttgctgctgctcttgaatttctgcaatcaggatctcgtcagcctatttttgat

SEQ ID NO: 16505 - DNA, 1191 bp, Zea mays
  Clone ID: LIB3066-009-H5_FLI
cgcggctccgaatggcaacttccccgaaccccgcgacgattcaccgagccggcgcccagtgacccttccagaagcttccagaaggtcaccgccatggccgcgcccttcttttccactcctttccagccctacgtctaccagagccagcaaggatctgtgacggcgtttcagatatccggtggagatgtgcaggtcctgcaggtgatgctgaagtctcaggagaagctgactgcaaaaccaggtgcaatgtgctacatgtctgggaacatgcagatggacaacaattacttgcctgaaaatgatggaggcgtgtggcagtggatttttgggaaacgtgtaagcagcaccattttctttaattctggatctgatgatggatatgtcgggattgctgcaccatttcctgggaggatactgccggtagatctaacaaactttagtggagaacttctttgccaggcagatgcttttctatgttcggtcaatgatgtctccgtctctagtacagttgagccaaggccacggaatattgagattggtgcagagatgatccttaaacaaaaacttaggggccaggggatggcttttcttgttggtggtggatcagtcatgcagaaaatccttgctcctagagaggtgattactgttgatgctgcttgtattgtggctatgtcggccaccattaacttccagttgaagagccctaaccagcttagaagagcagtttttgggggtgataaccagctaacagcatctctcacgggaccaggtgttgttttcattcaaagtctgccattccatcgactctcacagagaatcaccagtagatcagtggcaggcccaagcttgagggacaacccaaagttcttcatccagattgtcatgttcttcttcctggcctatgttatgattgtatcatccataattctgacagatgtttaggcgattcagtgagcttttggtgtattcctagacaagttatcgaagagttaaagctacctccccaatgttaatgtagatgtaagagaacgaatttcacaagctgttgttagaaaccttagccgaaggttcttcaattttttttctctaacagtttggaggggggcgggtttcttggttagggtgtaaagaggaagacagcaaaatcaagttgcacagcgtatggtgaatatacagtaattttcctcctct

SEQ ID NO: 16506 - DNA, 634 bp, Zea mays
  Clone ID: LIB3066-009-H6_FLI
ggctacagccgcaaagacctcggcgtcagctacgttaaggagaagcagctgagggtcaacatggggatcagcaagctgagggagaaggtgaaggagcaccaagagaagttccacagcgcggccaagatcgctggaaccaaccccgtggagtggatggagaatgccgaccgttggatcgtcgggttcctcgagaagttcgaggaaggatgccacatgatggaaaccgccattaaaggtcgaattcaggagggtctgaagaggcaaggcaggtcagagtcgaacctttccggggaggactccgactcgtaataatggtctgtagtatccaaatcaaactagacggaagctggactggaggtcatactcgcgcagtctgtgtaacagtgtgagattgattagcatgtttttgtaggagatcaggaatcataccaggagattatgtgatgttaagaacaatcgtatttatgcatgcaattcgttgttgtttcttgttggaatatgctctgaattaggatttattttcgtattaaactacaaatctatctattgtatatacattttgtaagatgcacggaagagacgacttaggtcctctatgtaagcagcccagttcttaaaaaacagtttttatatt

SEQ ID NO: 16507 - DNA, 1327 bp, Zea mays
  Clone ID: LIB3066-009-H8_FLI
atcattaccatcgccgcgcccgcctgctggctcgccggcgatcgaatttgaccgccggtccgcgagcggagcatacgtgcatacatggtttgcctgacgccggcggcggcggcgctgctgctcgtcgtcgtcctagcggcggccgtgtccgcgctcccggcgatcaacgtgacgacgatggcgttcgaggacgggtacgcgccgctgttcgggcacggcaacatcctccgctccgccgaccaccgcaccgtcagcctcctcctcgaccgttccaccgggtccggtttcatctcgtcgtccatgtaccagcacggcttcttcagcgcgtccatcaagctcccctccgactacaccgccggcgtcgtcgtcgccttctacgcgtccaacggcgacgtgttcgagaagcggcacgacgagctggacttcgagttcctgggcaacatccggggcaagccatggcgggtgcagaccaacgtgtacggcaacggaagcgtgggccggggccgggaggagcggtacgtgctccccttcgaccccaccacggagttccaccgctactccatcctgtggacgcccgccgccgtggccttctacgtggacgacgtgccggtgcgcgaggtgcggcagtcggccgccatgggcggggacttcccctccaagcccatgtccgtgtacgccaccgtgtgggacgcctccacctgggccaccgccgggggccggtaccgcgtcaactaccgctacgggcccttcgtcgcctccttcaccgacctggccctcctcggctgccgcgttgacgggcccatccagcagacgacggcggagcggtgcgccgcagccgccgaggcactcagggcgtcggacgtggccgtcatgacggtggagaagcagcaagccatgcgcaggttccgggagcgcaacatggtctactcctactgctacgacacgctgcgctaccccgccgcgttccccgagtgcgacgtcgtcgagtcggagcgcaggcggttcaaggacaccggacacctccgcttcgcgctgcggcggcggatgagcccgcgacgctcccacggcagggcggccagcagggacagggtcagggagctcaagaagcgcgcggcggacatgtagcattcgtgtagactgtagtagcggtcggcgatggtaatggatattcacgcctgccgctgttaatctattggatacgaatacgatacgcatcgtacagcatcacagttcacaggagtagcggaatggcgagggcgaaaaaaaataccttttgtcttcaacttttaaatttaaagaatatatctagcacataaaagtttagttc

SEQ ID NO: 16508 - DNA, 1009 bp, Zea mays
  Clone ID: LIB3066-010-A1_FLI
ctccaagcgagctagagctagagctatagagatcactctccttctccgcgtgaggtagtgacgtgacgcccagccatggcaacaatggcactgcgcgccgtggcgacggcgctgctggtggcggctgcgtccgtgtgcggcgcgtcggcgtcgacgctggtgctgtacaaccggtgcggggagacggtgtggccgggcatccagccgagcgccgggaaggaggtgctggcgcgcggcgggctgcagctggcgccggggcggtcggcgtcggtgcggctccccgcggggtggtcggggcgcgtgtgggggcggcaggggtgctcgttcgacgcggcggggcgcgggcggtgcgccacgggcgactgcggcggcgcgctctactgcggcggcgccgggggcgcgccgccggccacgctggcggagatcaccctgggcaccgcgccgtcccaggacttctacgacgtgagcctggtggacgggtacaacatccccatcgcgatgacgccggtgcacgggtcgggcgcccggtgcgcggcggccgggtgcgtgagcgacctgaaccgcgtgtgccccgcggggctcgccgtccgcggcgagggccgcgtggtggggtgccgcagcgcctgcgccgcctacggcgcgccgcagtattgctgcacggggcagttcgggagcccccagcagtgcaagcccacggcctactcgcgcctcttcaagtcggcgtgccccaaggcttactcctacgcctacgacgacccgacgtccatcctcacctgctccgccggcgcctcctacgtcgtcaccttctgcccgcaccgccgctgaacttttatttttttaaggtcttcggccgcgtgttgttagttatcctctgcctgcgtttgcgttttgatgttctggcgtgcgttcgtttcacttgcctccgtcacgcgtcttcggaatctccagatcttcctccctaagtatagcaatgcactcggctctactgctgctgcgttttgaaaacctg

SEQ ID NO: 16509 - DNA, 1030 bp, Zea mays
  Clone ID: LIB3066-010-A3_FLI
gggctgaccacagcaaccaacctcctctttcctttccatccatcggaccatcgatcacaattcacacagccctagcccctaggtagtggcatcatggcggtgaaggactgcggcgggcacaagggctgcgagtgcgagcgggagcggctgtaccggcggtgctgcgcggcggtcgtggctctgatcctcctggtcctcttcatcgtgctcgtcgtgtggctggtgctgcgcccccacaagccccggttctacctgcaggacctgtcggtgctgtgcctgaacgtgacgccgccggcgtccacgtacctgttcacgacgatgcaggcgacggtggcggcgcgcaacccgaacgagcgcgtgggcgtgtactacgaccaggcggacgcgtacgcggagtacaagggcgtggcgatcacggtgcccacgcggctgcccgtgcagtaccaggggccccgggacgcgtccgtgtggtccccgttcctgcgcgccccggacggcggcgtgcagctcccgccgcagctggccgtggcgctggcgcaggacgagacggcgggctacgtgctcgtcgacgtccgcgtcgacggctgggtccgctggaaggtcggcaccagctggatctcgggtcactaccacctccgcgtcaactgccccgcgctgctcaccgtcaacgacggcaggggcagctacggcgccaacaccggcggcggcaccggatacttccgcttccagcaggcagcggcctgtgccgtagacgtctagcagtgctctctctctctctctctctgtaccagctagctgtgtttgccaattcgtcgatcgaatcaaaggacgatgcttccttcgtcggtgttcatcactcacgcactagcaggctagcagctatcttctttctgcgactgacgacttttcgtccggttggttggttggttgattgattgatatcactactatatcagctagcttttcgatcgatcgattcgtgtaaaagcaaagcaaagcaaaggaaaggaaatgaaaaaggctatctttt

SEQ ID NO: 16510 - DNA, 416 bp, Zea mays
  Clone ID: LIB3066-010-B3_FLI
ccatcctttagttgccaatttaaaggaacagtagaaggaataccgatttgatggcccaaaataagcagatcattgttgtggtggctctcctttttcttgtggtggcaacatcatcatcagtgtgggttgcagaaggagccgatgacttaaaagtttcttgcgttaaagagtgcacccaaaattttaacactcccgagggcaagaagatctgtgaaacgatgtgtgccaaccctaaaggaaggcctatcgacagagttagagctgattgatcaatgctcatctttatttgtagctagctatcatgcatgcgatgatggccttcttgattattattatttcattcctcatgttgtttgttcttgcatgttttttccaccactaatattgtcctaattgatgcatacaagttgtcactc

SEQ ID NO: 16511 - DNA, 480 bp, Zea mays
  Clone ID: LIB3066-010-B6_FLI
acgcggaatctcgacatcaagctaaacaagaggggcagggtcgagatggagggcggtcagtactgtcgaagaggcacgcttgtcatcgaggcagagatcttcgaggtggcgccatcggtgcgcgtggtggagatgaggaagattggcggtgactcgcccgagttccgagagttctacaggcaggaactgaagccatcgttaggtgacattgtatggtcgtggcagggcagtgattcacctcctgttcccttgctgccgccggcgccgaggcaggcaaccaaccaacgttcatgatttcctctgcataaaaaaatttgcagttgaattttggcacttatggttcactaaaaacatgatgttaaacatattgtcactattaagggtggctggcaaatgatttgtcactgtcatagggacgctgtactagtagcataacatttgtgataatatatcatcacgggcacataatagatatgcccc

SEQ ID NO: 16512 - DNA, 449 bp, Zea mays
  Clone ID: LIB3066-010-D2_FLI
cgcgagtctagaacaataaaggtccagcgaactccaacatagaggatcttcagcacgagattagaaaatacagacatcaggtcgaagagttggagaagcaaattaggatgttcgagccagatccggcggtgttggtgttgacgaatgaagccgagacgtgcgagaaattcctcatggacacactcacccgcgtcgaggagcgtaagaaatatctgtcgtgcaaccagctgggcccgttcgagccgtcacccaccgacatacacgacgtattcggtgtgtcgcagcagcagcagcagcagggggacctgagcgcattcggggccggcgacgtagtatcgtatttcgctggcggaatggcggcgtcggacatcttctccagtccagccatgacggccgggtccggccgcatcgagtcgaaaatcgtctgctcgctgaaagacgacatcggg

SEQ ID NO: 16513 - DNA, 715 bp, Zea mays
  Clone ID: LIB3066-010-D9_FLI
cattctcttcccttccctgagcaaagagaagtagccacaagcatgtctggcatcatcgacaagatccaggagacgctccacatcgggggcgaccacaaggaggagcacgagcacaagaagggcgaggagcaccacaagaagggcgaggagcaccacaagaaggacgacggggagcacaaggagggcatcgtggagaagatcaaggacaagatcaccggcgagcacggcgacaagtccggcgaccacaaggacaaagaccataaggagaagaaagataagaagaagaagaaagagaagaagcacggggaaggccatgaccatggtgatggtgacggccacagcagcagcagcagcgacagcgactgatctcgcctcgccgagcgccgtacgcacaaatgcaccgcgcaggttataatacgagctgtccgccgaacaccatgcgcatatattatacagtactcgccaagattgttgttctgcaatcttcgggataaaaaggttctttttttgttttcgtttgcctgtggttttcatctttgctggatggatctgaagaacgaagtcgatgttggattcacatgtatgcattgcttggaggatactcaccggatatcggtgctgatgtgatgatgaaaaaacagtctcagagatagctagcatgtatgcgctgtttgccatgtaataattaatggtaatgcagaaatcgatctgcttg

SEQ ID NO: 16514 - DNA, 1165 bp, Zea mays
  Clone ID: LIB3066-010-E5_FLI
acgaatatacccatcccattccccacaaggctccgtcccttcggcggcggcggcgatgtctctcccccctggcccggcggacagtggcaccggcaccggagacgactggttcctcgactgcggcatcctcgacgacctgcccgccgcggcctgcggagccttcccgtgggacgcgtccccgtcgtcttccaaccccagtgtggaagtgggcagctatgtaaacgccaatgatgcattcaaggagcccaatgatgtcttcaaggagcctggcagcagtaaacgtttacggtcaggatccagtgatatgccaacatctaaagcttgcagggaaagaatgaggaggaacaagctgaatgacaggtttcttgaactggggtctgcattagaacctgggaagccagtgaaagctgacaaagctgccatcctaagcgatgctactcgcatggttattcagctccgttcagaatcacagcaactgaaggagactaatggcagcctcgaagaaaagattaaagaactaaaggccgagaaggacgagcttcgcgacgagaagcagaaactgaaactggagaaggagagtctagagcaccagatgaagctgatggcatcggctccagcctacatgccccatccgaccctgatgccggcgcctttcgcccaggcgcccctaactccattccatgcccagggccaagctgcagggcagaagctgatgatgcccttcgtcggctacccagggtacccaatgtggcagttcatgccgccttcagaggtcgacacctcgaaggacagcgaggcgtgccctcctgtcgcatgatcaccttgatggggctggtcctgctcacaccatgtggattagccgcaactagttgtcgttgtcgatccattgatggggtataactgatgttcttaggctatctccagcagcctctctatcctattctctatcttactccctattttaaattttactctataaacagtacagtctatagtgtaagacaatgttttgcatgtttatatccacactttgctggagatgggcatggtagtctgttggtgaccaaggaagctgtgatatctgtggcgaggtgccctgctagaggctcctttaatgggtgtacaattttcgtggtggaaagaagaatgttcgttcttgttctcc

SEQ ID NO: 16515 - DNA, 335 bp, Zea mays
  Clone ID: LIB3066-010-H12_FLI
aggggatgtaacaacaacccctgttcgagcaggtagtcgcccaggggatgtaacaacaaccccttcccctggaatgcatgttgatgatgttgctggttccaacttcgttttcagtaataataacaacaaagcgaagaccctcctacctaccctatttgcttgagcggctcttgtccgcgccacaagataccaattgttgcgctgggaatattcagttacgatgacccgctttagttcagttttttttttgggggggttggttcgatcatttggctgtagcgtgaatcgcatggacaacagactccaattactaagcaaatatttttcttctgcat

SEQ ID NO: 16516 - DNA, 902 bp, Zea mays
  Clone ID: LIB3066-010-H3_FLI
ccgtcacgccgatcaagaaccagggcccgtcgtgctctagctgctgggcattcgtgacggcggcgacgatcgagagcatcaccaagatcacgacagggaggctggtgtcgctgtcggagcaggagctgatcgactgcgacccctacgacggcggctgcaacctgggctacttcgtgaacggctacaggtgggtgatccagaacggcgggctcaccaccgaggccaactacccgtaccaggcgcggcggtacgcgtgcagccgctccagggccgcccagcacgccgccaccatctccgactacgtgcagctgccggcgggcgagggccagctgcagcaggcggtggcgcagcagcccgtggccgcggccatcgagatgggcggcagcctgcagttctacagcggcggcgtcttctcggggcagtgcgggaccaggatgaaccacgccatcaccgtcgtcggctacggcgccgactcctcctcgggcctcaagtactggctcgtcaagaactcgtgggggcagagctggggcgagcgcggatacctgcggatgcgccgcgacgtcgggcgcgggggactgtgcggcatcgcgctcgacctcgcgtacccggtcgtgtgattcatatactatcaatcgtatgcatgcatgatgcgtacgtgcgtgcgcgcctgcttgttggttgttgcatatcggcggcacgtacgtgtatatatatatatacgtactactactacggattgatctgcatgcagcgacgtataccacgcatatatacacacgaaaactactacgtgtaatcaatcgatactagtagacatataccaacggtaacgtgttgcatcattgtaaaagctggctatcagggacaaaatgcccacattaattattataaaaggctttgtt

SEQ ID NO: 16517 - DNA, 875 bp, Zea mays
  Clone ID: LIB3066-010-H6_FLI
cctcaactctcctttcctctcgtgggcgatcgactctctcctgcggcggcggcggcgatcaacgtcgacgactacggcccacgattctccttcgaagcgcgaatcatgatacattttgtgctccttatcagcaggcaggggaaggtgaggctgacgaaatggtacactccatacccacagaagcagagatccaagatcatcaaagagattagtacgctcgtcctgacaagaggccccaagctgtgcaattttgtcgactggcaaggttacagagttgtgtacaagaggtatgctagcctttacttctgcatgtgcattgaccccgctgacaatgaactggaaacccttcagatcatccatcactatgttgagatattggaccgctactttggcaatgtctgtgagcttgatctgatattcaattttcataaggcgtactttatattggacgaaattttgattgctggtgagcttcaagaatcaaacaagaaatcggtgctacgtctagtaactacacaggacgctttggtggaagccgcaaaggaggaggcaggctcgttgaggaacataattgcacaggctaccaagtagagcactcgtgtcttctacaatgattactcacacccccacggcatgatagtagcttaatcactaccttacggggcagcagcttttacccctgatttttcctcaatagtttatcccctcttccatctctgcattttgttcagaggtctgttctgttctgtcactctctctctctctatctctcttgttttcccactgtaccacctgtttcgagggaatgtgttgtttctgctcttttgcatgcacaacgttgtatacggaataaaataatgcaatgttttggttcc

SEQ ID NO: 16518 - DNA, 590 bp, Zea mays
  Clone ID: LIB3066-011-C2_FLI
gcaagaagtccgtgaatcgcagagaaagaatgaagaagctatacaactgaaggagcggtatcgggcaacggtcggaaaggagctggaagatatagaaaggagacattgtgatatgacttcaatactgcatgcgctaggcatctcagttgaaggtggtgaggttaaagccttcaagcaagctcttctgaaattccatcccgacagggtatcaaggaatgatatttatcaacaagtaaaagcagaggagacatttaagttcatttcgcggctgaaggagaagctacctcggctatcctaatagccatcccactcttttttccacatgccttggcgcatcctccattcacctgtagggtcaaggtacagaattcagaggatgtttattggcgttatttacaagtaactagggctttagcttgttaaatgtgtttttgtgtgtgtgtgtgtgtgttgggggttgggttgggtaggcattcgtgtcagctatgacatgggatggtaaccacttcgatttgtgatggcgaaatggttgtacatcaccgatggcagaaagatcattttttaagaccatctttattagtttattcgac

SEQ ID NO: 16519 - DNA, 2282 bp, Zea mays
  Clone ID: LIB3066-011-D1_FLI
cgtcgcaaccacggctgatagtttgtacgttgccgtcacgtttgctccagtttcgccatttattttcttatcatataaaaaaagagaacagatgattcccatggagaatatgctctccaaagttacaaccctattttttaaaggatttctatattactgaagaaaattagtttatttatttatggaaaaaatagaaattattaagcaaaatgggtcccaaactatacctggtcactagtgtagctggtaatccgccattccgcgcgagatcagtagggtgcgcgtgctggtgctggctacggccatggcgacgcccaccagcaccgtcacccgcggcggcaacaggcattggcattgtacccaagtgcttccactgctgttgctagtaccactatgcttcgcgcttctggttgagagcggcggcatccccacgacgctggacgggccgtttccgccggccacgcgcgcgttcgaccgcgcgctgcggcagggcagcaacgacgtcccgctcacggatccgcgccttgcgccccgcgtgcagcccccggcgcccgagcagatcgcgctcgccgcctccgccgacgccgactcgctctgggtctcttgggtcacgggccgcgcgcgcgtgggctcctccaacctcgcgccgctcgaccccgccgccgccggcagcgaagtctggtacggcgagcgcagcgccgccgacgccgcatcctatccgcacgtggtcacggggtccgccgaggtgtacagccagctgtacccgtacccgggcctgctcaactacacctctggcgccatccatcacgtccgtctccgcggcctgcgccctgccacgcgctactactaccgctgcggcgacagcagcctccccggcggcctcagcgacgagcactccttcaccaccctgcccgccaccggcgccggatgctacccgcgccgcgtcgctgtggtaggtgaccttggcctcatggggaactccaccgccaccgtcgaccacctcgcccgcaacgacccatccctggtcctcatggttggggacatgacctacgcgaaccagtacctcaccaccggcggcaagggagtcccctgcttctcctgctccttccccaaagctccgattcgggagtcctaccagccaagatgggatggatggggaagattcatggagccgattacatcgaagattccgctgatggtgatagaggggaaccatgagattgaaccgcagggtcacggtggagaggtgaccttcgcgtcttacttggcacggttcgctgttccatccaaggagtctggatccaacaccaaattctactactccttcaacgccggtggcatccattttatcatgctcggtgcctacatcgactacaaccgcacaggagttcagtactcgtggttggaaaaggatttgcagagggttgatcgacgagccaccccttgggtcgtggctgcttggcacccaccttggtataacagctattcctcgcactaccaagaattcgagtgcatgaggcaagaaatggaagaacttttatatgaatatcaggttgacattgttttctcaggacatgtacatgcatacgaaaggatgaaccgagtatttaactacacattggacccctgtggcccgatttacatcggcattggagacggcgggaacattgaaaaaattgacatggatcatgctgatgaccctggaaagtgtccctcaccaagtgataaccaccctgaatttggtgggctctgccatctgaacttcacttctggccctgccaagggcaaattctgctgggaccgacagccagaatggagtgcatacagagagagcagttttggtcatgggattctagaggtcctgaattcaacatatgccttatggacatggcaccgtaaccaggacgcatatgcagagaacagtgtgggagaccagatctacattgtacgacagcctgacaagtgccttctgcagccagctagtgcgtcgtctctcaattggtgatttgatttgatgacaaaatttctgctattatgtattaattaatatatattcatatccattagattctaagttgttcactatcttggttatttgttttagatagccccattggaggatgcccttctctagtgagtagtaacagctccggtgggtccattacaaatggccagctctcctacaaaatgtttgtaattatgtgtgtagctttaatgtgaaagagttaggtggtctgagcagtactcatctcctttttaatataatactttagggttgtttt

SEQ ID NO: 16520 - DNA, 1951 bp, Zea mays
  Clone ID: LIB3066-011-D7_FLI
acgcccccgccaccggccggatcgacagcaccgatcaccctgaccgtctgcgcgcggcggctctcactccggtgacacgcagggcgcgcataggcgagggcctccccccccggcgagggatggtgtggtcggctgggatggcaacaatgcgaggcgcctccgccgccgcgctactggtgctggcgctcgccgccgccgtggcgcgcgcggaggacccctaccacttcttcgagtggaaggtgacgtacgggacgaggaccatcatggggacggcgcagaaggtgatcctcatcaacgacatgttcccgggccctaccatcaactgctcatccaacaacaacatcctcgtcaacgtgttcaacatgctcgaccagccgctcctcttcacctggcacgggatccagcagaggaagaactcgtggcaggacggcatgccgggcaccatgtgcccgatccagcccaacaccaacttcacgtaccactggcagcccaaggaccagatcggcagcttcttctactaccccagcaccggcatgcagcgggcggcgggcgcctacgggctgatcagcgtccacagccgtgacctgatcccggtccccttcgacacgccggccgacgacttcccggtgctcgtgggcgactggtacaccaaggaccacgccgtgctggccaagaacctggacgccggcaaggggatcgggcggccggcggggctggtgatcaacggcaagaacgagaaggacgcgtcgaacccgcccatgtacaacgtggaggccggcaagacgtaccggttccgcgtgtgcaacgtgggcatcaaggcgtccttcaacatccgcatccaggaccacatcatgaagctggtggagatggaggggtcccacaccatgcagaacgactacgactcgctggacctccacatcgggcagtgcctgtcgttcctggtgaccgcggaccagaagcccggcgactacctgctggtggcgtccacccggttcatcaaggagaagagcagcaccacggccgtgatccgctacaagggctccagcgccccgccgccggccaagctgccggagggccccagcgggtgggcgtggtccatcaaccagtgcaggtccttccgctggaacctgacggccagcgcggcgcggcccaacccgcaggggtcgtaccactacggccagatcaacatcacccgcaccatcaagctcgccatgggccgcggcaaggtcgacggcaaggagaggttcgccttcaacggcgtgtcgcacgtggacccggaaacccccgtcaagctcgccgagtacttcaacgccagcgacggcgtgttcaagtacaacctcatcggggacgtgccgccctccaacacggcccccaccaagatggcacccaacgtcatcagcgccgagttccgcacgttcatcgaggtggtcttcgagaaccccgagaagagcatcgacaccatccacatcgacggctacgccttcttcgccgtcggcatggggcccggcaaatggacggcagcgtcgcggagtacgtacaacctcctggacacggtgagccggcacacgatccaggtgtacccaaggtcgtggacggcggtgatgatgacgttcgacaacgcgggcatgtggagcgtccgctccaacatctgggagaggcagtacctcggcgagcagctgtacgtgagcgtcatctcgccggagcggtcgctcagggacgagtacaacatgccggagaccagcctccgctgcggcaaggtcgtcggcctgccgatgccaccgtcctaccgcgccgtctagagcgtcgaccgatcgcgcacggtgctgtacacaactaaaggagagcgagaggggactttttctcgcgtttccttctctagccagccttgtctgtcccctcctcgtttattctctctctctcttttttcgttcgcttccgaggaataataccc

SEQ ID NO: 16521 - DNA, 1035 bp, Zea mays
  Clone ID: LIB3066-011-D8_FLI
caccaacacggcggcgctgagctagccagtgactcgatcttagcgtgctacaatggcggcagctgctagtgccctgctcctcctgctctgctcagccttctgctcccttgcccaccgggcggccggcgtcgactacggctcgtggcagagcgcccacgccacgttctacggcggcggcgacgcgtctggcacgatgggcggcgcgtgcggctacgggaacatgtacagcacggggtacggcaccaacacggcggcgctgagcacggcgctcttcaacgacggcgccgcgtgcgggtcctgctacgagctgcgctgcgacaacgacgggcagtcgtgcctgccgggcaccatcaccgtcacggccaccaacttctgcccgcccaactacggcctccccagcgacgacggcggctggtgcaacccgccgcgcccgcacttcgacatggcccagccggccttcctccagatcgcgcagtaccgcgccggcatcgtgcccgtcgcgtacaggagggtgccgtgcgtgaagaagggcgggatcaggttcaccatcaacggccactcctacttcaacctggtgctggtgaccaacgtggccggcgccggggacgtgcagtccgtgtccatcaagggctccagcaccgggtggcagcccatgtcccgcaactggggccagaactggcagagcaactcgctcctcgacggccagaacctctccttccaggtcaccgccagcgacggccgcaccgtcaccagcaacggcgtcgctccggcgggctggcagttcggccagaccttcgagggcgcccagttctagctactactactccatcgacgagtgtgactgtgagcaagagagaaggagaaaccttcttcgctgtagtaaagaagaggctcccgccattccgaggctgcttattattagcacccgcttaggcatttccttctcttattattaccataggattgagctgtttattttctgcaccagtgattgtagcaatgggttaagcaaaacaaaaacctgcaaggctattt

SEQ ID NO: 16522 - DNA, 886 bp, Zea mays
  Clone ID: LIB3066-011-F1_FLI
ttgcgccactgctcgttatcctcctcttgcattgcattgcaggtcgtagttgagcagcagcaaccactgcacaggatgtcgtggcagacgtacgtcgatgagcacctcatgtgcgagatcgagggccaccacctgagctctgccgccatagtcggccacgacggcgccgtttgggcccagagcaccgcattcccacaggtgataccaatttgcatgatccttgttcgttctagctcttgcatgccgatcagatcaatcacgcggtttccttgtgcgcatatgcatccagttcaagccagaggagatgaccaacatcattaaggacttcgacgagcctgggtttctggccccgatcggcctcttccttggccccaccaagtacatggtcatccaaggcgagcccggcgctgtcatccgcgggaagaaggtactgatgatccgtcgtcgtctatgctcatcatctcccaatataatgcacgtcgatcatctttctctggttcgtttccccagggatctggaggcataactgtgaagaagaccggacaggcgctggtgatcggcatctacgacgagcccatgacccctggacagtgcaacatggtggttgagaggctcggtgactacctcgtagagcaaggcctgtgattgaatgcatccaaacaacgacaccaacgccaacattaattaattagtagtctccatgccctgggattgtgcgtggccgctccgttaaacaccacccatccttcgttcggcattttttcccccttgtttatataattttattgtatcgttttggcaaataattttgtgattcgaccccaaagcaagtttggttgtcttacgatttgtaaacctggaacaatatataatgtgattgaactgc

SEQ ID NO: 16523 - DNA, 1211 bp, Zea mays
  Clone ID: LIB3066-011-G6_FLI
cagaagcggtctctcaagctaggtcgacgtagagctggaatgtgggctccacaattgttgtggtgggaatgatatcggattgtttggagctgtaatgcattttgtatgtttaattattgcttagccatcatttgaacttttctcactgttttcatacgcagctagacttaaatacattggcctctaccttcttaacattttcaatttgattttgacagaactgtcggcactcattccacacctgttatctcattcgcaatgcaagggttcaccttcttattaatgtgtcttcttgccttcatcttttctgtaggtttaattgactatatgattggaaatgggcagcatcccgaagtttttcatttggtacaaaattttaatttggaggacaagtatcctccattttctcttctgaagggatacattcagaaggccaagcagacttttgtggagatgtttaaaaagagtcaaacacacgagtccttgaactgggctataccaaaggaactatggattgcacattatctagctgagcagaaactcactgattctaagcaacgcagtgctatcatggcagaaattaaatatttgatgagtggatatgaaaagaaacaaaggtcagaaaatctctcaacatgggcttcacagcatccgtcaacggaatctaaaaggaggaacaggaagcgcaaggaggaggagcaggagcaccatgaagcacaatacaaccagcagcagcaggaacagaatgaaaacaagttaattcaaggaaagcggcatcagctgcatcaagaagaaaatatggcgcaagtgacacagcagcagcatatgcaaccgacaacaaggccagctactcttaagcttccgacgcctgctattcctctggttctgaatgcagctcagatccaaaactttgcgcgtccagcttacgccgctgtgcctggagttcacaattaccctgcccagccaggttggcctgcagctcaaggaagtccattcgtaccacagttcatgtcaccgcagtatatgggtctgccatttaatccctttggccttcatcctacttgctatcccagacgcagatagcgtagagagttctggcgttccgcgtccatttgctgagtgaaactgtggtgaagcgtacaagttatatgaaacagaccggtatcggttaactggttttgtgttcgtttgttatgctgtctgatggttcc

SEQ ID NO: 16524 - DNA, 1853 bp, Zea mays
  Clone ID: LIB3066-012-D11_FLI
gtcgactgctgctgcgttctgttccgttcggaagatgttcttggagagcttccgggtggagagcccgcgggtgaagtacggcgacggcgagatccagtcggagtaccgctacgacaccaccgaagtcgtcccgccggggaatggcggcggcgcggggtgggtggtgcgcccaaagtccgtcacctacaacttcaagaccagcaccaacgtcccaaagctgggggtgatgctcgtcggatggggcggcaacaacgggacgacgctcacggccggggtgatcgccaacagggaagggatttcgtgggagacgaaagagaaggttcacaaggccaactacttcggctccctgacccaggcttccaccatcagggtcggctcccacaacggggaggaggtctacgcgcctttcaagagcctcgtgcctatggttgaccccaactctatcgtgtttggtggatgggacatcagcaagctgaacatggccgacgccatggccagggccaaggtcctagactttcacctccagaagcagctcaggccctacatggaatccatgctgccactccctggcattttcaacccagacttcgtcgccgcaaaccaaggtgcccgtgctgacaatgtcatcaagggcaccaagaaagagcaggtggagcagatcaagaaggacatcaaggagttcaaggaaaaaaacaaggtggacaaggtagtcgtgctgtggacggcgaacaccgagaggtacagcaacgtggttgcagggcttaacgacaccatggacaagctcctggcttcgttggacaagaacgaagcagagatctcgccatccaccttgtatgcgatagcctgtgtcctcgagggtgtcccgttcgtcaatggaagccctcagaacaccttcgtgcctgggctgatggagcttgccataaaaaagaattcggtgataggaggcgacgacttcaagagtgggcagaccaagatgaagtctgtgttggtcgatttcctcgtcggcgctgggattaagcccacctcaattgcaagctacaaccatctgggaaacaacgacggcatgaatctctctgccccacaagtcttccggtccaaagagatctccaagagcagcgtggtggacgacatggtcgctagcaatcccatcctctacaagcccggcgaacatccggatcacgtaatcgtgatcaagtacatcccctacgtgggtgacagcaagagggctatggacgagtatacctctgagatcttcatgggtggcaagaacaccatcgcgctgcacaacacctgcgaggactcgcttctcgccgcgcccatcatccttgacttggtgctcctagctgagctcagcactcggattcagctcaaggccgaagggcaggataagttccactccttccatcctgtcgccactattctgagctacctcagcaaggctcctcttgtacctcctggcacaccagtggtgaatgctctagccaagcagagggccatgctggaaaacatcttgcgggcctgcattggccttgcccctgagaacaacatgatgcttgagcacaagtgaagagtttcacgtcccttaattaactaccgcaagataggatgaatggaaaaggagggatcaagcgaaggtgtgggaataatcagtgactcctctgagcccaacgaagaaatgtcaggaggctacaggaaggagaagtgtaaggagagaagaccaggcatggatatatcctcttttcgaaggctatctatctattctttttttgtagatttgactcgttttttgtactcatgggacgagattgtgtactggctatatgtccactgtatgcagcatgaaacctttattt

SEQ ID NO: 16525 - DNA, 653 bp, Zea mays
  Clone ID: LIB3066-012-D3_FLI
agaggagaaccagcagcctccaataagagccagccagagaaactaataaaactctcgccgccgccatccgagcgaacaagccaaccgaccccgtccccaaggcaatccgccgccgacgtaccaccaccaccgcaggagcgagatggagatgaagaggatcctcttcgccgtcctcgtcgtcatcgccgcctcggccaccgcagtgctggcctccaccgaggccgccgccgcgggcgccccaactgcctccgagtcgtccgccgaggctcccgctggcgctggcgctggcgctgccgctggcgccgccgcctcggggccctccgccagcagcggcgcgcccgccctcgccgccgcgcccgccgcgctcctcttctccctcctcgcctactacctccactaagcgtgtgcgtgcgtacgtacgcgcgcatggacgacgatggatccgtccaccgttgccattgcagttgcctcgctcgttcttggtgactgttgctgcggtggtcgacttggaagacgtcacctgcaccgctgttcccatatattattgatgtgatctgatatgattatatatgcatggtgacgggtttatgataattccatagacataatttaatttatgtatttgtgtcaagtcgttctgtaatcatgcgatg

SEQ ID NO: 16526 - DNA, 1144 bp, Zea mays
  Clone ID: LIB3066-012-E2_FLI
gcgggttgcgacgcttccattctcctggacgagtcgcccgccggcgacgtcccagagaaggagtcgtccgccaacggcttcaccctggtcgggctcagaaccatcgacatcgccaagtccaccgtagagggcatgtgccccggcaaggtctcgtgcgcagacatcctggccttcgcggcgcgcgacgccgccgtggccgcgggcctcccgagatacgaggtcgcggcggggcgccgcgacggcatgcgctcgaacatggacgacctcccgggcaacttccccgtgccgggccaccacgtgccgcgcctcaccgagctcttcagccagcgggggctctcccaggaggacctcgtcctgctctccggcgcgcactccatcggcggcgcgcactgcttcatgttctccaaccgcatctacaacttctcccaggacgccgacgtcgaccccacgctggacccggagtacgccaagtggctgcgccagatgtgcccgccgcggcagcccggcgacgaccccgagcaagcgcccaaggtgaagttcgacgcgcagacgggggagcggctcgacgtcgcgtactactccgagctgctcgcccgccgcggcctgctcacctcggacaacgccctcatcgaggacccgcagacgagggcgatggtggagaacttcgcccggaacgagccactgtggcagcagaagttttcccaggcgatgcagaaggtcgggatgcttgacgtgctcatcggcgagggcaagggccaggtaaggaagcagtgccgcctggtgaacgggcaggagaaggaggagaagcagcagcagccgcaggaggagcaggaggagcagcagccaccggagctggaggaggaggagcagcagcagccgcatcagccacagcttccatggttcctgcagaggcagcgcccgcccgttcttcttccatggctccggccccatccacggccgcgtcgaccgttccggaaacatccggtggccgacctggttaacggatttttccgtggttttcactgaaggcgagcactatgctcgggacgtagacctccaaaatatgcaatgctacggtacatatcaatggacgtaaaccggtgtatccatgagcttaattaacatgaacaatcctgctttgctt

SEQ ID NO: 16527 - DNA, 1481 bp, Zea mays
  Clone ID: LIB3066-012-E4_FLI
gccaacccgccgcaccttctcgtcctcagcccccgcccccaacctcgaggcggcaccagccgccgaggtcgatgccgcgggcgtgcttgcggatgcagcggaggcggcggcgtcagtgccagcgccgttcccaggggaggtagccgccgcggctgcggactcattcccccctgttgccgcacttcagcacattatcgacgctatccatacctttaccgggctgaactggtgggtgtgcatcgcgctgacaacatttattatccggagcgccacagtcccgttgctcgtgaaccagttgaaggccacgacgaagctaagagcaataaatccagagatggaagtcattaaagaccagatgaatagtatggatccaaaatcagtgcaggagggacaagctaaaatgaaagcgctgttcaaaaaacatggtgttagtccacttactccaatgaaaggactcctgatccaagggccaatattcatgagctttttctttgccatatcaaacatggttgagaaagtaccttcattcaaaggaggtggaacattgtggtttactgacctgacgactccagattctctttacatcttgcctatgttaacaggactgaccttcttggccacagtggagcttaacttgcaagaaggaatggagggaaatcctatggctggtaaaatgaagtacttttctagaggagtagctgttttgacagtcccatttacaatgaactttgccacgttttctgttactggacctcatcaaacatattcaccctgttatatggtcttgttatccggcgaccagctgtgaggaagtggtttgatcttcctgctttggaaaatacgccttcgctcacggcaaagccagtattcaatatgtttggtggatccaaggcaataccagccgcacagtcaccagtagcgatcgcaggagcccagcaatctggtctgggccaacctgatgcttctgctcttggctataaggtcaaaaatcttgagaagaaagtgaaatccaggggtaaatctcggaaacacaggtaaaattttgtgcatctgtgccccagatgagcaatctgtacttccaccatcggaatgatggatacttgatttgtcctgatatgccccccaaaaatcagattttgtattaggaacctatcttttcgtcgtttttggctgcttttgttttgatttttcaggggggaggggtgaaataagccacataaatgtttgacttagtaccagagttgattatacacaaaatgtatttcagtaacttgtgatagttaaaacattgggggtcatcttccaaggattggtatgaaagctacgttgaagttcagggacaatcaacttttgaggcaccattcgacattctgtagcaattaggttcaaagtgagctgggcagaattttgtggcctgaatgaatattgagtttgtatgtactaaactatcttagaataccatttgggggcctgtttgggcc

SEQ ID NO: 16528 - DNA, 1388 bp, Zea mays
  Clone ID: LIB3066-012-E8_FLI
gtttagcaccaggcaaaccaaacactaggccaacgcaattctctagagcactgtaggctctagttctccagaggcccgccacaaccacaagccaaggccacagccagtgccctcgccatggctcccaacctcagcaagaagacgcctgctggcctcctcggcgacgaggtggccccggtggagggactcaagccgtcgcggttcacccttaagggcaaggacctggccgtggacgggcacccggtcctgctggacgtgccggccaacatccgtctcaccccggcgtcgacgctcgtgcccgccgcggacgtccccgcagcgggcggcggcagcttcctcggcttcgacgcggcggcggccgagagccggcacgtggtgcccgtcggaaagctccgtgacattcggttcatgagcatcttccgtttcaaggtgtggtggacgacgcactgggtgggggacagcggcagggacgtggagaacgagacgcagatgatggtgctcgaccgctccgccggcgagcccgtcggcggcggccgaccctacgtgctgctgctccccatcatcgagggctcgttccgggcctgcctcgaggccgggaaggtggaagactacgtggacctgtgcgtggagagcgggtcgtcggcggtgcgcggcgccgcgttccggagctcgctgtacctgcacgcgggcgacgacccgttcgagctcgtcgcggacgccgtcagggtggtccgcgcgcacctgggcacgttccggaccatggaggagaagacgccgccgccgatcgtggacaagttcgggtggtgcacgtgggacgccttctacctcaaggtgcacccggagggcgtctgggagggcgtgcgccgcctggcggagggcggctgcccgccggggctggtgctcatcgacgacggctggcagtccatctgccacgacgaggacgacccgaacagcggcgaggagggcatgaaccgcacctccgccggcgagcagatgccctgccgcctcatcaagttccaggagaaccacaagttcagggagtacaagcagggcgggatgggcgcgttcgtgcgggagatgaaggcggcgttccccaccgtggagcaggtgtacgtgtggcacgcgctgtgcgggtactggggcggcctccgccccggcgcgcccggcctgccgcccgccaaggtggtggcgcccaagctctcccccggcctgcagcgcaccatggaggacctcgccgtcgacaagatcgtcaacaacggtgtcggcctcgtcgaccccaagcgcgcgcacgagctctacgatggtttgcactcccacctccaggcctccggcatcgacggcgtcaaggtcgacgtcattcacttgctggagatgctgtccgaggagta

SEQ ID NO: 16529 - DNA, 704 bp, Zea mays
  Clone ID: LIB3066-012-H6_FLI
ggaaggatggcgtcggagccggtggcgcgggcggtggcggaggaggtggcgcgctggggcgcgatgcgccagaccggggtcagcctgcgctacatgatggagtttggggcgcgccccacggagcggaccctccttctcgccgcgcagttcctgcacaaggagctccccatccgcatcgcgcgacgggcgctcgacctcgactcgctccccttcggcctctccaccaagcccgccatcctcaaggtgaaagattggtatgtggagtcattccgtgaaatccggtcctttccagaggtgaggaaccagaaagatgagctcgccttcacccagatgatcaaaatgatcagggtacgacacaccaatgtggtgcctgcgattgcattgggtgtgcagcagctgaagaaggacttgggcggtccaaaggcgttcccccctggaatccatgagatccatcagtttcttgaccgcttctacatgtcaaggattgggatccggatgctgataggttagcattcccgtctctctcgtgtccagttcttagaaaggtgtttggtcagtcttggtaagattagcacttttggtattaacacactgttgataaaaaagcaatatgtctacatccctaattcagcttatctgttatctatgaaagtttgtcttgctgctactgctttctttcttgcccaaagaagaacatctgagcc

SEQ ID NO: 16530 - DNA, 1983 bp, Zea mays
  Clone ID: LIB3066-012-H9_FLI
gtcccgtccgtccgtgcgtccgtccgaccatccgtccgtccgcagcaatggtcggcggcatgtcaccgccgcggcggacgctgtcgatggggagcggcggcgccatgggacgccgcgcggcctctgccggcgtgatgggcgacagccccaagcgcgggctgtcccgatcgatgaccatgggcggcgagcgcacggtgaagcggctgcggctgtcccgggcgctgacggtccccgagagcaccaccgtgctggaggtgtgccgccggatggccgcgcggagggccgacgccgcgctgctcacggactcgaacgcgctgctctgcggcatcctcaccgacaaggacatcgctacgagggtgatcgcgcgcgagctcaagatcgacgagacgccggtgtggaaggtgatgacgaggcaccccatcttcgtcctctcggatacgctcgccgtcgaggcgctgcagaagatggttcaaggcaagttcaggcacctgccggtggtggataacggcgaggtggtggccatgctggacatcgccaagtgcctctacgacgccatctcccggatggagagggcgtccgagaaggggaaggcggcgatcgccaacgtcgcggctggcgacgacaagtactccatcgtcgaagctctcaaggagcaaatgttcaggccctgcttgtctgccattattggcgaagactcaacagtcgtcatggtgtcgcctggtgattccgtccttgcagctaccaagaggatggtggaagcgcatgcgacctcagccgtagtggccgtggggagcaagccgcaaggcatcctgacttcaagggatatcttgatgcgcctggtcgctaagaacctgtcagcggacgcgactccggtagagaaggtcatgacccctgaccctgaatttgccacggtcgacatgcctatactggacgccctacggaccatgcaggagcgcaagttcttgcatcttccagtgatggacagagacggctcaatcatttcaatcatcgacgtcattgacatcgcacatgccgcgatctccattgtggagagcagtggcggcggcggcgacggcagcgcggggagcgacgaggcggcatcgtccatgttccagaggttctgggactccgccatggccttgggccccctggacgacgagacggacacccagtcccagatgagcgaggcgtcgaggtcgcagatgatgatgtccgatgtccaccaccaccaccaccaccacgactccgcgggcggcggcagcgaggcggggttctcgctgtcgtccttctccttcaagctccaggacaggcgagggcggatgcaccgcttcagctgtgaggttcagagcttgacgcctctggtgacctgcatcctgcggaggctcggcgccgacatcgaccctgaccgcctaccgcaaatcctgtacgaagacgaggaccgggacaaggtggtgctcgcgtcggacgacgacctcgcggcggcggtggaacacgccaggctcgccggatggaagggtctgaagctgttcctggactactccggcaccaccgggcgcaggaaagcggtggccaccccacgtggcgccatggcggtgggcatgtccagccgggacgcgtgggcggcggcgtacagcggggtcgccgccggggctgccctcgtcactggcatcggcgtcatggcgtacctgcgaagatctgcctagctagtgtggtggcgcggcggcgcggcgcgcatattcgccaatgcaagagcaaggggttcctgtcctgccttcgaatcaccacagaggtgctagtatgtgtggattacgtacccaaccggtgtatgtgtgtattcttttctacacgaacatgtaccagggcacaagttttccattaagaagaaatgggtggaccaaacaaatccttcagaccgaagcgagctaggtcgaggaaacccggcgttcggcattgatagcgattatataccgatattgtttgatt

SEQ ID NO: 16531 - DNA, 588 bp, Zea mays
  Clone ID: LIB3066-013-B1_FLI
ggggtgcgcgacgttctgggtcggggaggaaggggaggccccgcggcgggtggcggtgcccgtggcgcgcctgggccacccgcgaatgctggagctgctcggggaggccagggaggagtacggcttcgcgcaccagggcgccgtcgtcgtcccgtgcgccgtcgagcggttcatgcgggcggtggaggcctcggcgtcggcggggaacaggcacgagcaccaccgccacggacaccatcaccaccactttcgcctgcctcatattcacatcgcccggtgctttagaccgtcgcacgtcgttgcttaggattcacgtcgagcgcgcgcgagtagcaaaaaaatttcattttcctttttgtttggaagtggcaagatttctgtttttttttcttcttgtataatcaggtgaattttggtttcgtgatccatctgtggtgaagcggttcgcccacagatcacgagttgagcaccacccgcgctaagaatgttgcgcccgttatcatcagtttttttaaacgattgatgtatacttcgtatgtcctgaaatgtaaaagatgtcaataaatctaatattaaatatttttaaaa

SEQ ID NO: 16532 - DNA, 698 bp, Zea mays
  Clone ID: LIB3066-013-C5_FLI
gcggcagagagcgctccgccgcacctgctcctgatatgcttcccggggcagggccacgtgaacccgatgctccgcctggccaagcgcatcgcggccaagggcctcctggtgaccttctcctcgatctccagagtcggggcgatgctcgccgcgtccgtgggcgtgtcggccggcggtgacggcgtgcctgtgggccggggccgcgtccggttcgagttcatggacgatgaagaccccgggcctgacctggacgacctcttgcggcacctcgcgaaggacggcccgccggcgtttgccgagctgctggagcggcaggcggacgccgggcggcctgtggcgtgcgtggtggtaaacccgttcatgccgtgggcggtcgacgtggccgccgacgcggggatcccttcggcggtgctgtgggtgcagtcgtgcgcggtgttctccctctactaccaccacgtgcacggcctcgtggagttccctcccgaggacgacctggacgcgcggttcacgctgcctggcctccccgagatgtccgtcgccgacgttccgtcgttcctgctcccgtccaacccgtacaagctgctggtggacgcgatcatcgcccagttccacaccatcgaccgcgcgtcgtgggtgctcgtcaactccttcacggagctggaacccgacgtggcggcggcgctcccgggcgtgacgcc

SEQ ID NO: 16533 - DNA, 624 bp, Zea mays
  Clone ID: LIB3066-013-C9_FLI
cttgtattctagcagcaaagcaaagaggatcggatcagaagaaaagaatagttaggtcccggtggtcgatcgaacgaagctgctgctgctaccggccggccgggcatgacgatgacacggacgatgtgcctaggcctgctgcttctactactggcggcggcgtcgacagcgacggcgcatttcacggtcggcgatgtggatgagtacgtgtccaagcgcacgcaggagtcccgccacaggaacaacggtggcgcgggcatcgatgacctcatctccagtgcggcgcgcttccacgccaacgtggatgcacgcgcctatggccgtagatccgacctgcaggaggaggcaacagctaccgtaataaccaaagcggaagcacaagaggcttcagctgaaggtggcgattaacctacctaaccatattatttattcattcatatgcatgcatccttgttgctatgccagccattcttctatcttcttctattttaagcatccatgctggatttcccctatatattaagcattcactatatgcatgcatgtgtaagcaatcgaccatatattttataatatgtatacggtgtattatcaataattgttctacgttttcttgtttgtagc

SEQ ID NO: 16534 - DNA, 1524 bp, Zea mays
  Clone ID: LIB3066-013-F11_FLI
ccatgacgcaggaaaagacggtggtgctgtacccctccctgggcgttggccatctgaaccccatggcgcagctggccaaggccatcctccgccacggcagcgtcgccgttaccatcgccgtcgtcgacccgcccgagaagcacgccgtgctagctgctgcgctggcccgcctggcagcggtcagtccctccatcacggtccacctcctccccatcccgccctgcgccaccagcaagcagcattcccaccccatcatgcccatcctggatgcgctccgcgccgcgaaccccgcgctccgggcgttccttgccgcgcgagtccctgccgtcgccgccctcgtggtcgacatgttctgcaccgacgcgctcgacgtcgccgcggagctcgcgatccccgcgcacttcttctacccgtccgcggccggcgacctcgcggtctacctccaggttccagatctctgccgcgccgcgccgtccccgctaagggacatgggcaaggcggcgctgaacttcgccggcgtgccggcggtccgcgctctcgacatgcccgacaccatgcacgactgggagagcgacgtgggcagcgtacggctgcggcagctcgcccggatgccggaggccgcgggcattctggtgaacagcttcgagtggctggagtcgagggcgctggaagcgctacgtggcggccactgcctgcccggccgctcgacgccgaaaatctactgcgtcgggccgctggtcgacggtggcggcagtggcaccgaggggaacggcgagaggcacgcgtgcctcgcgtggatggacgggcagcccaagcagagcgtggtgttcctctgcttcggaagcctgggcgccttctcggcggcgcagctgaaggagacggcgcgcgggctagagcgttcaggacacaggttcttgtgggccgtgcgaagtccaagcgaggatcaggactctggcgagcctgatctggaggcgttgcttccggatgggttcttggagagaaccagaggcagaggactggttctgaagaactgggcgccccagacacaggtgctgcggcacgaggccgtgggtgcctttgtaactcactgcggctggaactcggtgctggaggcggccatgtccggcgtgccgatgatctgctggccgctgtacgcggagcagaggctgaataaggtgcacgtggtggaggagatgaaggttggggtggtgatggaaggctacgacgaggagttggtgacggctgacgaggtggaggccaaggtacgactagtgatggagtcggaggaagggaagaagctcagggagaggacagcgatggcgaaggaaatggctgctgatgccatcaaacaaggcgggtcgtcttacgtcgaacttggtgagtttttgaagggtttaggacgcaagtgatggatagctatgcgtatgaatgataataatctgtctgtatatcagtataagatgaatgcttaacgcagtctggaagataagtattatatggctacttatcattattattgttaac

SEQ ID NO: 16535 - DNA, 1152 bp, Zea mays
  Clone ID: LIB3066-013-H8_FLI
tgcagcgcgcgagcgcgttcgttcggcatggaacagaacgacggctcgttcctcgccgtgcgacgcctctccggcggcgccatccaccaccatcgccaccactcttcgccggctgaggtcgtgggcgtgtccacggcgtggatcgggaaggggcttacgtcgtgcgtgtgcgcgcaggggacggagagcgacgggcgcctctccttcgatttgagtcccattcaggaagagtgcttgcataggttgcagaaccggatagaggtgcagtatgatggttcaaatctagagcatcagaaagcactggtggccctttggcatgcttcttttcctggaactgaacttctaggattagtatcagaccagtggaaggagatgggatggcaagggaaagatccatctacagatttcaggggtggtggttttatatctttggagaatttactgtatttctctaagaaatatccaaaatccttccatgagctccttcgtaagcagaatggtgatagagcattgtgggaatacccctttgctgtagctggtgtaaatattacattcatgctaattcagatgcttgatcttcaagcagctaagccaacgtcattggttggagcagttttcctaaatctactcttagaaaatgatcgagcgtttgacattctttactgcataaccttcaaactgatggatcagaaatggcttgaaatgcacgccagttacatggatttcaatgtggttattaaatctacacggcgccagctcgagagggagctgttgctagaagacatccagaggatccaggacatgccatcatacatgcttctcacctgctagcaattgaacttggtcatacctaacattgcagcaaggtagtgcatctccatacactcgaagaagttgcgacgttggaaccacgtataccgagctcagtatggggggcgtgggcgatctaggttcatggactgtggatgtgctgctttaaattgtcgtgtttacctacttgacaacgaccttaacaccgaatgccttttcgtttggacgatgcgctgcatcttggagctaactttcgttgtaaacaggactacaggaggatcgtggaaacttgtctgaatatgatttgtagccatgtgtatgcataatcttgccgctttactg

SEQ ID NO: 16536 - DNA, 789 bp, Zea mays
  Clone ID: LIB3066-013-H9_FLI
ggggacaggatgccccgcagcggcatttcggggaccctcaggtcgccccagatcgacgtggtcatcgacacggggaaccccttcctgaaccgcaccgtcgacggcttcctcaagatcggcgctgtcggcgcctgcaaggtggcggccgaggagaccttcgactgcctccacaggggggatgtttcaaagcgcaaggttgagcatgccctgaagaagatgtgcaaggagggcgcatattgggggactgttgctggcgtctacgtgggcgtggtgtatggcgtggagagggtccgtgggcgcagtgactggaagaacgcgatggtcggaggcgccttgtccggcgcgctggtctccgccgccagcagcaaccacggagacaagatcgtcaaggacgccatcaccgccggcgccgtcgcaacggccgtcgagttcgccaactacctcacctagctgagcaaactgcatctgcagcgccgctgttcataagccagcgtcttcaggcttcgtttcttctgacaggcaggcagcagtttcgctttgcgtgagtgtctcctgaatccgttgcctctgcggttcgcaaatgcagccgtggggttggagctggagccgtagctacggacaaacaaaaatcacattacgcaattgtttcagacctgataagacactgcctgcaatttgccaaaacttggtttcggagttccaaaataaacttgtaatgttagccacggtgtataaggccttttgtattgccatttttttattatgttttgcttcctcctcttttttatg

SEQ ID NO: 16537 - DNA, 647 bp, Zea mays
  Clone ID: LIB3066-014-A12_FLI
gcggggagtgggtggacgtgccgcccatgcgccacgccatcgtcgccaacgtcggcgaccagctggaggtcatcaccaacgggcggtacaagagcgtcatgcaccgcgtgctcacgcgccccgacggcaaccgcatgtccgtcgcgtccttctacaacccgggcgccgacgccgtcatcttcccggcccccgcgcttgtcggcgccgccgaggaggaccgcgccgaggccgcctacccgagcttcgtgttcgaggactacatgaacctgtacgtgcgccacaagttcgaggccaaggagccccggttcgaggccatgaagtcggccatcgccaccgcgtgagcaaatactgacttccgctgccggcttccttcgtggcgtcaagccttgaggcttgaacgaacaacgtacgtccatgtgcttatagtggcacagttatgtgtgtaactaccgatcgtggaacggcctaatgtatttcggttgcctcagatctatatgtgcgtatacattgtgtactgaaaagtgtgtagcgtctggttaatgtatgagcagtgtgtatgtgaccaggacccggtgtgtagttgctattactgccatatccggtgaatgatcaaaccttttggtgtattaaaactagatgttcatccc

SEQ ID NO: 16538 - DNA, 503 bp, Zea mays
  Clone ID: LIB3066-014-A3_FLI
cgtcaacccgcaggggcacgcgtggtggcacgtgcttatgggcctcaactcgtactatgcaaacacgttcctgatgttctgccgggctcagcagcgcgggtgggagccgcgcatcacgcacctccttggattcttgccgtatgtcaaggtccagaaaccagagaagagggaatgatttctgtctctgtttgaaaactgatgatattcagtcggccaccagtaagctaatgcccccaatgtgtgctcagacaagtccgtggcagtcttgtatatgggcgcccaaatgattacggacttcaaatgttctgatgtcgcattagattttgtatcatacttaaatcatcgaacagagattgtcctagttttggccacctttcttttggtttcttcgcaattgccgtttggtggtaaattaggactgagttatttatttatttatttgtttgtcgttgaatggagtccagttgtactagttaccactgcacaagaagatacattcatcc

SEQ ID NO: 16539 - DNA, 1288 bp, Zea mays
  Clone ID: LIB3066-014-A4_FLI
gtctagaaacactagtgcttccaaaattgcaagcaaatcttcctttggtggtagtgcccctttgaagaatggtgaatttcagaagatgttggaaatggaatcacagaaaactatagtggtaaattgccctgatgtgagcatccctgtagtggaagagacaaaaccactcatatgcggaatcactgaattggatgatggccttttcaaggacaagcaactttccactaaggagattgcaacgtatggattgtatctttgccccttatggtttgtgacagagtatttatcgaatgcagcgcttgcaagaactagtgttgccagtaccacagtgctgtcttcaacttcaggactcttcactcttttcattggtgttttacttggccaagactccataaatgctgcgaaagttattgctgttttcattagcatggctggcgttgtaatgacaactatgggccagacttgggcatctgatgaatcagaagcaggcaaatctggttttacacagaggactcttctaggtgatatgtttggtcttatgtcagcaatcgcctatggtctatttactgtgctgcttaaaaaattttgtggagaggaaggagaaaaggttgatgtccaaaaactgtttggttatcttgggctttttacccttgttgctctatggtggattgtctggccattaaccgcactaggcgttgagccaaagttttcaatgccccactcagctaaagtggatgaagtggtggtggcaaatagcctaatcggaagtgtattatcagactacttctgggctctttctgttgtttggactactcccttggtggccactctaggcatgtctctcacaattccaatagcaatggttgctgatatgatcattcacggccgtcactattcagcagtatatattcttggttctgtccaggtattttcaggctttgttatcgcgaaccttgcagatcgcttttctcgttctctagggctatcatagtctcataaaacagaacaggcccttattagagcgtgcatcaggaagctccaaggtcgggttggttaggccaatacttcagaaaacctggatcgggagataccaggaattattttccctttgcttctttaaacatagtggaggtgaattttgccgtggtgaatagtgaaagtcagcagacgaaagaagaaaacatatgttatagcaaccctttgcaactgtaaattctcttaatacaaattgcgcgacagtgtagactgcggccgttctcggcccatgtcaacaggcttgcacgatttc

SEQ ID NO: 16540 - DNA, 1028 bp, Zea mays
  Clone ID: LIB3066-014-B1_FLI
ctggcgagggctcctccgccgcggccgtgctccagcggcgtttgcatcgcccgcgcacatccaagagccgccgccgtcgcggccaggccggggacgacgaggacgacgacgacggtcgcggcggcggcggcagaggccgcttctaacgggtcagcggcggcggccgtcgcagggatcagcagcagcagcagcgcgctggtgacctcgaccgtcgggaaatcgacgaacatcctgtggcatgagtgcgccatcgggcagaaggagcgacagggtctgctgaaccagaagggctgcgtcgtgtggatcactggcctaagcggttcagggaaaagcacgctcgcgtgcgcgctgagccgcgagctgcacggcagaggccacctcacgtacgtcctcgacggcgacaacctcaggcacgggctgaacagggacctcagcttcggagcagaggaccgcgccgagaacatccgcagagtaggggaagtagcgaagctgttcgccgacgctggcctcgtctgcatcgccagcctcatatcgccctacagaagcgaccgaagcgcgtgtcgcgatctgctgcccaagcactcgtttatcgaggtgttcctggacgtgccgcttcaagtgtgcgaagccagggaccccaaaggcctctacaagctcgcacgcgccggcaaaatcaaagggttcaccggcatcgacgatccttacgaaccgccgtcggactgtgagatagtgatccagtgtaaagtcggcgactgcccttcgcctgaatcgatggctggtcacgttgtgtcgtaccttgagacgaatggtttcctccaggactagacatggaatgcgatcgatgcgtctgatgtgtatatatgtagcagcagccggagcggcattgccaaggctgtgtaatctcatggctgtctttctctttaagaccaaaacaaacaagagatggcagtgtaaaaaggaaaaaaaaactgcgtctgacagagtcgctgaatcaaccatgcttctgataaaagctattgtttgtaggt

SEQ ID NO: 16541 - DNA, 1552 bp, Zea mays
  Clone ID: LIB3066-014-B11_FLI
gtgctcggcacccggtatccctgctcctcttccttggcggccgagcggggctccctctgacgactccgcgcttcctctggtgcacggccgcttctattgccgtcgtctggggcttctgctgcgttaccatgggccaaacagcgaggaaaatgccgagagagagaggtagagacagtttggtcgtcgagtcacatggagggtgccctggtggccggggaatccttcacctgcggagtgctacattgccgggctgctgcatcgtggtctgcctctactaccagggctgactccattgccggacagccaaaactctcggtcgagtctctgaaggccgtctgtccctgttccttccgcagcgaggtcacgagtcacccgaagaccaatttggtgaggtacctggaatctcaagtgccagacaagttgtgcccttgatcacttctttttacccactcatgttctaattaatcataatgatctgcataggttaattttgatgggacccaataggttaccctagtttgcctatctttataccttgtttaccactgaactttttgggtagtacttgctagtgctttatgtggttttgggtatgaagatacaatgttcatgattatacttttgttatccgttgttatttatcgttcatgataagatcattatgttaattggaacatggagcgaccacccgggaaaacagtgctaccacaagggtataatgggacgcccttggctgattaattaggaaagctagtggaggactaccttacccgaaaggggcaagggcagtaggggagtggtcagtgtagggaggccctcgggaggattttgctgcgatggcggtcctgcaagggattcctgcattggagcttcctataaactgtagcgagttttctgaagctagtggaactttgtaaaggcctcgtagtgttaccctgcctcgcctcctcggtagaggtgtatgggaagtcgcgatcccttggcagatgggtaacatgacttgtgggtaaagggtacaacctctgcagagtgtaaaactggtatactagccgtgctcacggtcatgagcagctcggaccctcacatgattaatttatggaactaaattcaatttgccatatgcattgcatcgcaggtgatgttgttacttttgttctactatttaattgggttggtatttacttgtacttagtaactgctaataaaattttgaccaactttaaaagcaatgctcagctctaaccatcctctttggtaagccttacacttcatgtgagctcccacctttggcgagttcattcacattattccccacaacttgttgagcgatgaacgtatgtgagctcactcttgctgtctcacaccccccacaggtcaagaacaggtaccacaggatgaggcgcatggaggatgctgtgatgagttcgtgagtggtctaggccgtcgtctcccagtcaactttgggttgctggaccgttgtctccttataacgtaattgtttatttattttgtatagaactcctgttatatataaagatgtgacattcgatcc

SEQ ID NO: 16542 - DNA, 1735 bp, Zea mays
  Clone ID: LIB3066-014-D5_FLI
ctctttctctctcgcacgagccgcgccggcgccgccaccacgcgcgcgggagacagagaccacagccgcagccaccgacgggcggaataggaatggtggcgccggggggaggagcaggaggaggtccgttgcggtggccggcggcggaggaggaaggatgcgtgcatattagtttccgatgaccccacctgatcatgtacctagctgaacaaatgggactggaactgatcttgtcaaagttgcatgatctcaaatgggaaaccccatcttgacactgtacggaagaaggtggtggagattagtggaagggatgaacaagaggttatggttgctgcttgcccctacagaatttgccctttgggggctcatattgatcatcagggtggagtagtcacagctatgaccataaattatggagtactccttggtttcgttccctctaatggttctgaggttttacttcattctggtcagtttgaaggtgctataagattcagagttgatgacttgcaaaagcctattgataaacctgagaacataaactggggaagttatgcaaaaggtgctgttagtgcactgcagaatagtggatatgatctaaggaagggtatcataggatatatttctggtgtgaaaggtcttgatagttcagggctcagttcttctgcggcggttggcatcgcctacttgctggctttagaacatgtaaatgatctggttatatcaccagtagataacattcagttagacaagtacattgaaaataaatacttgggtctcgaaaatggcattctagatccatctgccattttgctttcacggtatggctatctcaccttcatggactgcaagactgcttcaccttcctacgtctgcttctcggagctgaataaaagccaacagcctcagggacagctaccattcaagattttgttggcattttcaggactccaacataatctgccaaagaagcgtggatataatacacgagtttctgagtgcaaagaggctgcccgtgctcttttgcatgcttcaggctgtgaagatacaccaaatatactttgcaatgttgacccagttgtatatgagacccagaagtgtgtattggaagaaaatctttccaggagagctgaacactacttttttgaaatgaagcgggttacaaagggcagggatgcatgggctcatgggaacctacaagaacttggacagctgatctctgaatctggtcgcagctccatactcaactacgaatgtgggagcaaagagatgatccagctgtacgagatcctgctgaaggcccccggcgccctcggcgcccggttcagcggcgccggcttcaggggctgctgcctggccatcgtggagagcgaccgcgcggaggatgcggctgcatacgtccgtgccgagtacgaaaaggcccagcccgagctggtctccaggatccccgcggatcgccgtgttctggtctgcgagcccggggactccgcgcgcgtcatattgcctgatcctcacctgagctcctgatgccatttcgtggcccggacagacggaatgatgactctactagtccattcgctgcgtttggattcgtttttagttaagccccttttgagcatcggatattttcctttcctttattgtttctaataaaaataaattaatttctgtaaactttatataaggttctagcttttttagataaaagtatataatatctatctacttctctact

SEQ ID NO: 16543 - DNA, 490 bp, Zea mays
  Clone ID: LIB3066-014-E3_FLI
gggagaaaccgccggcggccgtcggcggtttcacggacacgtctacggcgcccgagaccgggctcgcagatgtctgcagcggcggcgtgaaggagcttgtgccggacccgggccacttcgagtggccgtcgggctgcgatctggggtcctactggggcaccagcgtgttcgccgacaccgacccggcgctgttcctgaacctgccgtgagccgtgacaacgccacggcgtccatgctcaactaatcaaccatcacacgacccacgagatagatgagatgtgaaccgagcacgctgagcgtcaagctcttgaaggcttgaagctgtgctgtagtttcctgagcttactagcgatctctgcttgtctctgatctgataatctcttactagtcgccgtttgtgctccgatctagtaacggctaacatggtcggctgttacaagtgcatgaacctgtgcttgatcttgagctaaatcatggtgtttttgaggct

SEQ ID NO: 16544 - DNA, 664 bp, Zea mays
  Clone ID: LIB3066-014-F2_FLI
tgctatgctacagcaacatataacccatagagataattcagtagatctagtagtttaactccataattgttggatttcaatacattcaggttcttgctaatttgatcggttttaaatgtttgatggaatcggttggactgtggaccgaggccggcgaatcaatcaagaacgccatctcctaggttagggtgtgttggacctgccatgggggacaggccggcgccgatcgagaaggtcgcggtgccggagaagatggccttgttcctccacgccgccgtcacgtcaccgggacaccagcagcagcacggcgcctcgtcgcacgaggcgcccgccgcgaacatcacgccgcggacaacagccaggaataagcagcagcacctgccggtgagccccggggcgtgcctctgctcgccgaccgttcacgagggctcgttccggtgcaggctccaccgcggcagcggcagcggctccggcctccacgagatgaagatgagcaagaaggccggcgtatgacgacgcgacgcagcgggcggcgacaagcgttcgtactacgccttaccgcaaatgcacaggtgcctttgcctgcatttcggcctctgtttttgtcccctcatttgttttcgctgcatacagtaatacagaaggggaagagtacctttttttt

SEQ ID NO: 16545 - DNA, 1695 bp, Zea mays
  Clone ID: LIB3066-014-H6_FLI
gcgcgcctaggggcggaaggccgccgtgccggttcttcccagctgcagcaaccggccagtgcgcgcggttgcgttgcatttgcatggctgcgcgctgcgctctgggagcttgcactagcgggtcggcggcctaggcgcggggcatctttcgagtgcgtgcgtgtctgttcaagctctgatcgtctctccggcccattcgccggaggaaactgaccgccgccttctcgctctcgctctctaccctattcccggggctgagaggggaggagagaaggccacgtccacaccataaagcaggacgtacagacacgtgtacgagggggatcacggtcgggtgaggtgactaagctggcggacggaacgacgacgatggcgaggagcggcggcgggatggaaggcagcggcgggctgaagaaggggccgtggacgcaggcggaggacaagctgctgagggaccacgtgcggcggcacggcgagggcaactggaacgccgtgcgccgggagacgaggctgcagcgctgcggcaagagctgccgtctccggtgggccaaccacctccgccccaacctccgcaagtgccccttctcccccgaggaggagcgtcagatccttctcctccacggcctcatcggcaacaagtgggcgcgcatctccaagcacctctcaggaaggacggacaacgagatcaagaactactggaacacgcgcttcaagcgccggcagcgcgcgggcctgccgccctacccgccggacgtcgagcggcagatcaagctgctgcgcgcgcagaacgtcaacccgttcgcgttgctctccagcataccgtcactgtcgcagacggcctcgcactcgcactcgccactgatcaaccagaactacccgcttctgaaccagatgcaggtgttccaccacctcggcggcagtcagcagccgtcgttccaccaggacggcagcgcggcggctttcggtgacatcgtctcctctcgcctgccgccactgccaaccgccagaacgcaggcggagctacattcgaaccaattcgacacctccatcagcggcgggctggtggatcagtcgatgctgatcggcgacgaacacctgctgcggcctaacccgagtatggtcaaggtctcctccatgcccgcgctctcctaccgtgagccggatgggtccaggatgctgccagcccatggcgccgggagcgacggcgacgtctcctcgctggggcaatgccctccgggacaggacctccaccgtggtgcgacatgggacttcaccttcgcggccgtgaagccggcgaagaggaggacggcgagcgaggtggggttctccgacatgttcgccgtcgcaccgccgggggattggttcggcggcgggtcgacggcgccatcgccggggccgtcatcggccgtcaccgacgaagagtttaacctggagatgcagcagttcatgtcaatgctaccactgtctgacgagcacggctggaacgcataatgcggccgggtaaaatggaaatcgaaaactgtgtagagcgtgtgtctccttgcttctgcgacgagaatggtgtgcgcattgtttttgtaatgtgcccactcttggatctttatctgttctagacgtcgattgagtttcaaacattgataatgctagggcaccatcggcgtgggataaacacaaaataatccaagaattcactgc

SEQ ID NO: 16546 - DNA, 1653 bp, Zea mays
  Clone ID: LIB3066-015-E2_FLI
gcagaggcgcagagacaggcgtcttcgtactcgcctatctccgcgactcaaagcttcttccatttcctaccgccgccgctgcagctccaccccattccgtcgacaccatgagggagtgcatctcgatccacatcggccaagccggtatccaggtcggaaacgcgtgctgggagctttactgcctcgagcatggcattcaggctgatggtcagatgcccggtgacaagaccattgggggtggtgatgatgctttcaacaccttcttcagtgagactggtgctgggaagcacgtccctcgtgctgtttttgttgaccttgaaccaactgtcatcgatgaggtgaggactggcacctaccgccagctcttccaccctgagcagcttatcagtggcaaggaggatgcagccaacaacttcgcccgtggtcactacaccattggcaaggagattgttgacctgtgccttgatcgcatcaggaagcttgccgacaactgcactggtctccagggcttcctcgtcttcaacgctgttggtggaggaacaggctctggccttggttccctcctcctggagcgtctgtctgttgactacggcaagaagtctaagcttggtttcactgtgtacccatccccccaagtttcgacctcagtggttgagccatacaacagtgtcctgtccacccactccctcctcgagcacactgatgtggctatcctgctggacaacgaggccatctatgacatctgccgccgttcccttgacattgagcgcccaacctacaccaacctcaacaggcttgtgtcccaggtcatctcatccctgactgcctccctgaggttcgatggtgctcttaacgtggatgtgaatgagttccagaccaacttggtgccctacccgaggatccacttcatgctttcctcctatgctccagtcatctctgctgagaaggcctaccacgagcagctgtctgtggccgagatcaccaacagcgccttcgagccatcctccatgatggccaagtgcgatccccgccatggtaagtacatggcctgctgcctcatgtaccgtggtgatgtggtccccaaggatgtgaatgctgctgtggccaccatcaagaccaagcgcaccatccagtttgtggactggtgcccaactggctttaagtgcggcattaactaccagcctccaagtgtggtgcctggtggtgacctggccaaggtgcagcgcgctgtgtgcatgatctccaactccaccagtgttgtggaggtgttctcccgcatcgaccacaagttcgacctcatgtacgccaagcgtgccttcgtgcactggtatgtcggtgagggtatggaggagggcgagttctctgaggcccgtgaggatctggcagcgctcgagaaggactacgaggaggttggtgctgagtttgatgagggtgaggaaggtgatgatggtgatgagtactagaagtatcctgatgcggtcatcgtcaggcttgtgtgctgctcttgtccccgttgtggtttgcaacacctgatgttgtaagactttctggttatgtccgccccgctttgccactgggttattaagaacgtcgttatggatggttgtctacactacattattgcttctcgatattggaaaactgttatgcgcc

SEQ ID NO: 16547 - DNA, 829 bp, Zea mays
  Clone ID: LIB3066-015-F11_FLI
agcccagccgacgccgagccaatggtgactccagcgacattctccctccgccccagcgcgccccccgcgccgcctcgtgccgggctgccccgcgctcgggcctgtttcgcgcccgccatccgcacctccccttccgtcgccttttcctaccagcctcggcgcttcagtggcatccgccgcgccgtggccgtcgactccgagcagggcttccccgagtccccagagcaggagaagaagcccaagacgtactacttcctggtggcaaacgccaagttcatgctggacgaggaggagcacttccaggagcaactcgccgagaagctgcgcaactacgccgagcgcgacaaggagcaggacttctggctcgtcgtggagcccaagttcctcgacaggttccccaacattaccaagcgcctcaagcgccccgccgtcgcgcttgtctccaccgacggcaactggatcacattcatgaagttaaggctagacagggtcttacaagaccagttcgacgcagaatcagttgaagaggcattggcttctaaccctgttgagttgaaatttgagaagcctgagaaatggacagctccgtaccctaaatacgggtttggatggtgggaacccttcttgcctccaaagtccagcaatggcacggcatagagataagcagcaatccctatgaggcatgtaagattactcccctgtaagtgatgaatgtaattttaattttgatgatgaggatgtagtacttgaggttgtacgagtacagttagttgaattagttgcacagtttttgtaataccaaataatcagctgttttattttatttgag

SEQ ID NO: 16548 - DNA, 365 bp, Zea mays
  Clone ID: LIB3066-015-F12_FLI
cttccttggtcgcttcaagtcgatacctagcattgttgagcttgacagcttgaaggtttccggtgatgtttggttcggttctggaattgtactgaaggggaaagtgaccatcactgcaaaacctggcgtcaagctagaaatcccagacggagcagtgattgggaataaggatatcagtggccctgaggacctttagataagaatcagcgaatcagcaaggaggctcacttcgccaagtggcggatcatttttcgtgtttttttcctgtatattcaaacaggttccatgatattatggagaatattaattgccagtataatccagaaattttacatgtattttactttgagggaaatgttttacac

SEQ ID NO: 16549 - DNA, 1782 bp, Zea mays
  Clone ID: LIB3066-015-H10_FLI
gagatctgacaagtagacttggttcggactgccaacaagtgtctcgtgttataggcaatgaccttaacctgatttcacgcaatttacttcagggtgcaggtgcattaatttatctgctagtcttatcttggcctctcggattgtgtacaatgtttgtttgtgcaactctatcagcaattatgctagttcatggacggtttcagaaaagggcagctaaatttgcacaggagttcaccgcaaacgccaataatgttgctcaagaggtgataactttggttaggacagtgcgagtatatggaacagaaaagcaggagtttaaaaggtatgcaaactggcttgataagctgtatgatgtgagctttcggcagacagtggcttatggaggctggagcctgagcttgaactatctataccattctactcagctttgcgtaggtcattggagtggtgattggaggcctagcaatcatgtctgggaagttaactgctgagcagttgacaaaattcacactctatgctgaatggctaattttgtccacatggtggattggagacaactggtcctccctgatgcagtctgtcggagcaagtgaaaaagtttttcgtttaatggatctccttcctagcaagcagcttagctctgaaggcctcaagttagagaagttgaaagggcaaattcagtatgctgatgtatcattttcatatccatcaagacctacggtaccaattttgggaggcttgaatttaacactgaatccaaacgaagtagttgcaattgttggtcttagtggaagtggcaagagcactataatcaatttactacttagattatacgaacctacaaatgggcaaatactaattgatggtgtcccgctcactgagcttgatatcagatggttcagggaaagaattggtttcgtcggacaggaaccacgcttattccgaatggatatcagctctaatattaaatatggttgcccaagagaagtcagtcatgaagaagtgatatgggctgcgaagcaggcctatgctcatgacttcataatggctttgcctgatggttataacaccatcgttgatgatgctcttctcagtggaggtcagaaacaacgtgttgctattgccagggcccttctgagggacccatctatcttactgcttgatgaagccactagtgcgcttgatgctgagagtgaacattatgtcaagagcgtcatcacaaaagttagtcgagattcaaaggctaaaagaactgtggtaatcatagcacacaggctatctacaattcaaacagctgatagaattattgtgatggaaaatggtaatattgtggaggatggtaaacacattgatcttattgagaagggtggtctatattcaagattagccaggcgacaaaatgacgatctcaagtagccctggatcacagaatgtggtttagtgcacgccttctttttaaatggaatggcagaagtgagagtcgtctgtcattagtgtattctttgcaagaactgacctggacccaggagctcgaataagctggcattgtttttcccatgaaccagaaacggtttgtgactgatcaaaataaaccaaaacggtttcccccacgaggacgagcacattaagcatcgagagcggcagtatggagaacagacttctaagaggtccagtattgtaaaagtagcttccataacaaagtgtatatgcgtttttatcttgttatcgggaactctgaaacttatcttacactacacacggaggaaacgctccaattttgtt

SEQ ID NO: 16550 - DNA, 874 bp, Zea mays
  Clone ID: LIB3066-016-C12_FLI
cgcgtctcacctcacacatgacacatgtaattgcttgaaaatctatggtttagaaagagggaatcagggaagtgaactagcggtccacgatactccgacgcccactttgctacctcggaaccctagccgccgcccatggatatcgccggagaccggcgccggtagcgatacgcaaaaggagtggtacgttctttgaccttgtttattgctgcgcccgaggcgtgtggcgcggggggagcaggaaggagaggggaagaacagaaggggaaggcgggcggggccgcgatgtcggtgcggatcaaggcggttgtagaccggttcgtgaaggagctgcaggaggcgctggacgcggacatccaagaccgcgtcatgaaggagcgcgagatgcagagctacatcgaggagcgcgagcgcgaggtcgccgagcgggaggccgcctggaaggccgagctatcccgccgcgaggccgagatcgcacggcaagaagccaggctgaagatggaaaaggagaatttagagaaggaaaaaagcgtcctcatgggaacagcatcgagccaagacaaccaagatggagcccttgagatcactgtcagtggtgagaagtacaggtgcctccgcttctccaaggcgaagaaatgagaaatggactggcactgaactggaccaacacatgctctgtagtcagctaaatctagccacctagtcttgcaagacccttattttgattcaaattgcattctcttttcttgtacaggaaatcctggaatgccgttaatagaatagcggatacttatgccaggactgtcttgtttataaaaaaaccgggctgctagagcagctgcaatggggagttaatgatgacagaaggttgttg

SEQ ID NO: 16551 - DNA, 905 bp, Zea mays
  Clone ID: LIB3066-016-D10_FLI
tcgtcgtctcactcaccccgccttcacgcctccctcaccaaataaggtcccgcccttttccgacattcacaggggggacaggaaatcagcggccatggcctcgattccggcgacgaccttcgccgtcatcttatccgtcctcttctgtgccgcggctggcaccgccgtcgacaacgacctccccgactacgtcatccagggccgcgtctactgcgacacctgccgcgccgggttcgtgaccaatgtcaccgagtacatcgcgggcgccaaggtgaggctggagtgcaagcacttcggcaccggcaagctcgagcgctccatcgacggggtgaccgacgcgaacggcacgtacacgatcgagctcaaggacagccacgaggaggacatctgcgaggtggtcttggtggagagcccgcgcaaggactgcgaccaggtgcaggcggacagggaccgcgccggcgtcctgctcaccaggaacgtcggcatcagcgacaacctgcgccccgccaacccgctcggctacttcaaggacgtgccgctgcccatctgcgcctcgctgctcaagcagttggactcggacgacgacgacgatcagtaatagcacatcgtcgacgaccgcagactggctggcactaaaccacaaatcctcttcacctggattacaaatatgtaactgagaaaggaaaggaaaacaaaaatgtaactgcgtggctgtaccaaattctgagtgctggattcttgctattgtcacccattgttcgttttatcatacaagttgcagcgcagagcaagacggctaaaacagacagcaatacagctctggtgaaaacatgccgacagaaataaccaatctaatgacctgcggttctgatagcaagataaatataccatttcatttccatggg

SEQ ID NO: 16552 - DNA, 882 bp, Zea mays
  Clone ID: LIB3066-016-D12_FLI
tcccattccccttccccctcttcgtctccgtcggcggcgtcggaccgaacccgagcccggagccctaactaaccctaggaggcaggcggcggcggggatggtgtactacgcgctgttggtgggcgcggagctggatggcctcaccaacctgcagccccgccacggctgcgacgaccccaacttcccctactacctcaagctcaagtgcgagaactgcggggaggtcaccgccaagtccacctacgtcaccctcagcgagcaagtcgacctgcccaaaggacacggcgccgctcacctcgtccagaagtgcaagctttgtgggagagatggaacaattgtgatgattcctggtcaggggacaccacttactattgagcagagccagaaagaggagaagacttgtttgatggtgtttgactgcagaggctatgaacctgttgagttttcctttggcactggctggaaggctgaatctgtgcatgggactccttttgaaattgactgctctgaaggtgaattttctgagtatgatgagaagggagaatgccccgttgagctaggcaagctgcagtcaacattcaaagtggtgaagaagcatgagaggggtgggaagactagatttgtctagatcgagtgacttggaatctgacagatattggagttggcggtgtataaatggtagatttgggctgaaggtcatgcgtgatccgacctcctttttcttctatctgttgattctgtggatgccgtgaaccatgcgaagctttcggtgatagtgtccacaggagcattaccctgtaccgaaactgatctttataacttaccaccaatgctcgaacatgttgctggttgctggtatttttagcactgttctctctggct

SEQ ID NO: 16553 - DNA, 1757 bp, Zea mays
  Clone ID: LIB3066-016-D2_FLI
cgcggttcctaaactcggatcctgcattttgtttcggcgatatgtgttggtgttaccagttgctgcagcgatacttccaatttctgtgccgatgggtttcctcgttttcttcttattttgtttcctcgtcgtcgcagcctgcaaattggtagtttcttggttcttatcagtggagctggctttggaatttgcaggcaccgttctgagctgcgctggtgctcctggaaaggtgttggtgcctggaggtggcagtgatgacttgctttcctccgtagagcctgtcggggacactcaacctgaagaactacaggttcgattgtccccttctgtgcctccatggtacaaatgtccaaatgtctgatgaaattaagtttgggtttcagcctttgcactttcatatcaggcattgtgcaatgcctcgtgaattgttggttagggcaccgtgctggttcttgggctactgacattgctagcttgtgatcccacctacacctagaaagaagtccactggctacagagcatcacggagtgccgagtgcagaccaaacaaatcaggccttctaacgcctcggccgccgcgtctggcgccgcagctacctcctctacggctcgccgggcacaggcaagtccacgttcgcggcggccatggccaggttcctaggctacgacgttgacctgtctcgcaccgatgccgccgccgacgacctccgcgcgctgctcctgcacaccaccccgcgctcgctcgtccttgtcgaggacctggaccggtaccttcagggcggcggcggggacgcggaggcgcgcgtggccagggtgctaagcttcatggacggcgtcgcgtcgtgctgcagcgaggagcgctgtcatggtgttcaccatgcacgggggcaaggactccatggacgccgcggtggtgcgcccgaccgtctagacgtgcacatccaattcacgctctgcgacttcgaggccttcaaggcgctggccaacaactacctggggctcaaggaccacaagctgtacctgcaggtggagaaggggttccaccgtcggcaggtgaaagagatggtgaacgaggcagttgattcagacattcaactttggactctgaggacatggaggaagaactatttcatattcaatgatcggcacagaggaatggggatggatatcgatgacatgtcgtacgaagagttgcttgctttgggagagcggattggtactgtaaacacaggcctttcagacgatgtattgtccacgtgcctaaacttgagcctctacatgccacaactttaggttctcatgaagattgtgaaacaaaatgtagcgtatgccaggcaagtttatttgtatcagattcttctatattaggatgttagttgaaacctctaaatttttttctgttgcgtgaattttttctcaggaggagtatttatccggagaggagtagggcaagatggcatgtatttatccggcgaggagtatttatccggcgaggagtactaccaaccagtccaccttccctgcatggagcactggcttcggcagaactggtgttctatctgtaaatttgttgccctgagaactaactagcaacgtgtttcatgtttcttcggaaatgaaatgtatagattctccatgtcctgtattccctccccacctctcttccttttctcttttggaattcctttccttcccttttttttactcaaaacactcatgttttgttatcaattaatcataaaaggaaatgttgtgtt

SEQ ID NO: 16554 - DNA, 1180 bp, Zea mays
  Clone ID: LIB3066-016-D7_FLI
agaactcgctccattcagagattcagagaagacccgcctctcccgtgaggccgtgacgcgacgccggatcgtcctcgtctcctagctcgtggaatgaagggaggtggcgtcatcagggccgccggcggaggtgccggcggtgcgggtctgttgcgaacgcgactgcggcttcccgtggtgctcctctcctgctccctcttcttcctcgccggcttcttcggctcgctcctcttcacccaggatccggaggaggcggatatgccggtgccgagagagcggctgttggaggcggcgtggccggagatgccttacggcgagtccggcgaggctgcgccgtccttgatcccataccagattttgagctggcagcctcgtgctttgtactttccacaatttgcgacatcagaacagtgtgaaaatatagtaaaaacggcaaaggagagacttaagccatcaacattagccctgaggaaaggagaaaccgcagagagtacaaaaggaatcaggacaagttcgggaacattccttagtgctaatgaagacccaactgaaacccttgcggaaatcgagaagaagattgcaagggctaccatgttacccagaaatcatggggagccatttaatgtcctgcggtataatattggacaaaggtatgcttcacattatgacgcatttgacccagctcagtatggtccacaaaaaaatcaaagggtggcatctttcttgctttatctcacggatgtcgaagaagggggagaaactatgttcccatacgagaacagtgagaatatggatataggctatgactatgagaagtgcattggcctaaaggtaaaaccaaggaagggtgacggactcttgttttactcccttatggtaaatgggaccattgaccggacttcacttcatggtagctgccccgtcatcaaaggcgagaaatgggtcgccaccaaatggatcagagacaatatagtgtagaaatcgaaaggctcaggtgtcatgtgccctccaaaaaaatagatcatgcgcacatatactgaccatatacttcagtgtttgttcaattgccatggacagttggaccaacggaaggaaagtgtaaccaatctatttgcatcgtgtcaatatatagcctacaacttacatgtggccaagtggcaagtggacattccatgatctc

SEQ ID NO: 16555 - DNA, 633 bp, Zea mays
  Clone ID: LIB3066-016-E3_FLI
ctgggcagaaggacgacgccatggcagcagagagcgggtgcgggtgcgggtgcggccgtgcgtggtggagttccttgttggccttgcgaagcaatagaggaagatgatgaggaagacgacgatttcgatgatgatgaagcagtcaaggtcttccgtcggcagaaggtcgatcaagctgtaaaagaggctgtgtcaagggtgctgtccatggtagactctaccgaagcgaggatgcaatatcgacgaatgcttgaggagtttcgccaggcaactgcagaattggaaggatcaaatgaagtgacatcaatatttgacagtgacttagagttattagggatcaacaatttcatgtaaagagcatttcggtttcaagatctgaggaatgacataaattaagtatctagggaatgggtttcacctgctactaactacgacctgataatggtcgttagtttatacagtgtttacgaaatggaaagtagattattgctgctatgatgtattgccactatatttaggtgtattttcccagtggcagttcaatgaacactacattgtggtgtttgtaacttttaataccccgtttgggtgtagatattggagcacagaattgaaaattagaatcagctttcc

SEQ ID NO: 16556 - DNA, 1443 bp, Zea mays
  Clone ID: LIB3066-016-E6_FLI
atcgatcacgacaagatggcgtgcacaaacaatgcgatgagagccttgttcctcctggtcctcttctgcatcgtgcatggtgagaaggaagagtcaaagggcatcgatgcgaaagcgtccaggcctggtgggtccttcgacatcaccaagttgggcgcctccggcaatggcaagacagacagcacgaaggctgtgcaggaggcatgggcatcggcgtgcggcggcactgggaagcagacaatcctcatacccaagggtgacttccttgtcggacaactcaacttcacaggcccttgcaagggcgacgtgaccatccaggtggatggcaatctgctggcgaccacggacctaagccagtacaaggaccatggtaattggatcgagattctacgtgtggataacctggtcatcaccggcaagggaaaccttgacgggcagggcccagccgtgtggagcaagaactcctgcaccaagaagtacgactgcaagatccttcccaactcgctggtgatggacttcgtgaacaacggggaggtgtccggggtcacgctgctcaactccaagttcttccacatgaacatgtaccggtgcaaggacatgctgatcaaggacgtgaccgtgacggcgcccggggacagccccaacacggatggcatccacatgggcgactcatccgggatcacgatcaccaacaccgtcattggcgtcggtgacgactgcatctccatcggccccgggacctccaaggtgaacatcaccggcgtgacctgcggccctggccacggcatcagcatcggcagcctagggcggtacaaggacgagaaggacgtcacggacatcaacgtcaaggattgcactcttaagaagacgatgttcggcgtccgcatcaaggcgtacgaggacgccgcctccgtgctcaccgtctccaagatccactacgagaatatcaagatggaggactcagccaaccccatcttcatcgacatgaagtactgccccaacaagttgtgtactgccaacggcgcctccaaggtcaccgtcaaggatgtcaccttcaagaacatcaccggcacctcctccaccccggaggccgttagcctgctctgcactgccaaggtcccatgcaccggcgtcaccatggatgacgtcaacgtcgagtatagcggcaccaacaacaagaccatggctatatgcacgaacgccaagggcagcaccaagggttgcctcaaggagcttgcatgcttctagaccctccatcgactgacccatctctctagttataatttttctctcgtccttgcattgcccattagatgctatccattggtaacgcacaacagtaaaacgacagacatccgacagctatattatgttcgacggtgtaacaccctgaatttgagggtataaaatttcttctccaaataccaaccaaattcaggggtt

SEQ ID NO: 16557 - DNA, 443 bp, Zea mays
  Clone ID: LIB3066-016-F5_FLI
agaacaagaagacacaacctgtatctctcaggaatacggtggtgggggacatcggaatgcaagctcgtttattttgagtgtgactgagtttgacaggtggaaagtcggatcttctcgaccaaaaggtgcataaccatctggctttcttcattgctctacaagattaatgaagaaacacatgcagagggaacaaaaccccaaacttgggggtgtgggacatgagaaacatcatagctgcatatcagacaattctcgacacttacgcagcattctgctatcatgccatatcttaccctatggcacttattcataggctgctgtgtgggcacttagttttacaaaatctgctgaaatctaattggagaactctacatgtctcacgtactagcttagacactgaatatattagtccttaaatgcgtctttttacattttatttatgc

SEQ ID NO: 16558 - DNA, 430 bp, Zea mays
  Clone ID: LIB3066-016-F7_FLI
gttacagcaataaggaatttgtctcttcttccacctccagcctcataagcctgcggttaggggggcataaccccaaccggagaggacggccgacggctacgagctacgtagccgtggtccggcgagtcggggattccaggtccttgacaatgacccactggaaaaggcaaatgcatccattaggagcagaactctcatgaacaagcttgttctgcctttacttttggttgaacttgtgataaccaacccaaactgccaaaaaatctggtgttgctacatttgtatcaatctttacctgagcttgtgtttttgtaagcttatgcatgtacctccacatgtatagatatgctacctacattttctttctgtggtcatatgatatgttgacaaggtcacagatatactctcagtatatgatgacgcttctatg

SEQ ID NO: 16559 - DNA, 1791 bp, Zea mays
  Clone ID: LIB3066-016-G7_FLI
cgcataggacgaactaccgatgcaagctgcgatcgatcagtcaccgcatctccggttccgcgcaggcatggacgacaagtcctgctacgtggccaccggcctctccctggcggccatcctcctcgtcctccaccgcctcgtggtccgtgctggcggcaaggggaacgccgccgcgcggcggctgcctcctagccctcccgccgtcccgttcctcgggcacctccacctgctagcatcggagtgccctctccactcgtcgctggcccgcctcgcggcgcgccacggccccgtgctctcgctgcgcctgggctcccgcgccgccatggtggtgtcgtcgccggagtgcgccgaggcgtgcttcacggagcacgacgtggcgttcgccaaccgccccagactgacctcgcaggcgctggcctccttcggcggcgccgcgctggccgtgtctagctacgggccctactggcgcaacctccggcgcgtggccgccgtgcgcctcctctccacgcaccgcgtggcgtgcatgtgccccgtcatctcggccgaggtgcgcgccatgctgcgccgggtggggcgcgcggccgaggcgacagggcgcgtccagctcaaggccagtctgttcgagctctccctcagcgtgctcatggagaccatcgcgcagaccaagacgtcgcgcgccgacgacgcggacgacgccgtgtcgcccgaggcgcacgagttccggcggatcgtcgacgagatcctgccctacctcggcgccaccaacctgtgggactacctgccgctcctgcggcggttcgacgtgctcggggtgaggaacaagatcagggacgttgtcggcaggagggacgccttcctgcagcggctcatcgacgcggagcggcggaggctggacggcgacggcgacggcgacgagaagaagagcatgatcgccgtgatgctctcgctgcagaagtcggagccggacgtgtacacggacaccatgatcatggcactgtgcgggaacttgtttacagccggaacggagacgacgtcgtccacgatagaatgggccatgtcgctgctgctgaaccacccggaggcgctgaagaaggccgaggcagagatcgaggcggccgtgggcgcgtcccgcctcatcaccatggacgacgtgcccgggctgggctacctgcagtgcgtcatcaacgagacgctgcgcctgtacccggtggccccgctgctgctgccgcacgagtcggcggcggactgcacggtcggcggctacgacgtgccccgcggcacgctgctgttcgtcaacgcgtacgccatccacagggacccggcggcgtgggaggagccggacgagttcaggccggagcggttccgcgacggcaaggccgagggccggctgatgctgccgttcgggatgggacggcgcaggtgccccggggagacgctcgctctgcggaccgccggcctcgtgctcgccacgctcatccagtgcttccactgggacaggatcgatgacgctgagatcgacatgaccgagagcggcgggctcaccatgccccgggccgtcccgttggaggccacctgcaagcctcgcgaagccatgcgtcatgttcttcagcagctctgattggtctatgtgctaaacattctcatccctattctctcttgtgtgtgtggcagtacgaacagcacgtgctagctaaataagctgcgagcaatagctatccgcgtaacagtatggttcgtctaagttgttatctttcaaaagttatctagtacaataaacaaattgttcgtgtc

SEQ ID NO: 16560 - DNA, 1310 bp, Zea mays
  Clone ID: LIB3066-017-A5_FLI
gcgtggatgtacttggcagtccctgtcgtcttctatgcctccgagagaagtatcagaaaaattcgtgagcaaagctatcgcgtgagcatcataaaggcggcaatctacccgggaaacgtgctctcactttacatgacgaagccaccaggcttcaagtacaaaagcgggatgtacatgtttgtaaaatgcccagacgtttcgcctttcgaatggcaccccttctccatcacttcggctcctggagatgactacttgagcgtgcatatccgtacgttaggtgattggacatcagaactcaggaatctgtttgggaaggcttgtgaagctgaagtaacttcaaagaaggctacactagctagactcgaaacaactgttgtggcacatggtctcgcagaggatactaggtttcctaaagtcttcatagatggcccttacggtgcaccggctcaaaactacaggaaatacgacattcttttgcttattgggctcgggattggtgcgactcctttcatcagcatactcaaggatctcctgaacaacataaagtccaacgaggagatgcatgacgccgagttaggttgcagtttgaagaccaatgggccaggaagagcctacttctactgggttacaagagagcaaggctccttcgagtggttcaaaggtgttatgaacgacgttgccgagagtgatcgcgacgatgtaatcgagatgcacaattacctgaccagcgtgtacgaggaaggcgacgccaggtcagccctgattgccatggtccagtcacttcagcatgctaagaatggcgtggatatcgtctcaggcagcaagattcgaacgcattttgcaaggccaaactggagaaaagtgttctctgatttggccaatgcccacaagaactcacgcatcggcgttttctactgtggatctccaacactgaccaagaccctgagagatctttcgatagagttcagcagtaccacgacgactcggttccatttccacaaagagaatttctaagaagcaacggcacggctcgtgtggcccgccggtgcattcattggtgatcaacgggcacaaggctgtgtgcctatgcaagccagatttgagtccttggttattttggggaacagggagcggggctttaccggaccaagagccatgagctagccttttgcttcgtccgcttgctgggagctagctgcttgttcagatttggtgttggaggaggcgtgcatgcgcaagctgaaccggaaattcagcatgggaagttccatgtaggaaactgataattgtaatgcaatttttttctctct

SEQ ID NO: 16561 - DNA, 1290 bp, Zea mays
  Clone ID: LIB3066-017-A6_FLI
gcgacgcgctcaagacctacgcgcgccggtggctgccggccgttgccaagagcgggtacctggtgctggagcaaaccgacatcagcacagccgagtggaacagccggcttcttgtcgaaaagatggtgagcttgctccccgccgagaggaacgccgtctcctgcagcttctttctcaagcttctcaaggcagccagcgtcctgggcgcctctcccgcgtccaaggcagagctcacgaggagggtggcgctgcagctggaagacgccagcgtgagcgacctcctgataccgtcgtcgtgcgcgggcgagacgctgtacgacgtggacgccgtgacggccatccttgaagagctggcgctgcggcaagcggcggcggcgggggtcccggaggcaagcccgccgcacgcgcgcggacacaggcggtcgcggtccgccgagagctcggagtacgagggagcgcgtcggtccgcgtccgccccggcgtcgcacggcgcgatggtcaggatcgggaggctggtcgatggattcctgatggaggtcgccaaggatcccaacctgcccctggacaagctgatcgccattgccgaggccgtgccggactgcgcccgcccggagcacgaccatctgtaccgagccgtcgacacttacctcagagtgcacccggagatagacaagggttcgaggaagaagctgtgcagggttctcaactgcaggaagctctccgagacggcgtctatgcacgccgcccggaacgagctgctgccgctccgggtggtcgtgcaggtgctcttcttcgagaacgcacgcgcggcggcgctgtccgtccgcggggctaacggccgcgccgccgccggtggcgtcaaggcgctgcttgccaagacaaggagggaggagacagacggcgaggagaaaaggctccggggcctcgccgtcgccggcgcgcctggcgacgacggcaacgactggagcgtggaggggctgaagcgcgcggcgtcgagggtgtcgaccctgaggatgaggctggaggaggacgcggacgacgaggcgttcgtgcacagggcgcgcgcgggggcggggctggtccggagcgcgtccgcccgcgtcagggcgctctgcgcgatcccggccgggaagcccaggcggatgctgagcaggctgtggccgtcgagctccagcagcgccgtcactgagaggcgttgaattgaaagacctgcacgagagcaatgcggaatgcggtggcagattgatcgatccaggcacaccattctggtcgcgaaggctgtgcatgtgt

SEQ ID NO: 16562 - DNA, 432 bp, Zea mays
  Clone ID: LIB3066-017-B9_FLI
ggagatctcttccaacttgagatgctgctgctgctgctgctgctgctgcggctgccaatgcagctgttccggtctctcaagctaacctgacgactgcctgtactagtaacacattcttgagccagccaaagccaagtgatactccgtcactgcctccgaagggaggtcctccatcagaggaggacggtttggaactgactgttgccccaccctcccaacagaacatgacgaacatgtcttcccagaatgcggtaggcgtgatccaagtcatctaagctaatatattttattttattttatttctctctctctctctctttctctctagaagttactgtggctgttgacagttattgaccgaataaatattaacattgtattagcaatactacatgaataagaagagcatgaggtataagcccatcatttgcc

SEQ ID NO: 16563 - DNA, 1757 bp, Zea mays
  Clone ID: LIB3066-017-C6_FLI
gtgccgccgccaccgtcgtcgccgcctccccgcctgaacctcctcctcccgagatccctcctcgcgctcgccgcgcgcgccatgccgtcgcgccgcccctccccggtcctcctcctcctcctcgcgctctcgctcgccctcctcttccttctcctctccccttccttcccctccacctcccgcttctctcgctccctcagctctggctccgctttcgcctcctcatctccggcgtcaacctccgcctcgcctgcacccgtcaagatctacctgtacgacctgccggccaagtttacctacggcgtcgtccgtagctacaaggctgcgcgtgcgacatctggctccgcgaacgccgctgctactctgcccgacgagcaactgcggtacccgggacaccagcactcggcggagtggtggctcttcaaggacctgctccgacgcaggccgcaggaccgccccgtggcacgcgtggacgacccgagcgacgccgacctcttctacgtgcccttcttctcctctctcagccttgttgtcaaccccatccgctctccgctggcagcaaacgcctctggggcggggacagcgtacagcgacgaggccttgcaagaggagttgctagagtggctggagcggcaactttactggcagcgccacagggggagggatcacgttttcatctgccaggatcccaatgccctttacagggtggtcgatcggatcagcaatgccgtactcctggtttctgatttcggcaggttgcgcagcgaccaggcatctctcgtcaaggatgtcatcctgccctactcacatcgaatcaactccttcaagggtgaggtcggggtggatggtcgcccctctttgctgttcttcatgggcaataggtaccgcaaggagggagggaaggttcgtgatgcactttttcagattcttgaaaacgaggatgatgtaaccataaaacatggaacacaatcgagggagagtcggcgtgcagctacacaaggaatgcactcatctaaattttgcctgcatcctgccggagatactccctcagcatgcagattatttgatgcacttgtcagtctgtgtgttcctgttatagccagtgattacattgaacttccattcgaagatattatagactacaataaaatatcaatatttgttgggacaagcaaagcagtacagcctggatacttaacttcaactcttcgaagaatcagttcagagaggattctggagtaccagagggaaataaaaaaggtcagacattactttgagtacgaggatccgaatggaccagtgaacgagatttggcgccaagtatcccttaaagcaccactgataaagttgttgactaaccgctacaaacggttgcttgaaagaggcaccaatggaacagattgttcgtgcatctgctctacaactccaactgacataactgcggcaagttaaacaagatggaactcatcggcctacaagctctgtgcctatttcctgtgatcacattgcctgaattttttaggttgtacagttccatgtaaaacgagattaccagccactatttttgaacagtaaatttactaatcaccacaatccttgagttttcactagatttgtataggaggagcggatagtcaggaaccttacagtgccctttttgtattgtaagttacattagctattttttgttgtcggcagttcgctgccctagtttttcgacctacataagcatcaatccccgtgccagtgcgtggccc

SEQ ID NO: 16564 - DNA, 725 bp, Zea mays
  Clone ID: LIB3066-017-F10_FLI
ggagttcctgtacatagacttgtaaaagctgccgactcagtttcggtatgcctatctaaagggttaggcgcacccatcggatcagttgttgttggttcagaggccttcatcgacaaggctagaattcttaggaagaccctaggcggtgggatgagacaggttggagttctttgtgccgctgcttatgttgctgttcgtgacaccgtgggaaagcttgcggatgatcacaggaaggctaaagccttggcagagggcctcacgaaaattaaacagttcacggtggattcatcttcggtcgagaccaatatggtgttcttcgatatcgtggatccacacatttcaccgagcaagctatgccaagtcttggaacaacgcaatgttcttgcaatgccagcaagttcaaaaagtcgctatttcgcaagatcgtcgtggccctattgggaacggagatgctcttaatgaagtaggaggaccgaccaatccaactagcagcagcaggcggggagtggatgcgcctgctagaagagtgctagctccgcgcatacgctcgctcgacaaatgtgtgttgttaactattgtgtatagtgttataattactgtcctttattcctgatgtttgttttgtagttgaaactcacattgttttttcatttccatctcgattttgtatgccgtgaccacgaaagattaaatgttttcttgcggtttctaaaaatatagctctc

SEQ ID NO: 16565 - DNA, 463 bp, Zea mays
  Clone ID: LIB3066-017-F4_FLI
cgacaacgacggtagcctagatgactaggcattcagaattggggcttatatatgacactggaatattgtgcatggtggacatatagtgcagcaccatattggctatgggatgatatcagatgcacgaccctgtctagatgatgcaaccacgacatgagacatggctttaggaacctcctccatgcagggaagaggaatcaccatctccattgattgaggatcactcggtattagtactgggggccacctgtgaagaggagtcaccaaagcctaaaatgttgttattccactggaggatggggaacccaatggtcatgcgctaaggaggggacctaagaagactctaggggtggtgattaatgtgttgttgttcatgatctcagtagggttcaatgttgccgcaacgtaggttcacaactcaactactataactgacaggtttaatttcttactggttttctgt

SEQ ID NO: 16566 - DNA, 591 bp, Zea mays
  Clone ID: LIB3066-017-H10_FLI
catcagccgcacccgagctagccagttgtatagcgacgcccacgcccgaaacacacacgtatgtctcgcgcgctcgcacttgcggtcctcctcctggccgccgccgcggtggcgccgctggcctccgccgacggcgtgaagtccgtccccatccccggcgccaaggaggccgccagcggcgccaagatgttcgacagggaggccgacgccggtcacgacccggtcagcggcctgccggccgacccggcgcccgacgcgcgcccctaaggctacgcaccgtcgtcgttgtcgtcaccgccgtcgccgtcccgacccgtttccgctgaacaccacgcgccttgtacgtgtgcttgtgatgttcggcctctgcgtgcgttttgcattgcttgcgtgcgttttccttcggctgccgtgccgattggtcgtggtggacgcagcgccatggataacggatcttaggtactcacccgtgcttgctgtacctgtacccatttatttggcatttctctctttttttttcaatatgccggaggatatataatttcttcgagaaaaaggaatatatgcaggaggatctcgaatttcttgtgg

SEQ ID NO: 16567 - DNA, 607 bp, Zea mays
  Clone ID: LIB3066-017-H3_FLI
gcaccctcggccgaacagttccccgagtccccgactgctctctgtctctctattggcgacgactgggctaccgccgccacaggcgccctacgccaggtgtccaggtctcgggcccttctccggcaccgagcacccaccagcggaatataccatggaggtcaggcccatggtagctctgcgtgccgccctagttggtggggtagcggcatttgcgaagatcggtggggcgatgaaagccgcaggcggtgtcaagattggtgcagccgctgcagccgtcacggctgcaacatcagctgccatatcgggaaaagacgcaaaagaagacacttcaaagccggaaacgaaatgatatgacccatggattggtcgacaagtatgaaatcgcctctccagaggtttagaagagagagggtgccatagtcaataagttacaggagtaaattttgatgctccgtgtgttttttatctcgggaataagaatgacagtacagttttccccagaagtatgattttgtgttgtgcaacagtttcggctgttgaatgcttttagtcacactgtctgaatggcttgatttctgctgtgccacattctggggcgcgatgcatc

SEQ ID NO: 16568 - DNA, 2291 bp, Zea mays
  Clone ID: LIB3066-018-A12_FLI
catggcgatggggatgccgccgatgagcaggacgaggaggttgtcgatgccatcgcatgaccgccatcgaggagatggccggcatggacgtgctctgcagcgacaagaccggcaccctcaccctcaacaagctcaccgtcgacaagaccctcatcgaggtgtgcggcaagggcgtcgacaaggacatggtgctcctctacgccgccagggcctcccgcgtcgagaaccaggacgccatcgacacctgcatcgtcggcatgctcgccgaccccaaggaggcccgcgccggcatcaaggaggtccacttcctccccttcaacccggtggagaagcgcacggccatcacctacatcgacggcaacggcgactggcacagggtcagcaagggcgcccccgagcagatcatcgagctgtgccggatgagcaaggatgccgagaagaagatccacgccctcatcgacggctacgccgaccgcggcctccgctccctgggcgtgtcgtaccagctggtccccgagaagagcaaggagagcgccggcgagccgtggcagttcatcggtctcctcccgctgttcgacccgccgcggcacgacagcgcggagaccatccgccgcgcgctccacctgggcgtgaacgtgaagatgatcaccggcgaccagctggccatcggcaaggagacggcgcggcgcctgggcatgggcagcaacatgtacccgtccaccaccctgctgggcgacaacaagaccggcgagatgggcggcctgaacatcgacgagctgatcgagaaggccgacgggttcgcgggggtgttcccggagcacaagtacgagatcgtgaagcggctgcaggaccggaagcacatctgcggcatgaccggggacggcgtgaacgacgcgccggcgctgaagaaggcggacatcggcatcgcggtggacgacgcgacggacgcggcccggagcgcgtcggacatcgtgctgacggagcccgggctgagcgtgatcgtgagcgccgtgctcaccagccgcgccatcttccagcgcatgaagaactacaccatctacgccgtgtccatcaccatccgcatcgtgctgggcttcctgctcgtcgcgctggtctggaagttcgacttcgcgcccttcatggtgctcatcattgccatcctcaacgacggcaccatcatgaccatctccaaggaccgcgtgaagccgtcgccgacgcccgactcgtggaagctcaaggagatcttcgccacgggcatcgtgctagggacctacatggcgctcgccacggcgctcttcttctacctggcgcacgacaccgacttcttcaccaacgccttcggcgtgcggtccatcaaggagaacgacaaggagctgatggcggcgctgtacctgcaagtgagcatcatcagccaggcgctcatcttcgtgacccggtcccggagctggtccttcgtggagcggcccggcgcgctgctggtgatcgccttcctggcggcgcagctggtggcgacgtgcatcgccgtgtacgccaactgggagttctgcaagatgcagggcatcggctggggctggggtggcgccatctgggcgttcagcgtcgtcacctacttcccgctggacgtgctcaagttcgccatccgctacgcgctctccggcaaggcctggaacaacatcaacaacaagacggccttcaccaaccgcaccgactacggcaagggcgagcgagaggcgcagtgggccacggcacagaggacgctgcacggcctcaaccaggccaccgccacctccgacctcttcggcgacaaccagggctaccgcgagctgtcggagctcgccgagcaggcggccaagcgcgccgaggtggccaggctcagggagctgcacacgctcaagggacacgtcgagtccgtcgtcaagctcaagggcctcgacattgacaccattcagcagagctacaccgtgtaaactcgactcagtttttttatttgtttttttttgcagacaaatacaaaccacacacatatatatatttgtaaagattcgttcgtattttcattttcaccgggaagatttgtaactgtcctcctccctccttgtaagttgctcctgtaaactcttcctgaattcatggcgtgtcgttgtagcaatcaccacttcctccctgtgaatgcccacagcgtgtcttggtaaaagcatgtatgtatgaatattggagtatatgttactactcagctccacacattgtatgtcctgctcccggtgacgaagaacacaaattttgcatttcag

SEQ ID NO: 16569 - DNA, 1341 bp, Zea mays
  Clone ID: LIB3066-018-D5_FLI
tcggcgtgcggcggcactgggaagcagacaatcctcatacccaagggtgacttccttgtcggacaactcaacttcacaggcccttgcaagggcgacgtgaccatccaggtggatggcaatctgctggcgaccacggacctaagccagtacaaggaccatggtaattggatcgagattctacgtgtggataacctggtcatcaccggcaagggaaaccttgacgggcagggcccagccgtgtggagcaagaactcctgcaccaagaagtacgactgcaagatccttcccaactcgctggtgatggacttcgtgaacaacggggaggtgtccggggtcacgctgctcaactccaagttcttccacatgaacatgtaccggtgcaaggacatgctgatcaaggacgtgaccgtgacggcgcccggggacagccccaacacggatggcatccacatgggcgactcatccgggatcacgatcaccaacaccgtcattggcgtcggtgacgactgcatctccatcggccccgggacctccaaggtgaacatcaccggcgtgacctgcggccctggccacggcatcagcatcggcagcctagggcggtacaaggacgagaaggacgtcacggacatcaacgtcaaggattgcactcttaagaagacgatgttcggcgtccgcatcaaggcgtacgaggacgccgcctccgtgctcaccgtctccaagatccactacgagaatatcaagatggaggactcagccaaccccatcttcatcgacatgaagtactgccccaacaagttgtgtactgccaacggcgcctccaaggtcaccgtcaaggatgtcaccttcaagaacatcaccggcacctcctccaccccggaggccgttagcctgctctgcactgccaaggtcccatgcaccggcgtcaccatggatgacgtcaacgtcgagtatagcggcaccaacaacaagaccatggctatatgcacgaacgccaagggcagcaccaagggttgcctcaaggagcttgcatgcttctagaccctccatcgactgacccatctctctagttataatttttctctcgtccttgcattgcccattagatgctatccattggtaacgcacaacagtaaaacgacagacatccgacagctatattatgttcgacggtgtaacaccctgaatttgagggtataaaatttcttctccaaataccaaccaaattcaggggttacctcttgtctctctctctcttttccttttgattaaaagtaagtgaattaggcgagggtttaattatttattttgtcaaaacttatgtgagtcatgaaatgttgcatc

SEQ ID NO: 16570 - DNA, 685 bp, Zea mays
  Clone ID: LIB3066-018-D9_FLI
ggaatttgaagaggtggaagcagcacctgtgttggttgacggccctctagaaccgcaaacgtcaaatatcatgtcaactactactcacattcaagaggatcctttatctgcatttttcagtgcagctgcaaatgctggtggcaattctgctgtagctgttgcaaggcaaccaattcaactttttggtgctactccggtggctacacatgcagctactagtatcactacaatacaatcgccaggcttgcattatttgcttccttcacaagcctcatcggtttctgggatgcctgctgatgctcatggttctataggaaggtccacaaaccttgtaaatccatcacttttctcaccattgacgtcttcacagacaacaatggtgtgcactaattctgtagtagcaattgctccacctcaacatcctcagactgctcagcagccgcaaagtgctcccttgcttcagccttttctattacctacggcttcaccatctccaccatatgggactccattacttcaaccgtttccgccacctaatccatcgccatctcttgcgtctgcaccagtcttgagtccaacactgtctagagacaaagtccgagatgcattactgagacttgtggaggtatactgttctgtttattttatttcgatgtatgatttgaatgcattgttcttttttctg

SEQ ID NO: 16571 - DNA, 709 bp, Zea mays
  Clone ID: LIB3066-018-G10_FLI
gaaggggaagagtcagcaatggaggcgaggattgcaggagtgcccgaagatgaagagtccggcctcctcccccgcccgtccgcagccggccgacggccgtcctcccgcggcccccgcttcccgcctccaccggcagcctgggcgacggtggacggccccctcgggcttccgctggaggacgcggagggccacgcccgccgcttcttcatgtggggtttcgcgtgcctccccttcctctgggccatcaactgctgctacttctggcccgtcctccgctcgtcggtcgcctcctcgcccgccgccttcgcccccatccgcccctatgttgtgcggtcggcaattggcttcaccatcttctccgttgttctggtcacctgggccacgaccttcgtcgtcggaggcgagcggttatttgggccagtgtggaatgatcttgtgatgtacaatgtcgccgacaagcttggcatctctggattcatgggatgagcctgcgatgtctccctcacttcagctgggctcgcttcacccaagcgtggaacgatctattccatgcatctccctagggattaccactgtctcatgtactttattgttgtcattattattgacagactgactggtcagaacaatgtctagcatggctagctcatgttatagaaggaatatggatcgatgaaaacgatgataaatgaaactcaatctgatggac

SEQ ID NO: 16572 - DNA, 715 bp, Zea mays
  Clone ID: LIB3066-018-G6_FLI
cttgaatgatatagcactagcaagtttgttgaatgttaatttgaaggaccagtcacatatcaacaggcaggaacctaccaatgatacatcactaggaggagcaagtttcttgaatgctaatttgaaggaccagtcacatctcaactggcaggaacatatgaatgagacatcaccagtagcaggtttattgaatgctaatttggaggagcagtcacatctcaactggcaggaacctaagaatgagtcatcaccagaagcaggtttcttgaatgctaatttggaggagcagtcacatctcaactggcccttgcaggaatgtgagccatggattgagagacaaatgttttgaccaatagtttgatccttgttacaagcctgacttcccatgttcctgagcagcagtttcctctactgcacaaccagggccagagtgagcaacaaccaagatattcttgtgagcgtgatggaaattacattttagttctctgccttcgctgtcttaagctctctgaagtattgtcttcgactttgctgggatgatgagctgctgccccgagacaacaacagtcagccagaccaaaatcacttaaatagttttaacaatgtattaagttttgtcttgttacctgctgtctggcgtctgccatgttttgtccactgttaaacttgtctaataatacccttttagggctaatttggaaagcctcaatgtctt

SEQ ID NO: 16573 - DNA, 1159 bp, Zea mays
  Clone ID: LIB3066-019-A5_FLI
tcttcatagagcgcgtcggggtcgggggaggacctgtcgatttggcatgagctgccgattcaatcatcctccggataggaatctggctattgcctctgccagaatgaagggagaatatcctgagagagcgggacagccagagtgtcagtattatctgaagactggaacatgcaagtttggccctacatgcaaatttcaccatcccagggaaaaggctggaattgcagggagggtgcagctaaacacatcaggatatccactccgcccgaatgaaaaggagtgtgcatattatttaaaaacaggacactgtaaatatgcaaatacttgtaaattccaccatccggaacttttcaatgtggtgccttcgtcacgtggttctcctatttatacctctgtacattcctctgcgagtgctggtccgcagtcctatactggaactatgccaagctgggcttttccacgagcttcttttataccaagccctaggtggcaaagtccttcaaattatgcgccgatgattgtacctcagggccttgttcaaatgcagagctggaattcatatactggtcagctgcagtcacctggggctcaacaaacttatggaagttcacaacaaggagaagctagtacaggaaatcagggaatgctgtcaccatacagacccagttcgtttcccgtgcctcaatatgcgctgcagagagagaatgtatttcctgagagacctgatgaaccagaatgccaatattacatgaagacaggagattgtaaattcggtgcagtgtgcaagttccatcatccccggggtgaagaactgtgcaaattctattctcgttacggcatctgcaagttcggcgccaactgtaaattcgaccatcctacagtggttgctccaatggtctatgcgtatggtttctccgcgtctgcttcccctgcatccgcttcgactaatgtacctatggcgcgacgccttctgggatccccaccggggtctggatatacatcttaggcgtcgtttttttttcagttgacctacttcgatttataaaatccatggcactgcctcaggcgctgtgattgtttctcctaacttcctgccgggatcaaagttctgtaaattgagttgctaccggagatgtacagccccgttttttttttggtt

SEQ ID NO: 16574 - DNA, 810 bp, Zea mays
  Clone ID: LIB3066-019-G9_FLI
gcagccgaactagttcacagattgagtgttctttggaatgtcctgtagtctgttcgatatcactgtacgactcttgtatggaagcaacagacagtgatcataaacctgtcaaatgcgtgttcaatttagatattgctcatgtggacaaacaaacaatgaggcagaagtatggagaaataatgagttcaaataaggaagtgcttgactcacttcagggcttggaggctttgcctgaagtagatatcagcacgaatgacatcatgctgcaagatcaaaacccttttgttgtgaaactgcataacagaagtacaaaagagttggcttgttttgagatcattggtcagacaccaatgtcatctggcacagctttctcaggtttcccttcttggctgaaggtttctccggcagtcggcataatttctcccagacaatctgttgaagtgacgttgcaacatggacaaatacgaagtcaagattatcttactgggacttcaggggacagttctggagctgcgcaagagaaggttgcaacgctattggtcacagtaaccagagtggactcgacagctgggagacggcacaaaatacaagtacagcaccggtgccgcagggagacgtattcgtcaagaggttataacttggcggatcgattctttgcttgaaccagagaattcagaagtactaggcgaacgatgttgatgtcccagtgtgcatagagatttgcatgttgtagaacaaaaatcctgtgatgagagtggcataaaaacgcggatttggagagttcaaatttattaatagtgtcggaaagag

SEQ ID NO: 16575 - DNA, 547 bp, Zea mays
  Clone ID: LIB3066-019-H10_FLI
atgcagtatacttgtaaatagcttggactggtcgaaacttagaccaaatctcccgtggcttgtagaatcgggaggatgtgttttgctggattcttgtattattcttcagttcctttatttccattatcggaaacgaagggagccttcggatgagcacgacaacgcagacaaagcctgactgatatagaaactactgtttcttcttcggctcaaagaattgaagctgaaatgggtatcgataccgacctgcctcctacaacgggctctggatagcagcagcatcgttgttacctgaagatttggagcgtcgtttcactggttgctgcttggagggtacttctcaccgccgtcatgtcctgtggagaggcttgtgaactattatttgtctcgtagtgtcaaaatgtcttgtttttctattgatttatatcagatatttgatgttggctggtctgcttttgttttatattctttttttgtgtgtgtgtgctgcagaaacttgcacgagaaatgtacattcgtcgaataaaaatgtgcttattctcgtttt

SEQ ID NO: 16576 - DNA, 951 bp, Zea mays
  Clone ID: LIB3066-019-H7_FLI
gtctattggaatcagcaacaaatcttcaggtgctttgcctgcactattgtcttggaagtttaacttcatttagtttccaaacaaaggcacctgcattaagagtattgcggcttcattgggtaacttcatggcttacaaatgatgacttgacaatccttacagagaattgcaatttggctgaactttcactttctggttgcaaacttcttgactccagctctcaagacattatctcatctgggtggccaaacttggcacttttacaccttgaggaatgtggtaaagtaactgttgaaggggtttcttcttttttcaactgtaaggctttggaagacgtcctactacggcacacgtccatctgtgcatgtcatttccaggacttctaccggtgtaacttttctccgttgaaaaagttgaattgttgattcacttgattggttatatagtttctgagagttgggaaccgcagggtaggggcatcggaaggagcatcatagacgatgctatcagagagttaccactactgcggaagctggctttggatctttgcgatgcctgtgaagacggttacgatagcccaaacgatgcggaagggaagatgattagaagtgtaaggatgagtcgatgcaagaagatggcggggtcgtgtttggaggtccccagacaagggtcttcaacttcaaggccggtgcacaaggacactgtagtgctggaatggagcagcagaatgttcacaaccaccatagtgaaagaaagagtgtgatgagcctcttctgtagttttgtccctaatgaagaacacaagagcaggccacaatatatatgacttgtatgaatggtctccccgcttctgattttgaatgctttgtatgtgtgaagttatacaagtgtgacggacatatcctcgtgtgtgaatgtatttgtatggtatcaaacgaagatcatcttttgc

SEQ ID NO: 16577 - DNA, 212 bp, Zea mays
  Clone ID: LIB3066-020-A11_FLI
aattggtcgtctgagaaattttgatagcgccgcctgatgtgttatcatcattatatgtgtaattttactgttttaccaggagattgctacgtcgagttatatgttgtgtcgaattcacgtgtaggctctgaatcttgactgtgttcgttcattttcgcttgtttcacactgaagtgttataagctcaactttactgcttttgttttcttgtg

SEQ ID NO: 16578 - DNA, 526 bp, Zea mays
  Clone ID: LIB3066-020-D6_FLI
gcattacgaggccaaaagtaagctgctgctgttcttcgacccgtcccgttcgttcgattcgttctttccgccatggaggctcggaggaagcccgcggtgtgctgtgcccttcttgtgctgctcatcgtcgcctccagcgcaacggtgtcgactgctcatgacgagagctgctggaaggacgacgaccaccaccctatctgctttcccgaagactgcgtggcgacctgccaggatcacggccacgcggacggccgctgcaactgggcatggtcgtggaggccgtattgccagtgcctgttggcggactgccaataggcgcgaacagctgcgtcgcatggcgtcctggctgcctcgccggccgatgaaggatgaacggttgcggccgatgatcgatgtgtccgtcggcatgtcgatcactcattgaaaccccctctaatcctgtgcggtattattttcatggcacctgtggccattaaagatccatggacacgtacagtaccaatacatgattcttcacagttcaact

SEQ ID NO: 16579 - DNA, 1988 bp, Zea mays
  Clone ID: LIB3066-020-E10_FLI
cgcgagcagcggggcgatcgacctcctcgaggacgacggaaacgtgcgtaccataccatggcgccgagcaagctgcgccaggcgctgggcgcggtgaaggaccagacgagcatcgggctggccaaggtcggcagcggcggctccctggaggcggacctggacgtggccatcgtcaaggccaccaggcacagcgagtcgttccccgccgacgagcgccacatccgggagatcgtcacgctcacccgcctctcccgggtgtacgtcggctcctgcgtgtcctcgctgtcgcgccgcctcgggcgcacccggagctgggcggtcgcgctcaagaccctcgtcatcgtgcaccgcctcctcgccgaaggggacccggcgttcgagcaggaggtgttctacgccacgcgccgcgggacgcggatgctcaacatgtccgacttctgcgacagctcccgcgccgacgcctgggacttctccgcgttcgtccgcaccttcgccgcgtacctcgacgactgcctcgagtgccggatgcagggcaagcagcagggtggtggtggtgccgccccgcgcggcggtggcaggccgctccacgaggagatgtacgcatcccccgggaaccgcttcgcctgcggcatcgccgccttcaacgggagacaagaggacgcggcggacgccgaggcacagaggacggtggctctcgtggccagggacccgcccacgagagagatgacggtggatcagctgctcgtcaaggccaaccagctgcatcatctcctcgaccggttcatcgcctgccgccctgtaggcgcggccaaggcgaaccgagtggtgggggtctctctgtacccgctgatcaaggagagcgtgcagctctactgcgagctcacggaggtgacggccacgctcatcgagcagttcgcggagatggagaccgcggactgcgagcgcgtgcacgccctcttctgcggtctcgccaagcagatggaggagctcgagacgttctacgcgtggtgcaaggtcgcctgcgtgtgccgccagtccgacgtgccggaggtggtggaggccgtcacgcagaagaagctggaactcatggacgagttcatccgcgacaggcacgccgcggactcgcagcagaggctctcgccgccggatccggagccgatggcaagcccagagccagcccccgtcgaagaggacaacgacgacatgaacgcgaccaaggcccttccagcgcccgaggagccggcggcggctgcggcgcaagaggaaagcacagccgggaaagccgagccagatgcctccctcatcgtggccgacgacccggtcgaggaggaggccgacttcctgaacctcagcgcggacgccatgtccggccaagagcacgggcggcagctggagctggcgctgttcgacggcaacgcagcgccggaaggcagcgtgttccaaggctcctcggcggactgggagacggagctggtgcattccgcgagcgcgctcgcgaatcagcgcgcccaactcggcggcggcctcagcatgttggtgctggacgggatgtacaaccacgcggcggcggcgaccaacgcgcagacgacgttctccggcagcgccagcagcgtggctctgcggccaccaccagggccgcacatgctcgccttgccggcgcctccaggaggcggcagcgccgtagcgggtgcggaccctttcgcggcgtcggcgctggtgcctccgccgacgtatgttcagatgtccgacatgcagacgaagcgccagcttctgacgcaggagcagcagatgtggcgacagtacggcaagaacggaatgcagcagggggcattggcaatgccaaaccagaatcaacagttgctaccacacgtggggcacaattacgcagggtatcggactacatagattaatgacctgcagatgtaattcctcctgcgaccacatttcctccagtgttcgaagaaaaggcttcggagtatcagatagtc

SEQ ID NO: 16580 - DNA, 1245 bp, Zea mays
  Clone ID: LIB3066-020-E7_FLI
gaaaaaatttcttgagtttgaaaataaactgaagagactagaggagctggaaaaagaggcaacagagctaagagcggcaaattcaaggctgcagcaggagaatgcacatcttattaggcgactggaggttacacgcctaccccctgtacctaagcccaaaactagtaaaagcattggaggaggctgatcggttgaaacaagaaactgataggttggctaaagaggttgaacaacttcagagtggcaggtttgcagatgtcgaagaattggtatatctgaaatggataaatgcctgcctacggtatgagctgagaaacaaggatgccccatcagggaagactgttgcacgagatcttagcaagaccctgagccccaagtctgaattgaaggccaaacagctgataatggaatatgccaatgtgggtgcggaggacagtcacttggggcatgtcgaattcggttcagagtgctcttcctcacgggcttcgtcaggtgaaccggatgatgtgtcaattgatattgcttccatgacaaagcatactaataaaaaccccaaaaagaagaagttcttctctaagcttcggaaactggtgctgggaaaagggaaagagaaccgtgaaatttctactctggagaggagagtgtctatttcaagttgttccttcgatgacttcactggaagggattcacatgatagctattcttcgttcatggcagaaccaaacatgcctgatagtcgacggcatggtgatcatggctttggtacacattcttctttggacagcgcaaaatctagtcctcttggcacagaaattgtaggtgaaagaagtgaccattctgtggtcaagagtgtatcttctagagaggaaaaggtaaatgcattcggtcccagcattggccttgatagtagcaaggccatacctgaggatgttgagatccataaatttgctgatgcgctgatcacatcaaggtcaggttccatgtcatcaagaagatcggcatccttccgacactgatataggagtcatctgctactgacccctctgcctggatgtatatttctgccagttcttgatggggggagttataggagatgttactggaatataagttgtcaatactttatttttttgtaccattgcgtatagggtgtagtttacttacctttaataccaactcctactacctgggctcgtcatgtgtaccataaaatggcacatttcaatggcaaacacaagacaattc

SEQ ID NO: 16581 - DNA, 503 bp, Zea mays
  Clone ID: LIB3066-020-F11_FLI
acatcgtcccacctgtaggtacgacactgcgccgcttgaaggaggctttgcggcgatggaccgggtcggcggcggcgaaaagcaactggaggattgcacagtagccaatgctctaggaacttggttcttctcagttgcgggtgctcttgttgctattcctgtgggcataaagaagaaatccttagccccactcgtcttcttcggcactactggaaccatgctggacattatcatgggcattacccagtgtgagcgagagcatgctgagcgggaaatgaagattttggaagcccagaaattttcggtcgatgcttcagctcagaacgaaagctctgattcctttggcagtgctgacaagtgaaacacttctcctgttttccctcacttgtgacctggcttcacctctgttaattagagttgttgctcagatgccaatttgacacctttaaatttctgaatacactattcctactccctcaataacgtgcaattgtgcatttgat

SEQ ID NO: 16582 - DNA, 678 bp, Zea mays
  Clone ID: LIB3066-020-F12_FLI
tctccctccccctttctctctcttctctctctaccaccccaggccccccgatctcctcctcccactccgatcgcccgaccgatcgccgagcttccctgttccctccccgcccccgcgacgccgcgacgccatggagccgccgcacgccgagcaggtcgtcgcctctgtagaagcaggaggagagggtggcactgcaagcccgggcaccggcctcgaagggccggtgcttagcgcgggggctggacggcggtgggtaaggggaggacggggagctgggggcggggcaggaggcggacgcacgactaccggagcggcctggcgaggccgactgtggctactacctccgcacggctaccggaccggcctggcgaggcggctgcggctatcgctggtggcgtcgtggggtacggtgacagcgaggtgttcagccaaaatgtcttcggagatacaatctgcggttcgtgacgtcgtcagtgcaagacaaggccgaagctagccctgaccagaagcaggagcgtagcaccaagaaagatgaatctggcgatcaagaatccgaagctgtcggcaatgcggtgccatgaaagggtgtttgcaaatatgtacaaaacataataacatgtgtaggttttgtgaatgattttgttgtggtgcttattgatggtttatgtgatgtggatc

SEQ ID NO: 16583 - DNA, 1320 bp, Zea mays
  Clone ID: LIB3066-021-A4_FLI
ggaggagctgaaagctactgtacaaggtgtcctcaattgttgctcacactatttttgcttcgcatgcatcatggaatggtctagggttgagtcgagatgcccattgtgcaagcagcggttcactacaatcaccaagtcatcgaaggtagatcttggtcttggagtgagaagagctgtaatcaaggtcgaagagcgtgatcaggtttatcagcccactgaagaagaaataaggcgttggctagacccatatgaaaatgttgtttgtatagagtgcaatcaaggtggcgatgataatctcatgctactatgtgacatttgtgattcctcagcacatacttattgtgttggcttgggtagagaagtgcccgaaggaaactggtactgtggaggatgtagactcggtgacgagggaccatcatatactggaattcagcgtacagtagcttatgaaagacaaaattacagaagtcatgtcgatagtagttctgtaagttttggcatggctgcaccaggcggtacatttgaaaggccgtcatcaatcaatcctcgccattcttttcaagggattgatctaaatctatctccaagagagtttcccggagaatcacatcttgctgaatcacaagtttcaactgatagcgtatcaactcccactggaagagctggaagaactatttcaggaaggcgtgaaatacaacggtacattcagagtttgttcagaccaagtctacctagtagaccagacacgtaccacaatattgcgcagaacagtggtggtgtatcaagaaatgaaccgaaccgctggaacttcccttcttcatcagaagcaaacacatcacagaatctgcctgatggcattcagaaccatcacagtgaccttccatttgttcaagctcacagcaattttgctccatttatgtccctagatggggatgatttccagcaaattgagggtgtcaagagcaacctcaggaacatgcagtagagcccttacggcgttactagaagctcgattctaccctgtgaagcttaccaagggggcaacatgtgccgttttaatggcttgtggaactgaacataacaaaagcttgtgcctgttgcattctcccagaaattgatgtggttcggctcatttgcggagatgtgatgtggtcaacgatataagatacatgctctctttgtttaagtttaggcattttttgttgtcgtcattcttattcattcagtcattaagcacaacctcagattacacagcgaagaaggcatttctgaatgtcttgatagcttcaaatttatacattgtaatattgtggtaacacc

SEQ ID NO: 16584 - DNA, 1308 bp, Zea mays
  Clone ID: LIB3066-021-B7_FLI
cccgatgcgcctccgccggccggaaaacccctactagtcctagggctcgcctcgccgccctgatggggggccggccggggtatctcaccctgccgatcttttccgtggtcgcggcgatcgggtacgtctactacaccacggtgttcgtggccgtgccgcggtggctggacctgtccacggctgcgggggtagccaacgccgccgcgttcacagcgctagcagctgcctgcctcgccacctacgccgtcgccgttcgcagggaccccgggcgggtgcccccgggttttgtgcccgacgtcgaggacgccgagagcactgtccacgagatcaagcgcaagggtggtgacttgagatattgccagaaatgttgccactataaacctccacgtgcacaccattgccgtgtttgcaagagatgtgttctgaaaatggaccatcattgcatttggattaataactgtgttggacatgagaactacaagattttcttggtctttgtattatatgctgtggttgcaagcttctatgcattgggagcgttttgcacagtgttcctaaagatgagcagccaggcagcgattcttctcgaacatccattattatctgtggggtcattctttctccattagcgttagcgctggcagtgctcttaggttggcatatttacctcatattacagaataaaactacaattgagtaccatgaaggagttagagcgatgtggttggcagaaaaaggtggagatctctatcatcatccatatgaccttggtgtctatgagaatcttatttcagttcttgggcctaacatattttgctggctctgccctgtattgaatactgttggaaatggccttcgtaccgtacatcctatgatattccggtatctacaccaccaaaaaaaatagcagcacattcacaataggtaatagttgctaatttgtgaaaggatttcccattaagctgctagaatgtgtttggtctgaacgattccgaaggcaggtcgtgtaactctgcaacatacaggagatgatgactaccacagcctctcgccaggtgtttgtcttgaatcgagacatgaactcttaaccttgttttttatttcattcttgacatacttgataatgtctcgcttgtaatctggagtaggctgttcttaccaaaaagaaaaaaaaaactgcaattctgttgtaaagttagttcgtatgtttgggagccatgtaatgtagccaaaggccatgaaaccgattttcccagagtatttgtgtacatttgtttaaaatgaaatgtaacatctgctgtacttttg

SEQ ID NO: 16585 - DNA, 634 bp, Zea mays
  Clone ID: LIB3066-021-G3_FLI
ctgtcgcaccacgtcggccgcgccctggagcgcggcgagctgcaggacatgctggaccccgccgtgcccgactggcccctggaggaggcgcagtgcctcgccgaaatggcgctccggtgctgcgagctgcgccgcaaggaccggccggacctcggcgccgtcgtgctcccggagctcaaccggctgcgcgcgctcggcgaggacaacatgcagtactgcggcgccatcatcagggggggcggcggcggcggcggcggcatgcacagctcgtcgccgttccacagcaacatctcacggtcacacgccgagatgatgatcgattcccagtacccaagatcagtgttcagctcaagagcgggcgattcgcccatgccgccgagaaggtcgaacgcttgacgggcatgaaatggacttttatttccagcatcggtgacggggtggtggtgatgtcttgtgcaggtgcataagctgcctagcatgagggggagctagagcaggtgttgtttctagcatgagtttggtgcagaattttattacacgaggtacgagctatgtattagtaaatacagaaccgtatggctctgccattgccgtgtacctgttcttgtaacctgtggagcttcctcttttgtgt

SEQ ID NO: 16586 - DNA, 1576 bp, Zea mays
  Clone ID: LIB3066-021-G7_FLI
caagcattgaagccgtagccgccgccgccggacgagacaggttgaggcggggcggcaatggccgccggggaccttgaggtgctcaccgcgctcgacaccgcgaagacgcaatggtaccacttcaccgccatcgtggtcgccggcatggggttcttcaccgacgcctacgacctcttctgcatctccctcgtgactaagctcctcggccgcatctactacaccgtggaggggtccgcgacgcccggcaccctcccgccgcacgtgtccgcgtccgtcaacggcgtggccttcgtgggcacgctgtcagggcagctcttcttcggctggctgggcgacaagctcgggcgcaagaaggtctatggcatgacgctcatgctcatggtcctctgctccgtcgcgtcggggctctcgttcggccacaccccggcgtccgtcatggcgacgctgtgcttcttccgcttctggctcgggttcggcatcggcggcgactacccgctgtcggcgaccatcatgtccgagtacgccaacaagaagacgcgcggcgcgttcatcgccgcggtgttcgcgatgcagggcttcggcatcatggccggcggcctcgtggccatcgtcgtgtccgcgtggttcaaggccagtttccccgccccggcctacgccgtcgaccccgccgcgtccacgccgccgcaggccgacttcgtgtggcggatcatcctgatgctgggcgcgatgcccgcggcgctcacctactactggcgcaccaagatgcccgagacggtggagatctcagccggcgccgccgaggagggcgccgcggctgcgactgcgactgcgactgagcctgcgccggcgtcggcgtccgcgtcttttgggctcttctccggggagttcctccgccggcacgggctgcacctcctgggcacgtcctcgacgtggttcctgctggacatcgccttctactcgcagaacttgttccagaaggacatcttcagcgcggtggggtggatccccaaggcggcaacgatgaacgcgctggaggagctgttcagcatcgcgcgggcgcagtccctgatcgcgctgtgcggcacggtgcccggctactggttcacggtggcgctgatcgacgtgttggggcggttcgcgatccaggtgacggggttcctgatgatgacggtgttcatgctggggctggccgtgccgtacgagcactggacgacgccggggcaccacatcggcttcatcgtcatgtacggcctcaccttcttcttcgccaacttcgggcccaacgcgaccacgttcatcgtgcccgcggagatcttcccggccaggctgcggtcgacgtgccacggcatctcggcggcgtcggggaagctgggcgccatcatcggctccttcgggttcctgtacctggcgcagaaccgggacccggccaagacggaccacgggtaccccgcgggcatcggcgtgcgcaactcgctgttcctcctcgccggctgcaacctgctgggcctggcattcacgttcctggtgccggagtccaagggcaagtccctggaggagatgtccggcgagaacgacg

SEQ ID NO: 16587 - DNA, 1000 bp, Zea mays
  Clone ID: LIB3066-021-H5_FLI
cacctctgagactcctccttcacaggccggcgtcgtcggtggtcggagagatggggcaacaacgcacgttggtgtatagcttcgtggcgcgaggcaccatcgtcctagcggaccatgctgaggtctccggcaactttgcctccgttgctgcacaatgcctacagaaactccccgccaacaacaatcgcttcaactacaattgtgatgggcacacattcaactaccacatttatgatggattcacgtactgcgttgttgctaccgagtcagctggtcgccagcttccagttggatttattgagagagtcaaagaagatttttccaagaaatatagcggaggtaaagccaaaaatgctagtgccaatggcctcaagcgagaatacgggcctaaactcaaggagcacatgaggtattgtgaccagcaccctgaggagatcgacaaacttgcaaaagtgaaggctcaagtcacagaggtcaaaggagtgatgatgcaaaacatcgagaaggtattagatcgtggcgaaaaaatcgagctccttgtggataaaacggaggatctccgatcacaggcacaagatttcaggcaacagggaacaaagatacgacggaagatgtggtgggaaaacatgaagatgaagctcatcgttttcggcatcgtggttgcgctgatcctcctcattgtcttgacagtttgcaaggacttgaattgctgataagaagcagacacacaggaaagaaaagaagaacgtggaaaagggaaggaaaaaaaaacatagaaggtgcattattggtatcacaccgcacggccaaaatccatctcgtctttgtgatgttgacattgatcacattattgttcttagtcatgtctagatcgttgggctcaaagctataacagggctctctcatattttaaataattgtagtggtggtttggataaatatcccgccgtttctgtattagtagaagagattgacggcaaaacgaacaaatttctcctgt

SEQ ID NO: 16588 - DNA, 689 bp, Zea mays
  Clone ID: LIB3066-022-A11_FLI
agccactatctgctacaccagtggcactactggcacaccaaagggagctgtactttctcatgagaacttaattgcaaatgtagcagggtcaagtttaggcattaagttttacccctctgatgtgtacatctcgtatctacctttggctcacatctatgagagagctaaccaggttgcattgcttcactatggtgttgccattggattctaccaaggggataacttgaagctgatggatgatttggctgttctgagaccaacaatattcgcaagtgttccccggttatataacaaaatttatgctgcaattacgaatgctgtgaagcagtctggggggttgagagaaaggctgtatcatactgcatacaatgccaagcgacatgccatgataaatggtagaaacccatcacctatgtgggacaagttggtatttaacaaaattaaagctagacttggtggacgaatgaggcttatgacttcaggtgcttctccattgtcaccagatgtcatggaatttttaagaatatgcttcggtgaagttcttgaagggtatggaatgacagagacatcttgtgtcatcagtacgatgaatattggtgacagatcaattggatacggttggtcctccgaagtataattcatttctgggacgtccacaagtttaacctcacaagaaggatttggagatc

SEQ ID NO: 16589 - DNA, 912 bp, Zea mays
  Clone ID: LIB3066-022-E11_FLI
ccaccgcacaccagctgggaaaccgatcgagcgagcgaccatggcccgtgctctcaccctcaccgtcttcctcgtcgtcatcgcctccgctgtcgtgtcgttcgctgcggatgaggcaccggctgcctcgccaaagcattcggcctccacaccgtcaaaggcacccagcacgtcgcccgacaagtctgagaaggcccccacggcgtcgtctgaggatggtgcggctacccccgctaaggccccagcttccgcggcctccaactcagaggcgtcaccttccgaggcacctacctccgggtctgagttcggtgccgcctcacctaacgagagcgctgcgtcagaagaggcccctacaagtgcccccgaggactcatcatcggccagcccttccacgtccccgtcggaggctgaggctgcagtatcgcccgatagtagcagcggtggtggtgccacctcgaaagagccttccgccagcgaggctggtgccgcagaggagccgtcgacggccgaggccggcggcgcatcggccgacagcccgcctgagccgacccacacttcttcggactcgccagcggagtctcctggcccggccgctgaccacgagagcggcagcccgagcatgttgggtggcactggccttgccctggtcatgctggtcgcgaccgtcacgtcctccgccatgctttgtttctaaacgaccacgatcgctctgagtttaatatggtcatgcatgcatggttgtgggagccgatgactacgccttattacgagtctctgaatctctccttagggttttttaggcttttcgattcatccttttcggggttaccttgtttctatgtttgttttttgggtattgttttgtaatttttaactacgataaatgaattgttgcatagctgtgttttatgt

SEQ ID NO: 16590 - DNA, 1076 bp, Zea mays
  Clone ID: LIB3066-022-E9_FLI
gaaataaaggccaacatacaggcgagggagagcttctcgccggggcgttcgtcggccatatccactgttcatctccttcctctcagtgttctctgctttctagggtgtgagcgctctttcttgagtgagagggtccaacatttggtaccagagctaggatggagacgccgccggcaaaggatggcctcaagatgttcgacggcatgggctcgacgagtgccgcgatggagcgcgtcatcaacagcagctccgttgagctcccgctgctgaccaaggcgaattaccacgagtgggcgttggttatgcaggtctcgctggaggcgatggaactgtgggacgcggtggaggccgtgtgcaaggagcgtcccaaggatcggcgggcaatggccgccatcctgcgcggagtgccgccggagatgaaggcggggctcgccgtgaagaagacggcgaaagaagcgtgggaggcggtgaggtcgatgaggatcggcgatgaccgggtgaaggccgcgagcgtgcaacgcttgtggaaagagtacgagaacgtcggtttctgtgatggtgagagcgtcggcgacttcgcgttgcggatcaacggcctcgtcgcaagccttcgagagatgggcgagacgctggaggaccaccgcgtcgtgaagaagatcctccgcgtcgtccccaaacgtctcaagcaggtggccgtggcgatcgagatgctcaccgacctcaacacgacgacgattgaagagctcgtcggccgactacgcgttgcggaggacgccgacgcggacgacgccaaggcgaaggaggtctccacggagggcgtcgggcagctgttgctcactgaggcacagtgggaggcgcggcgtcgggaacggaacaagcagcgcaagccccgtgacggtgacaagaggcgcggcaatggcgatcgcggcaacaacggagacgatgagcacagcgacggcgacgacgatgcgagcagcatggcctcgggttcaagccggagaggctggagccgcaacaagggccagtgcttcgagtgcggcggctatggtcacatcgcccggttctgccgtgagaag

SEQ ID NO: 16591 - DNA, 958 bp, Zea mays
  Clone ID: LIB3066-023-A10_FLI
ggcaagcacaaagatggtggactgaaaattacgagaaggtcatggagctttacaacgttcagaagtctaacagtcaagttgatcctctgccaagcattccaaggtctgacagtgagatctccaaagacgataccccagctacagcaccgcttaacaaggggcaattgctacgtacttcacccagaccactaaaaggcagtgaagccataggctattcatcttcggattgtcctcagcaccaatccagtcatcttcgcaacgtttaccgcaaagaccgctaccttgggcaccagttctgtgatccagttgaactggcatcgacgcctgagttatcaagcatcagtggtgcgaagacagagacgtctattggtgcatcagtgaggacaagctcatctcctgaagaggtcgatggatcgggcgaactttcagcctctgtcagcaacgcaagtgacgaagagagggaatgggtagaagaggacgagcctggcgtgtatattactattcgagctttgcctggtagcatcagagaactacgccgcgtcagattcagccgggagagattcagtgagatgcatgccaggttatggtgggaagaaaaccaagcgagaatatatgagcagtatctctgagagaagacgtgttagctacattttaccatttgatgcttctacaattatagaaacatctctacatcaggcactaacatcgtgtcatcaggtttgctccttgcaggcgcaacaatgaccctgggcagttaggctgttcgcattgcatgtgtgattgcttcgaggcttttcctttccttttctttttgtgtttaacatttgctctgtttgtgtgatattcacattttttccctttttttgctgcgttgtcgttagtcagtctggatagacggtttatttcagaaaaaaaatgagaaactgtacattttatcaaccataagttgttgtttcgg

SEQ ID NO: 16592 - DNA, 1824 bp, Zea mays
  Clone ID: LIB3066-023-A3_FLI
aaatgaagaaaataaaaatagttgcaagaaaatttcctcgctccaacatcagctagatttatcatccaaggatcaagaagctcagcaaaatattctttctcagatagaagaagtgaagagggagaatattttactacaggcaaagaacacagaaatggaacaagagctcttaaaagctcaaaaatgtagccatgataatatggacaagttgcacgatgtggaaaagaactatgttcatctccgggataacttgaaaaacttagaggataagatctcaaatttagaagatgagaatcatttattgagacagaaggccttgaatttatctcctaggcacagccgaactgggagttatcactgcggttcttcaccatgcagcccaaaatcattcgttgaatcttcacctgtgaaacttgcacctccccctcataaccagacagaatcaagaaggtcgaggatgaattctgatagatatgaggattaccatgatgtgctccaccgctgcatcaaagatgatatgggattcaagaagggaaaaccagttgcagcctgtatcatttacaaatgccttctctattggggagtatttgaggctgaaagaacaactatttttgacttcataattcacacaatcaataccactctgaaggcagaaaacgagaatgacattttgccctactggctagccaatacatctgctcttctatgcatgttgcaaagaaacttaaggtcaaaaggattcatcatggcagcctctcgatcgtcttcggatactcacttaagtgaaaaggcaaatgaaacattccggactcctttaagagcctttggacaacaaataagcatgtcacacattgatgctcgatacccagccatgctatttaagcaacaactaactgcttccttggagaagatctttggcttaattcgtgacaatctaaagaaagagatatcacctcttttaagcctttgcattcaggcaccaaaacttgctcgaggaggcagtggaaggaggtcgagatcacctgatgtagccttgcagcaaccgataagtactcattgggatcggattgtgaaatttttggactcattgatggatagactacacaaaaattttgtgccttcttttttcacccgcaagctagtaactcaagttttttccttcattaatgtgcagctgttcaatagtatgctcctacgacgagaatgttgcacattttcaaatggagaatatgtgaaatctgggctttgtgtgctggagaaatggattgtggacactgaagagcatgcaggtgcagcttgggatgagctgcagttcattaggcaagcggttgactttctgatcattccacagaaaagcaaaaagaccattgagcagattaagaaaaatatttgcccggcattaagtgtgagacagatatatcgcttatgtacgatgtactgggacgacaaatatggtactcatagtgtatcagctgaggttgttgccagaatgagggacatggtgagtaatgacatgcaaaatcctgtctctaattcatttcttttagatgatgacttaagcattcctttcacaaccgaggaaattgcagagcaagtaccagatgttgacatgtcaaacatcgaaactcccgcatctcttcgtcatgttcattctgctcagttcttgacgcagcaccttcagccaccttatacgtctcgatgaattgcctaggtttttgctttggtaacaattagtgatgccgaggtagtgaacttagaggatttgataggtcggtggtaactataaccatcattgttgatttaatccatgctaatattcattcc

SEQ ID NO: 16593 - DNA, 1153 bp, Zea mays
  Clone ID: LIB3066-023-A4_FLI
cacaggattagttcaataaggaggagctgctggagttctacctgaagcaggcggcgcgcgggaggaagctcaagttcgacatcatccccacggtgcacctgtaccggcacgacccctgggagctgccgagcctggcgcgcgtcgttggcgagcgcgagtggtacttcttcgtgccccgcgacggcggcgggcgggcggccaagcagcagcccggctccggcggccggcctagccgcaccacggagcgcgggttctggaaggccacggggtcggaccgcgccgtgcggtgcgccgccgaccccaagcgcctcatcgggctcaagaagacgctcgtctactacgagggccgcgcgccgcggggcaccaagacggactgggtcatgaacgagtaccgcctccccgacgctgccgacgctagcagcgacgcgcgcgtgccgcaggtggacgtggtgctgtgcaaggtctaccgcaaggccgtgtcgctcaaggagctggagcagcgggtggccatggaggagctcgcgcgcgccaccgccacgccgtccgcgtcccacagcaccggctcccccgccgactccatgtcgtcgtcggagatcgtgatggtgcccgtgggcggcgtctcgctctcaccgtcagctgcgatgagcatgaagagagaggaggcggcgaagaatcagcagcagcaggaccccttcctgacgcagctgcggagcccacggatggagagctggtggtctgcctactacgccagcgtcctcaacttctaaccaaaatccacacaatccaacagctttatatgtaaagcgaaggcccacgctcacagtcgtcggcccaactgatgcccgtgcgccgcgcgctgggccgcacggcccaagagctaccaagcgcgggcacgcaccgcggcagcccaaggatctctccaccttatctccctgctcgggactcgggacctttacctatcttcttcgttcttccatgggagcgagctagagagagggcgccatggatcagcagcttctcgtggatgactccaatcatattaacgatatactaacttataatgtgccgatcgttgaacaccgtttattttgatttgatttgatttattccatgagcaatgcaaatccgatatagcacggattctgcacagctc

SEQ ID NO: 16594 - DNA, 951 bp, Zea mays
  Clone ID: LIB3066-023-B3_FLI
gttggattgtccacgaaaatgcagctcccctgcctcatgcccatcaaatcgttaaacttgttagatcggtaggcagagagaggccagactgatgggaatggcagcgaaggagcactttgtgcttgttcatggtgaagggcatggagcctggtgctggttcaagctccgctggctccttgagggtgctggctaccatgttacatgcattgacctagccggaggcggcgtcgatcctactgaccccaacacaatccggtcgttccagcagtacgacaagccactcatagacctcatttcaaccttgccggagggggagaaggtgattctaatcggacatggtgctggagggctgagtgtgattcatgcaatgcacgaatttgttgacagaatcagccaagcattttttgtggcagctacaatgctaccatttggatttcaagctgatgaagataagaaagatgggttaccaactttgcctgagaacgagattgagttgacacttggtgcgggagcagatgatcctccaacaaccatttccttgaggccagaattccagcgtgatcgactatcacaacaaagccctgaagaggaatcagtacttgcttcaatgctgatgcgtccgtggcctgcaacagctatcagtacagcaagcttcgaaggagatgatgaaagattgaaccgaatcaaacgaattttcataaagatgcagcgtgaccacatgctggatcctcaacagcaagattccatgatcaagaagtggccacccagcgaggttttggccatagatacagatcacagtcccttcttctctgcaccagaacagctgtttaatttaatagtcaaatctctatgatgcataaatgcagaaagctacagactggggttgcccggattcttgtaacactacccacaaacaataatcaccacaagatttacgacctcagatttgtc

SEQ ID NO: 16595 - DNA, 628 bp, Zea mays
  Clone ID: LIB3066-023-C11_FLI
ggacgaacttaggaaggcaaagaagaaaatgggggagcaaaatatacaaaaggctgtgaagtccgcaatggatgctgcagaagctgctctttcaggaaataaaccgttttgtgttactcatgtggatgtgggtcttgataccacggctgtccgtgaggcggttatcaaagtcatggaccagaagggtttgcctataatgttattcagcaccgatgaggcatcaaacaaagccgttatctatgctggtgtgcctcccaatgctcctagcggcttcaaggtgttggactggctaacaccttcaattgcgccactcaagggaagaggcggtggcggcaagaacggcgtcgcccagggccaggggagtgacgcttctcagctcaaggaagcaatggcacttgcgaacagcattgcttcaatgaagctctgctgatcggtggtagtaactggtgcactgcccatggaactcatgcgtggctgctgctggattactctttgattttagctttctatttacccattatacttaaacagaagttcaatggtgcttgcagtttcatttatacttaccatacaattggaagcacaggacatgtaacagtataaagcttgttgtgtgcccgattgaacg

SEQ ID NO: 16596 - DNA, 1628 bp, Zea mays
  Clone ID: LIB3066-023-D7_FLI
attgaccaaagacccggtagttccctggatggacgccggctagcctgcaagagaaaaaatgttgaaggacccaatggccagagttcagcaggtgctagcactagtttttcccacaggaacgacaatgctttccataacattgcttcttcaagttacaatcctgcacctatcagaaattcgtcctcacccaattgcttgccagttccaagttctatcgatgatcaactcccacgatatggaactaatgcagggctctcagccggtacctatgaccttaatggaggggtcaacaatgctgggaattcgcagagaagtttccgggcaagaattactacgtctcaacagattgctccctgtagtgtatggccctcttcaaatgctatcagacttcctaattcatggaatcatcagctacctcattttcaaagtgcatttgatgatacccaggaggttattcctgtggtcagcagcctcaacttgcaataccagcatccagtgaatgtttctagtgtgccaccggctgcaaaccgtttcactggccatggagcttcatcatcgagagctggcagtttggagaacagaattcttggtagtcaagaggctcctagaaggaatgtggtgcctgccaactactctgatttagttcccccgtctgtagtagacccgagacgtttgctgccagaaccatctaattggagttctgatgtccgaggcactgcaatatcaggaagtattcctcctgtatcaagagctaataacagtgcaactgttaatccgccagcaggattcagtcaccaaaacctcacccggcgccatcctcgaaatttgtcagaggagattggtcggctatctggagcacttcgcggccatcaacccccacgcttaaggccagggtttctgctggagcgccagggcgatggtgtttggggtgttcctttatcaacaaggggtagagaaggaagaaggttaatggagattcggaatgcacttgaaatgatccatagaggggagaatgtaaggcttgagtctatcttctatggcggtgttgacattcacgatagacacagggacatgcgccttgacattgacaatatgtcctatgaggagctattagcactcgaggaaagaataggaaatgttggcactggcctcagcgaggaagctgtgataaggttgctcaaacaaaggaaattttcatcttggacactaaaagcatctttggaccctgaaccatgttgtatctgccaggaggagtacgctgatggagacgacctcgggaggctggactgcgggcacgacttccacgctggctgcatcaagcaatggctggtggtgaagaacgtgtgccccatctgcaagagcaccgcattgaagaagacctgaaacccgaacaaaggctcgtgtcagagacacccccccatgtttctatgttcactcgatcgttcgcgagatcctttgccgattcgtattgctacgttttttttggtcgggaaaattttgccagacacctgcatgctattgggaaaggaaaagagagagaaaaagagagagagagagaggatgcggttgcggtcctctgtaaactgctgctgcagtaaataatccctggaatatgtctccctgcatcc

SEQ ID NO: 16597 - DNA, 725 bp, Zea mays
  Clone ID: LIB3066-023-E11_FLI
tcttcccttccctgagcaaagagaagtagccacaagcatgtctggcatcatcgacaagatccaggagacgctccacatcgggggcgaccacaaggaggagcacgagcacaagaagggcgaggagcaccacaagaagggcgaggagcaccacaagaaggacgacggggagcacaaggagggcatcgtggagaagatcaaggacaagatcaccggcgagcacggcgacaagtccggcgaccacaaggacaaagaccataaggagaagaaagataagaagaagaagaaagagaagaagcacggggaaggccatgaccatggtgatggtgacggccacagcagcagcagcagcgacagcgactgatctcgcctcgccgagcgccgtacgcacaaatgcaccgcgcaggttataatacgagctgtccgccgaacaccatgcgcatatattatacagtactcgccaagattgttgttctgcaatcttcgggataaaaaggttctttttttgttttcgtttgcctgtggttttcatctttgctggatggatctgaagaacgaagtcgatgttggattcacatgtatgcattgcttggaggatactcaccggatatcggtgctgatgtgatgatgaaaaaacagtctcagagatagctagcatgtatgcgctgtttgccatgtaataattaatggtaatgcagaaatcgatctgcttgattgtgttgtgcctt

SEQ ID NO: 16598 - DNA, 893 bp, Zea mays
  Clone ID: LIB3066-023-E5_FLI
gggcaggggagtggaggggaggggaagcatcgcaattccgaacccccacctcgccgctcccaccaccgcggccgggttgcgtccgtttcgattgcccaggatgagcaccgagtccggggagctgctcgggatcgaccccgtcgagctccggttcccattcgaattaaataagcagatctcctgcacgctgcagctgacgaacaagacagacaagcaggtcgcgttcaaggtgaagacgacaagcccgaaaaagtactgtgttcgcccaaacaacggcatggtggcgccccggtccaaggctgacgttgttgttacgatgcaagcgcagcgggacgtgccaccggacatgcaatgcaaggacaagttccttgtgcagagcgccaccgtcgccaaggaggtcgtgccaaaggaggtcactggagacatgtttaccaaagattcaggcaatgtagtggaagaagtgaagttgaaggtagtttatgtagcaccatcgtcctctcaaagcgaaagatttgaggatggtaatctcggcagtttgagttatcaagaggaaacaaaggaacctaaagaatcagaaaaaataatcactgagccatttgctttgatttcgaaactgatggaggagaagaattctgctattgaactgaacaacaaggttcgacaagaattggattttctaaggcgagacatcagcaagcggcatggtggtttctcattagttttagtactggtggttgctattctgggaatactgctagggttcctcatgaagagatgagtgtatgtaatgatttatcttgtttggccttttctgaactaaacaaaattgtatgtgctctgtgtgcttgctgttgtacaactcagtgatctgttaatcatagtatctgaggcct

SEQ ID NO: 16599 - DNA, 1825 bp, Zea mays
  Clone ID: LIB3066-024-A3_FLI
tgcgtttccaagtccgatacaaaccagcgccgcgccgcgcgagcacgtcgggcgacgttgcggcaggcgagatccgagaacactcctccctcgcgcccccgcacccgcatggccgccgctggccgcagatagggaggcgcaggcgggggcgtgcagatccagatccggtgggcggcgaggacgagatcgccccctaccaccatggcgggcgccgtgtcggcgctcttcctgctggacattaagggccgcgtcctcgtctggcgcgactatcgtggtgatgtctccgcgctccaggccgagcgcttcttcaccaagctcctcgacaaggagggcgactcggaagtccactcgcctgtggtctacgacgacgccggcgtcacgtacatgttcatccagcacaacaatgtcttcctcctcaccgctgctcgccagaactgcaacgcggccagcatcctcctcttcctccaccgtgtcgtagatgtgtttaagcactacttcgaggaactggaagaggagtcgctcagagataacttcgtcgttgtgtatgagttgctggatgagatgatggatttcgggtacccacaatacacggaggcgaagatcctaagtgagttcatcaagacagatgcgtacaggatggaggtcacacagcgtccacccatggccgtgacaaatgctgtgtcatggaggagcgaggggatccgttacaagaagaatgaagtcttcttggatgtagtagagagtgttaacattctagttaacagcaatgggcagattgtgagatcagatgtggttggggcactgaagatgcgaacatatttgagtggaatgcctgagtgcaaactcggcttgaatgatagggttcttttggaggctcaaggcagagcaactaaaggaaaagcgatagaccttgatgatatcaaatttcatcagtgtgtacgtttagctagattcgagaatgatagaactatatcgttcatacctcctgatggatcttttgatctaatgacatacaggcttagcactcaggtaaaacctcttatctgggtcgaagcacagattgagaaacattctagaagccgtatagaactcatggtgaaggcaaggagtcagttcaaggaaagaagcacagcaacaaatgttgaaattgaagtgcctgttccttcagatgccacaaacccaaatataagaacttcaatgggttctgctgcatatgctcctgagagagatgcaatggtctggaaagtaaaatcattccctggtggcaaggaatacatgtgcagagcagaatttagtcttcctagcataacagcggaagaaggggccccagaaaagaaggcaccaatacgagtgaaatttgagataccatatttcaccgtatcaggtattcaggtccgttatctgaagataattgaaaagagtggttaccaggcactcccctgggttagatatatcacgatggctggcgaatatgagctgagacttatatgagttttctcttttctggctgatggaagacatttatgaagctgcaagatacatatttgctcgagacagcaaccgtatgacatttgaatgttagcctggacgtcttctgccgaccacacaaggttttccccctgggggcttgttcatcttgttaggctcaccttaccttggttattgtacgttacccatcaagtatagtttttgaaaaaaagagaggataattttaattttcatctctcttgtattattattgatttatttttgtgggtaccaaacttggatttgtttcatctgatcgagttcacaaaaacactgccattactgggtgatggttctg

SEQ ID NO: 16600 - DNA, 1227 bp, Zea mays
  Clone ID: LIB3066-024-A4_FLI
agcaaggctgttgagcaagcacagcagcaagttaggtctgccaaaatgtcagcagcggtggtaagaaaggacggagtggatgcacaggcttctgagaaaactcaaaaatcacgcgcgatcttgggtagaagtggtgtaaatggagtagttactgaccacatccagggggtacggcctgctgctgaggcagagagaccaggatcttctgatgcagtgagtgtttgacgcacacccttgttgatcagccaccagtcgtcctgaagccttcagaacaccagtctgagcaggaggcgcttgaaatagcgatcacaaagttgctattgaagtcatattacaatattgtcaggaaaaatgtggaggacttaataccaaaagcagttatgcatttcttggtatgtgattcatatccgattgtcctttcggttaatcatacaaaaagggcgctgcataattaccttataacaaaactttatagagatgatcttttggaagacttgctcaaagaacctgatgagataaccataaagaggaagcagatacgtgaaaatctcaaggtccttcaacaagcttacaaaactttggacgagataccacttgacgcagaggcagtagagaggggtggatactccctggattctgatgcgattggtctgccaagggcccatgggctttcttcatccctccacggattcaacgatggaagctcaccatattcaaccccgaagcagtcaaggtcaaggaggtcaaaccattctggcgagcagcttcctttcaaccccaatatgagtggcaatggtttttgatgccaccctcctacgttacaagacggccaaccagattggttatggaaccaaccaaatgtgcagcaagcacaccttattcaagtttgttggcaccaatagatatatgttatttctagttaaattctttgtagcgctgcgccgatgaagcctaacatggtgcgagttttgttgtttcgccttttgtacagtatatatctttgcccagtcatttcgtcatgatatgatatcaagtgatgggtatagttttgttcggacccagggaaagcaatgggaaaaaaatctactaggtgtgtagcagtacccagcgtctgagtgactgttacggatttgccttgcaaaatagacatggctggtatggcggcggcaaaaacaaaatgtggcataaaattgatctcgttttcttaatgttttcatttgatttgat

SEQ ID NO: 16601 - DNA, 1132 bp, Zea mays
  Clone ID: LIB3066-024-C6_FLI
gagaaatgaatatcgatagctggcatatcatcatgaggatgcgaattccacaggaaggcccatgtgatcctattgctcccttagatcttccacattcgttgcatgctttccaccgcgtatcagcttgtgactctctcaatttggagggataccacacattccgtggaggattctggaattattttagcttgggaatggatgcacaagtatcctatgaattccactctgaaaggaagagaaatccagagaagttcagacaccagctaagaaatcagggtacatatgctaagcttggatttaagcattccctaaaccatctttcatcgaggaacatttctcaacttgcaaaggtgaagatcatgaaaagacctggttcccaatgggaagagctgaagattcctcgcagcattcaatcagttatctgcctcaacctgccaagcttctctggaggattgaatccatggggaacacctggcactaggaaagcacaagacagagacctgactgcaccttacgttgacgatgggcttatcgaggttgtcggcttccgtgatgcctggcatgggctcatcttgctggctcctaatggccatggaactcgtctagcgcaggcccaccgaatccgtttcgagttccacaagggagcagccgagcacacgttcatgaggatcgacggggagccatggaagcagcctctccccaaggaggacgacaccgtggtggtggagatctccaacctccgtcaggtggccatgctggccagcgacccgtgcaggtccaagagcgtgaacgagccgtcctccccgtcgtgccacggccatgaggacgacgacagcaacagcctggaggacgaggacgaggacgagtgggaggacgggaggaagaagttcggtgcggcggccaccttcaagatccccgacgaggtcgacatcgctcatctcagttagaatctagaaaccccgccggctgcttctgcgtcggttggtggtgcggagtctgtgcatttcagagcgtttgctgctactgctcccttttttttttttgtttttttggttgcctccacgagctcagatttcagaagctaaccactgccgttgatgaaactgctcgttatgatcccccattgttctgt

SEQ ID NO: 16602 - DNA, 831 bp, Zea mays
  Clone ID: LIB3066-024-E5_FLI
acattattacgggaacaaaaagaaaaaaaacacgagaaaaatcaaatcaggagacggggattccagagagcccctgtcgggtagggaagggaaggagaggcgaagcggaggcgagatgggggcggccgaatccgtgccggagacctccatacacgaattcaccgtcaaggattgcaacggcaaggaagtgagcctggaaacctacaaggggaaggtcctccttgttgttaacgtcgcctccaaatgtgggttcacggagaccaattacacgcagctgacggagctttatcagaagtacagggacaaagacttcgagatattggcattcccttgcaatcagttcttgcgacaggagccaggtactgatcagcagatacaagactttgcttgcaccagatttaaagctgaatacccagtttttcagaaggtgcgcgtaaacgggccagatgcggcgccggtttacaagtttctgaaagctagcaagcctggtttgtttgggtcatcaaggatcaaatggaactttaccaagtttctggtggacaaagatgggaaggtcatcgagagatacggaacctcgacagctccaatggcaattgagaaggacatccagaaggcccttgaggaataatttttgtgagcttgtctcgtctcatccaccacacacttgcagcagaaataggcacttgctgaaatattccgtcgtagtaacattcagaccggacgtctttgcttatctgtagtaaaaattctgtgtaatgttaccctccttttcgccttccgttcgtgtaagtagaggttgtattaagtagccatcgtctgctagcttttgcc

SEQ ID NO: 16603 - DNA, 468 bp, Zea mays
  Clone ID: LIB3066-025-A9_FLI
gactccgagtcggaaggccgcgtcgtctattccgacatgaagctggctgatgagacgggatctgcgccggctccggcaccggcgccggggccgacgaccagttgaagcgaggaaggtggccaaaactgagggcccggctactatcttttgctataactaaagatagggccaagtttaatttctccgataaattctgtccgagcaaaaagtatgatggggtttttagtcgagatggtaaataatgtatgacgcgcgtgtggaccaagagtcatggcttgctgtacttgtggtttctgagctgcaacactcaatcgactactaaactaaggtaataactaggttagtgcccgtgcgttgcaacggaaacatataatatcatgataatttaaagagaacccagagaacaatcctgattgtactattgtatatattggcaaccttggacatgaggtagaaccaaattactgc

SEQ ID NO: 16604 - DNA, 1349 bp, Zea mays
  Clone ID: LIB3066-025-C4_FLI
atcacgacaagatggcgtgcacaaacaatgcgatgagagccttgttcctcctggtcctcttctgcatcgtgcatggtgagaaggaagagtcaaagggcatcgatgcgaaagcgtccgggcctggtgggtccttcgacatcaccaagttgggcgcctccggcaatggcaagacagacagcacgaaggctgtgcaggaggcatgggcatcggcatgcggcggcactgggaagcagacaatcctcatacccaagggtgacttccttgtcggacaactcaacttcacaggcccttgcaagggcgacgtgaccatccaggtggatggcaatctgctggcgaccacggacctaagccagtacaaggaccatggtaattggatcgagattctacgcgtggataacctggtcatcaccggcaagggaaaccttgacgggcagggcccagccgtgtggagcaagaactcctgcaccaagaagtacgactgcaagatccttcccaactcgctggtgatggacttcgtgaacaacggggaggtgtccggggtcacgctgctcaactccaagttcttccacatgaacatgtaccggtgcaaggacatgctaatcaaggacgtgaccgtgacggcgcccggggacagccccaacacggatggcatccacatgggcgactcatccgggatcacgatcaccaacaccgtcattggcgtcggcgacgactgcatctccatcggccccgggacctccaaggtgaacatcaccggcgtgacctgcggccctggccacggcatcagcatcggcagcctagggcggtacaaggacgagaaggacgtcacggacatcaacgtcaaggattgcactcttaagaagacgatgttcggcgtccgcatcaaggcgtacgaggacgccgcctccgtgctcaccgtctccaagatccactacgagaatatcaagatggaggactcagccaaccccatcttcatcgacatgaagtactgccccaacaagttgtgtactgccaacggcgcctccaaggtcaccgtcaaggatgtcaccttcaagaacatcaccggcacctcctccaccccggaggccgttagcctgctctgcactgccaaggtcccatgcaccggcgtcaccatggatgacgtcaacgtcgagtatagcggcaccaacaacaagaccatggctatatgcacgaacgccaagggcagcaccaagggttgcctcaaggagcttgcatgcttctagaccctccgtcgactgacccatctctctagttataatttttctctcgtccttgcattgcccattagatgctatccattggtaacgcacaacagtaaaacgacagac

SEQ ID NO: 16605 - DNA, 514 bp, Zea mays
  Clone ID: LIB3066-025-C5_FLI
cgcggccgtccgacgccgcggcgcagcccgccccgcagtcgccggcgacggcggtgtcgtcgggcgccgccaagcccaagtgcgtggccggcgccaggaacgaccacgcgtgccgcgtcggcgccgtgcacgacccggacagccaggaggaggagggctccagcgtcaccatcgacgcgcccgccgccgcgcccgacgacgtcggccacgacgacggcagcgactacaacgaccccgacgtgcccaacaacgaccagctcgtcgtcgtcggccactgaaagctgccgcgcgcgcgcgcgcgccgacccgtggaccatgcgtgcatgaagaagaatgcagggggtgggcctgggcctgtaacctgttaatggatcggattctcggtgccaattcgtgatcttgaccggtctaagaagatggggacttgcgtctttgtttcattggttattatttctactagtgtgtatatggtaaagtcgtgtgctgtgaacctgcgatcatttatcctctgttc

SEQ ID NO: 16606 - DNA, 1105 bp, Zea mays
  Clone ID: LIB3066-025-D10_FLI
ccctgcccatcagcacaaccaccaccaccgccgcctggccgtaacgtcacacgctcgcctccttccatggcgcccaggaacgctgtccccgccgccagcgccgtggccaacggcatggtgatggagccgaggttccgcggcgtccggaagcgcccgtggggcaggttcgcggcggagatccgggacccggccaggaaggcgcgcgtgtggctcggcaccttcgacaccgccgaggccgcggcgcgcgcctacgacgccgccgcgctccacttccgcgggcccaaggccaagaccaacttccccgtcgcgttcgccgcgcttccgccgccgccgcccaagaagccggccgccgtgaccgtgagccccagcagcagcagcaccgtggagtcctcctcctcctcctcccgggactcgcccgccacgccgcccagggccgcgtctccgtcccagcaggccccgtcgctcgacctcagcctcggcggcacgccggccatggtggccgcccagccgttcctcttcctggacccgaggctcgcggtgaccgtggccgtgccggcgcccgccggtgccaacaagcatgctgcagcatcctgccgtgaagaggagcagagcgacaccgggtcgtcgtcatccgtggtggacgcctccccggcggtcggcgtggggttcgacctcaacatgccgccgccggccgaggtggcgtaggtggagcgcccggtgacacgtatagatgtccaaacgggccacccggcacggacccggcccgaacccgtttcggcccggtacgaatagggccgggccaggcacggcccgttgatgcttcgggccgggtcgggctggcccacgtgcctagagacatgcccaaacccggcacgcacagggaaaaatcgtgccgggccggcccgttggcccggtgggcctcaacggaccgggccggacactggcccgaaccaacagtagaacggtatataaatacatatatttaacataattaatcatatataataacatattatttatatatattaagacaacaaaatatttatgtatgcattttatatttatgtatgcattttatatatgtttggccgcgtatttagtattt

SEQ ID NO: 16607 - DNA, 2232 bp, Zea mays
  Clone ID: LIB3066-025-D3_FLI
atcctcgtcttctccaattccaaagtaagaaagccacacgcgaggccgaccgaggaagtccaatctcatggcgctctcctgcatgaggtgccccgcgggcgccggcgccgcctccgcccgacgcgccgcagcgcagccgttggccgcggaggctgcggtctccttcgccagatgccgcggcttcgggaggtccgccaccgctgcgacttccgcctggttttggcgcaaccatgccgttgcctcacagggagtgaaagctcccatggatgctgatgtcaagaatgctgtcatacctcctacctcaccaaaggtggaaagtggctctccttcagaaatcactctggatgaatttgaagacttgagcgctctatgcaagaatgatgattctactgttagcatcacagtagttggagcatctggtgaccttgccaagaagaagatatttcctgccctttttgctctctactatgaagattgccttcccaagcatttcaccatctttggctatgcacggagcaagatgacagatgctgaactgaggaacatggttagcaaaacactgacttgcagaatagataaaagggaaaattgtagcgagaaaatggaagagttcctcaaaagatgcttctatcattcaggccaatatgattcagaagagcatttcatagatctagacaagaagctaaagcaacatgagggttccagagtttctaaccgccttttctacttgtcaatacctcctaatatatttttggatgttgtaaaatgtgcaagcaaatcagcatcttcggtgaatggttggacacgagtaattgttgagaagcccttcggccgagactcagaatcctctgctgcattaacaagcggtctgaagcagtaccttgtagaggaccaaattttcaggattgaccattatttgggaaaagaactggtggagaatttgtctgtcctgcgcttctcaaatctcgtttttgagcctctctggtcaagacaatatataagaaatgtgcaacttatattctcagaagactttggtactgaaggacgtggaggatactttgatggctacggtattattcgagacataatgcagaatcatctcattcagatactagctttatttgctatggaaactcctattagtttggaagcagaggatataagaaatgagaaggttaaagttcttcgttccatgaagccgttgcagctggaagatgtggtcgtaggacagtataaaagtcacacaaaaggtggtaccacataccctgggtatactgatgataagacagtgcccaaggatagtgtgactccaacgtttgctgctgcggcgcttttcataaataatgccagatgggatggagttccctttcttatgaaagctgggaaagctttgcacacaaaacgagctgagattagggtacagttccgacatgttcctggaaatctctacaaggggagttttggcacagatcttgatagggccactaatgagcttgtgatacgtgtgcaaccggatgaagcaatttacctaaagattaacaacaagattcctggtctcggtatgcgactagataggagtaacttgaatctccattatgccgcaaggtactcaaaggagatacctgatgcttacgagagactcctgcttgatgccatcgaaggagagcgcaggcttttcatccgctcagatgagttggatgctgcatggtcactcttcacacccctcctgaaggagctggaagagaagcggatagctcctgagctctacccatatggaagccgtggacctgtcggggcccactatctcgccgccaagtacaacgtaagatggggtgacttgagtgcggagcactacaaggcatgaaacgaagatggccatatctttgtgatattcttgcttttccatttctataagtttgcacgccctggcagtgagatagatttaagagagaaaaaaagatgagaataaggcgggcagttaactaggttggaaggcatgtatccattactagactgaatagctttgttggcataattgcagctgttagggctagtttgcaaccccgtgtttccaaagaattttcattttcccaaagaaaattagtttattttccctttggaaaatgagaatctcttgggaaaattgagttgccaaacgcccttaaaaatatgtttctaggaatcagtttatttttcacaggaacaataaaggaaacggaaaaaatttgccgc

SEQ ID NO: 16608 - DNA, 505 bp, Zea mays
  Clone ID: LIB3066-025-G10_FLI
gtaagtggaagactggaagcctagtcatgcggcatgcacgacttattatattcattacaccaatcaaaacatttaataaattaaattgaccaatcaactagtccaatgtcttaagcataggcgaagacacaatatacgttacatttacgctttagacacagtcgaaaacacagcttcaagacaccaattgtcttcctcatttcgcaacagatgatgattaaacaactttgagctcagtcatatgtgtttataattcatcatctacaactacgggcgcgcgttgtgatcctttattgttttcatttcgataacatgaactacttatacaattgctcaatcatcatcacggttctggcaaggcggtgggggactggtactacgatagggaggtccctcggcagattgattgcccgtatccctgcaacccaacttgcaagaaccgtgatgatgatcctttattgttttcatttcgataacatgaactacttatacaattgctcaatca

SEQ ID NO: 16609 - DNA, 835 bp, Zea mays
  Clone ID: LIB3066-025-H10_FLI
gttcaacgacatcatccttccacctatcatggccaacaaatacgcatctccgcctcctcctctattccaaggatattaagctctatggagagatggtcgaccaagaatgaattgaacaacaatatataaggtcgcatgcgcaaccaaacagctacatgtacattgcaggcgtgtgtgaaattgcacactaacgaacgaactcttgctccgatcacgagctagctgaggtcgacgatggcggctgtgctgaacagcaggaagacgccgcaggcggtggtggccgtgctggtggcggcggcgctgctggcttcgtccgcttcggcggcgatcacctgcgggcaggtggggtcgtcgctggcgccgtgcatcccgtacgcgacggggagggccagcgcgctccccgcgtcgtgctgcagcggcgtcaagagcctcaacagcgcggcgcggaccagcgcggaccgccaggcggcgtgccgctgcctcaagagcctcgccaacagcgtcaagagcgtcaacatgggcaccgtcgccaccatccccggcaagtgcggcgtctccgtcggattccccatcagcatgtccaccgactgcaacaagatcagctaagttacgacgaccaagctaataagcctaccgaacgtacacgtacgccccgcgcgctgcacgagtgatgaagccagggaagaaataaaataaagctagctgtattgccaggagcagcatgcattatttatcgatctatatatatatatactgtactgtagtactctattatatatgtatgtgtggcctgcagtgcgagttgcttcgatccacctacttgttcacacagttt

SEQ ID NO: 16610 - DNA, 889 bp, Zea mays
  Clone ID: LIB3066-026-C12_FLI
cgaacgtgcgctgtctctcgatcctgcatctctgcacctgctcgcctccccagggaggcagggacaatcgacttcgccgggcgccggctagccccaccggcgacgacaggcacagtggaccacggaggagaaagtactctgctttgaatgggaagtgccatgaacaaagacaaagttcatgacaaggagactcacggaacaagtagtgatataactgagaaaacacctgtggaaacggtgaagggtcccaatctgcttgagcgagcaaaggaagagatcgaggcccttgccggagctgttcatactaagatggagcaccattccagtccccacgcgaagaaggatgaatcacataaggaaggcaaggaggggagcctgcacaaaataaaagcccacacggatgaaactcacggaacaagtgctgacataaatgagaacacaccagttgacaaagtcaaaggtccgaatgtgtttgagcgtgccaaggaagagattgaagctattgtggaagctatccatccgaagaatggatctgacagtaagtgaagactgaaacccctggggctgttttgccttaactggctgcaaaagccttaacgtgaggccatgtgctaccagatagataaatgctgtcaaagacgttcacccaatagtctttttatacgcgctctggagctgtaaaagctaagagcggacttgtttttatgctacactgttttccgttgtatcattgtggtttgtttgtccagaggtgtagaaatactcaacatggaattgtgatgcttaaattgttgagcttgacaggacattatattgtgccaccaactcgccatggtctggaagttgtaataagagtgatcatgaaacagggcataaatctattgctagt

SEQ ID NO: 16611 - DNA, 883 bp, Zea mays
  Clone ID: LIB3066-026-C4_FLI
caagttcttccacatgaacatgtaccggtgcaaggacatgctgatcaaggacgtgaccgtgacggcgcccggggacagccccaacacggatggcatccacatgggcgactcatccgggatcacgatcaccaacaccgtcattggcgtcggtgacgactgcatctccatcggccccgggacctccaaggtgaacatcaccggcgtgacctgcggccctggccacggcatcagcatcggcagcctagggcggtacaaggacgagaaggacgtcacggacatcaacgtcaaggattgcactcttaagaagacgatgttcggcgtccgcatcaaggcgtacgaggacgccgcctccgtgctcaccgtctccaagatccactacgagaatatcaagatggaggactcagccaaccccatcttcatcgacatgaagtactgccccaacaagttgtgtactgccaacggcgcctccaaggtcaccgtcaaggatgtcaccttcaagaacatcaccggcacctcctccaccccggaggccgttagcctgctctgcactgccaaggtcccatgcaccggcgtcaccatggatgacgtcaacgtcgagtatagcggcaccaacaacaagaccatggctatatgcacgaacgccaagggcagcaccaagggttgcctcaaggagcttgcatgcttctagaccctccatcgactgacccatctctctagttataatttttctctcgtccttgcattgcccattagatgctatccattggtaacgcacaacagtaaaacgacagacatccgacagctatattatgttcgacggtgtaacaccctgaatttgagggtataaaatttcttctccaaataccaaccaaattcaggggtt

SEQ ID NO: 16612 - DNA, 1097 bp, Zea mays
  Clone ID: LIB3066-026-D8_FLI
ccgaagagagaaacgcgagcaaccagcgatcgccccatggccgccatggctcgttccgtctccctcgtcgtggcgccccttctcctcctctccctcctcgtctccgccgcggccagtgcgcggaccgtgggcgacaccgtgcaggacgcgtgcagcaagacccagttccccaagatctgcgtggacagcctcgccgccaagccggagagccagaaggcgacgccgcgcaagctggcggagctgttcgtgaacatcgcggccgagaagggatccgggatggccaccttcgtgcaccgcaagtacagcgacaaggaggacagcgacatattcaagtgctacgacagctgctccgacgacgtggaggaggccgtcgcccacctcaacggcctcgtccgggagcccaccgacgccaagttcctcgagctcaagtcgtggctctcctccacgctcggcggcacctccacctgcgaggacgcctgcaaggacctgcccaagaccagcgacaaggacgacgtcgtcaacttcagcctcgacttcgagaagctgcagcgcgtcacgctcgacctcatcaccgaggcgtccggcaccatgtccgcaggcatcgccctgccaccctccaacgccggagcgccctcctacggcgcggcggcgccttccgggggctccgccgatgcccccgccggcgcctccgagggccctgcgagcgccagcggcccgtctggtgacgacgcgccggcgtccggtgctggtgccagcgcgtcggctgctgatgctccggcggcggcggcctcatccggtccctctagcgcaccagcgccatcgtcgtcgtctgagtcctccgccgcaccaggcccatcttctgatggcacctccagcgccccagcaccatcgtccggcgacgattctgattccgacgacgatgggtcagcttgagcctgaccgatgacgcgggtttgggttaccggtgccactcaaaatacgatcccttttattgtaaaagagggatcccttctttccattgcattcttgcaatccgtttcttcttgactatgtttcttcttgactatgtaacgataataacatgagaaaattatctg

SEQ ID NO: 16613 - DNA, 1222 bp, Zea mays
  Clone ID: LIB3066-026-E5_FLI
ggtgatcctaagggagtactaatctcgaacaagagcattgttaccattgtttcagcagtagatgagttcctcagcaactcaaacgagcagcttaacatggatgacgtttacatttcctatcttccgcttgctcatatatttgaccgggtgattgaggaggtgttcattcgtcatggtgcttcaattggattttggcgtggggatgtcaaactcttggttgaagacattggagaactcaaaccaacagttttttgtgctgttccacgtgttctagacagaatttatggaggattgcaagataaaattacagctggtggtttcctaaagaaaaccttgttcaatgttgcttacaaatacaaacaaggcaatatgttgaagggaaacaagcatgaagaggctgctgccatgtttgatcgcctggtcttcaccaaggtgaaacggggactaggtggaagggttcggctgattctatctggcgcagctcccctatctagacatgttgaggagtatctgcgtgtggtaacatgctcccatgtccttcaaggatacgggctcacggaaacctgcgctgggtcctttgtttccctgccgaacaacatgtccatgctgggaactgtcggccctccagtcccgtatgtcgaagtacggctggagtctgtccctgagatgggttatgatgcactgtcgagcgagacgcctcgtggggaaatttgcatcagaggtgacaccttgttctcgggatactacaagcgagaggacctaaccaaagaagtcttggtcgatggctggttccacacaggagacattggtgagtggcagtctgacggaagcatgaagatcattgaccgcaagaagaacatcttcaagctctcacagggagagtacgttgcggttgagaatctggagaacatctttggtcaaactcctgctgttgattcgatttgggtctacggcaacagcttcgagtcgagcctggtagcagttgtgaaccccaacacgcaagcactggagcgctgggcagagtcgaacggggtaactggagaatttgccacgatatgcgaagaccctaaagcgagagagttcatcttgggagagcttacaaagatgggtaaagaaaagaagttcaaaggcttcgagctcatcagggctgttcatctggaccccgcaccgttcgacatggagcgcgaccttatcaccccgacgtacaagaagaagcggccgc

SEQ ID NO: 16614 - DNA, 1148 bp, Zea mays
  Clone ID: LIB3066-026-E6_FLI
gagagaggaacgcgaacaaccaacgatcgcctcatcgccatggctcgctctgtccccatcgccgtcgccgtcgcgcctctgctcctgctcctcctcgtctccactgcgtccgctgcacggaccgtgggcgacaccgtgcaggacgcgtgcagcaagacacaattccccaagatctgcgtggacagcctcgccgcaaagccagagagccagaaggcgaccccgcgccggctggcggagctgttcgtgaacatcgcggccgagaagggatccgggatggccacgttcgtgcacgggaagtacaacaacgccaaggacagcaccgtgttcaagtgctacgacagctgctcggacgacgtcgaggaggccgtcgcccacctcaacggcctcgtccgggagcccaccgacgccaagttcctggagctcaagtcgtggctctcctccacgctcggcggcacctccacctgcgaggacgcctgcaaggacctgcccaagaacggcgacaaggacgacgtcgtcaacttcagcctcgacttcgagaagctgcagcgcgtcacgctggacctcatcaccgaggcatccggatccatgtccgcaggcatcgccctgccaccctccaacgccggagcgccctcctacggggcggcggcgccgttcggaggcgccgcggacgcacccgccggcacctccgagggccctgccagcgccagcgggccatcggctggtgacgccccggcgtatggcgccagcgccagcgccagcggcccgactgctgatgctccggcgacggcgacggcggcggcgtcgtccgggccctctagcgcacccgcgccatcgtcgtctgagtcctccggcgcaccagggccgtcgtcgtctgatgggtcctccggcgccccggcgccatcgtcgtctgatgggtcctccagcgccccggcgccatcgtccggcgacgacggatcagcttgacgcggagtttgggtcatttcgtgcctactcaaagacgacgatctcttcttccaattacaaattggccgtccgtttactcctcacaacgtgtaacgataataacggatgctactacgtaccacggtacggataatgggtacgtagctacatgaagctgtctacggataatgccgtccatttactcc

SEQ ID NO: 16615 - DNA, 421 bp, Zea mays
  Clone ID: LIB3066-026-E7_FLI
gtgatccttgaacaaaattgttcccttgacatgtcccagatgatgagatgagtgtagccatagtttatctctaacttcctgctaagaaactgacagaaagtactttttttttccttctttcgatcttcgtaagggattgaagctgcactgctgcaggacagcagaaggcttctggtgcaaaatttgcaacctcctcctcgttggagtgcctgttcgcctcgctttaatctgtttctacaatgtttttgttttcatgtattgtagctgtaacagtctaagtagccgcgatggcaatcgtgggaagcaattgaacgaattggtgttgttactgtcgtttcggacactgaaagaccatctttctttgcttgctttgccccgaaaggaggaattttgcattaataattaaatacattcttgagtg

SEQ ID NO: 16616 - DNA, 408 bp, Zea mays
  Clone ID: LIB3066-026-F1_FLI
cgcagaccgcgtcgagaagatgctcgccgtgctcgacaccaacatcctctgggtgaaccctgactgtggtctcaagacacgcaagtacacggaggtcaagcccgccctgaccaacatggtctcggccaccaagctcatccgcacccagcttgccagcgcgaaatgaggtcgtttgatagctccatggtctgatagcgcggaatgagccagttgttttgaataatttgggtgttaccccctgttccatggtgttagtgttaggttagcctctcattggtgggatacgccgttacaagatgtgttctaagtttggagtgtgtgtttttctttgggctatgtttctgggggtatgtgtgtgctttggttataaacagaaatgaaatacgcagtcttgcaatcgcatcaccc

SEQ ID NO: 16617 - DNA, 1034 bp, Zea mays
  Clone ID: LIB3066-026-G1_FLI
gtagctcctcaccaagaagcatgacaaagagtccatcagtcacatgcaggaagcctctccaatctgacaatacttctcacagtcaagaagaggactcatattctgtcacttcttcaactgtaacttcagcgagagctggaaaaactaagaagacaactgttgctgttgcacctacatttgtctgtgataatcgtgctgagaagagaggagagttttacacaaaattagaagaaaagcgcaaggctttggaagaggagaaactccaagcagaggccagaaagcaggaagaggaagaagaagctctaagacaactgaggaagaacttggtcgtccgagcgaaacccgtgccgagcttctaccaagaacccccaccaaaggttgaacttaagaaggtgcctccaactcgtgccaagtcaccaaagctgacgcggaggaagagctgcagcgacacccctcacacaccagagggaggaaacggcggcggcgcagtgtgctgccggctgcaccgccacagcgtcgggaactccaaagacatcggcggcaaggcacaatgctctccaaagactggaccagctgctaagtccagggcgcccccaaatccagggaagacccgagggcttccatgagaagaaagcgggacagcagccaagcgccgccgctgtacaaacctgacccgtgaagcatccattgccatgccgtttttcatcttaattcatataccctcacatcacccggaaatatggcctcatgccccggcagcagacagtgtgcctggtgctggattgttttttttttggcgttgcccttgtaagaacctggctgccactgccagagaccgtgcgctgtgtccgtgtctgtaaatttgctgcaagttttgtatggggtgaccgagtcggtcctgtgtgagaaccaaacggccgggcatattgtcattgcgtgggggcagcattcgctgatactatgtaatgtgacctgagtgagctgttgtaacctgttgtgggcatattggcaaagcgattctgattgctgtcggc

SEQ ID NO: 16618 - DNA, 653 bp, Zea mays
  Clone ID: LIB3066-027-B12_FLI
cgcttcttcttctttctatatacatatatagacctaataagaacaaagacgtacgatagataacctgcttattttgcgacccatcccattcccacgcaaaggcaccgagcgtgatctccgtccgtgccgccatggcctcgcaccgggcgctgctgctgctgctcctcgccgccgcgctcgtcgctgcgctggccgctgtcgcatccgccgacgacgccaacgccaagcccaccatcctgacccccgtggcgcataccccgctggggtccttcgacggcgacaagccggcctctgacgacgacgccgtcgacgacgacgaggacgccgcccctgtcggcgcgcccaacggggccaccatgactgagcccagggacgacgtccccgccccgcccggcgccgaagcaaccgcgggcggcgccgccgccagcaacgcgcccgtcgcactcgccagcgccgcggcgcgcgtctgcgccgccgccgcggtcgccgcgggagccttcgcctccttctgaggagcggagactggtttcgtttcgtgcaggggttgcaaaatctctgcgatattttatttatttatttaacatggtcgctttcctcggtttgatatttgtatgtaaacacacagctaaagctaatcgtccattcgtatgtgt

SEQ ID NO: 16619 - DNA, 2662 bp, Zea mays
  Clone ID: LIB3066-027-C12_FLI
gctcatggcgggcctcgcgcccaaaaccaaggtgctcagggacggcaagtggaaggaagaggaggcgtccatcctcgtgcccggggacatcatcagcatcaagctgggtgacatcattcccgccgacgccaggctgctggagggcgacccgcttaaggtcgaccaggcggcgctcacgggcgagtcgctgcccgtgaacaagcacccgggccagggggtcttctcgggctccacggtcaagcagggcgagatcgaggccgtcgtcatcgccaccggcgtgcacaccttcttcggcaaggcggcgcacctggtggacagcaccaacaacgtgggccacttccagctcgtgctcacggccatcggcaacttctgcatcatctccattgccgtcgggatggtcatcgagatcatcgtcatgtacccgattcagcaccgcgcgtaccgcgatggcatcgacaacctcctcgtcctgctcatcggcggcatccccatcgccatgcccaccgtgctctccgtcaccatggccatcggctcccaccgcctgtcccagcagggcgccatcaccaagcgcatgaccgccatcgaggagatggccggcatggacgtgctctgcagcgacaagaccggcaccctcaccctcaacaagctcaccgtcgacaagaccctcatcgaggtgtgcggcaagggcgtcgacaaggacatggtgctcctctacgccgccagggcctcccgcgtcgagaaccaggacgccatcgacacctgcatcgtcggcatgctcgccgaccccaaggaggcccgcgccggcatcaaggaggtccacttcctccccttcaacccggtggagaagcgcacggccatcacctacatcgacggcaacggcgactggcacagggtcagcaagggcgcccccgagcagatcatcgagctgtgccggatgagcaaggatgccgagaagaagatccacgccctcatcgacggctacgccgaccgcggcctccgctccctgggcgtgtcgtaccagctggtccccgagaagagcaaggagagcgccggcgagccgtggcagttcatcggtctcctcccgctgttcgacccgccgcggcacgacagcgcggagaccatccgccgcgcgctccacctgggcgtgaacgtgaagatgatcaccggcgaccagctggccatcggcaaggagacggcgcggcgcctgggcatgggcagcaacatgtacccgtccaccaccctgctgggcgacaacaagaccggcgagatgggcggcctgaacatcgacgagctgatcgagaaggccgacgggttcgcgggggtgttcccggagcacaagtacgagatcgtgaagcggctgcaggaccggaagcacatctgcggcatgaccggggacggcgtgaacgacgcgccggcgctgaagaaggcggacatcggcatcgcggtggacgacgcgacggacgcggcccggagcgcgtcggacatcgtgctgacggagcccgggctgagcgtgatcgtgagcgccgtgctcaccagccgcgccatcttccagcgcatgaagaactacaccatctacgccgtgtccatcaccatccgcatcgtgctgggcttcctgctcgtcgcgctggtctggaagttcgacttcgcgcccttcatggtgctcatcattgccatcctcaacgacggcaccatcatgaccatctccaaggaccgcgtgaagccgtcgccgacgcccgactcgtggaagctcaaggagatcttcgccacgggcatcgtgctagggacctacatggcgctcgccacggcgctcttcttctacctggcgcacgacaccgacttcttcaccaacgccttcggcgtgcggtccatcaaggagaacgacaaggagctgatggcggcgctgtacctgcaagtgagcatcatcagccaggcgctcatcttcgtgacccggtcccggagctggtccttcgtggagcggcccggcgcgctgctggtgatcgccttcctggcggcgcagctggtggcgacgtgcatcgccgtgtacgccaactgggagttctgcaagatgcagggcatcggctggggctggggtggcgccatctgggcgttcagcgtcgtcacctacttcccgctggacgtgctcaagttcgccatccgctacgcgctctccggcaaggcctggaacaacatcaacaacaagacggccttcaccaaccgcaccgactacggcaagggcgagcgagaggcgcagtgggccacggcacagaggacgctgcacggcctcaaccaggccaccgccacctccgacctcttcggcgacaaccagggctaccgcgagctgtcggagctcgccgagcaggcggccaagcgcgccgaggtggccaggctcagggagctgcacacgctcaagggacacgtcgagtccgtcgtcaagctcaagggcctcgacattgacaccattcagcagagctacaccgtgtaaactcgactcagtttttttatttgtttttttttgcagacaaatacaaaccacacacatatatatatttgtaaagattcgttcgtattttcattttcaccgggaagatttgtaactgtcctcctccctccttgtaagttgctcctgtaaactcttcctgaattcatggcgtgtcgttgtagc

SEQ ID NO: 16620 - DNA, 642 bp, Zea mays
  Clone ID: LIB3066-027-F9_FLI
gcgctgggccggcggtgggagaccgacgccgcgtacgtgcagtccaaggaggcggtgaaggacgtgtcggtgcccaccagcaccatcaggttccccgacgggacgtcccggctggtggcgccggcgctggtgtacgccagcgctgccaggatggcggacgccgacgtggggagccccaacttcaacctgacgtggaaggtggacgtggacccgtccttcagctacctggtccgcctcttcttcgccgacatcgtgagcaaggccaccaacgacctctacttcgacgtgtacatcggcgggcgcaaggccgtgtccgggctggacctgtcgacggtggccggcggcgagctggcggcgccctactacaaggacttcgtggtgaactcgtcgttgctggaggacggcaagctgagcgtccaggtcgggcccatggggcaggacacggggcggatcgacgcgctgctcaacggcatggaggtgctgaagatgagcaactccgtgggcagcctggacggcgagtttggcgtggacgggcagaaggccgacgacgggagcggtgggcgcaaggcggtggcggccgtcgggttcgccatgatgttcggcgcgttcgcggggctgggcgccatggtggtgaagtggtac

SEQ ID NO: 16621 - DNA, 1633 bp, Zea mays
  Clone ID: LIB3066-027-G2_FLI
atcaaatgcttgttataagcagtggtaatgagaaatatgagataatgaatgctataaattccttaatgcttgatgggaaatggtcaaatcaagaatcttctgtcaaggaagtagtttccactgctagggtccaaagtttaaagaaactggtgaaagagaagctgcatcaatggctcatctgcaaagtaaacgatgatggaaagggtcccaatgttctgtgcaaggaaggacagggtgtgattcatttagtagcagcactgggttatgattgggctataagaccgataatgattgctggtgtcaatgtgaacttccgggatgctcatggatggactgcactccactgggctgcatctttgggaagagagcggacagttagtgtcctcatagcaaatggagctgcagcaggagcactaactgatccaacttctgagttcccttctggaagaagtccagctgatttagcttcagtaaatggacacaaggggattgctggttttctcgcagaatctgctttgacaagccatctgtcagcacttactattagggaatcaaatgatagcactgtagaagcgtgtgggctaccatttgctgaagatctcactggcattgattctgtccatctcgctggagagggtcctgatgctgaatcacttgaaggttctttaagtgccgtgcggaaatccactcaagctgcagctcgtatatttcaagccttcagggtggagtcattccacagaaagaaagtcgtggaatacggagatgacacctgtggattatctgatgaatgcacactttcacttgtttctcttaaaaatgtcaaaccaggacaacatgatacacatctgcattctgctgctgttcgcatccagaacaagtttcgcggatggaagggaagaaaggaatttatgatcattcgccagagaattgtcaagctacaggctcatgtacgaggacatcaagtgaggaagaactatcggaaggtagtctggtcagtcggtatcgtcgagaaagtcatactgagatggaggagaaagaggcctgggttacgcgggtttcggccccagaaacaactagaaggtccatcgcaaatccaacctgcaaaggctgaagacgaatacgatttcttgcacgacggcagaaggcaggccgaagccaggctacagagagcacttgcccgggtgcactctatgtcacagtacccagaagcgagagagcagtaccacaggcttacaacctgcgttgctgaaatgaaacagtccagggtatgctttcgaagcttgctgcaggacgtgttttattttccctcggggtttgatcatgatttgatgctggctactttggaacagatgatgcaggatgagatgctaagccaggcggctggtggtgcggacgatttcatggctggactggaggacttgatctgcatagatgatgccccgccccgatgtctgccattcggtgaagctgagcctttttacatcagataggcagggaggcggtttccttgctccccttttgtcagactagccctgtaaatattcttcagctagttgttcaccccgactgtttactcgctttctgctagtgtacaactataacatagtttcaatgcactgattatcggtagaat

SEQ ID NO: 16622 - DNA, 747 bp, Zea mays
  Clone ID: LIB3066-027-G7_FLI
caacttcaagaaggacagggatggttactggaagtggtttgctggcaacctggcctctggtggtgctgctggtgcttcctctttgttttttgtgtactccctggattatgcgaggacaaggttggccaatgatgccaaggctgccaagggaggaggcgatagacaattcaatggtcttgtggatgtctaccgcaagacactcaaatctgatggtattgctgggctttaccgtggatttaacatatcttgtgttggaattattgtttatcgtggcctgtatttcggactttacgattctatcaagccagttgtcctcactggcagcctccaggacaacttctttgccagttttgctctgggttggctgatcaccaacggtgctggtcttgcatcttaccccattgatactgtccgcagaaggatgatgatgacttctggtgaggctgtcaagtacaagagctccttggacgcattccagcagatccttaagaaggaaggccccaagtccctgttcaagggtgctggtgctaacattcttcgtgccattgctggcgctggtgtgctttctggctacgaccagctccagatcctcttcttcggaaagaagtacggctccggcggtgcttaaatggagaaaaatgatgacgaacaagagcagttcgctcccggtccagcccagtcaggatctggtcaagtttttgcctttcatatcgaagaaattaataatttatgtaggagaatttttcc

SEQ ID NO: 16623 - DNA, 806 bp, Zea mays
  Clone ID: LIB3066-027-G9_FLI
tgaaacatcaattcctaggaagcatggccctgcaattgctggctacgagacggccctcaagaagttctttgagtatgttttgcaagcatttctgaaacacattgattttgaagttgtccagtgtactgtaattgcaagcccaggttttacgaaggaccagttccgcgattatttgtttcttgaagctgcacggcgagatttaagagtaataattgagaacaagcaacgccttgttctggcgcatgcaacatcaggttacaagcatagtttaaaggaagttttggatacaccaggtgtgatggcactgataaaagatacaaaagcagcacaggaggtccgagctctgcaggatttcttcaatatgcttactaatgagtcagctcgtgcttgttatggaccgaagcatgttgagtttgcactgcaacagtttgctatccagactcttttaataactgatactttgtttcggaacgctgacattgctacgaggcaaaggtacgtgaagttggttgaagatgtcaagaaaaatagtggcacagtacacatattttcctcgatgcatgtctcgggcgaacagttggcgcaactgactggaatagcggctatacttcgttttccccttcctgaactagaggacatggagctgtgatgaaaccaacctttttgcttctcgataacattctttttggttgtgatctgttagcatactacctgtatcatgtgtaacgttatggagctatttgatattgtataggcaaccctggaaaggaattctggtattttttaaggtatatcctattcgttgt

SEQ ID NO: 16624 - DNA, 1102 bp, Zea mays
  Clone ID: LIB3066-028-C4_FLI
agccggcgcacgccgacgggcacagtagcgaccgcgagcgagccagagcatgggtgacactggcgcgaacatggcccactggggcgggctctacggccggggcggcgcgccggcgacgacggaggcggtgacgacggcaggaggcggcgggtcggtgtcgagccctacgtcgggcgggtcgggcggtagcccgagccgcgcgcagctgcagcccggggtcggggtggagggcgggcgcgtgggcaagcccgcgcggcggcggtcgcgcgcgtcccgccgcgcgcccgtcacgctgctcaacaccgacacctccaacttccgcgccatggtgcagcagttcaccggcgtcccgcccgggccctacggccccggccccggcggcggcggggggcccgtcatcagcttcggcgccgagtacggcggcgcgcagctggtgcgcccgtcgccgacgtccgccgtcatgtcgttcgacccccagcaccaccaccaccggccgacggcggcgtcgtcgctgcagagccagctgttcaggccgcagcagcagcagcagtacggtgccgacgtcggcggctacggcgtgcacggcatggccatggcggcgccgtcctccttcctgcacggcgggttcgaggcctcgtcggaggaccggctgctgctgcagagcatgatgcaggcctcgacgatgcccaccggccacccgccccccactaacaacggcaatggataccacttcggctagctgatcgatccaccggtttgatccccaccgcacaaccgaggtaattaatataataagcggggagctagatcagggatccatggaacgaagaagccgtcgtcgatgaccacgagctgatgatgacgcgtgttctagcttgttgctgctgcttaagcagctaagcattttttttgttatgttttttttgctggcctcgcagaaggctagctaattacgagtaagtaactaagtatagttagtagtggtagtgttatcttgctgctttaactagaaaaggagttaagctaggtcgatgtaaatagttccctttccttttttttctttttctttttgaaaaaaaatatcaatcaagaagtttaattt

SEQ ID NO: 16625 - DNA, 640 bp, Zea mays
  Clone ID: LIB3066-028-E2_FLI
tggatggcaatcgacatttctcactaaagataaagctgttgccgaggaaagggccgcaaagctcgggataaagctagaatggaccgacgacggcgtgaagacggtcatgggccccatccccgcggtgaagtgggacgagagccgaggacggaagatctggttcaacagcattgtcgccgcctacattgggtggaaggacgcccggaacgaccccacgaaggcggtgaccttcggcgatggctcacccctgcctgctgacgtcatcgacgcgtgcggccaggtcctagaggaggagtccgtggccgtgccatggcagcacggcgacatcctccttatcgacaattgggccgtcctgcactcccggcgctcgttcgagccaccgcgtcgcatcctcgcctcgatctgtaaatgatgtgtgtagatgcgctgcgggtttgctgctccgacgggcgacgaaggcctgaaactcacacgttggaaagagcggtgttttagaatattagaggtgtgcgtgcgggcgaaataattggtatttcgccgctcaaaacattgtctcctggttataattaccattgtatctatgagttatgtatctatgagttatgggtccatttgagtctacaaaatgtggcttgatggc

SEQ ID NO: 16626 - DNA, 1405 bp, Zea mays
  Clone ID: LIB3066-028-E3_FLI
ccaatccaaaccagacaagcaaggaatcccccgatggctcatcgcgttctcctcctcctctctctcgcgtcggccgccgcggttgccgccgccgtcgacgcggaggacccgctgatccggcaggtggttcccggtggagatgacaacgatctggagctgaacgcggagtcccacttcctgagcttcgtgcagcggttcggcaagtcctacaaggacgccgacgagcacgcgtaccggctgtccgttttcaaggccaacctgcgccgcgcgcgccggcaccagctgctggacccgtcggcggagcacggcgtcactaagttctccgacctcacgccggcagagttccgccggacctacctcggcctccgcaagtcccggcgcgctctcctcagagaactcggggagtcggcgcacgaggcgcccgtgctccccaccgatggtctccccgacgatttcgactggagggaccacggcgccgtcggccccgtcaagaaccagggttcgtgcgggtcgtgctggtcgttcagcgcgtctggagcgctggagggtgcgcactacctcgcaactggcaagctggaggtgctttcggagcagcagttcgtcgactgtgaccacgagtgtgattcatcggagcctgattcatgtgattcgggttgcaatggtgggctaatgacgacggcattcagttatctccagaaggccggtggccttgagagtgagaaggattacccttacactgggagtgatggcaaatgcaagtttgacaagtccaagattgttgcttcagttcagaacttcagtgttgtgtctgtggacgaggctcaaatttctgctaacctcatcaaacatgggccattggcaatcggcatcaatgctgcctacatgcagacatacatcggaggcgtgtcatgcccatacatctgtggcaggcaccttgaccatggtgttctccttgttggatatggtgcttctggtttcgcccccattcgcctgaaggacaagccttactggatcatcaagaactcgtggggcgagaactggggggagaacggatactacaagatatgcaggggttccaacgttcgcaacaagtgcggcgtcgattccatggtctctaccgtgtccgcagtccacgcctcgaaggagtagactctggtcagcggtgataatcgtgattccatatattgtagaactataatccctgctagtaatccatttgtgctgtttatgtatcgaaggcagcaaagatgtgtgaagcggcaatgggatgcttgctgtaaggtaatatgtttggcttgctaggcatgctacacgctatttggatgtagcaacgttatcaccagctgtatacgctttttaatcgacaacatttgaataatatgtacataacattatgttgtgctcc

SEQ ID NO: 16627 - DNA, 417 bp, Zea mays
  Clone ID: LIB3066-028-F10_FLI
ctccccgagatcaggaagaaactcttcagccagcgagtatcgtcctaatgttttttttttgttactctgatcgattgttttctgaaataaaccagaagcggtccgatcctacgaagatacacaggtcctgacattgggtgaagcccgtatgtgcacgtttcggatttcgcaacatcgatttgagcttcaacagttcttcgctagcttgtcggtagaggcggcaatggctgaagttgagtctgtatcccggtggataggggacctccgcgaccgttaccctgagtcgagttgtcacagtctgtatctatcgctcctgaaacctgaggggcctgtattgtttgtcaagcactttgtttcttctcttctgtttgtagcctactatatccactgaaatctaaggggcctgtattgtttgtc

SEQ ID NO: 16628 - DNA, 1148 bp, Zea mays
  Clone ID: LIB3066-028-F5_FLI
aaaaggaaaagaaaaggcaggagaataacgaagcaagatctgccgcggctccattttaactggtcggcgcctccgccgctgccgtcttccccctctcccctccgtaccactcgtcttcgtctagcctcccgcccgcagccaccatggcacccggcctctacaccgacatcggcaagaaaaccagagatttgctgtacaaggactacaacacgcaccagaagttctccctcaccacctgctcgccccatggcatcgcaatcacagctgcaggaacaaggaaaaatgagtccacctttggcgatcttcacactcaaattaagaacaataaattgacggtcgatgtcaaagcgaactcagaatcagatcttttgacaacaatcactgttgatgagattggtactccagggctcaaatcaattctcactttggttgttccggaccagaggtcagggaagcttgaactccagtacctacatgaatatactggtgtgaatgcaagcatcgggcttaattccaaccctatggttaacctttctggtgcctttggaagcaaagcactctcagttggcgttgatgtttcatttgatacggagactagcaatttcactaagtacaatgctgccctgagcctcgccaatccagatcttattgcttcccttcatttgaataaccacggtgataccctggttgcgtcttactaccacctggtaaagcatcattcaggcactgctgttggagctgagctgtctcacagcatctcaagaaatgagagcacactaatatttgggtctcaacactcactggatccccacacgactgtcaaggcacgtttcaacaactatggcatggccagtgcccttgtccagcatgaatggcgtcccaagtcattcatcaccgtctccggtgaggtcgacaccagggcaattgagaagagtacgaaagttggcctgtccttggtgctcaagcactgaaatgctgagtgtttggggctctaggattttattttcgattcggatggattggaataagcatggcctggtgtcatatttgcggcaccgtttggatcttgaattacatattcctctccatgatcaatttcataggaaaatattaggattgatttatgctttaattcccagcgccctgtt

SEQ ID NO: 16629 - DNA, 1929 bp, Zea mays
  Clone ID: LIB3066-028-F9_FLI
ttctggttccttaagtttgtgggccgtggctatttaatctccaactgcatccccagatattcaccaaattctgtgagactgggaactccgggattggtttggataaggtgttctgggaatggggaaccaatgcccaaacgggacccttgggagtgactactacaaccgccccgcttccaggttcgctgatggttgccttgaggacgatcgctactctgacttgaagaagtttgacaagccatggcctgaggtgaactcgtttaagcccactgctgttggtattttgaagaggggattggatccaacgtcaatcactgtccttgaaaggaagacggccgacgtaagggaacattatatcatcggtcggaggcttggtcaaggccagtttggcacaacattcctctgcaccgagatcagtacagggtgtgagtatgcatgcaagacaatcccaaagcgaaagctcatcaccaaggaggatgttgaggatgtgcgccgtgagatccagataatgcaccatttgtcaggccacaagaatgttgtttccatcaaggatgtatacgaggatgggcaggcggtgtatattgtgatggagctctgcgccggtggggagctctttgatcgaattcaggagaaagggcattacagcgaacagaaggctgcagatctcataagaatcattattagccttgtggctatgtgccattcacttggggttatgcaccgtgatctaaagccagaaaacttcctcctttgggataaagaagatgacctgtcaataaaagcaatcgattttggtctatctgtgttcttcaaaccaggtcaggttttcactgagctggttggaagtccatactacgttgctcctgaggtactacacaaacggtacggaccagaagcggatgtgtggtcagctggagtgatactgtatgttttgcttagcggggtgccacctttttgggcagagacgcaacaaggtatatttgatgctgtcttgaaggggcacattgattttgactcggacccatggcctaagatatctgaaagtgcaaagaatctcataaggaagatgctctgcccttgtccttcagagcgtctgaaagcccatgaagtactacgccatccttggatctgtgaaaatggagtggctactgatcaggctcttgatcccggtgttctctctcgtctcaaacaattctccgcaatgaacaaattaaagaagttggctctgagagctgataatgacaataatgtgaccatcaattatgaagaatttatcgctgcaactgtgcctcttaacaaaatagaacgtgaggagcacctgatggcagcttttacctacttcgacaaagatggaagtggttatatcacagtcgacaagctgcaacgagcttgtggagaacatgacatggatgacactttccttgaagagataattttagaagttgaccaaaacaatgacggtcagattgactacgccgaattcgtagcgatgatgcaaggcaacaaagttggacttgggtggcaacaaatggaaaccactttgaatgtaaccttgagagatgcacctcaagtacactgtcactgacgcgctcgccatgtacagattttgttctcttctcgtgttcatcgtttctccacacgacctgagagttccggtcgacatgacatgtatcatgaggagagagcaaatcaatcgattcatttagtggtatttatcccaaataaagtgtgggctggcaggcagaatatggtttgtcatgagagacactagtatgggtttatatgtataaatatatagtagtggtggtatattggtttatggtagcgggtgatcctgtcaagcgattcaatcgaaataccaaaagaagtgcgttcagtttgcccgttttgttacgggtttcatgaagatgaaggtgattatgttttctc

SEQ ID NO: 16630 - DNA, 695 bp, Zea mays
  Clone ID: LIB3066-029-A11_FLI
ccagataccaaggcacggaggtccatgaccatagcagcaatgacatggctgtggtgatggggctccggcgagcaattcccattacccagccacatctcccgttgaattgagagttgttgaactacaacatgcgctcaaaaacctcttagccccttcccctgagcccgaacaacgccgagggcgtgatacattggcggcgacaacctctctttctctcactacctctgacctatctgcatgcatcaagcgggatgctcatgggtttcatcaggtgaccatggtttgagggcaatggatggaggggcctcgagttttatactcccagaccaggtggataaggatttaaccggtgatcgatctccgatgattgagggagggttaggtgcgattcggatcgagatcgacttcaggtagaggaaggtcctggcgggtggggcccaatagcagaggcgtgggtgacgcgtgtgagggcagtctgacgggcgggtctcgcctggctatgacacataacaacagtcgtctgatgctgagccaagctagcagcttaagtgggtcgcacggttgtatatatggcccattaggctcagggcagaggtgcgaggctgggccgagcggtgggggaatctgcccataggaacctttctttttttattttcttatcaattccttttggatttcaatcacaaatttcaatt

SEQ ID NO: 16631 - DNA, 1229 bp, Zea mays
  Clone ID: LIB3066-029-A3_FLI
gtgcgtcctctcctcaacctcaacccccaccccgccctacctacaaccctattaaattccgccttccgacccgtagacctgattgatccccgcatcgaatccggcggatcgggagcgggagagaccactcccaaatcgcgtcgcgtcgcgtcgagagcgagagcggaagaggtgcgcgcgggggaaccgagccgactgatggagccgacggcggcgcccgccgcctgcgagatcgcgcgcctgccggatgacctcctgtcggcggcgctcggccggacggggccgctggacgcctgccgcgccgccgcggtctcgccggcctttcgcgccgcggccgacgccgacgccgtctggtccagcttcctgccgcccgacctgcccccgctcgccgatggggagctccccgccgacgcgacggccaccaagaagcagctcttcatgcgcctctccgaccccgccagacccgtcctcctcgccgacggcctcacgagcatgtggctggacagggtcaccgtcgccaagtgctacatgctgtccgccaggaagctgaccatcatatggagcgatacgccgcagtactggcactggatccccctcaccgactccaggttctcagaatgcgcagaactccagcacgtttgctggctggaaatccgcggcaagataccctgcgacatgctgtcccggaacaccacttacgccgcctacatggtgttcaagatgtccgatgaatcctatgggctggactatccgctccaggaggctgaagttagcatcggggcaaccaggtccactcgtcaggtctgcctagggtacgtcgacgacgacgaggacggggaagaggtgcctcagaactaccggtcgttcggggcggtgggaaatgtatttagaccaaggatcgggaggcggaaccgtcgccagcctcctggagtgcacgtcctgcaccctcagacaagacccggcggctggatggagatggagatgggtgagttcaggaacgaggaagctgaagatggcgaggtgtccgtcagcctcatggagaccaggggcggcaactggaagagaggtcttactgtgcagggcattgagatcagggtcaagaagtaaggatgtgaaggctgtggggatcgggctttgcgcatcaaaacaaataaaagtatcttagttagatttgttgtgcgtgttctactgcagcacttgcgtatgtgtgtgtcttgcctatgcccagc

SEQ ID NO: 16632 - DNA, 1240 bp, Zea mays
  Clone ID: LIB3066-029-B6_FLI
caaggttaaaaacaatatctcagaaactgcagaagttgcacaggcagaggatacctctcctatggatatcaatagtcaatccaaccagaagcaagaatcatgtggaccgaatggatccaaagatcgtatactaagatcaacttctcgttcatcatcttccagagaaaaaactatggagaaatcatgcagttcagcacacaagggcaaaagaaccttatggggccgtacttcagcaagaaaagacctgtcaacagaggagattgaatgctgcagcgatgatgaggcccttgttgagaaacttgagagtaacaagattgatctccaatcaaaaattgcaaaggaggccaaagaaaatgcaatcctatggtcaagtctagaaaaacggaaagaagaactacatgagcgtcgtttagcacttgaaaaagaagttgaaaatttgagggaccagctgaagagggtgatgaatttgcgaagggggcaggtgtcctcgccttcaacaatagacagcaaggtcaggggccagcagctgtgctgtgaatcatgcaaccaacgtctcctaaatacagacaggcttagcggacctgaaagctcatcagtggaagcgtcaccgactgttgggagtgatcctgcatttgacatgggtgatatcgagcaatcaaggaagcaagtcgcacagcattcgccttcttcaagagacaagccaagtcacgaggcggtcgggggcatcacccagagggctcctcaaagagggcattcgattgccagggagggccaagatgggtcgtcgtcgttgtcatcctctaattcgaagtggaatcttgcgcagaaacaatattcaaatagcccattgataagagggcttcatgtatccagcagactagaggatttcggtggaagcatatcaccagcagcgtcatcggcattagccaagctgacgaaccggctcaacttcctgaaagaacggagggcgctgctggcaagcgagatgcagagcttggatttgggtcggcccccaacagtgaagtccccaacaccaaaaggccatgaaagcaagaatagttgatgttagtctgttcctgtcgtgctcttctgaatgctagatagccttatgattaaaaccagcagtgtagtttgtgtgcatcccgttctcatccatgtagtgctgtctgtacatgtttccacaaaattctgctgcttcaaacttgcagatacatatagatacagattgaacgtgtcaaaa

SEQ ID NO: 16633 - DNA, 2022 bp, Zea mays
  Clone ID: LIB3066-029-D1_FLI
gtttggactatacaattctcgtgtctcgccctcccccgacgcgccgtctagggtttcacagccgcaccccgatccactagagctatggagttcgacgaatacgagtacctggagaaggcggtggagccggctcccccgccggccaatggttccggctccggcgagaaggaccgcggctcgcgtcgccgcgagggcgacgagggccgcatatcgaagcgctcccgctcgggggaggaccgcgagcggggccggcaccgcagcgttcgggagcaccgggatcgggataaggatgacgggaaggagaaggagaggagccgcgatagccgcgggaaggacagagacagggaagggagagaacgggagaaggagaggggggacaggcaccggcccagagagagggaggtggaacgggagcggaggagcctgagccgttcggagcggcgccgtatcgaggaagaggagatggtgagggagctggagatggagcgcgagcgcagcgagcgacaccactatcgcgaccgtgacgtcaggcgtaggaaagatgacggggcagagccagaagttgatccagaaagggaccagaggactgtatttgctttccagctatctctgaaggcagacgaaagagatgtttatgagttcttctcaagggctgggaaggttcgtgatgttcgtcttatcatggaccgaaactcaagacgttctaaaggagttgggtacattgagttttacgatgttatgtctgttccaatggcaattgctttgtctggtcaaccgctgcttggacaagcagtgatggttaagccatctgaggctgaaaagaacttagttcagtcaaatgcgacatcaggtggtgcggcttcaggtggagcaagaaagttgtatgttggcaatcttcactcaaatattactgaagaccaattaagacaggtatttgaaccatttgggcaagtggagcttgtacagcttcctctagatgcaatgactggactgtgcaaaggttatggctttattcagtttgcccggcttgaagatgcaaaagctgcacagagtttgaatgggcagcttgatattgccggcagagttattaaggtttcagctgttactgatcatgtgggagtgcaagctagtggagctactactggagatctagatgatgatgaaggtggaggcttggcgctaaatgcaagctccagagctgctctaatgctcaaattggacaggagtggtacagcaaccagcttaactggtggtattggtgctgctggagtggctgtaccagctacttcagttattggggcagcaggagctgcttctcttctgtcaccaacagtttctgctgttggatcagttcctggggcacctgtgcttcctattaccgctcagaatgtgatcatgtccacacctacagaattcttgttgcttaaaaacatgtttgacccatcattggagacggatcctgattttgacttggatattagagatgatgtccaagatgaatgttccaagtttggtgcagtgaagcatatttttgttgacaaaaatactgcaggcttcgtgtatctgcagttcgatagtgtaactgcagcagggaaggcccaacaagcacttcatggaagatggttcgccggaaagatgattacagcgacatttatgtccgatcaggaatacagtactaagttcccaaacttgtgagcatatgcggggaagagttggtcagacccgcatagttcgttcggagagtttgctagtgctgtatcgttggatggtagactagacgaacaccttattgattgtatgacaggatagtttcagttgcagcgctggtcgtgcgtacaatgtttgatgtactttatttacggcatcacacacagtgaccatcccttattttgtccaccgaatgaaatgccctatgatctccaggcacgttggcatatggtttatttatgtacgatctgttggcactggtacgtatttgtatactaagcaaaagcgttacataatcacaatggtacctttatt

SEQ ID NO: 16634 - DNA, 1060 bp, Zea mays
  Clone ID: LIB3066-029-E12_FLI
gaaaatgagtaatccccctttaccctcaaaagaagggaagaaaaactaggctgttcagggcacatggataaaattcgcttctcttctctttcttcgttgcagcattgcatcctacaaaggtagcatcgtaaattctattcaaggatgctaatgtgctatcacctttaattcatcctctgaccaaaggctacatggtcctctaccgcaactatttctgcaaacatcgagctgatctcggagcccggagctgcaatctgacaacagtgcgtgtcgcaacaggagatcgggtcaccggaatcgatagaaaggacgattagactatggtgccccgaattaccaatcgagttacacgccacagatcgcggcttgggatttgggacgtccccaaatcagaaccccggacttagctgcataggcagagagaaaaggagagtgatagtggggcctggcggaggagaggaggattacgcaatagtcacgggagcggacgacggggaagaggtcgagcatgcgccagaactccttctcgtccatggtaggcacaggcgcgacgtctcctctggctgtctgctgctcgcctgcgacgggtgaacgggtcagggacagcgttcagggctcgggagcacgccgatgtggatgtggactcgtttgagagaagatggattggatgagttcacgaacgcttagcttcgattctcaccacatgggccggatggctcggagacaagcgggcccagtacatttaaggccgagcagaatactagtgggctgaccacaagtgcttctactaacaccagtgggatatacacgtgcgcatgctattacgcggtcttactaatcatgtgctcgtggtaagggatgtaactggttaaataacgtagtcgtcccagatccccgattcagacttcgaaccctcccgacaacagtaggggcgcgagaagttgtagaaccccgcttccttcccagtaatccaacacacagaagaacaagagacacagtgaatgaaacctctttttgtatatctttattatgatgggtatagatacatatggttgaaatg

SEQ ID NO: 16635 - DNA, 958 bp, Zea mays
  Clone ID: LIB3066-029-F2_FLI
taaaaataaataaaaagtgagagagggaggaaggcgcacacttcctccttccttctttccctcttcgtcttcgcttggccggtgggtggtgcggtggggatgcggcggctatggcggtggtaccagcagtgcctggccgcgcacccggtgcgcacgcaggtcgtcagctccggcatcctctggggcctcggcgacatcggcgcccagaccgtcacctactactccgctcgccccgaccgtcgcggccacgacagcagccctcccgaccccgaggataaagataataaagacaataaagagtttaaagttgattggaagagggtgggcatcacaagctccttcggatttgcttttgttggtccagttgggcattactggtatgaatacctggatcgcatcatccggcggaggtttcagcctaacacgttcaaattcgtcgcctcaaaagttgccacggatggcttcctcttcggaccactagacctcctcctgttcttctcatatgttggtctgggtcaaggaaggagcatagagcaggtgaaggaggacgtgaagagggacttcattccggctctggtgttaggcggaaccatctggcctgctgtgcagatcgcgaacttccgcttcgttcccgtgcggtaccagctcctgtatgtgaacttgttctgcctcctggacagctgcttcctgtcgtggattgagcagcagggtgacgcctcctggaagcggtggttcacttcgttccagaaaatcgaagaccagaagggtaaggtttgatttgagtcatgcatggttcgttgtctggatcagtacctgtaaactccggttgatcaaggaagataattgcgatgccagcaaggctgaacattggcgtcgctatagagaattctttttagtctttgacgggatgaaacggttgccgagttgctctgttaactgaagtgcctgtgttttgccg

SEQ ID NO: 16636 - DNA, 1702 bp, Zea mays
  Clone ID: LIB3066-030-A5_FLI
cattggcgctggccgccgcgctcggcccggccacggcgcgcgcccagctgcggcgggaccaccaggcgccgccgggcccgcgcccgcacagcgtcaccatcaccgagttcggcgccgtcggggacggcaggacgctcaacacggtccccttccagaacgccgtcttctacgttcgctccttcgccgacaagggcggcgcgcagctgtacgtgcccaggggccgctggctcaccggcagcttcaacctcaccagccacctcaccctctacctggaggaaggcgccgtcatcgtcggcgcaaaggactcatcacaatggctgatcgttgaacctttgccatcttatggccaagggctagaccttcctggtcctagacatcaaagcttgatcagcggatacaacttaaccgatgttgtcataaccgggaacaatggagttattgatggccagggcttggtatggtggcagtggttgcgctcccatgagctgaaccatagccgacccaaccttctggagttcctgtattctgaagatattgtcatctcaaacttgacattcttaaattcaccagcctggagcatacacccggtgtactgcagtaatgtaaaggtccacaatgtgacgattaagacctcattggacgctccactgactgatggcatagttccagattcatgttcaaacttatgcattgaggacagcaccataagtgtcagccatgaagccatctccctgaaaagcgggtgggacaggtatggcatttccttcgggaggcctacctccgacattcgcatcagcagagtggacctgctatcatcttccggagccgctcttgcattcgggagtgagatgtctggtggtatctcagacattcatgttaaccacctccggatccacgactcctccaaaggtatttctttcaagacctcacccggccgtgggggttacatcgaggacgtggtcatctcggaggtacagatggaaaatgtgcatgtcggcatcgagttcaccggcaactgctcgacccacccagatgacagcttcgatccgtccgacctcccggcgatcgaccatgtcaccatgaagaacatggccggcacgaacatctcggtcgccggagttttgtcgggaatcgaaggagccccattcacagccatctgcctttccaaccttaacttctctatggctgctggttctggtccgagttactggtcttgctccgacgtttccggctactccgaggctgtctttcctgaaccctgcacagagctccgtgatccgtcctccagctcttccgtctgctattccctggccagctacagcgccattgaaacagcataaatgtccatccatccttccatccatttcttgttctccccttgagcctgcatcgccgccatcttttgtctcagttcttttttccaatacacacagacagaccaggaaaaagaacaacatcactactctcatggccctaaggctcggatcataagctgcatgaatgatgacctagcttgaaggggaagaagaatcaagtggggggttgtggacagctaggtgcttgcttgtacagctacatttctttattcaatctgtaagaaggaaggatttttttttttttggtttggtaggtgttgagcgcagaacagttgcttcatactattggcatgtgggtataaattatgaaacaccatgattaaatt

SEQ ID NO: 16637 - DNA, 2027 bp, Zea mays
  Clone ID: LIB3066-030-D2_FLI
ctctgccttagatggacactacgacgagaagaggaaatccaatgtggaatacacagaggacgagaagaaagccgtgatcgcggctctgaaaaagaaggctttgagcgcctcacagaagtttaggcattccatgaagagggggaggaagagcagcaaggtgatgtccatctcgattctggatgagcgtgaacctgaggaggtgcaggctgtggatgccttccgccagcttcttgtacttgaagagctgctaccatcgcagcatgatgactaccacatgatgctaagatttctcaaggcaagaaagtttgatatcgagaaggcaaagcaaatgtggtctgatatgctgaagtggagaaaggagttcggtgcagataccattctcgaggaattcgaattcgaagaagctgataaggtggcagaatgctaccctcaaggttaccatggggttgataaggaaggcaggcctgtctactttgaacggcttggacagatcgatgtgaataggctaatgcaggtcactacaatggatcgctttgtcaagaaccatgtcaaggagttcgagaagaactttgctgttaagttcccagcttgctcaatcgccgcgaagcaccatattgaccagagcacaacaattcttgacgtgcaaggagtggggatgaagcaattcagtaaagctgcaagggagctcattggcatgcttcagaagattgatggtgacaattatccagagaccctgtgccgcatgttcatcatcaatgcaggccagggattccggcttctatggggcaccgtcaagagctttcttgacccaaagaccactgcaaagattcatgttctgggtaacaagtatcagagcaagcttctcgaggtgattgatgctagtgagttgccagaaatttttggtggaacctgccgatgtgaaggtggttgcatgaaggctgacaaaggcccttggaaggaccccgaaatcatgaagatggttcaaagtggtgatgggaggtgtggatcactcggtacggcctctttcgaggctccggagaaaatgatttgtgaagacgacacgtatcctaagaaacaagctttgtttgatggggaaacacaattagctggagacgagcattctcagtcacagaaaatttcccgtggccggattgaacatcctcacgtgtcacctcttcacgaggaacttatccccacttcaattcatacccctggatcaccctattcttgtgatgtcccgatggttgaagaggccatagacgccatctgcaagagccacggaacaccaccagatgagaagattgccatcaccaaagctattataaatgtatcgaatggatccaagcccccactctttgctggcatcatagcacttgtgatgagcatcgcaacgatggtccgtctgacccgcagcatgatgcctgggaaggttctcggtgctgccataggtggagctaccctctcagaaggtaaatcaaaagtacaagagcgccagcggtccaagctatcagaagaggctgtggaggaagctgaagacgccgtctctgcaaagcgcctctcggagcttgaggagaaggtcattgcactcctgacaaaacccgcatcaatgcctgctgataaggaggaggttctgcaggctgctgtctcccgcgttagtgcactggaagaggagcttgcagctacaaagaagaccttgcaggagactcttgagcgtcagttggagatcgttgcatacattgagaagaagaagaaaagcaagcgtttctttcgttggtagaagcaaacagcagtgaattgttcacgcccacgagaaaaaaggttttgcgtgtgatggaagcgagctggtgcttgcgtatgccagcaagctgcgattctgagtgtaacacataaggatgttctttcattcttcttttttgttcccttgttgcatcaaattgtgccttaaccacgtcgatgtgctgccaaattgtcaatccctgatacggtcaatcatggatggaccgactgcaatataaatatattatacc

SEQ ID NO: 16638 - DNA, 1603 bp, Zea mays
  Clone ID: LIB3066-030-E11_FLI
gccgtgcaaatccatttcttgccttgccggcacagctctgcatagctcctcccaagctttaggattaggatttggatttggatttggatttggatcgggtgtgtttcctgcgtaaccatgagcgagatcatgaagctaaagcgtgggatcagcaccaaaccaggagaccacctcgtccaaaatggccaacaacatccatgtcacgaatgggaggagcaacagcgctactggccctcgccgcgggcgccgccggcgagcccgacggagtcgcccaggaccccaggcgggagccagaagaaggcggttctgggcaaggtgaagagcaaggccaagaaatggatgcacatgctgcatcacaagaagaaacccgcgccaccggaggagatgatgtggacccccagggccgggcctggacccagcgcggcacaagacagcatgcccagcagggaggagcgacacgccgccgagcaccgtggcactggcactggcacccccaggaaaccgcagcaacacgcgccttcctgttcctcgagcgatccagagcgggcgtccgaggtgttcctggaagcgtcaccgaggcagaactcgccggtcccgagccccaccgcgcacaggcagcagcagcagccgcagccgtacttcaaggtcagcagcaggttcgagtcggagatgaaggaggccaacgagatgctgatggagtccaagaagctccgcgtcaacacgaccaagcccaagaccaagaccgtgacgttcgcgccgccggccgtggagcgcgagcagccgggcccgggcggcgagaggagcggctggaagaaagactgcaggagggagctgcccggagcagcggcgtcccaggcgctccgcgacgcgttcgctgcggtccgccagacggtgctcgagatggtcgccaggatccaggaggcggtggcgctcgttgacggacggcggcacgtggtagagaggctcgtgtcgctcggcaggtacctggtgatgaagctggagcctgggcaggacgacacgttgctctcggaagcgatcactgacgccgtcctcgacctgttcgacgcgtggagcgagagcgtcgagaggcctttggtgcgacgggcgaaggagatctcttcttggttcctgcaggaaggaagagaagacacacctcctcctgttccgccgtctacgcgtccttgtgcggccgaagatgcagatgtgttttattccttagagaattgacagagcagcttgaagcaagagatcgagacattatgaaactacgtcggtagagttcatttacctaacgatgtcaggaagctgaaggcaaaggtctccacggctttgtacctgagatttgagtgagagaaagcaataggcaatcttgatgaagtttctcttcagtaaagaccatgtattcacgatgcatgtaactaggagccaaacacaatgtgtatatcgtaaaagaatagacctagtgctgaaggctgtggggtggataaaccgaggcaaaagcattttctcccgtaaatatggagaggcggctctcaccactacgtcagacccgttcaatgtgtatatcatagacatgttgaaatagaaatccccaatggcagag

SEQ ID NO: 16639 - DNA, 779 bp, Zea mays
  Clone ID: LIB3066-030-G4_FLI
gatatgccagcaggttgctgtcaatatcgcccctccagaaacgcaatcaagtacaagttattgggtttggagggttgattcgacttatggaaggggacgaggaggacgagaaaggggatggttcagcccactttgggttgcatttgcaattctgattggtggtctcttattggatgtgctgatatctgtttttcttggtgtttccgcacttcctgtcaatataataattggtgttcttatagttctcggattgggcaccgcccttcatctagctcttgagtgctgtcacgaatggggctcaaggaggaacgtggccaatattccgaggctggagaacatagcgccgactgggtaccaccctgcagtagtataatcgttatgggacttgtaaatagcgtaggaacatctaagctcgtgctggcttttggattattatgttctcgcaactagctttagctcacacgtgttgctcgttaatgtcgagctcaaattcaaagctcgttgattacaatccagttcatactcccactagtccaatccaatgtaaatgcagagttactgatactcggtcatcacgggctagtgctcatgccaaactgccagcaccttaattggatggtctggctacccattcagcatgacagggctaggttccttcttccctccttgtacggtttactctgacaagtcacttgttgtgtttcatctttatctgtggcttgtcggtataggcatttgtgaaggccatttgagagttgtggatataacatttttatatg

SEQ ID NO: 16640 - DNA, 703 bp, Zea mays
  Clone ID: LIB3066-030-H11_FLI
gtctgccatggtcaaaggctcagcggactacgtcgccatcaaccactacaccacgtactacgccagcaacttcgtcaacgccacagagaccaactaccgcaacgattggaatgcaaagatttcgtatgagcgagatggtgtgcccattggcaaaagggcgtactcggactggctttacgtcgttccatgggggctctacaaggctctgatttggaccaaggagaagttcaacagccctgtgatgctcatcggagagaacggaattgaccagcctggaaatgagaccttgccgttcgctctgtacgacaagttcaggatagactacttcgagaagtacctgtacgagctccagtgcgccatacgcgacggtgcaaacgtcttcggctacttcgcgtggtcgctgctggacaacttcgagtggcggctcggcttcacctccaagtttgggatcgtgtacgtggaccggaacacgttcgtccggtaccccaaggactcagctcgctggttcaggaaggtcatcaagaacgagaactgaatgatcgatcggccggtccattattaaggaacgaactccatgcgtttctttttagctaggggtatagtagtgcgtgtagggggtgcatcgatcagtttggtcatttcaataaaatgcttgtagttgttgttttggacttcgaataataaaaatactacttcccttctc

SEQ ID NO: 16641 - DNA, 1409 bp, Zea mays
  Clone ID: LIB3066-030-H5_FLI
ccgatcgatcgccacagccaacaccacccgccgaggcgacgcgacagccgccaggaggaaggaataaactcactgccagccagtgaagggggagaagtgtactgctccgtcgaccagtgcgcgcaccgcccggcagggctgctcatctcgtcgacgaccagtggattaatcggcatggcggctctggccacgtcgcagctcgtcgcaacgcccgccggcctgggcgtcccggacgcgtccacgttccgccgcggcgccgcgcagggcctgaggggggcccgggcgtcggcggcggcggacacgctcagcatgcggaccagcgcgcgcgcggcgcccaggcaccagcagcaggcgcgccgcgggggcaggttcccgtcgctcgtcgtgtgcgccagcgccggcatgaacgtcgtcttcgtcggcgccgagatggcgccgtggagcaagaccggcggcctcggcgacgtcctcggcggcctgccgccggccatggccgcgaacgggcaccgtgtcatggtcgtctctccccgctacgaccagtacaaggacgcctgggacaccagcgtcgtgtccgagatcaagatgggagacgggtacgagacggtcaggttcttccactgctacaagcgcggagtggaccgcgtgttcgttgaccacccactgttcctggagagggtttggggaaagaccgaggagaagatctacgggcctgtcgctggaacggactacagggacaaccagctgcggttcagcctgctatgccaggcagcacttgaagctccaaggatcctgagcctcaacaacaacccatacttctccggaccatacggggaggacgtcgtgttcgtctgcaacgactggcacaccggccctctctcgtgctacctcaagagcaactaccagtcccacggcatctacagggacgcaaagaccgctttctgcatccacaacatctcctaccagggccggttcgccttctccgactacccggagctgaacctcccggagagattcaagtcgtccttcgatttcatcgacggctacgagaagcccgtggaaggccggaagatcaactggatgaaggccgggatcctcgaggccgacagggtcctcaccgtcagcccctactacgccgaggagctcatctccggcatcgccaggggctgcgagctcgacaacatcatgcgcctcaccggcatcaccggcatcgtcaacggcatggacgtcagcgagtgggaccccagcagggacaagtacatcgccgtgaagtacgacgtgtcgacggccgtggaggccaaggcgctgaacaaggaggcgctgcaggcggaggtcgggctcccggtggaccggaacatcccgctggtggcgttcatcggcaggctggaagagcagaagggccccgacgtcat

SEQ ID NO: 16642 - DNA, 1730 bp, Zea mays
  Clone ID: LIB3066-031-A3_FLI
gcatagacaggcgtcttcgtactcgcctatctccgcgacccaaagcgttcccccttctcccattcttctctcatttctcaccaccgccgccgctaccccctttcgacaacaccatgagggagtgcatctcgatccacatcggccaggccggtatccaggtcggaaacgcgtgctgggagctgtactgcctcgagcatggcattcaggctgatggtcagatgcccggtgacaagaccattgggggaggtgatgatgctttcaacaccttcttcagtgagactggcgctgggaagcacgtcccccgtgctgtttttgttgaccttgagcccactgtcatcgatgaggtgaggactggcacctatcgccagctcttccatcctgagcagctcatcagtggcaaggaggatgcagccaacaacttcgctcgtggtcactacaccattggcaaggagattgttgacctgtgccttgaccgcatcaggaagcttgcagataattgcactggtctccagggcttcctcgtcttcaacgctgttggtggaggaacgggctctgggcttggttctctcctcctggagcgcctgtctgttgactatggcaagaagtccaagctcggtttcaccgtgtacccatccccccaggtgtccacatccgtggttgagccatacaacagtgtcctgtccacccactctctcctcgagcacactgatgttgctgtcctgctcgacaatgaggccatctatgacatctgccgccgctcccttgacattgagcgcccaacctacaccaacctcaacaggcttgtgtcccaggtcatctcatccctgactgcttccctgaggttcgatggtgctctgaacgttgatgtgaacgagttccagaccaacctggtgccctaccctaggatccacttcatgctttcgtcctacgctccagtcatttctgctgagaaggcctaccacgagcagctgtccgtggccgaaatcaccaacagcgccttcgagccatcctccatgatggccaagtgcgacccccgccatggcaagtacatggcatgctgcctcatgtaccgtggtgatgtggttcccaaggacgtgaacgctgctgtggccacaatcaagaccaagcgcaccatccagttcgtggactggtgcccgactggcttcaagtgcggaatcaactaccagcctcccagcgtcgtccccggcggtgacctggccaaggtgcagcgtgccgtgtgcatgatctccaactccaccagtgttgtggaggtcttctcccgcattgaccacaagttcgacctcatgtacgccaagcgcgccttcgtgcactggtacgtcggtgagggtatggaggagggcgagttctccgaggttcgtgaggatctggctgcgctcgagaaggactacgaggaggtcggtgctgagtttgacgagggtgaggacggcgacgagggtgacgagtactagacgctctactggcgcggcgtcgtcgggcttgtgtgccactgctatcctgtgatctgccctgagtggctcctatcgtgttatgtttctgtcggttcttatctatctgtcgttgtgtggtttacaacttacgttgtaagactttattcccccgctttgctactgggttattaagtttggcgttattgttttcttgatctctgagatgctttgctttcaccacctgtttttttgtcatctgtgtaattgagtcgacggacaatc

SEQ ID NO: 16643 - DNA, 1399 bp, Zea mays
  Clone ID: LIB3066-031-A9_FLI
caaacttacaacatatggctatggcgacggcgaagctgaactccccggctaccagcttgctcgctggcggccgcacgcgccgatctgcgcccgcccgctgcacgacggtgatccgcgccgccgcaggctcctactcggacgagctcatctccaccgcgaaatctgttgcttcccctgggcgtggtattctggcaattgatgagtcaaatgcaacatgtggaaagaggttatcatctattggtttggacaacacagaagtgaaccgccaggcttacaggcagcttttgctgacaactgctggtcttggtgaatatatttctggcgctattcttttcgaggagaccctttatcaatcaactacagacggcaagaagtttgttgactgcttgaaggatcagaatatcatgcctggcatcaaggttgacaagggtttggttccattgcctggatccaacaatgaatcatggtgccaaggtcttgatggtttggcttcaaggtgtgctgagtactataagcagggggcgcgcttcgcaaagtggaggactgttgttagcatcccttgtggtccatctgcattagcagtcaaggaagcagcatggggacttgctcgatatgctgctattgctcaggataatggtttagtgccaattgtggagccagagattcttcttgatggagaccatgggatcgagggagctcttgaggtggcagagaaagtgtggtctgaggtgtttttctacttagccgagaacaatgttctgtttgagggtatcctgctgaagcctagcatggtcacccctggagctgagcacaaggagaaggcttctccagaagccattgcaaagtacacgctaacaatgctcagaaggagagtacctcccgctgttcctggaatcatgttcctttctggtggacagtccgaggtggaggcaactctgaacctgaatgcaatgaaccagtctctgaacccatggcatgtgtcgttctcctatgcccgggctctgcagaactcggtgctgaagacatggcaagggcgccctgagaacgtggaggcagcgcagaaggccctgctggtgcgcgcaaaggccaactcgctggcccagctcggtcgctacactggtgagggcgagagcgatgatgccaagaaaggcatgttccagaagggctacacctactaatgtgccagcgagatgtttccatgacataataataattgtagcgttttggtgttattattattattattttggtacgctctggtgaataataaccaaattgttggtgccaacgacatctagcagcaaattggtctttagaactcatgtagaaccttgagaacgaacatgtaatctggtgaattctattcctatatttgaggcgatggatgctaagttgccat

SEQ ID NO: 16644 - DNA, 866 bp, Zea mays
  Clone ID: LIB3066-031-B1_FLI
ttttgtcagttggacaatccgcagctcctccatctcattcttccccccatcccatccccaaggttgaccggcgaaatcagcagtccgagaaccgcgagcttctgcctgatccagcctcatcccgccatggacgaatctgaggagcacagcaacggcggcgggcacccccacccgcaccacgggtacgagtggaagttcccggcggcgctgagcgcgaacacgacgagcgtgcacgtgacggcgctggacggcgtggtgaacgtgaactcgctgttcacggtggccgtgttcgtggggctgtcgctggcgacaccggggcagctgcggagcctggcaggggacccgcggtgcgacgccggcccgggcgtggcgcggtcgctgctggtgctggaggtggtggccttctcgtccttcctcttctccagcctggtggcgcagggcctgaagctggcgctcaacctcatcaactccaaggacccgcacgacgcggcgcgcgcccacatcgacgcccgcgtgctccgcctcggcatgctcgcctccgccgtcggatccgtcgtcggctgcgtcttcctgatgacgtccatggtcatggtcgtgcaggtccgcctcggcacgctgagctgccccaccgaccgcgccgccgccaaggccgccgcgggcctcgtcggcctcgtcaccaccgcgctcgctttctacgtgggcaccgtcttctacaccttcacccactgatgccagttccatgcgtccgtacgctgcatcccaaatccatctagcgttgcgttgcgttgcaaagggcacatcgccatcagtggtgtcggtgtgcgaggaaattgaaaggaggacctgcaatctgcgttattactttg

SEQ ID NO: 16645 - DNA, 961 bp, Zea mays
  Clone ID: LIB3066-031-B10_FLI
gcggcctcccacccatacaccttgggcgggcgccgcgccgtcgagggccatccagagctcgccatggcggccgtccggtccaacagggcccacgcccaccagcactgccgctccgaggcgtcgtgcccgacgacctccgtggccgtggcggcggcgagggccggcgacgccccacgccaccgttcgcaggctccggtgcaggtctcgaaagggcatcaccagatgcggcggtcagcggcgttcccaccgcgtcgcccggggccagggcgtcgccctcctcagcgttgtgacagcgacctcaacatccggcagcaccgcacctgcagcgaggtggccggcggcaccgcggcgggctgtgcggccgtgtgctgctgcttcccctgtgtcatggtggaggtcgtggtgctcgccacggtgcgcgcgcccgcggcgctgtgccgcaaggcggcccgcgtgagcaagggcgggcggcggcgctccgcctccgtggggcaggccacggagatctacgagctcccggtggacaacgccggcgtcgtcgtcaaggtggacgccagcgccgtcgaggcggtggcgctgccggtgaagcccgccttgcagctggaggagacgggggagcttgagaaggaggtgtgggccaggttctacggcacgggcttctggaggagcgtgtctcagctcgacgacgacgacaggtgaccggaacaatcaggcccgtgagtgagcgagcgatcgaccagctcctccggcgatgcttaagcaatagcatgcgtttccttggttgggtttccttcgttgttttccgcggaaataagagaagatcgaggaaaaggaaatgtgatgcatggtcgtcgatcgactatacgagtttcttttgttttgctttttgaagggagaaccattctcttctacgatgccctgcatatttaataaaatgtatgtctattgaacaatgtgactg

SEQ ID NO: 16646 - DNA, 528 bp, Zea mays
  Clone ID: LIB3066-031-D3_FLI
gccccacacacacaaaagcaaaaagcatcatcacaataatggcccgcgcgtgtgtgttcctcgtggtgctcctcctggccgccgtcgcggtggcgccgtttgcgggggctgcgcgtgtggatgtcgtggagggcaggtccatggcgtccgccgacgcgcctgaggcggcggctgacgcgcccgctcccggtcccgactccgcctcatccccggactcgccgtcggaggcgccctccagcagcagctcatccgactagccgcgcacaacgcagttcttgtcatgatctatctagcaaataaaaagatcatatgtctcgtttgattctctggaataactaatagtatatatgctgcgcccggatgatatataaatatgtgcatcaaatgcgtgcggcaaacgcatggaatgtgcttgcctagctagctaattgttgttttttttttctttacttttcttcatacctgtctctctctctcggttgtttaatttttcttcatgcatgtaatataatgtgatatacccaatat

SEQ ID NO: 16647 - DNA, 782 bp, Zea mays
  Clone ID: LIB3066-031-D7_FLI
tctccctctccctctccgatccattctccagcgcagcgaagtaaacatgtctgaccgggcaaagatgtcgtggcaggcgtacgtggacgagcacctgatgtgcgagatcgagggccaccacctcgcggcggcggccatcgtcggccacgacggtgccgcctgggcgcagagcacggcgttccccgagttcaagaccgaggacatggccaacatcatgaaggacttcgacgagccagggcacctcgcgccgacaggcctgttcctcggacctaccaagtacatggtcatccaaggcgagcctggtgccgtcatccgtggcaagaagggatcaggaggcatcaccgtgaagaagacagggcaggcactcgtcgttggcatctacgacgagccgatgacgcctgggcagtgcaacatggtggtggaaaggctgggcgactacctgcttgaacagggcatgtaactactacgtaccagctggaatgcatgtcgacgacgatggtttcgagtttcgacttccaataatagtaacaacaaagcaaaggccttcctcccggcgtatttgctttggctcttctcctccacgccataagatatctagcaattggtcactcgccttaattagttcgctttgcttttgaggttgattcgaccattttgctgtagcgtgaattgcatgcatggacatgcaacgctccaatggcctttggaatgtggaatttttttccccattttctgtatttttcctataaaaaatgaactggttcttatataattcctctcag

SEQ ID NO: 16648 - DNA, 3478 bp, Zea mays
  Clone ID: LIB3066-031-E1_FLI
agcccgcccttggcagtgccatggttgcaaaattctcctcgcggtctcgcatggcacgagctgcagaaaaccgattaaaaaaaccaaaaaacacacccgtaaagtaattaaaccaaacacgcgctgccaccgaccgatcaggcgaccccgctccaagaggaaatccaccaccgcggccggggcctcccagatctcgctggaggcagcggcagcggcggcggtggggggcgatggcgctcaacatgaagaccctgacgcaggcgctggcgaaggcgtcggctgtcatcgagaagacggtgtccacgacggtgcaggaggtgacgggcccgcgcccgctgcaggactacgagctgctggaccaggccgggtccggcgggccgggactcgcgtggcggatctacacggcgcgaccgcgggatggcgccccctcggcgccctaccccgtcgtctccgtctgggtgctcgacaagcgcgccctcgccgaggcacgggcgcgggcggggctgtcgaaggcggccgaggacgccttcctcgacctcgtccgcgccgacgcggcgcggctcgtgcgcctgcgccacccgggcgtgctccacgttgtgcaggcgcttgacgagaccaaggccgccatggccatggccactgagcccgtcttcgcctccgtagctaacgcgcttgggtgccttgacaacgtcggcaaggtgcccaaggagctcaagggcatggaaatgggactacttgagattaaacatggactgctacaagttgcagagacgttagattttcttcataacaatgctcatcttgcccatcgagctatatcacctgagacggtctttataacttctaacggatcttggaagcttggtgggtttggttttgctctttcagttgatcaagccacaggtggtttgacttcatcacagctattccattattcggactatgatgtcgaggatacagctttacctcttcaaccgtcgttgaactatactgcaccagaattggttcgaagtggagattctaaagttggctctgcttgtgatatgtttagctttggatgtctagcttaccatctggttgctcgtagaccacttctggactgccataacaatgttaaaatgtacatgaatgccttgacatatttaacaagtgaagccttttctaatattccttctgatttggtatcggatttgcaaaggatgatatcgatggatgcagtatcgcgtcctagtgctgtggcctttacaggttcttctttcttccgggatgatacgaggttgcgcgctcttcgtttccttgaccatttgcttgagagagataatatgcagaagacagagtttttgaaggcattatcagatatgtggaaggattttgattcccgagttcttcgatataaagttcttcctcctctttgtgctgagttacgcaacatggttatgcagccaatgattttgcctatggttctaacaatagcagaatctcaggataaaggggattttgaacttgcaacactgcctgcgcttgttccagtgtttacttcagcatcaggtgaaactctacttttgcttgtgaagcatgcagatctcatcattaacaaggccacacaggaacatttgatatcacatattcttccaatgctggttcgggcttatgatgacaatgatccccggttacaggaagaagttctgcgtcgaacagtatcactgtctcgtcaacttgacaccaagctagtcaaacaggctgtgcttcctcgtgtacatggattagctctaaagaccacagttgccgcggtgcgcgtgaatgcgttgcgatgtttaggagatcttgtgccatccctggacaaagaaggtatattgggtatcttggagaccgttcggcgttgcacagctgttgaccatactgcgccaactcttatgtgcacacttggtgttgctaatgcaatctataaacaatgtggtgtggagtttgctgcggaatatgtgattcctctcatcttcccattactcacagcacatcaattgaatgtacaacaatttgccaagtatatgctatttgtcaaggacattacaagcaagatcgaagagaagcgtggtgtgactgttacagataatgggaacacagaggtaaaagcatcaccttcattggcaaacgggatccattctgaacctatgccaggacaaataccagctgcaaagagcagccctgcatgggatgaagactggggtcctactaagaaaaccggtgttccatctctctcagttgattctagtgcacaaacaaagcaaccctcagtacacccttttgacttcagtactcaaacaaagcaatccacaccactcccctttgatttgagcacccaagtaaagcagccatcattagtttctcatgctacagcagctacgatcccacctgcgcaaccacaaccagtacaatctcttgtgcccagttcaggacctcaatcttctggctcatgtgcccctgttgacattgagtggcctcctcgaagaagctcgtcatccgacttcagtgcatccttgtctattagcaaggagaatgaatctggaaggctatctagcgatggacttgacgatattgatccttttgctgattggcccccaaaacctagcaatgttactagcattacagcaaccgagcatcgtccaagcataaatcaaaatatttctggatttagctcaggtaacatagggtttggtggcagcgggaattctatagggcaagcgaaaagcaaccaaatgagctggtcaaacacgtctaatctgatgggcatgaactcaactggcagctatttgaatcagggcagtgcagctctaggttttggaaatccaattggaggattgagcactggcctctccaatccaagcagttccagtacaggcctgagcatgatgcaaccaaaatctgattttggatcactgtccatgtcggccaataatgccgcaaatggcccacccagacttgcccctcctccatctacttcagttggaagagggcgtggtagaaatcaaggacaatcagcactctcccgagcatcaaggcctcctcattcgaactcgtcatcaggacaacaacctatcctggatttactttagtaagagatgcttgcctctattcttggcgatgacgattgtcaatgtgtacatcttcaaacctttgtaaggtgagcatcatactgttcttttggacatgcatgtggtgaaagcatatatatattttttgttcatttcgaagctggctggccttggtttatagtctgaaggagttctacttcggggaatctggatcttgcagaggttaccttctctcatgcttagggttttgatttgggcattgaggctatcttcatattggtgacagaagaaatgtcgttgtgtatgtttctgtctaaaatcggctgtagcttgtagagttgatgaatatagttgacatgcttatctgggctgtgaagttttgaatgttt

SEQ ID NO: 16649 - DNA, 1266 bp, Zea mays
  Clone ID: LIB3066-031-E6_FLI
gtcgtcgacagcctcgccaactcctccgagctcgtgatccgccgcctgcgctcgctcgcggtggaacacgccaaaaacctcgcgttccacaaggttgatatccgtgacaaagatggattggaaaaggtttttgcttcaacaagatttgatgctgttattcattttgctggactgaaagctgttggagaaagtgtacaaaagcctttgctttattatgaccataatgttgttggcacaataaatcttctggaagtaatggcagctcatggatgtaagaagttagtgttctcatcatcagctgcagtttatgggtcacctaagaactcaccctgcactgaagattttcctctcactccacataacccatatggcagaaccaaacttatggcagaggagatatgccgtgatatctaccattcagatcctgaatggaatatcattttgcttaggtactttaatccagttggggctcaccccagtggataccttggtgaagacccatgtggaactcctaacaaccttatgcccttcgttcagcaaattgcagttggcaggaggccatcgctaacaatatttggaaataactacgcaacaaaggatgggacaggggttcgtgattatattcatgtggttgaccttgctgaaggacatcttttcgcattaaagaagctttttgaaagctcatctaacataggatgtgaagcatacaaccttggaaccggaaaaggaacatcagtgttggagatagtcaatgcatttgagaaggcttctggaaagaaaatccctttgatcatgggccaacggcgtcctggtgatgctgagattctcttttcatcgccggcaaaagcagagagagagctccactggaaagcgaaatatggcatcacagaaatgtgcggagacctgtggaactgggctagcaagagcccttatggatacgcggcatctgagtctccgaagctgaatggtagttcacgctgagcaacgccgattggcccgtgtggactcacttgtacatgagactgtagtgccagccaaccaggataaatgtagatctagtcggtcggtcatacagagagaagttctataggcctaggaaagaaatgttatcctgttcctcagcataagctcccatagtggttcttccatatgcgtatagtctatgaaatttgttctaggaccattgctatagtcaaccagctaattcaattctatttcttgagttgcgttgcctaaaatagagcatgatatagatatcagcatcac

SEQ ID NO: 16650 - DNA, 965 bp, Zea mays
  Clone ID: LIB3066-031-F1_FLI
cggaaaaggggccagcggcaccgtaccagtcgtccagttacctgacgcagcagctcagcagcaacatggcgcagagaaccgccgccgccgcctcctcttctgcgtcaggctacggcgttcagagaccccctggtctaagtctaacaacagcccagacgaaattcacgtcgctccggccgttgccgccttcggtcgtcccttcccatgcctacggcgcgccgcctcacggacccgtcaccgtctttcacccgtcagctcctcccgtgccgtatccagcgagcaattctggcggtcctggcagcagcgacgcggtgttggagatcgagagcgtgaggtggagcgtggtgggatcgaagcctgagggctcggagcgtctgaggagctgcaaaagggcagcagagatggacgccgacgtgtccgtggcgttgctgaagaagcctctcaccgtcgccgccgccgccgcagcacggcaggggctagatatgttgctaccggtcgcagagacggggtcggagttccgtggatccaccaggccggagccggaggcgcagccgcggcctagtggtacgagtacgacgcctatttgtgtcgacgacgagccttgagctgatgatcttcgacttggagacgcaggcaggatcgcgtcccacacggtcatcgaaagatgtcagcgcgatggtaaggtactactactactaccagtggagctgaaacctggagcgaagcgtgtatggcagtcagcagccaagtgccagcagcagcgtgtgccagccagggaaatcccctggcctgtgcgcgcgttcggttacaccgctagcccctcgaggaggcgcgggaggtcagcatgcatgttctaggtgtggtctttggccctctttgttcacctgtatacattgaaacactcatcagtggtttttggctggaagggggaccggggcagggccagagccagagccttctgctgt

SEQ ID NO: 16651 - DNA, 1066 bp, Zea mays
  Clone ID: LIB3066-031-H2_FLI
aacagatgatgaacaactggttaatacataataaatgaataaggcttttattgattgtgtttcttctcttcatgcatgtaacaaggccggaaccggaaaccctagaacatatatatatacgtacgtatccaacagcagcacatacatatacatgtaaggaaattaaaataatttgatatagtacgtacgccttggaaagacctgcatgcggcgtggcatcaatataatataaattataatatgcatgcagatcgatgcaagaaggtcgagaagcgatcgatcatagtagatagcatgcatatatatatataataattaatcgattcatgcggcggcggcggcgacggcggcgtggtgtgtgaatccgaaggcgatgtgcgccatccgaccgtactccctgtcgtgcgcggcgacggggacatcctcctcctcgcccttccacgcgtcctcgcagctctcggaggcgcccattgcggcggtcagctgctccatggccttgccgtagatcttcgccttgaggttgtccagcgcgtcgcggaggaggtcggcggcgccgccgtactgctccaggcagtggttgaagcgggcgcgcgcctgcggatccgacgacgacgccgcctccagctccgcgaggtcgtcgatcttggactcggtgctggcggcgtggtcgatggccatcctggtggccagcaccgccagcccgtgcatgttcttgttgccggcctccttgctgcgcgggtcggcgcccagcgacgccatgcagtggtcgtaggccacgccggcgtgcgtctcggacgcgccgcggcacgcctcctccacgctcaccggggtcgcgcactgctgaggcggctcgccatcgtccaccgccgtgccagcagcggcggcggcgatattatcatcagcaggcaccaactccactaccgcctgcgcaacaccaaccagaagcagcaggcggagaccgagcagtaccagcgtcacacgccggctgctgctactgctgctggcacgggtcattttcgacctaattacttagctcggatggacgatgttccctgctgctggtctc

SEQ ID NO: 16652 - DNA, 1394 bp, Zea mays
  Clone ID: LIB3066-031-H3_FLI
ggccgagccgaacgggcgtgcgccatgcgcatgcgaccctgacgagcaacgacaaccacagagcccaaccggaaggaggatcggtaccagctcacggcggcgccagcaccacacgccgccgccgccgccgcccacccccctcccgacaggcacgcttcttgcgcctcttgtgggatgctactacggataacgtacgcccaacccacgccttcggcggcggcccagttgaggctccctgggccgcgtttacgccgacgccgcgtcgctgcctccgcagcggacggcgccggcaattcaagctccccgctccactgtgacccttcgccccacgcctacctcctggtcctgggtccggacgtcgaacccagcggctcacgctcactgagtacatctccaattacagagaagggaaagctgaggtcttgggtcggtccaagtgggcagtactaccgtgagctgccttgccccagctgtaggggtagaggttacactccatgcaaggagtgtggaatagatagatcaagtttggactgccctatgtgcaatggcaaggggattcaaacgtgtttacaatgtagcggagagtgtgtgatatggcaggaatctgttgatgaacagccatgggagaaagttcggtcaagttctcccttgaaagtaaaagaagatgacgaagttgacaagttagagataaatatcaacaaccccaaaagatcaaagcgtacttatgcatctacttcaccagaagttgccaagaagattagccggtctttaagaagtctaaatgctcaaacaggattgtttactaagcacatgaagattatacaccaagacccagaattgcgtgctcaaagagttgctgcaatcaagagaacaaaaggaagtgatgttgcaagaaagcgtgcttctgaaattcagaaggcattcttcagtgatcctgagaaccggctcaagagaagcattgccatgaaaggggtgaaattttactgcagcaaatgtgggcaagaaggacatagaagcttttattcccctacagtgagggaaggttcaaccagggtgcggttcaggtgccggttgtgtggcagagaagggcataatagtcgaacatgtggaaaaccaaagtccgagaaggagcacaaacaacgacctcaccactgcagccgatgcggtgaaaagggacataaccggcgcaactgccccacatgcactgatttgggtagtgatgcttcaggctatgtggttaacaaagttaatggctctaattcagctgtttatcaatgtagtatatgcttagaaaaggggcataacagacgaacatgcccgaaaagaaaggctaccttactaaaatgaaaagtgtgagtaaaattaaaagaaaggctatcttttatgcctgtgtt

SEQ ID NO: 16653 - DNA, 2282 bp, Zea mays
  Clone ID: LIB3066-031-H6_FLI
ccgaatccccagaccaaatcgccgtcgccgtcgccgtcgcatcgcagcagcgggagtcccagggtcccggaccgaatccatttccagacacccaaggccaagatccatcgctcgttccaaccagccttcttcttcttctgcttggtcgtctgatctcgttttccattcgtgtccaatccgatccagccaaccgctgtgaatgatggcgctcaacctgtcccaccagaccggcgcggccgtggcggcggcaccggcggcgccacgcgcggccgtcgtcgcggcggcggccacggcgccacgctcggccgtcgtcgccgcggcggccaccgtggcgccgccgcccgcgtcggcgcccgcccccgctccggcgctccagctgcagacgatgacggtggacccggcccccgcgcaggcgcccgacgcggtgaagccggacctcgccatggcgtgccaggcgctggtggaggccgcgcccgaggcggagcacgccgacgtggccgccgagctccggagcagggccggggtgcccgtcttcgtcatgatgccgctcgacaccgtgcgcaaggacggcaactcgctcaaccggcgcaaggccgtggaggccagcctggcggcgctcaagagcgccggggtggagggcatcatggtggacgtctggtggggcatcgccgaggccgacgggcccgggcagtacaacttcaacgggtacatggagctcatggagatggccaagaagaccgggctcaaggtccaggccgtcatgtccttccaccagtgcggcggcaacgtcggtgattcagtcaccataccacttccgggatgggtcttggaggagatggacaaggaccaggacctggcctacacggaccggagcggccgccggaactacgagtacgtctccctgggctgcgacgcgatgcccgtgctcaagggccgcacccccatccagtgctacgccgacttcatgcgcgccttccgcgaccacttcgccaccttcatgggcaacaccatcgtggagatccaggtcggcatgggccctgccggcgagctgcgctacccgtcctacccggagagcgacggcacctggtcgttccctggcatcggcgagttccagtgctacgacaggttcatgctgagtagcttgaaggcggctgctgaggccgtgggcaagccggagtggggcaacgcgggtccgggcgactccggcagctacaaggactggccggaggacacgggcttcttccggcgcgagggcgggtggagcacggagtacggggagttcttcatgagctggtactcgcagatgctcctggagcacggcgagcgcatcctgtcggcggcgacgggcgtgttcacgggttcccccggcgtgaagatctcggtgaaggtggccgggatccactggcactacggcacccggtcccacgcggcggagctgacggcggggtactacaacacccggtcgcacgacgggtacgcgcccatcgcgcgcatgctggcgcgccacggcgccgtgctcaacttcacgtgcgtggagatgcgcgaccacgagcagccgcaggacgcgcagtgccgccccgaggcgctggtgcagcaggtggccgccgcggcgcgggaggccggcgtgggcctggccggcgagaacgcgctgccgcgctacgacgacacggcgcacgaccaggtggtggccacggccgccgacagggccgccgaggaccgcatggtggccttcacgtacctgcgcatggggcccgacctgttccagcccgacaactggcgccgcttcgccgcgttcgtcaagcgcatgacggagccgggcgcgcgggaggcgtgccgggagcaggtggagcgggaggccgagggcgtcgcgcacgccacccagcccctcgtgcacgaggccgccgtcgcgctcaccaactgaccggaccggccggcgttccccgtcgactgtgttcgatcgctagacggggtggcacgctgcgatgactacctgtatggcgagtccctatacttactcatacataagctgcgccgccgtgtcgtcggtgcgtgcaccgcgcagtagtgtgcgtacagcggaagctgcgactgcgagcgaggtagggtgtggggtgggtgactggggtacggtacgtaggtgccacgttggaggctttggcgtttgctcagagcctggcaggagatgggtttgatgttctgctgctgtgttactgtatcctacacctacagaatgtgctatgatttgtactgctataatttttaacgaagatacaaacttctac

SEQ ID NO: 16654 - DNA, 750 bp, Zea mays
  Clone ID: LIB3066-032-A5_FLI
cactcaccacgctcttgtctgaccaactctctctctctcttatctccttccaagattcccccatttttttgttgttgtcccccccattcttgctaggatcattccttgatctttcgctcgctccagtacgcctgttttccagctccggagatcccatctcggccacctcctgcggtctccaagctccaagaggccagattccagcacaaatttgaggtcaatttgcccgctgagctcgaatcaatccgctcggcaacaagtgtcatttgttcccccgatccccgggcttcgattcgatcgaatccgacctaattttattgtgtgtgtgtgtgtttaaccttctctcgctgcacttttcctttctcctccctgtcgcaaacgcaaagtgggttccatcgcgtcacccgcacggctcctctgatcgggcggagaaagaaagcgcataaaaggcgagctcttgatgcggtcttggtcgtagcaacagcagctccactgctcccggcatcgcctgctgttgtttatccatatacggacggagcagcgggcgctccggcagaggcagtggcagcgcgctccccccgtcagcgcgtgctgatgcttgcccccctgctcgccgccttcgctgtcgtcttcctgctcctcctgtccaggccatgcgcccgtgacatgagactgttcctcgcctccctgtgccagcagctcgtgctgtccctgctcgggttcctggcaggcctccgcctgctcagcgcg

SEQ ID NO: 16655 - DNA, 966 bp, Zea mays
  Clone ID: LIB3066-032-B12_FLI
ggaggcgagagtgcgtgcgtgcagccacaggcaggcgtcggcaccatgtcttctttcaccggcacgcaggacaagtgcgcggagtgcgacaagaccgtccacttcatcgacctcctcacggccgacggcgtcacctaccataagacatgcttcaagtgcagccactgcaaagggatcctctcgatgtgcagctactcttccatggacggtgtgctgtactgcaagacccacttcgagcagctcttcaaggagaccgggagcttctccaagaacttcacgccaggtggcaagtcttcagacaagggtgaactgacaagggcccccagcaagctatcatctgcgttttctggtactcaggataagtgtgctgcttgccagaaaacagtgtacccgctggagaagttaactctggaaggcgagtcctaccacaagagctgcttcaagtgctcgcacgggggctgcatcctcaccacctcctcctacgccgcgctcaacggcgttctgtactgcaagatccacttcgcgcagctgttcatggagaaggggagctacagccacatgatgaagaagagcccgtcccaggatacgctgccggacatggcagccgacgagcaaccgccggaaccggcgccaccgcaagacggggaaggagaggacaactaggaggaagggaccgccaccaatatatatcacacacacacacactcacacattctcacactcaagtctgcgtttgccatttttcttttctttttctctacgacgcttcgttattccctcctttcatctatctctccgtgaactcggtttgtcgtccagctggctgtaagtgtaccagatgccttcgttacgtctgatgaggctcatgacaatggcgattttggcatggagctgtgttagcctcgcggaaaaactgtaactgtgtaagcagaactgctatatattgttcctaacaatgttgtcctt

SEQ ID NO: 16656 - DNA, 1440 bp, Zea mays
  Clone ID: LIB3066-032-B8_FLI
gtacggtctgttggaatggattaggtgtggctagttttggtttggtgcatcctcgtatgtgcttttgcaggaagattttcgtagggggtgtagcttgggagacaactgaagaaacattcacaaagcattttcagaagtatggagctataactgattctgtgatcatgaaggacaagcatactaggatgcctcgcggatttggatttgttacattttccgatccatctgtgcttgacagggttctagaggatgaacatgtcatagatggaagaacagttgaagtcaaaaggactgttccaaaagaggaaatgtcatcgaaagacggtcctaagacaaaaaagatctttgtgggtggtattccaccatctcttaccgaagataaattaaaggagcacttctcatcgtatgggaaggtggttgagcatcagattatgcttgaccatagcactggacgctcacgtggctttggatttgtcacatttgaaagcgaggatgctgttgaaagggttatgtcagaggggagaatgcatgatcttggagggaaacaggttgaaattaagaaagctgaaccaaaaaaacctggtgtgggtgattcaagctcaaatggaagacacagtcgtggtggtggtcatcgtgattcataccgtggtagtggtggcagtggcgtttctgggaacagcagtggtggtggctatggatacagtggtggctaccgatcaactgctgcagcacattatggcagcacagcatatggtgcctatggcagagggtatggatacggtggtactgctggctatggcttaggttatggctctgcatatggtggctccatgtatggaggtccatatggtgcctacgtggcatatggtggtgcctatggaggtggtgcatatggtgctccaggagggtatggcgcgggaggatatggcagctacggtggggctggaggcatgggtggtggtggcagcgctggtggccggggctccagcagataccacccttatggaaaatgataatccattcactgcctttgccttcctctaggatctgataataaagctatacattcccaccgagaaaatggaacattccattcaccttgttgaatcagcggcatctgaacatttttttcctggaacctatcattgcacaacaaagattctagtctgtagtcgctgaaccctgaactgcctcatcccacccccaccccctgagctttctgtagaaggtgcagctcaaattctcgtaggcatgagccttagaagacccttgaaactacaagctttgtggtaacaatatggtgtcatggaacatatgtattttgatgtaaaacattcgctcactgaccagtgacttcgccatctctgcttatgtatgtagagaagcttagcaaaggattggactgatactattgaattgtgtgggtttctatttgtctcc

SEQ ID NO: 16657 - DNA, 1199 bp, Zea mays
  Clone ID: LIB3066-032-C12_FLI
cacctatggtggtgcctagtgggcctaaggtgccagccttgctcgcgtttggagattcaatcgtggacacaggaaacaacaactacctggtgaccgttgtgaaggccaacttcccgccgtacggcagggagtaccctaaccacaaggctactggcaggttctccgacggcaagatcaccgtggactttctagcgtctgcgcttgggttgaaggagacgctcccgccatacctgaacaagagcctcaccctggaggacctcaagaccggcgtcagcttcgcgtcggcggggagcggctacaacaacgccacgtgccggacgtcgtcgaccatgacgatcgagcggcagctgcagttgttctccgagtacaaggcgaaggtggggggcatccacgagagggccctcttcgtggtctgctccggcagcaacgacattgtggagcacttcaccctcgccgacggtatgacctcgccggagtacgccgacatgatggcccgcagggccatcggcttggtcgaggcgctgatcggccaaggcgcgcggcagatcgcgctgaccggggcgccgccggtggggtgcgtgccctcgcagcggcgcatcgccggcggggttcggatgcagtgcgccacggaccgcaaccagctggcgctcttgttcaaccggaagctgagcctggaggtggccaagctgtccgggaagtaccgcggcgtcaacatcttctacgtcgacctctactccgtcctcgccgacgtggtccagcgctaccaggctctcgggttcaaggacggcaaggacgcctgctgcggctacgtcggcctggcggtgggcccgctctgcaacatcggcagccgtacctgcccggacccctccaagtacgtgttctgggacagctaccaccccaccgagagggcgtacaagctcatgatggacgacttcctcacaagatacatgagatacatacactagctagctagagctagtcgatccgccatgttaatttgcgctttaattatagcttgttgctagccgctcgctttatattttcttatcatatatacttaggttctttaatttaacgaataagtaagtaatcgaatcgataggcatacaggcgctcgcgcatcatatgaagttctgtatgggttttccccttaatgtactgcttaatttgctcccaataaaattggatggttagggacc

SEQ ID NO: 16658 - DNA, 984 bp, Zea mays
  Clone ID: LIB3066-032-C7_FLI
cacgcctagcttctctttccaaaagcatggcgttcactgccctctcattgctataccacctctcgatcactgtatcgcttgtcctagctcgtggcattatcatagccggtgttgttgacatagctccacgtcccactcctctacctcttcctccgcagccacttcttgcaccctctccgactcctcgtcctccaggtcttggggcccctactcgcactcctcctcttcctcttcctcttccttcccctaggccaccacgcactccgcctacaacgactcctcttccacgtccatggttgggggcaccttctcctgcccgtgttcctcgtcctccacggctcggagcaccccctcgtactcctgttcttccgtctcctcgagtaggtgctccatctcccgcacctcctcctgttcgtcctccacagttgggagctccccttcctacccctgttgctcctactcctcagttggaggatccctctagaggtcctattcttcctcgaccgcctctcaagggtgttccaccttctactcctccacttgtggcaccacggttaggggcacccctcccatcccctcctgttccttcagctcggaagggcactccacctcctccaccacagtttagggtacctattcgatctcctgttattcctcctcctcagaagggcattccaccttccgctcctctaattcccgcaccacgattaggggtacctcttccatctcctcctgttcagcagccccctcggactcctattctaccaccctctcgaaagggtgctccaccatctatccctccactttctccaccaaagttaggagcaccacttccgtctccacttcttcctccgcctcgactaggagctccccctcgcactcctattcttgctcctcctcctcaagttcgtgccgtatttcctagtcctcgtagccctcctccgcgtttgggtgcacctcttccaactcctcttctacctcctc

SEQ ID NO: 16659 - DNA, 244 bp, Zea mays
  Clone ID: LIB3066-032-D1_FLI
cggggatgacgtcgtcgtagacagtcttagtgccgaatggaagcccaacactgcctacaccacttgatagaccttttttatttttttattcaataaaaggatataaggtgtgtgacaacaacacaaatattgtattatctatgtatctcctatgcaatcccaattttatcatggacacattttaaaatgaatacatatttttaatgaataatcgaaatatatgatacatatgtatcaattctag

SEQ ID NO: 16660 - DNA, 1417 bp, Zea mays
  Clone ID: LIB3066-032-D5_FLI
catcgggcgagctctggtgtaggtagaaaatggccgatgccgaggatatccagcccctcgtctgcgacaacggaactggcatggtcaaggctgggttcgccggcgacgacgccccgagggccgtcttccccagcatcgtggggcgcccgcgccacactggtgtcatggtcgggatggggcagaaggacgcctacgtcggtgacgaggcgcagtccaagaggggtatcctgaccctcaagtaccccatcgagcacgggatcgtcagcaactgggacgacatggagaagatctggcatcacaccttctacaacgagctccgcgtggctcccgaggagcaccccgtcctcctcaccgaggcgcccctgaaccccaaggctaacagggagaagatgacccagatcatgttcgagaccttcaacacccccgctatgtacgtcgccatccaggccgtgctctctctgtatgccagtggccgtaccacaggtatcgtgctcgactcgggagatggtgtgagccacaccgtccccatctacgagggatacgccctcccccacgccatccttcgtcttgacctggccggtcgcgacctcaccgactacctgatgaagatcctgactgagcgcggctactccttcaccaccaccgctgagcgggaaatcgtgagggacatgaaggagaagctcgcctacatcgccctggactacgaccaggagatggagaccgccaagaccagctcttccgtggagaagagctacgagctccccgacggacaggtcatcaccatcggcgccgagcgcttccgctgccccgaggtcctcttccagccatccttcatcgggatggaagctgccggcatccacgagaccacctacaactccatcatgaagtgcgacgtggatattaggaaggatctgtacggcaacatcgtcctctccggtggcaccaccatgttccctgggatcgctgacaggatgagcaaggagatcactgccctggctcccagcagcatgaagatcaaggtggtcgctcctccagagaggaagtacagtgtctggatcggaggatccatcctggcatccctcagcaccttccagcagatgtggatcgccaaggccgagtacgacgagtccggcccatccatcgtccacaggaaatgcttctaattctttgggcccgagaaatgcaagccgtgggggagccgttaccgccgccagcctctcctgcccccgttttcgttgccgtttcttcattagcgcgaacaaagttttgtgccggtctatcggccgccgctttcctcccctattcatcaagactgcaataactgtcgctacctatgcttctcacctgtgatttttggacacaatatgttaaggtccattcaattctaatgagacgcctgatgaggctactagcaaac

SEQ ID NO: 16661 - DNA, 710 bp, Zea mays
  Clone ID: LIB3066-032-D8_FLI
atggacaactctttagggcgcttggtgtattcgcacagaggaaaatcaacctcacaaagatcgaaagtcgtccacacaaggagaggcctcttcgagtatctgatgactgttcctcactcttaaagaattttgattacctcttttacgttgaccttgaagcatcaatggctgatccaaagattcagaatgctcttggaaatctgaaggagtttgcaacctttttaagagtcctcggaagctatcctacaaatgtgaatgaaccttagaaaacactgcagattacatgatggattagcaggaatggacgaaatggtttgagttggttctctgagcaggttgacaagtgaggacctctatgaagctgatgctaacatttacagagcaaaaggatctatattagagcagtatagaagggtggatgtgaggcttacattggttgtgagcttgaaagggaatttgttgtttggctggtgaggttcttttgacttctgatgcaacgaggatagctgaaatagcaatcttcttcaatgtcttattatgcgggagcttgaaaatacttcaatttataagtttataggttttcatgttggagcatctttgtcatggtagcatgtaggttgctaaaatagtcagtggaataatgagacaatgtctaagaacacttgtcttttttttaggacagtataataagaactgacgtttccctgtcc

SEQ ID NO: 16662 - DNA, 1577 bp, Zea mays
  Clone ID: LIB3066-032-E12_FLI
catcgccaagcagagctaccagctgcgcatctggctcagcgccgtgatcgcgaacatggagacgtgcgtcgacgggttccccgatgacgagttcaaggccaaggtgaaggagtcgttcaacgatgggaaggagctcaccagcaacgccctggcgctcatcgagaaggggtcatcgctcctctccgtgctaaagggcggctcgaaacgacggttgctcgaggaggagggagaaccggcgcaagccgggcctgcactcgacaaggacggcatcccggagtgggtgcccgacagtgagcggagggtgctcaagggcggcggcttcaagagcacactcacgccaaatgtggtggtggcgaaggacggcagcggcaagttcaagaccatcaacgaggcgctcgccgccatgccaaagacctacgacggaagatacgtgatccaagtgaaggagggagtgtacgaggagtacgtgaccatcaccaagactatgaagaacgtgaccttcttaggtgacggctccaagaagtccatcgtcaccggcaagaagagcttcgccgacgggatcacgactttcaagactgcaaccttcactgcgcaaggcgacggattcatggcgatcgggatggggttccaaaacacggccggcgcggagaagcaccaggcggttgcgctgctggtgcagtcggacaagtccatcttcctcaactgcaagatggacgggttccaggacacgctgtacgcgcactccaaggcgcagttctaccgcaactgcatcatctccggcaccgtggacttcatcttcggcgacgcggcggcggtgttccagaactgcatcctggtgctgcgccgcccgatggacaaccagcagaacatcgcgaccgcgcagggccgcgcggacgcgcgcgaggccacggggttcgtgctccagaagtgcgagttccaggccgaggccgcgctccgggactccgggcgcccgcccatccgcaactacctgggccggccgtggcgcgagtgctcgcgcaccatcgtcatggagtcggagctcccggacttcatcgacaaggcggggtacttgccctggaacggcgactttgggctcaagacgttgtggtacgccgagttcggcaacacagggcccggcgccaacacggcggggcgcgtcagctggccggggttcaagaaggtgatcagcaaggcggacgccaccaagttcacggtcgagaacttcctgcacgcccagccatggatcgatcccacaggcacgccggtgaagtacgacctgttcacatgaggacacagctggaccggggatcggatcggagggttcggttcacggtggccggtgggggatcggaggccagcgcggcagcatgcatgcccttggttcgttgaatcgttgggtgtcggaggcaagggggaggaccgaaaccgatcactgcgtacacgagtggaaaatgctactgctgttcagtttaagttcgcgttgtatgtatagtggctgctacttatgtgagttttgtacctgtacatgaagtctcttttcttttatatacatggctaatggggtgttgactaagttt

SEQ ID NO: 16663 - DNA, 341 bp, Zea mays
  Clone ID: LIB3066-032-G3_FLI
cggtggcggagatgtacctgctgggcatgaccgacaagatcgtcaccagcggctggtcgacgttcggctacgtcgggcacggcctcggcgggctcacgccgtggatcatgttcaggcctgagaaccacaccacgccttacccgccgtgccgccgggccaagtccatggagccgtgcatgcacgggccgccgttctacgactgcagggccaagcacggcgccgacacggggaagctggtgccgcacgtccagcactgcgaagacatgagctgggggctcaaacttgtccatcccgagtgaaacagcaataataatgaaaagaatatcttttttaatggttcg

SEQ ID NO: 16664 - DNA, 1716 bp, Zea mays
  Clone ID: LIB3066-032-G9_FLI
cagcttctcggcttatggtgccagagccagaccgacgtgcctagtagcgtactatcttagcttcaagagaccgacccaggcaagatccattgatcgatggagctgcttcctctgctcacgtggctcctccttgcgcacgccctggcctgcctggcctggacggccgccgcgcggcgccggcagtctcggtgctacctcctggactacgtctgccacaagcccagcgacgaccgcaagctgtccacggagacggccggcaacgtgatccagcgcaacgcgcggctggggctcaccgactaccgcttcctcctccgcgtcatcgtccgctccggcatcggcgaggagacctacgccccgcgcaacatcctggagggccgcgaggactcgcccaccctgcaggacgcggtggacgagatggacgccttcttcgacgaggccatcgccgagctcttcgcccggaccggcctcgcgccccgcgacgtggacgtgctcgtcttcaacgtctccatgctctccccggcgccgtcgctgtcgtccaggatcgtgcgccgctacggcctgcgcgaggacgtggcggcgtacaacctcacgggcatggggtgcagcgcggggctgatcgcgctggacctggcccggaacgcgctccggacgcgtccccgtgcgctggcgctggtggtgtcgtccgagtccatcgcgcccaactggtactccggcaccgacaagactatgatgctggccaactgcctgttccgcagcggcggctccgcggtgctggtgaccaacgacccggcgcggcgcgggcaggccaagatggagctcagctgcctggtgcgcgccaacatcggcgccagcgacgacgcgcacgcgtgcgcgctgcagcgcgaggacggcgagggccgcgtcgggatcagcctgagcaaagcgctccccaaggccgccgtgcgcgccttcgccgtcaacctgcgccgcctcgcgccgcgcgtgctccccgtgggcgagctcgcgcggttcgccacgcgtctcctcgcccggaggctcttcacgtccccgcacctgcgtcagcagcacctatcgggcggcaagcagaagggcgacgcggcggcggccccaaagatcaacttcaaggccggggtggaccacttctgcctccaccccggcggcacggccgtcatcgaggcggtgaagaagagcctggacctggaggacgaggacgtggagccggcgcggatgacgctgcaccggtgggggaacacgtcggcgagcagcctgtggtacgtgctgtcgtacatggaggccaaagggcgactcaaggtcggggacagggtgctcatggtcacgttcgggtcggggttcaagtgcaacagctgcgtgtgggaggtgaccggcgacatggccgacaagggggcgtgggccgactgcatcgacgcctacccaccggagaagctcgccaacccgtacttggacaagttcggttggatcaacgatgtcgacggcgataccctgatgctctaacggtacggtatacgatcgaggaccgctctccaccggcggaaatgacgacaacggcggaagcagtaaaaagcaggctagctgttgttcagaacgacaggccggtgatgctagcttgcagcctgcgtaggtgtatttatgcccttggttttactgggcctgtcgttctgaacaatatagccctatttatttaccacccaattatat

SEQ ID NO: 16665 - DNA, 525 bp, Zea mays
  Clone ID: LIB3066-032-H12_FLI
gcaccttcatcctcgtctacaccgtcttctccgccaccgacgccaagaggaacgccagggactcccatgtgccgatcctcgcccctcttccaatcgggtttgccgtgttcctcgtccacctggccaccatccctatcaccggcaccggcatcaaccccgcgcggagccttggcgccgccgtgatttacaaccagcaccatgcctgggctgaccactggatcttctgggtcggccccttcatcggcgctgcgctggctgccatctaccaccaggtgatcatcagggcaatcccgttcaagagtaggtcttaagggagccgatgctgctgcttcgagatgatgccggtcttaaaaggatggattcgtggctgtttcaaatgatcccctactatgttacgtgcagttccattccattccattcctctttcaaagttcggagctgcttttatccgaacccagacttgtaattcatctgtaccaattgtgtaatatgccgcgcctctgttatgtgcaattgaaaattatg

SEQ ID NO: 16666 - DNA, 398 bp, Zea mays
  Clone ID: LIB3066-033-A3_FLI
ggtgaacggtaagctaagcgaggagcctgggttggtgaacgcaagcccgtacgagaaggggtggattatcaaggtcaagctcagcgattcaggcgagctcagttcgctcatggatggtgacaagtactcgaaattctgcgaggaagaagacggtcattgaagaaatcagagggtcttctgaacaccaaggacctgtgtctcaagctctatcagtgctttctggtctggagacctgctgtgacaaatttaaattggcaaggttcattgcatggaataaattagttaggatttgccctattccaccagggcttgggaaatccgagcttgtgttgtgagtggcgtggtcaagtttgattatctctttttagttgtaatctcgtgatttccttctttttttt

SEQ ID NO: 16667 - DNA, 551 bp, Zea mays
  Clone ID: LIB3066-033-F12_FLI
tgatttgaaataattgggaataaatagttcgtgaatccctgaagcgtgcatatatatattcctgccaagataaaggtaatggagtcgtcacgcaggttccagccggccgtcatcctgcttctcctgctcattgtgtccaccgatatggcacaggcaagggaatgcgagaagtacagtgagcgatttgttggggcatgcatgatcgcagacaactgcgccaatgtgtgccgcggtgagggcttcttggccggcaggtgcagcaccttccgccgccgctgcatctgcactaggcagtgctaaacaagatcgctcgatcgctcgccatgcatcgacaacctattcttaataacgttcattatctcgttcttatttatgacgaatgtcatgtatgttctggtgactgtcatgtatattctgatgactgtcatgtatcttgttcatgtatgctcaaggttcattatcttgttcatgtattaagtatgttatgaataactcaatatttattattttgttcatgtatgaattatcttctaatgagctcaaggttcatt

SEQ ID NO: 16668 - DNA, 920 bp, Zea mays
  Clone ID: LIB3066-033-H3_FLI
aacgaaatccagcagaccgacgcgaaccgagaaaaatcccacgaaatctcgtggccgcggcgaccggaagaagaggacgacgacggacggagcggcgatggcgtgccgcgcacttgccctccgctccctgctcctccccgacccgctacaccgcctcccggccgcggcgccacctgtttggagagcgtcccgcggtggccgccgtccgcacctccgctgctgctccggcggcgggggcggggagcccgggcagccgccgcaagaagctgtgctcgaggccatatccaagatagcaaggtctaaaggaagggttgcactcacaacaaatatggtcatgggtggtactgtgactgacgatgcaagtgatgaatggcttgttctggatcagaaggtaaattcctaccccacagatagaggatttacagcaattggcactggaggtgatgattttgtccagtcaatggtagttgctgttgaatctgttcttcaagaatcaattcccaagggccgggtatctcagaaattatcttcaagagggaaatatgtttctgtaaacattgggccaattcgtgttgtttctagtgagcaggtccaagctgtgtatcgtgccatgagaagagataacaggatgaaatacttcttatgaagtgcaatttcatgtcctggatgttccctagtccattccatgttgtatcctacgatgcattttcgccatatttgctggacctccggtgaattccaatgacttttatgtgccattcaagcccaaattgaagcttctctactacaaaacaatatgttgggtccagctacgttatttagtgcagggggcgtatatagctactatgtattccctttcttctataatgaataagattcaaaggttcacagtttgtcctaaaataaataatattttacac

SEQ ID NO: 16669 - DNA, 818 bp, Zea mays
  Clone ID: LIB3066-034-B10_FLI
aaaaaaatcttaaaatttttttaatggatagtttacataggtattattgtaagctgtcgcaacgcaaagttataattgcatattagttattgccatcgacactttttttccgtcacttcgcgccctctaaaattgactttgttattaggaattgctttaaagacaagcttatcctccctaagtcgtccctcgataaacataaacataaactgtacagtctatataaacccgtcaccctcctcatagacccagccgcgtcgcgccgcacaagaggtgagggcacgcgcacggcgcataagagctgggggttgccaagtgttcatccacaaccacaaacatcacgaatggatgctcccgcggcggccgagggctgcggcaagcacattgtgctcgtccacggcgcgtgcctgggcggctggtcctagtacaaggtggccaccctactccgcgcggcggggtaccgcgtcgacgcgccggacatggcggcatcgggcgccgacccgcgggcgctgcgggaggtgcccacgttccaggactacaccaggccgctgctggacctcctcgcgtcgctgccggacggggaccgcgtcgtgctcgtcggccacagcctcgacggcgtgaacgtcgcgctggccgccgagacgttcccggacaaggtctccgccgtggtgttcctctgcgccttcatgccggactgcacggcgcggccgtcgcacgtgctggaaaaggtgaggccatcacgcagcagtcggccagctgctcatgctctcctctagatttgagaggtcccgctcatggtgtgtgactgtacatgtgtc

SEQ ID NO: 16670 - DNA, 1441 bp, Zea mays
  Clone ID: LIB3066-034-B3_FLI
atggttcaaggcaagttcaggcacctgccggtggtggataacggcgaggtggtggccatgctggacatcgccaagtgcctctacgacgccatctcccggatggagagggcgtccgagaaggggaaggcggcgatcgccaacgtcgcggctggcgacgacaagtactccatcgtcgaagctctcaaggagcaaatgttcaggccctgcttgtctgccattattggcgaagactcaacagtcgtcatggtgtcgcctggtgattccgtccttgcagctaccaagaggatggtggaagcgcatgcgacctcagccgtagtggccgtggggagcaagccgcaaggcatcctgacttcaagggatatcttgatgcgcctggtcgctaagaacctgtcagcggacgcgactccggtagagaaggtcatgacccctgaccctgaatttgccacggtcgacatgcctatactggacgccctacggaccatgcaggagcgcaagttcttgcatcttccagtgatggacagagacggctcaatcatttcaatcatcgacgtcattgacatcgcacatgccgcgatctccattgtggagagcagtggcggcggcggcgacggcagcgcggggagcgacgaggcggcatcgtccatgttccagaggttctgggactccgccatggccttgggccccctggacgacgagacggacacccagtcccagatgagcgaggcgtcgaggtcgcagatgatgatgtccgatgtccaccaccaccaccaccaccacgactccgcgggcggcggcagcgaggcggggttctcgctgtcgtccttctccttcaagctccaggacaggcgagggcggatgcaccgcttcagctgtgaggttcagagcttgacgcctctggtgacctgcatcctgcggaggctcggcgccgacatcgaccctgaccgcctaccgcaaatcctgtacgaagacgaggaccgggacaaggtggtgctcgcgtcggacgacgacctcgcggcggcggtggaacacgccaggctcgccggatggaagggtctgaagctgttcctggactactccggcaccaccgggcgcaggaaagcggtggccaccccacgtggcgccatggcggtgggcatgtccagccgggacgcgtgggcggcggcgtacagcggggtcgccgccggggctgccctcgtcactggcatcggcgtcatggcgtacctgcgaagatctgcctagctagtgtggtggcgcggcggcgcggcgcgcatattcgccaatgcaagagcaaggggttcctgtcctgccttcgaatcaccacagaggtgctagtatgtgtggattacgtacccaaccggtgtatgtgtgtattcttttctacacgaacatgtaccagggcacaagttttccattaagaagaaatgggtggaccaaacaaatc

SEQ ID NO: 16671 - DNA, 362 bp, Zea mays
  Clone ID: LIB3066-034-E1_FLI
caattactatgtacgagatacaatgagtggaacatgaaaagcacgttctccgtgggaatttggatatggttgaacttccacggacaacgatttccttggaatcgccaccggcaagacgaatccacagattgcattcatccgaggggcgattaaaatcaaggggagcatcagtgcggcgcagaagttcacccctgacatcttccccaagcctgccaagctgtagaaggttagattgtattacttggtcgaggtgaataataatgtttgcaagcttcaattactatgtacgagatacaatgagtggaacatgaaaagcacgttctccgtgggaatttggatatggttgaacttccccgtaaatc

SEQ ID NO: 16672 - DNA, 1838 bp, Zea mays
  Clone ID: LIB3066-034-F12_FLI
tcctcctctccgtcgtcctcctcgctgcccccgccgccggcgccggcactggttcggagttcgacgacggcacctcgcccaagttccccggatgcgacaacacgctgcagaaggtgaaagtgacgtactgggtggacggcgacgagcggagcagccttacggggatcagcgcgaggttcggcgcggtcctgccggacgcggcgcccgacgacgagaagcagcgggccgccgtgcccagccccgagagcggctgcgccaagtcgtcgacgccgctcgcgggctccgtcgccgtggctgtgcgcggggagtgcacgttcatcgagaaggccaaggcggccgaggccggcggcgccgtggcgttgctcctcgtcaacgacgaggacgacctgcagaggatggtctgctccgacaaggactcgccgcccaacatcggcatccccgtcgtcatggtgtccaagtccgccggcgacaaggtgcagtcggccatcggggacgggtccaaggtcgacattctcatgtacgcgccgctgaagccgtccttcgatggcgccatacctttcctctggatgatggccgtcggcacggtggcctgcgcttccgtgtggactgtcgtcgtcgtcggagaagagcctaccaagcagggcgacgtctccctgggtggggaggagaaccccgacgccgaggtcgtggagctgcaagccaatacggcgctcgtgttcatcgtcacgtcctcgctcgtccttctcttcctcttcttcttcaactccaactggtccgcctggctcctggtttgcctcttctgcctcgggagtctccagggtatggaattcgtggtatcttctctcgttgtcagactatgccagcggtgtcgcgaggccaaagtgaagcttcctgctctaggaaacgtgaaggtggtcacgctagtggtcctgccgctggccttcatcttcgccgtcacctgggctgcacaccaggactcgccggttgcttgggttggtcagaacctcatgggcatctgcatgatgattctagtactgcaagtggtgcacatgccaaatataaaagttgcgtcggcgctccttgtctcggcctttttctacgacattttctgggtcttcatatcacccctcatattcaagaaaagcgtcatgatcacagttgctcgtggcagcgatgacgggccgagcctccccatggtactgaagatgccgaaggagttcgattcgtggaatgggtacgacatgattgggttcggggacattctcttccccggactgcttgttgctttcagtttcagatatgacagaacacacggcaaggacttgacagatggatacttcctctgcttaatgattggttatgccttcggattgtcatgcacatacgttggcttgtacctgatgaacagcgggcagccagctctgctctaccttgttccttcaacactaggagttatcgtcctgcttggagcgaggaggggggagctcggtcagctctggaacgccaaggtgtagcctgcctgggaggcccgtgcatatagctgatacgatgacactggttgcaggcttcaaatgggctttggtttagctagacatgcatctgatggttttttggtgaaattatgccaagcatcagcatgatccatggttaggaaatttctttgttattagagtacacaacacacaccacacatacgaaggctggttggtttgttactagcctgctgctgtagggcacactgcacgtcaaaatccctagcgtgatgcaaatttcagcaaaatttatagacagatatgcatcaataatacctactatatcaaagtagtttttattgagcc

SEQ ID NO: 16673 - DNA, 494 bp, Zea mays
  Clone ID: LIB3066-034-F8_FLI
gatcgaagctcagcttgatgacgaatccatcttccctcagaaactcggaaccccttttccacaaaatttcaaggaagttgtgaagacaatctttaagcgacttttccgtgtttatgctcatatttaccactcacattttcaaaagattgtcagccttaaggaggaagcacatcttaacacttgcttcaagcattttacattgttcacttgggaattcacgttgattgacaaggctgagcttgcaccacttattgatctaattgaatccattgtttcagtttgttgacatgacatcaatgattatttggatcattttcttatttttggagagcaaggagttacaactaagtgtccagtatgagggtgagactaagaatggtcaaaagtttttttttgttatcttttaggtgtctgtctctacaatgggacttgtgcatgtttgtcttatgaagtcctgaagaaactatttagggctcaatgagataatgttgtgt

SEQ ID NO: 16674 - DNA, 687 bp, Zea mays
  Clone ID: LIB3066-034-G2_FLI
gaaggacgtcacggacatcaacgtcaaggattgcactcttaagaagacgatgttcggcgtccgcatcaaggcgtacgaggacgccgcctccgtgctcaccgtctccaagatccactacgagaatatcaagatggaggactcagccaaccccatcttcatcgacatgaagtactgccccaacaagttgtgtactgccaacggcgcctccaaggtcaccgtcaaggatgtcaccttcaagaacatcaccggcacctcctccaccccggaggccgttagcctgctctgcactgccaaggtcccatgcaccggcgtcaccatggatgacgtcaacgtcgagtatagcggcaccaacaacaagaccatggctatatgcacgaacgccaagggcagcaccaagggttgcctcaaggagcttgcatgcttctagaccctccatcgactgacccatctctctagttataatttttctctcgtccttgcattgcccattagatgctatccattggtaacgcacaacagtaaaacgacagacatccgacagctatattatgttcgacggtgtaacaccctgaatttgagggtataaaatttcttctccaaataccaaccaaattcaggggttacctcttgtctctctctctcttttccttttgattaaaagtaagtgaattaggcgagggtttaatt

SEQ ID NO: 16675 - DNA, 949 bp, Zea mays
  Clone ID: LIB3066-035-A7_FLI
tttcttcctggcggcggcgcccaaggccatgacggtgcggcctctcgtcggtgcgcttcggccaggcgtggcgtgtgggcgtcctctcctggcggacagggctcgaacccaaactccggctcaccgacgggcggcccggccaagcgggcgcggctcctgccccgacctcggcccgacgcgcgcgggtgcgggtcctccggcagcggccaggcggtcggcctcgaccccggtggtgcgcggtgcaggccccggcgcgcggccccccggtggcagcgcgggcagacggcccaagcgcgcggacgcgcggtctcccggcggtggcgcgggcagacccggcgctcgggggcgcgggcgtgcggccccccgtggcggcgcgggctaggcagggcgtgggcgcagccccacggcgggaccgcggcatggcagcgcgcgacacgcgggcactcggcctccagcgcgtgaccgcggcccggcggacgggcgggcccctcggcgcggcaccggatgggcgcacggccgcccccgcttgacgcgtctcccgggagcaccggtcacggacgaccacggcggatcgggcgtgcggctcctctagcacggtccgacggatgcggacctcggttagtgcgggtgcgcgtcggcccagcggtgcgagcacgcagccacgacggcgtgggcgtgccgctcctccgtcttaagggcgcggccaccagcgcggcacgggctcaggcgtggagcgcggccccggctaggcacaaactcgccgcgggtagcccctgcgcacctgcgcaggcctgtaatgaccctggcgggcacgacgtggcgtccctgcctcgcaagcgtgcagcgccaggccccggtggccatgatccggcatggaacacggccggtggccctgatgagccatggccgtgaacggcgaagcaaccatcaagaataagaacgattaaac

SEQ ID NO: 16676 - DNA, 781 bp, Zea mays
  Clone ID: LIB3066-035-B11_FLI
ccgagcgatctcctctccctctccctctccgatccattctccagcgcagcgaagtaaacatgtctgaccgggcaaagatgtcgtggcaggcgtacgtggacgagcacctgatgtgcgagatcgagggccaccacctcgcggcggcggccatcgtcggccacgacggtgccgcctgggcgcagagcacggcgttccccgagttcaagaccgaggacatggccaacatcatgaaggacttcgacgagccagggcacctcgcgccgacaggcctgttcctcggacctaccaagtacatggtcatccaaggcgagcctggtgccgtcatccgtggcaagaagggatcaggaggcatcaccgtgaagaagacagggcaggcactcgtcgttggcatctacgacgagccgatgacgcctgggcagtgcaacatggtggtggaaaggctgggcgactacctgcttgaacagggcatgtaactactacgtaccagctggaatgcatgtcgacgacgatggtttcgagtttcgacttccaataatagtaacaacaaagcaaaggccttcctcccggcgtatttgctttggctcttctcctccacgccataagatatctagcaattggtcactcgccttaattagttcgctttgcttttgaggttgattcgaccattttgctgtagcgtgaattgcatgcatggacatgcaacgctccaatggcctttggaatgtggaatttttttccccattttctgtatttttcctataaaaaatgaactggttcttat

SEQ ID NO: 16677 - DNA, 692 bp, Zea mays
  Clone ID: LIB3066-035-F11_FLI
ccgactacctcatgaagatcctgactgaacgcggctactccttcaccaccactgctgagcgggaaattgtcagggacatgaaggagaagctcgcctacattgccctggactacgaccaggagatggagactgccaagaccagctcttctgttgagaagagctacgagctgcctgacggacaggtcatcaccattggtgctgagcgcttccgctgccctgaggtcctcttccagccatccttcattgggatggaagctgctggtatccacgagaccacctacaactccatcatgaagtgcgacgtggatattaggaaggatctgtatggcaacatcgtcctctccggtggtaccactatgttccctggcattgctgacaggatgagcaaggaaatcaccgccctggctcctagcagcatgaagatcaaggtggttgctcctccagaaaggaagtacagtgtctggattggaggatccatcctggcatcgctcagcaccttccagcagatgtggattgccaaggctgagtacgacgagtctggcccgtccatcgtgcacaggaaatgcttctaattctttgggcccaagagatgcaaagccgagaggagccattatcgccagcctcccgccccgtttctttctccttttgttgctgtttcttcattagcatgaacaaagttttctgccggtcta

SEQ ID NO: 16678 - DNA, 1544 bp, Zea mays
  Clone ID: LIB3066-035-F12_FLI
aggaagaactcgtggcaggacggcatgccgggcaccatgtgcccgatccagcccaacaccaacttcacgtaccactggcagcccaaggaccagatcggcagcttcttctactaccccagcaccggcatgcagcgggcggcgggcgcctacgggctgatcagcgtccacagccgtgacctgatcccggtccccttcgacacgccggccgacgacttcccggtgctcgtgggcgactggtacaccaaggaccacgccgtgctggccaagaacctggacgccggcaaggggatcgggcggccggcggggctggtgatcaacggcaagaacgagaaggacgcgtcgaacccgcccatgtacaacgtggaggccggcaagacgtaccggttccgcgtgtgcaacgtgggcatcaaggcgtccttcaacatccgcatccaggaccacatcatgaagctggtggagatggaggggtcccacaccatgcagaacgactacgactcgctggacctccacatcgggcagtgcctgtcgttcctggtgaccgcggaccagaagcccggcgactacctgctggtggcgtccacccggttcatcaaggagaagagcagcaccacggccgtgatccgctacaagggctccagcgccccgccgccggccaagctgccggagggccccagcgggtgggcgtggtccatcaaccagtgcaggtccttccgctggaacctgacggccagcgcggcgcggcccaacccgcaggggtcgtaccactacggccagatcaacatcacccgcaccatcaagctcgccatgggccgcggcaaggtcgacggcaaggagaggttcgccttcaacggcgtgtcgcacgtggacccggaaacccccgtcaagctcgccgagtacttcaacgccagcgacggcgtgttcaagtacaacctcatcggggacgtgccgccctccaacacggcccccaccaagatggcacccaacgtcatcagcgccgagttccgcacgttcatcgaggtggtcttcgagaaccccgagaagagcatcgacaccatccacatcgacggctacgccttcttcgccgtcggcatggggcccggcaaatggacggcagcgtcgcggagtacgtacaacctcctggacacggtgagccggcacacgatccaggtgtacccaaggtcgtggacggcggtgatgatgacgttcgacaacgcgggcatgtggagcgtccgctccaacatctgggagaggcagtacctcggcgagcagctgtacgtgagcgtcatctcgccggagcggtcgctcagggacgagtacaacatgccggagaccagcctccgctgcggcaaggtcgtcggcctgccgatgccaccgtcctaccgcgccgtctagagcgtcgaccgatcgcgcacggtgctgtacacaactaaaggagagcgagaggggactttttctcgcgtttccttctctagccagccttgtctgtcccctcctcgtttattctctctctctcttttttcgttcgcttccgaggaataataccc

SEQ ID NO: 16679 - DNA, 1937 bp, Zea mays
  Clone ID: LIB3066-035-G3_FLI
gggtcctcacctcctcccgctccagctccagctcgtctctctcctcgcctcgcgtagggtttcgcttcccgtctcgccgccgtcagcatgggggacaactacgatgacgaaggcgagccgatcgtgaacctcgacgaacgggaaccctcccctgagcatcagccgtacgaagacctcgatgacgacctcgacggcggcggcgattggacccgcgaccgctctccgacccccgtccacggcgacgacggcggggcagggtcctcctccaagccccgaaagcgccttctcaagaagggcggcggtggaggcatgcccggcgatgacgggctggatgactttgggttggaggacgaggacgcggacccttcggctgaggcgaggaagaggaagggctcgtcgtcgctgagggacctcgcgaggggcggggcgggcagggagaagaaggctaagaaaatgcggatggaggacgacgggagggggagggacactgggatggtgagggataggcggggatcaggaggaagggactcaggcggtagggatgaccaggatgatggggagagggagatccaggagctctgggataccattgctggtggtgagtcagaggatgaccaagaaggtgttagaaccgtagatgatgataatttcattgatgacactggagttgatccagctgatcgttatggcagcgataatgagcgacattcacctggacgttatgcacaggctgaggagggtgaggaggacgatgaaatcgaacaactcttcaagggtggtaagaagaagaagaagaagaatgatcgccctcgtgcagatattggccttatagtggaacaattcattgctgagtttgaagtagcagccgaagaagatgcaaacttgaataggcaatcaaaaccagccattaacaaacttatgaagcttcctctgctcatagatgttctctccaagaagaatcttcagcaggaatttcttgaccacggagttctcactcttctaaaaaattggcttgagccattacctgatggaagcatgccaaacatgaatattcgatctgctgtactgaaattattaactgattttccaattgacttggaacagtatgaccgaagagagcagcttaagaaaagtggtctgggaaaggtcattatgtttttgtccaaatctgacgaggagactactgcaaataggaaattggctaaggagctggttgataaatggagtcgaccaatattcaacaagagcacgagatttgaggacatgaagagatatgatgatgaaagagcaccttacaggcggccacaaatgaagaaaccttcatcgagtagctctggaatggaatccagagatgatgatcttgatgctgacttttcacaacgcaagtctgggcaaagtagttcaaggcagcacgcttctaggccggaagcctcgcctttggactttgtcattcgtccacagtccaaaattgaccctgagcagatacgggctcgtgctaagcaggctgtccaagaccagcgtcggctgaagatgaacaagaaattgcagcagctgaaagcgcccaagaagaaaaaccttcaggcgtcgaagctcagcgtggaaggccgtggcatgatcaagtacctgtagatcacccgctatggcatccgcagtcagcagtgcccagcacattatacaggacctgcatgggcccagggattgctggattactaagaagcatcctatcaccattccatggcaaacagcccggcatcaataattccttggatcttttttccaaatatttttcttgcctggtagggtgcagcatctgcgcttcagaaaccggttgatttgagcactatctatgagcatgtataaatatggtgcttttcaagcagagtggtgcctttatattgtataaaatatttgtcatgcttatgagttacagttaactc

SEQ ID NO: 16680 - DNA, 791 bp, Zea mays
  Clone ID: LIB3066-035-H5_FLI
cgaaagaagtcgcctaattctttcgatcgaattaggcgccttcttcgtcccacgctccgtctttatttgtaatctgaagcttacaggaacatttgagtggatcatggacggattggtaggcctcttgaaagtccgggtggtgaggggcatcaaccttgcctaccgcgacgcaagaggcagcgatccgtatgtcgtcctacgacttggcaagaagaaacttaagacgagcgtgaagaagagatctgtgaaccccatctggcacgaggagctaactctgaccgtcacagatcccagcctagctctgaagctggaggtgttcgacaaggacacgttcagcagggacgacccgatgggggacgcggagatcgacgtggcgccgctggtggaggcggcgaacgcgagcccggaggcgagcctgaggaacggcgccatcatcctgtcggtgcggccgagcgccacgaactgcctcgccgacgagagccacgtgtgctggaggaacggcaagttcgcgcaggacatgatcctccgcctcaggaacgtggagagcggggagattcagctgcagctgcagtgggtcagcatccctcctgctgcagccagcaggtgaaggaaggaagaacaggcgacacgaagcaatcgcattttcacctcttgtgaatgtcggattgtaaacttaatggtgtctgggtcagtcagggtagttcatgtgttgcctattaatgtacagttggggacagcatgaaatccaagccaagtcactcaagtgttgtaggatccttcctgttcctgtt

SEQ ID NO: 16681 - DNA, 604 bp, Zea mays
  Clone ID: LIB3066-036-B6_FLI
agccagccagccagccgggtcctcccgcgtagctagcgtaggcgtaggcgtagccgtagcagcgtgtgcgagaggggaagaaatgctggaggggagggcgcgggtggaggacacggacatgccggcgcggatgcaggacgcggcgacctccgcggcctcgcgcgcgctcgacctcttcgacgtcgccgactgccgcgccatcgccggccacatcaagacggagttcgacaagcggtacggcgtcgggtggcagtgcgtggtgggcgccaacttcgggtgcttcttcacccacagcagcggcaccttcatctacttctccatggagcgcctctccttcctcctcttcaaggccgccgtcgtcgcagccgtcgccgccgccgccgccgtcgcctcctaatcaaccaagtctccgtccatcacaccgtgcactttgtactgctagctagtatctatatatatatatatatatatatatatatatatatatatatatatatatatatatatatgccatttgtaatgtccagaagctcagaccctgtacggccagcagcccgtgtagtagtgtaaatacatcgcgccatgcttcgctcgttcctcgtcg

SEQ ID NO: 16682 - DNA, 1417 bp, Zea mays
  Clone ID: LIB3066-036-E1_FLI
gtgtaaatgatgcaccagctttgaagaaggctgatattggtattgcagtagcagattctactgacgcagctcgtagtgcttctgacattgtcctaactgaacctggccttagtgtgattattagtgctgtgctgacgagtcgggcaattttccaaaggatgaagaattacacgatctatgctgtatcgattaccatccgtattgtgcttggttttatgcttcttgcgctgatatggaagtttgacttcccaccatttatggtcctgatcattgccatcctcaatgacggtaccattatgactatctcgaaggacagagtaaaaccatctccacaaccagacagttggaagttagctgagatttttgcaactggagtagttcttggtggttatttggccatgatgactgtcattttcttctgggctgcatacaagactgacttcttcccgcggctgttccacgtcgaaagcctcgagaagaccgcccaggatgactttcagaagctcgcctctgccgtgtaccttcaagtcagcacgatcagtcaggcccttatcttcgtgacgcggtcgcgcagctggtcgtttgtggagcgtcctgggttcttgctggtctttgctttcttggtggctcagctgatcgccactctgatcgctgtatatgccaactgggcgttcgctgcgatcaagggcattggatggggctgggccggtgtcatctggctctacaacatcgtcttctacttcccgctggacatcatcaagttcctcatccgctatgctctgagtgggagggcatggaacctcgtccttgagcagaggatcgcgttcacgagcaagaagaatttcggcacggaagaaagggagcgcaagtgggcgcatgcccagaggactcttcacgggctccagccgccagaggcatccatcttcgagaacaagacgacattcaatgagctgaaccagctcgcggaagaggcccgcaggagagccgagatggcgaggttgcgagaagtgagcaccctgaaggggaggatggagtcagtggtgaagcagaagggtctggacatcgagaccatccagcagtcctacaccgtgtgactggctgaccgacgacgacggggtttatagaggtttcttcttcttatactatacaatctgtactaggtagcaataaggatcaaggaaggaacccctatatattggctgtggttcgcgggaaatgaatgatggtcatatttatgatgtcggtgtggtgcttctgtcgccaactctcgaccatactaccctcaactcaccccttgtatgctgtggcattaaccacccccggcaccaccggcaggcattgatattgagagatgaggtatagtagtctgtagcctctagtagatgatgatgaattgatgatatagtacatttttgct

SEQ ID NO: 16683 - DNA, 863 bp, Zea mays
  Clone ID: LIB3066-036-F6_FLI
ttggcctctccccgcgccaccaccgttccgttgcgcccgctaacgatcacgcgtttccggtgggagagagagtaggtagggagaggacgggacaggatgctcgggttcaggcagatgtcgtggtcgtcggcggaggcgcaggcgccgtcggagcagctgtgcgaaggggtggcggccgtcgtggcggcgcgccaggggatggagacgccgctgacggcggtggccgaggcgttcgaggagctggtgcgcgggatggacgccgacggcggcgagctccgcgtcgcgcccttcagcgacacctgtgccctcgtctccgtgctcttcagcagcctcgggatggccttcaggttcgccgagatggagtacgtcaccaaggtgaacgatctcatcggtgccggcaagtcgtaccgcacgctgagcgacatcctcgacaaggacatccagaacgactgcgtgaagaagcagggaagccactcccggaacctgcgcagggtccgtctcggcctcggcctcatcaaggccctcttcgagcaattcctcgccaccgagggttcattgtatgatgctgctacgacagcttacgggcaggtgtgcgcgccgtttcatagctgggcgatcaggaaggctgttggcgctggcatgtacacccttccaaccagggagcagttggtagtgcggctgaacgaaactgatctctcggtgcagaagcagatgaggagatacattgacgcttctagtcctatcatagagtacatcgataaccttttcctctcgaggaacattagtctagattggtgaactagtctttctgaactgtactgaaagtcaagtttgtaacttgttcacaagctgttgttggtacc

SEQ ID NO: 16684 - DNA, 1136 bp, Zea mays
  Clone ID: LIB3066-036-H1_FLI
agctggcggacggaacgacgacgatggcgaggagcggcggcgggatggaaggcaacaagtgggcgcgcatctccaagcacctctcaggaaggacggacaacgagatcaagaactactggaacacgcgcttcaagcgccggcagcgcgcgggcctgccgccctacccgccggacgtcgagcggcagatcaagctgctgcgcgcgcagaacgtcaacccgttcgcagacgcagacgccgacgccgcccacgccaacgccagcgccggccttccggcgccgccgctcctctacgacgtcggaaacccgttcgcgttgctctccagcataccgtcactgtcgcagacggcctcgcactcgcactcgccactgatcaaccagaactacccgcttctgaaccagatgcaggtgttccaccacctcggcggcagtcagcagccgtcgttccaccaggacggcagcgcggcggctttcggtgacatcgtctcctctcgcctgccgccactgccaaccgccagaacgcaggcggagctacattcgaaccaattcgacacctccatcagcggcgggctggtggatcagtcgatgctgatcggcgacgaacacctgctgcggcctaacccgagtatggtcaaggtctcctccatgcccgcgctctcctaccgtgagccggatgggtccaggatgctgccagcccatggcgccgggagcgacggcgacgtctcctcgctggggcaatgccctccgggacaggacctccaccgtggtgcgacatgggacttcaccttcgcggccgtgaagccggcgaagaggaggacggcgagcgaggtggggttctccgacatgttcgccgtcgcaccgccgggggattggttcggcggcgggtcgacggcgccatcgccggggccgtcatcggccgtcaccgacgaagagtttaacctggagatgcagcagttcatgtcaatgctaccactgtctgacgagcacggctggaacgcataatgcggccgggtaaaatggaaatcgaaaactgtgtagagcgtgtgtctccttgcttctgcgacgagaatggtgtgcgcattgtttttgtaatgtgcccactcttggatctttatctgttctagacgtcgattgagtttc

SEQ ID NO: 16685 - DNA, 1876 bp, Zea mays
  Clone ID: LIB3066-037-C6_FLI
caagatggcaaatgctctcctaggtggcctgtgggcgatcgtcgtcgtcgcggtggtcgtcggcgtggtcgccaccgtcacccactccggcaagaaggccggcgacgacttcaccgtcccgggggaagcctccattgccacgtccggcaagtcggtcgagtccctgtgcgcgcccacgttgtacaaggagtcgtgtgagaagacgctctcccaggccaccaatggcaccgagaaccccaaggaggtgttccacagcgttgccaaggtggcgctggagtcggtgaaaacagcggtcgagcagtccaagacgatcggcgaggctaatgccagcgactccatgaccgagagcgcgcgggaggactgcaagaagctcctcgaggacgccgttgacgacctcaggggcatgctcgagatggccggcggcgacatcaaggtgcttatcagccggtccgacgacctcgagacatggctcacgggcgtcatgacgttcatggacacctgcatcgacggcttcgtcgacgagaagctcaaggccgacatgcacaccgtgctgcgcaacgccaccgagctcagcagcaacgcgctcgccatcaccaacagcctcggcgggatcctgaagaagctggacctcggcatgttcaagaaggactcgcgtcgccggctcctgtcggagcaggacgaaaaaggctggccagtgtggatgaggtcgccggagagaaagctcctggcggcgggcaaccagcctaaagcgaacgcggtggtggccaaggacggcagcggccagttcaagaccatccagcaggccgtggacgccatgcccaagggccagcaggggaggtacgtcatctacgtgaaggccggcctctacgacgagatcgtcatggtccccaaggacaaggtcaacatcttcatgtacggcgacgggcccaagcaaagccgcgtgaccggccgcaagagcttcgctgacggcatcaccaccatgaagaccgccacattctccgtcgaggcgtccgggttcatctgcaagaacatgggcttccacaacacggccggcgcggagaggcaccaggcggtggcgctccgcgttcagggagacctcgcggcgttctacaactgccggttcgacgcgttccaggacacgttgtacgtgcacgcccggcgccagttcttccgcaactgcgtcatctccggcaccattgacttcatcttcggcaactcggcggcgtgttccagaactgcctcatcgtcacgcggcggcccatggacaaccagcagaactcggtgaccgcgcacggccgcacggaccccaacatgaagtcggggcttgtcatccagaactgccgcctggtgcccgaccagaagctcttccccgaccgcttcaagatcccctcgtacctgggccgaccctggaaggagttctcgcgcctcgtcatcatggagagcaccatcgccgacttcatcaagcccgagggctacatgccctggaacggcgacttcggcatcaagacgctctactacgccgagtacaacaaccgcggccccggcgccggtaccagcaagagggtcacctggcttgggttccacgtcatcggccggaaggacgccgagcagttcaccgccgggccgttcatcgacggcgcgttgtggctcaagttcaccggcacgccgcacatcctcgggttcaagttctaaagaccgcacgcatggcatgttatatacagcacacgatagggaggtggcacatacatgtttgtacctgaggtgtcgcaggacaggagggctaacgtttgtacctttaccactttttcttttctttttgattcatttggttgtttctcttggtgaaaattttcaggaaacgagaaatattttggac

SEQ ID NO: 16686 - DNA, 439 bp, Zea mays
  Clone ID: LIB3066-038-D7_FLI
gggggctctgcaggccacggggcgatgctggccggaggtgccgcggcggcgtacggagctcacacggtgtcccactcccacgggatgtacggccacggccacggccacggcaagttcaagcatggcaagttcaagcacggcaagtttggcaagcacaagaagatgtttggcaagcacaagaatatgttcggtcgcaagtggaagtgattaacgtacagctttaatccgattctggacgagcagacgtatatatatacaccggagtccagaatgctaagttatgctattttgattgtgattcgaatacgggaggttgttagggttttcgaagtacgtactgacggctgcctgtaagctttgttggagctgttcttgccgtgttggcagtccgaattaatttaaccatcgattgtgtcgaacagcatctccagctgccgac

SEQ ID NO: 16687 - DNA, 595 bp, Zea mays
  Clone ID: LIB3066-038-E9_FLI
ggcgaagggcaggcccggctccgtcccgttccatgaaggcctaacccgagcgggcaggcttttaagtagggcgcgagtgagagcgagcggccaatcggccgggagcgaagccagcgctagctgccgcctccctccccggtcctcgggtccgccgcgcgcgcgccggccgccaccaccgcacgacgccgaccaccacaattagctagcagcggcgtcgactaataaacgacaatggcgtccatctccctcgaggacgtccgcaacgagaccgtcgacctcgagaccgtcccggtgcaggaggtgttccagcacctgaaatgcagcaaggaggggctctccagcgccgagggagacaatcggctcaagatcttcgggcccaacaagctggaggagaagtcggagagcaagctgctcaagttcctgggcttcatgtggaacccgctctcctgggtcatggaggccgccgccatcatggccatcgtgctcgccaacggcggaggcaagccgcccgactggcaggacttcgtcggcatcgtcgtcctcctcttcatcaactccaccatcagcttcatcgaggagaacaacgccggcaacg

SEQ ID NO: 16688 - DNA, 493 bp, Zea mays
  Clone ID: LIB3066-038-F10_FLI
cggcctccccatggcgaggtcgggattctgggcgccgccgcgtggaacattgccgatgactgccactctggctgctcctacggtcaggttgggtcgggcggtcgcggcctgggtcgtgcgctggtgggcactgggtgcgaaggcatcggccagatttggggaaattcctcaccgaagatcaacagtgccgccgatccgctgctcacgatgaccgtctctaccactacttcgaccgccattgagcgcgaggacacgtgtcatccgaaaagcaagttggtacctggaatctcaagtgccaggagaagaacaggtggtcgaagaggagccgcctaacactgaggagttcgatctgatctaggtggcgtgtctcggtcgacattggcgccgacgatccttagttcgctttatctttattattttattttgtaataagacttccgctatgtaataagtactctaatgttttatgacatttatctctatacactctgtt

SEQ ID NO: 16689 - DNA, 158 bp, Zea mays
  Clone ID: LIB3066-038-H9_FLI
gccggaactacgagtacgtctccctgggctgcgacgcgatgcccgtgctcaagggccgcacccccatccagtgctacgccgacttcatgcgcgccttccgcgaccacttcgccaccttcatgggcaacaccatcgtggagatccaggtcggcatgggc

SEQ ID NO: 16690 - DNA, 974 bp, Zea mays
  Clone ID: LIB3066-040-A5_FLI
agccacaccgtccccatctacgagggatacgccctcccccacgccatccttcgtcttgacctggccggtcgcgacctcaccgactacctgatgaagatcctgactgagcgcggctactccttcaccaccaccgctgagcgggaaatcgtgagggacatgaaggagaagctcgcctacatcgccctggactacgaccaggagatggagaccgccaagaccagctcttccgtggagaagagctacgagctccccgacggacaggtcatcaccatcggcgccgagcgcttccgctgccccgaggtcctcttccagccatccttcatcgggatggaagctgccggcatccacgagaccacctacaactccatcatgaagtgcgacgtggatattaggaaggatctgtacggcaacatcgtcctctccggtggcaccaccatgttccctgggatcgctgacaggatgagcaaggagatcactgccctggctccagcagcatgaagatcaaggtggtcgctcctccagagaggaagtacagtgtctggatcggaggatccatcctggcatccctcagcaccttccagcagatgtggatcgccaaggccgagtacgacgagtccggcccatccatcgtccacaggaaatgcttctaattctttgggcccgagaaatgcaagccgtgggggagccgttaccgccgccagcctctcctgcccccgttttcgttgccgtttcttcattagcgcgaacaaagttttgtgccggtctatcggccgccgctttcctcccctattcatcaagactgcaataactgtcgctacctatgcttctcacctgtgatttttggacacaatatgttaaggtccattcaattctaatgagacgcctgatgaggctactagcaaacaacaccatgtgttcggattgtcattggttattgatgtcttgtgaatgaataatataaattttttttggtc

SEQ ID NO: 16691 - DNA, 652 bp, Zea mays
  Clone ID: LIB3066-040-C10_FLI
ccgagaggtgaaccagcagcctccaataaaagccagcacatccaaataaaaccgagagacctcagccctcaggcaagccgaccgccgacgtaccaccgcgccaacccgagagaaagatggagatgatcaagaggatcctcatcgccgcgctcctcgtagtcgccgtctcggccaccgcagtgctggcctccaccgaggccgccgccgccggcgccccagccgcctccgagtcgtcggcgtccgccgaagcccccgctggcgccgccggcgccggcgccggcaccggcaccgccgcggggccctccgccagcggcgccgcgcccgccctcgccgccgcgcccgccgcgctcctcttctccctcctcgcctactacctgcactaagcggacggacggacggacgcgcgcatggcattggcatgcatggactgttgaacatctatgcatgcatggacgacgtcacttgcaacgctgttcccatatagtactactggtctgctatgaatatctatgcatgcatggtaacgggttgtgttatttaattattattattacgtagacattactatttaaaattcatgtgttcgcgtcaagtcgttctgtaatcttgtgatggaatatatatgatatttccttttaaaatcattcgtttg

SEQ ID NO: 16692 - DNA, 894 bp, Zea mays
  Clone ID: LIB3066-040-G4_FLI
cttatacgtccctacatacccttgtcaatgacatgtttccaccaacaactctggttgagcaggtcagttttttcatatctgctgaatagagtggtattttgcttgtcttaggcatggactggaattatgtcctaatggaacaattgcatcggttagatctaacggcttctaacattccatcatttcgtttttagctacattttgtctccaatacccatgatttgctagctacataatatttttaatttttctaatcattagataataagttcatagtacatgaatactgcaatcagtccccgatccttgtggcatctatgtcaaacactcaactactcaaaacatacattggacaaatgcgtgctcatataatttccttgtgctgaatgttgtgcaggaagactacaacaactggaattactggaaggtgccattaccagatgttgatttgtagtgtagttttgacagaaacagccgtagataccagtagatcctgcaaaagcctagcagtagagcttcctgtaccctaatattcagccaccacgacggttttaggtccaatttgtgaaggtctcaagaattccgggatgtatggttttctgaaagccaatggcccaaggaaacgttgccactttatttccttcgacggagctttcacgtgatcatacggcttttgggtagtcatctgattgtcttcgtcgaacttgttgtacccagaggtctgagccctagaccctcgattcattagagaactcgtgatctggtcattgtccaagctactttgttctgattgcaggaaatctttaggtgccaaaagcagctgtacattttttttttcgtgatccaaaaacagctgtacatcgtatatcagcgcatagaagagaattgctaagc

SEQ ID NO: 16693 - DNA, 366 bp, Zea mays
  Clone ID: LIB3066-042-B12_FLI
gtccgtctgattggattgctgctccattggtacagttgcacccgcggagatttaaagcaacgtttgtttggttgttcggtacataaatgcagactcgtctcgtgcaaaatatcacccccagccaggcccgtccgagacggccgccaagcacgtagtgcaacggcacgtaaaaggaggagagttgtagcttgtttattttttgctatatctcttaattagaatatttaatcacagtactgattttatatttgtgtttctgttattttttaaacaaaactagaccacatatattgtataatatttaaagattttttgtacaatcttatctaatacacgttctgatacagacaaccaaacacgagctat

SEQ ID NO: 16694 - DNA, 858 bp, Zea mays
  Clone ID: LIB3066-042-B2_FLI
cgggtggaattgccgagaagccgagagagaggggttggagcggagttgcgggaggtgggagagaaggcggcgatggggcgcctgttcctgatgcacctggacggcaacgtctacagctgcaagcactgtaagacccacctcggcgttgccagcgacatcatctccaaggccttccagtgcaagcacggcaaggcgtacctcttccataaggttgtcaacgtgacttctggagtaaaagaagaccgcatgatgatcacaggaatgcatactgtttctgatatcttctgtgttggctgtggatccatagttgggtggaaatatgatgcggcacatgagaagggccagagatacaaggaaggcaagtttattctggagaggtacaaggtgtcgggccctgacggaagccaatactgggttccacaagatgctcacttgggcggaagcgacgccgatgacatataaaacacgatccaacaagctcaagcctgtcgttgatcccctgtaaataacctgggtggcgttgctctttaggcagccgacagccggggattgctccattgaaataattcgccggcgtaaattgttgctgttccaggtgacatgatcgtatccctccctccctcccgttgtccctggaagtcattagatgttaccgctgtatatgtgcgtaacctgtgttgcttataagtccatctgagttgtatgccaagcactagtgaccaaataagtaaagtaaatttctcaagtgtctggtcgacctgggtgtcaagcgagggcagtatgtacaaatctgcattgtattgtgtgttcggttccaacgtcactcttaaataaccgaatagctgcacgcttgttttt

SEQ ID NO: 16695 - DNA, 540 bp, Zea mays
  Clone ID: LIB3066-042-B8_FLI
cgcgcctgcaaccttgcaaaacaggccttcgatgaggcgatctctgagctagacagcctgggagaggagtcctacaaggacagcactctgatcatgcagctcctgcgcgacaacttgaccctatggacttccgacaccaacgaggatggcggcgacgagatcaaggatgctgctgccccgaaagaatctgcggagggtcagtaagatggattcagtctcacgacctgctgctgctgatgttgaggagtgaccagaaccagaaccgtcgtcctcgattctgatagattatcttctagtataccttgtgttgtcgttgtcgtcggcgcgacgatcgtcgtcgtcgtcgcgccggtgtatgcgatgaagctgccattgctgctgttttaattaagcattctagatgttataccgcatgctttgtttcggtttctatgtcgataaatggtggccggatgctggttttcgtgctccgagccggccaccaggaagaagacctgcctgcccttgtgggtgcagcgttgttagaatgacctacggtgt

SEQ ID NO: 16696 - DNA, 1355 bp, Zea mays
  Clone ID: LIB3066-042-C6_FLI
aggaggagcctgcccgcgcctgcgcctggttgtaattgtagctcacgctcacccttcagttgaccaccgctgcggcagcaatggcggcgagtcgccggcagcaccgccgcggcttcccgctggtcccgctgctgctgtcgctcctggcggccgccgcgtacggccgcctcatctccgacggcggcccgcccgcgccgctcctcccggtcatccgcctcgcggcgccgccggccgaggccgagtgcgagcagacctacggcttcctcccctgcaccaccaccgtgctcggcaacctcttcctggtgctggcctacggcttcctcatgttcaaggcggccacgttcctgtcggcgggcagcgagctgctgctagagatcatggggcccggcctcgtcggcggcctcctcctccccatcctcggcgccctccccgacgcgctcctcgtcctagtgtccggcctctccgggagcaaagaggaggcgcagagccaggtgctgatcgggatggggctgctcgccggttccaccgtcttcctcctcaccctgctctggggaacctgtgtggtcgttggcaagtgtgacctcgggccaggccgtgaggcagtagatgtgacagacaccaagggcttcagcttgaaaggcactggtgttacgaccgacgtgcagaccagctacgcggcacggatcatggggctatctgtcatccccttcatcatcgctcagttccccaagatgttgaagacgcaccacgggcagcgcctcgctatgctgctggcccttgtcgtgtcgttcgcgctcgtgcttgcctactgcctgtaccaggttttccagccttggattcagaggaggaagctcgcgtacgcgaagcacaagcacgtgatctccgggatactgaggcacgcccagatgcagtcgctcggccgcctgctgaacgacgacggcacgcccaatgaacaagtcatcagaaagctgttccgcaagatcgacatggacgagagccggtccctgtcccgcgccgagctccacgccctcatcgtcggcatcaacttcgaggaggtcgacttcgacaggacggacgcggtggacaaggtcatggacgacttcgacacgtcccgcaacgacgtcgtcgaggaggaggagttcgtgcaggggatgaggaagtggctggacgaggccaggcgcagcgtgcccgtgggcggcgccttctccagcaagttcatccacgagtaccacgagaggacgaggcaggagcacgacgagctggtcgacaggtccgacgaggcggtggagagcgtggagaaccccgggtggtgcatagccaaagccgtggcgctgctgctgctgggctccgccgcc

SEQ ID NO: 16697 - DNA, 518 bp, Zea mays
  Clone ID: LIB3066-042-D12_FLI
gaaagcggccaccaccaaacactgcatagtaaacatagcctaacacgacgggacatataagcaaggaagcgacagaaaaaaaaagaatccctagttctctaccagcagcacacacacatggcagccaccactactagcacgaggaagcagagaggtcagttcgaataacactgtaaaccccgtgaccgcactacgctgacggctggtcgatcaaaacccatcatcacttcatcaggtacgcgcacgcactaacgccggacatcgaccagagcccgcgctggcgggccgccgaggcgggatcccgtctgcgagtgtcgtgcccgccagctcccagttgccatggcaccgcccctagcggtggagaggtgcggcgacggcgacggcgagagcgagggcagccaccacgtgcagcccggcggcgcgcggggcgacggcgtcgttgtagtccgtgctgcctgcccctgacgggccgtacgcgccagtgccgccgaacggtgtcaacgcctgtcccggcgccg

SEQ ID NO: 16698 - DNA, 671 bp, Zea mays
  Clone ID: LIB3066-042-G3_FLI
aagaagcacaattttgatggtcctatatactattatgtgttcaattcccttctattttcactacttgttctccacatatattggtgggtcttaatatatcggatgcttctgagacaaatcaagacaagaaatgttggagatgatgttcgatctgattctgaaggagaagacgaccatgaagactgattggcgtcaccatcttagtttgcatattatgtcggtgctagaagcatcacccccaataccgtccctgagcttatacattctttggctggattccaagaatacgtgcagattatgagaggacgagcatttgttcctcacgagaatcaccgaagccgggctacgatttcttctgtctcgactgctcatttgtgttgtactaagtatgcattagaaacagcgctgcaatgtgttaaaaaagttggatgtcggatataacattcttgtgagtgttcagacaaagtgcagcggtaaatgtagcattccagaaaaaggactggctgtaaactatatggcctttctttcgacaaaccattgtaaaaattgtgtatgccaggatagccttgcttgggatttaccacaatcccaatcagaaactgtcccttctgaagcatgtatttcaccattcagtgattcgcctgatgataatttgataaattcatttatcc

SEQ ID NO: 16699 - DNA, 1154 bp, Zea mays
  Clone ID: LIB3066-042-H8_FLI
aggggggtcaaggacggcgccatcgacctcatcaacaaatggcagcaggtggcgccgtccctccccgatgacctcatgatccggatcatggccatggagcaggatgccatgttcgaggccctgtacctgggcacgtgcaaggacctcctcccgctgatggccagccgcttcccggagctgggcgtcaaacaggaggactgcaacgagatgccgtggatccagtccgtggccttcatccccatgggcaagtcggccaccgtgatggacctcctcaaccggacgtccaacatcaaggccttcggcaagtacaagtctgactacgtgaaggaccccatcccgagggacgtgtgggagaagatctacacctggctcgccaagcccggggccggggtcatgatcatggacccctacggcgccaggatcagctccatcccgcaggatgcgacgccgtttccgcaccggcagggcgtgctgttcaacatccagtacgtcagctactggttcggcgagggcgacggggcggcgccgacgcagtggagcagggacatgtacgcgttcatggagccgtacctcagcaagaaccctaggcaggcgtacgccaactacagggacctcgaccttggcgtcaacgaggtggtcggcgacgtctccacctacgacagcggcagggtctggggcgagaagtactacaatggcaacttcgagaggctcgccaggaccaaggccaaggtggacccctgcgactacttcaggaacgagcagagcatcccgccattgctcaagtgatcgatgatacccggtcccatccagatcctttcgaccgcgccaagcaaaaggacgacgagtcgtacatgattctgctgattatattaattagattgatcctgctttgcatgcgttgagccaggtgctttgcatggcgagttagctacgtagttggcatcagccacatgcatgacattaaaacacaagctgacagccggctacccaagtaaataaggatacgcgacatacactgtcgtgccaattagtatggctgcttcttcttttttaatattattagtcaacattttatttcattttccttgtactgatgctactccatgcatcttaattatattcatatatatatacacgtcgccatatgacatttt

SEQ ID NO: 16700 - DNA, 2111 bp, Zea mays
  Clone ID: LIB3066-043-A11_FLI
tcaaattcttgttgggatatattcctccaattcccctcctcctcccaacaaggcaacaacaatctgttccggccgccaaacaaaaccaaaaaaaaaacacactgaacccaataatccgatcccacagaaacttttctctcggtccgttcgatcgatcgctgccgtgtcgtttgccagacaccatcagcacccaaaaccatggcctgcaacctggctcagtgcgccaccgccgccgcggcgaccgtcgcgccccgcacccctcgccctgctgcgtccgcgtccgtctccttctccgcgaggaagccggcgggcggcagcctgcggctgcagcggcaggcgtgctgcgagccgtcggtggcgccgtcgcgggcggtgttcgcctgccgggccgcggcgtcggggagcgcggccgacctggcctccgggggcaggaggtcgtccggcgtgccggtgttcgtcatgatgccgctggacaccgtcaaggagtgcggcaccgcgctgcaccgccgcaaggcggtgcaggccagcctctccgcgctcaagagcgcgggcgtcgagggcgtcatggtggacgtgtggtggggcatcgccgagcgcgacggcccgggccggtacaacttcgcgggctacgcggagctcatggagatggcgcgcaaggccgggctcaaggtccaggccgtcatgtccttccaccagtgcggcggcaacgtcggcgactccgtcagcatcccgctgccgcggtgggccgcggaggagatggagagggaccaggacctctgctacaccgaccagtggggccgccgcaactacgagtacgtctcgctcggctgcgacgccatgcccgtcctcaagggacgcacgcccgtcgagtgctacaccgacttcatgcgcgcgttccgcgaccacttcgccgactacctcggcaacaccatcgtggaaatccaagtcggcatgggccccgccggcgagctgcgctacccgtcctacccggagagcaacggcacctggaagttcccaggcatcggcgccttccagtgcaacgacaggtacatgcgtagccgcctgaaggcggcagcggaggcggccggcaagcctgagtggggccacggtgggccgaccgacgctggcggctacaacaactggccggaggacaccgtcttcttccgcggcgacaacggtgggtggagcaccgagtacggcgacttcttcctgtcgtggtactcgcagatgctgctggagcacggcgaccgcatcctgtcgggcgccacgtccgtgttcggcgcggcgcccgtggaggtctccgtgaaggtggccggcatccactggcactacggcagccggtccacgcccccgagctcaccgcgggctactacaacacgcggcgccacgacgggtacctcaccatcgcgcgcctcctggcgcgccacggcgccgtgctcaacttcacctgcgtggagatgcgggaccacgagcagccgcaggaggcgcggtgcatgccggaggcgctggtccggcaggtgggcgccgcggcgcgcgccgccggggtgggcctcgcgggcgagaacgcgctgccgcggtacgacggcacggcgcacgaccaggtggtcaccacggccgccgagcgcgccgccgaggaccggatggtggccttcacgtacctgcgcatggggcccgacctcttccacccggacaactggcggcgcttcgccgccttcgtgcgccgcatgaacggcgccgggtcgtgccgggaggccgcggagcgggaggcgcacggcgtcgcgcaggccaccgggtcgctggtgcacgaggccgccgtcgcgctgcggagctgaccggccgggacgggacgggacggaacggaagcctacgatcgactgtacatacaggggttgggacttgttgggttttcctttgggtggagagcgagggagcgcagtcgagagccagcgagcagtctctcgtgcagtgcagtgcagctccggcgtagatgagattgtattgtgaccaagccgggagggaaagcagggaggggaggacaaagaagttttgtcacgtttcaggctccggccatcgccggagtttgtccggggaatatatcgatttcctattag

SEQ ID NO: 16701 - DNA, 1117 bp, Zea mays
  Clone ID: LIB3066-043-B7_FLI
gcgacaaaatatctcgccgttcccatggacatcgacctcttccccgacatcgaccttgacgccctcctcgcctccttctccggcgaccccgccgccgtctccggcctcatcatcccgtccccgcctccgccggcgccggcgacggcgcacgatgcggaggcggggtcgccggagtcggtgacctcccggacgaacccgctcggggaggtggcgctctcggagatcgagaggctcctgatgcaggagggggaggcggaactgggcggggaggtcgatgggatcagcgtggaccagttcttcgacgcgctgtacgacggcgaggaggcgaaaggtgagcgggaggcgggggcaagcgcggatgtggactccggcagggacgatgtgctggaagtcgtgacgccagaggcggggacggtggaggtggatggcgatgatcccatcagcaagaagaagatgaggcaaatgaggaacagagattccgccatgaaatccagggagaggaagaagtcgtacataaaggacttggagacaaagagcaagcacttggaggcagagtgccgtcgcctcagctacgcacttcagtgctacgcagctgaaaacatggcactgcgccagagcttgctgaaggataggcctcttggtgctcccacagccacgcaggagtctgccgtactcacggaaaccctgccgctggtttccctgctttggctggtgagcatcgtctgcctgttcctgatgcccgttctgcccaaccgaagcccagctgctccaagcagcggcggaagagacctcgtgatggcagccggaaagacaagcagtgagaccccagagatactggaactcatcctccatggaaggcgttgcaagagcacgagggcgaagattaagctatgtattttaccatttcatgcaggagctgcttgctagtagttgctaggctttgagcctcttgcaagcttacctctatatgtagtgtacccgcaaatcttaccgtgctcgctatgcgcctgtcttgcagagaagcctgtcgatatccatggagtagtaccttttttttgtttaatagctcctgtgctacccagaatatgtttaaaatctggattttgtgttattttct

SEQ ID NO: 16702 - DNA, 778 bp, Zea mays
  Clone ID: LIB3066-043-D10_FLI
accttccatcgacaaaatggaggtaccgcgcctcccccagggtgcccttccatccatggcgttgccgcggccgtccccgcaatcaactcccagatctcgtgctcacctccccgcaatcaaggtcgtcacgcccgatgaggatggccgcgagtcgccgcacggcggtccgggccccagcgatagctccggcgcaggcgcgaggaagaagctccggctcaccaatgagcagtcgacgctgctcgaggacaccttccgcgcccacaacatactctccaacgcgcagaagcaggagctcggacggcaggtggatctcagcgccaggcaggttcatatcgtcttctgcgtgtatgtagttgtttcttcttcaattctctttgtggggaaaacattaattgggattttcccagcaatcagcttgataggcgacatcatcattgtcgggatcttctacttcattggatttgcattgttctgcttggaggcttttctgaacatgtgggtcattcagcttttgcacccttctgatcaattcagaagagaacccggagaaccatgcacttgtggagttgttcatctggaaagtgacaccattattgaatatgattgatcgactttggggtcaatagtggcacaacaaggttctccatcgactcaagaaccaagctgttaatgaggacacctttcggtgttcatatgagtttggatggaaacctcgggttgctttgttgtccaattcctgttaatgttatctacacttacaaataaacgttgttgttgc

SEQ ID NO: 16703 - DNA, 815 bp, Zea mays
  Clone ID: LIB3066-043-D3_FLI
ggggctctcccaggaggacctcgtcctgctctccggcgcgcactccatcggcggcgcgcactgcttcatgttctccaaccgcatctacaacttctcccaggacgccgacgtcgaccccacgctggacccggagtacgccaagtggctgcgccagatgtgcccgccgcggcagcccggcgacgaccccgagcaagcgcccaaggtgaagttcgacgcgcagacgggggagcggctcgacgtcgcgtactactccgagctgctcgcccgccgcggcctgctcacctcggacaacgccctcatcgaggacccgcagacgagggcgatggtggagaacttcgcccggaacgagccactgtggcagcagaagttttcccaggcgatgcagaaggtcgggatgcttgacgtgctcatcggcgagggcaagggccaggtaaggaagcagtgccgcctggtgaacgggcaggagaaggaggagaagcagcagcagccgcaggaggagcaggaggagcagcagccaccggagctggaggaggaggagcagcagcagccgcatcagccacagcttccatggttcctgcagaggcagcgcccgcccgttcttcttccatggctccggccccatccacggccgcgtcgaccgttccggaaacatccggtggccgacctggttaacggatttttccgtggttttcactgaaggcgagcactatgctcgggacgtagacctccaaaatatgcaatgctacggtacatatcaatggacgtaaaccggtgtatccatgagcttaattaacatgaacaatcctgctttgctt

SEQ ID NO: 16704 - DNA, 1130 bp, Zea mays
  Clone ID: LIB3066-043-F10_FLI
aaaaaaagaaaaaaaaagagcagaaaaagtagagtagactacgacagcgtccggcgaggaggcggaggcgaagatgaggaagaagctcggcacccggttccccgcggctcgaatcaaaaagataatgcaagcagatgaggatgttggaaagattgcactagcagttcctgttttagtttcgaggtctcttgaattgtttttacaagatttaattgaccgtacttatgaaattactcttcaaagtggagcaaagacactgaattccttccacctgaagcaatgtgtgaagaggtacagttcttttgatttcctaactgaagttgtcagcaaggtaccagatcttggtggcgctgattcctgtggagatgaaagaggattacctagaagaaggtaaggtcatttgtaatcaacattttatgattcaattgtctcacgtatctgaaattcactttttcagaaagtcaaatggcagtgacccagagaatgatgaatcaagatctagtaaaatggccataagaaatgcaaacatcagccccagaggacgtgggaggggtcgaggcagaggacgaggtcggccaccaaccaagagaaaggaggttggttatgtacaatttgaagatgagagcagcatgtttgctgaacaaggtgagcccttgccaggagaggaaacagttcaagagatcaatggcaacgagaccatgcctcaaagcacgcaacctccagtagaggctccgccaacagcccttgcacaagctacaacaagttctaaggcggaagaagcgaacagtgatcatcagtcagattggcctatgccagatgccattggaagcatcggtgtcgtgccatctggttttggacatctgacagtgcaggttgaagatgaggactacgacaatgaggattagtcagggtcatcttctcattgtatgcactaacaggactgttctggtgttgtaaaatgtaaatatagtttgaaatagttgccgcagtttacctgtgattgtctgtcgttttatgcggttatgtagtcctgtgtaactttcgttctccaataattgcttggtagttgcttttttacatgattcaagtgttttgtgacatttaacacagtatttgagcagggattgcct

SEQ ID NO: 16705 - DNA, 547 bp, Zea mays
  Clone ID: LIB3066-043-G1_FLI
gagccatccccaggctcttgcgcaatgtgaacacacattaacaggactaggaattgaacatagagaggctgttgacgacactgctggtgcagcaaagattgttgcagaacatatggtccaggatactggtgctattgctagttcattggctgctaaactctatggattggatgttcttgctgagaatattcaggatggcaaaaataatgtcacccgtttatgatgctagctcgaaaacccaacattcttcgcaatgatagaccatttaagacaagcatagtcttttcactagaagaaggacatggacaactctttagggcgcttggtgtattcgcacagaggaaaatcaacctcacaaagatcgaaagtcgtccacacaaggagaggcctcttcgagtatctgatgactgttcctcactcttaaagaattttgattacctcttttacgttgaccttgaagcatcaatggctgatccaaagattcagaatgctcttggaaatctgaaggagtttgcaacctttctaaggttcattcacatttgtagga

SEQ ID NO: 16706 - DNA, 228 bp, Zea mays
  Clone ID: LIB3066-043-G10_FLI
acaagctcttttaaaaccatccgctttgtaatttggcgccaattgagggtgtcattaacggtgttcgattattaatcgatccagtttggccccacaactagaaaaggaaaaaatgcacacatcttatccttgctacttctaggatcttttcatatgtcttaatttcaatcgagggcgaggccagaagaagccaaattattgcaaatactcgttaagccttgtttagtt

SEQ ID NO: 16707 - DNA, 1368 bp, Zea mays
  Clone ID: LIB3066-043-G12_FLI
gtcttcagagccatccgctggaggagatctatttgcacagcaattctcactattgactacagacaagaagttagaattgtctgagcaaaagagctatacttccgtagcaaatggtatgtctggtgtgctcgagctttcagaggcatcgattgaatcatctggtgcaaaagctgctgcatgtggaactctttcggttctttcctcaatgtcaaataaagtttacaatgaccaaggaactccagcagcattcagagttcctgcaggtgctgtgattccttttggatccatggaggacgccttgaagaaaagtggatcaatcaaatcctacactaatcttctagagaggatcgaaacagctcaaattgaaaatggtgaacttgatagcctatcctcgaagcttcaagcaactgtttcacttctttctccatcggaagaaatcattgaatctttgaagaaaacatttgatcagaatgttcgactaattgtgagatctactgctaatgtggaggatttggctggaatgtctgctgctggactctatgaatcaattcctaatgtcagtctctctgaccctagatcctttggagctgcggttggacaggtttgggcatcattatacacaaggagagcaatccttagccgtcgagcagccggtgtacctcagagagacgcaaagatggcggttctcgtgcaggaaatgctgcagccagatctctcttttgtgcttcatacaattagcccagttgaccatgatcccaaattagtagaggctgaggttgcccctggtcttggagaaaccctcgcttctggtacccgtggcactccatggagactctcatgtcacaagcttgatggcaaagtcacaactctagcttttgcgaatttcagtgaagagcttatggtgctcaactctggccctaccgatggtgaaatgagtcgtaggaccgtagactacagcaagaagccgttatctgttgatgcaacctttagggagcagtttggtcagcgccttgccgccattggacagtatctggaacagaagtttggaagtgcccaagatgtggaaggttgcctggttggccccgatatatttatagttcagagcaggccacaaccacaataaacaaaaagttttgtgtggttacctggctagctgaataaaaatggatactggcagaagaaatatatggacttcgtagcacgcgtaggagtgatcgagtcttttttaatatgctatctcaggtaaaataataatttattggcacaggtttagccattcactaacttgtatcaattttgtgaactaaagaacttactattacatgtgggagccacatgccattctatttcgatggtacctattttttc

SEQ ID NO: 16708 - DNA, 761 bp, Zea mays
  Clone ID: LIB3066-043-H1_FLI
cagggcgcggagggccgcgtacaggagaagagggggtatggagcccgccgagcgaatcgagtccgggacggcgctggggaagcggccgaggagcagggcgctgccgcggacgcccagcatggtgacggtgccgtcggcggcgaagcaggggcgccaggagcggcgcgccgcctcgctgccggctgccggcactgggacgggagccgctgccgccatgccggtgggttactgttactactacggcggctcattcgccgcggtggagacggcggccttcttgaaggcgtgcggccgatgcagccgccgcctcgggcccggccacgacaccttcatctacaggggcgaggtggcgttctgcagccaggagtgccgggagaagcggatcgagtacgacgagcgcatggagaagacctgctgctcactgacctccatcaaggaggccccgtccgtgtccggcgccagcggctccgaccagtccggcagcggcggggagaccgtggccgccgcctagccggggtggccttggaggtgcagtgcaggcgtgcagcgacgccggatggatcgatcggcccggtagtttctgccatgccagagcgtctgtgcatagtacagctctggctctgggttccggcagtgatgaatgcgtcagtgattttattatcaggtgattgatgcatgtaactctggaaacatggcgttctattctatgtcgaaacaaaagaaaaagaaaaaaaaggaaaaagagagacccgggttctgtt

SEQ ID NO: 16709 - DNA, 358 bp, Zea mays
  Clone ID: LIB3066-043-H12_FLI
tcgagctgcttcggcgacagagagccgcttcggagcaagcagcaatggacgctaagcagaggcaaagttcgggtggcatgtggggttggctcgctggaagcccgacaccagcagtttagttccgtgattcatatattttacttgtaacattatatatcatttgactgacaccctctacaatttttttatttggttacttacggcattcgtgttcattttggacccacaaagaataaggtgttctagcgatcgttatactcacaattactcaaaatgtattctttaggtttagcaagggggtgttcatgttagtcgatgtgctggttatccttttgacgctgtgctggtttggttgtcc

SEQ ID NO: 16710 - DNA, 997 bp, Zea mays
  Clone ID: LIB3066-044-A8_FLI
gatacatctccccttctcacccaaccctccaagcaacattgaccgcaaagggccatccgctgcggtcagtgtaggtttctgaatcatagcttggcgatgcctgaggctagacaaatactgagctagccttcagaaaaaaaaagaaaagaaagagattgagaagcagggagaaaaaatggcactggcccattgaggaagcttgagaaccagttaacaagaattgccaacatattcttggacaatcttgttaacagagttttaaggtttcccagcagagaagagcgcgtgcaaccaccacattcatataattaataagcaaggtttagagaagaggcaacatgggcacaaagatgaagaaggggatcctgaagccgttccgctatatctcaaccatcatggatggtaaggaggctgaaatgcaaattgggttcccgacggatgtaaaacacgtggcacacatcggttgggatggtcctggctccaccaacaacaataacaacaacagcaacaacaatagtggcggagcacctagctggatgaaggattaccactcggcaccgcttgactcgtcctcttttaggagtgagagtgggggcacggctgctgcaaatccctgggcttctcaagagatagtcatggatggagcaagcgtcggagaaacctccttcagggacacgaaaagcgaggcaggcgtcgacgtcggcgggggcgactccccaccgtcccccgccacccgccggtcgagacggcaccgctctcggggctccggcaactcatccatggacgccaccggcggcgagggcgaggagaagactaaggagaagagcaagaagggcacccgaaagaaccgcaagaagcaggacaagtcggccggcgacgacgcctcgggcacatgccaggacctccccgccgttcccaagaagtccaaccgccggaaaaacaagggaagctccgaggggagcggtagcgccgcggccaaggacaccaccgcggccgc

SEQ ID NO: 16711 - DNA, 1790 bp, Zea mays
  Clone ID: LIB3066-044-A9_FLI
atctccagactccaaccagcgctcctccctccccgttctttcctcctcccttcagccatcgcagtcgcaggttcttggctggttgctggtgtcgacagcaaagtccgcaactccatcctgcctgcgctcctcccgtcctccgtcctcactcagcacccgcgcacgccgcctgcctgtcgattgagatctctttcacgcccctttctgccatcgcacaactgagccgcagctagtaacatccattttgctggtcagtaagtcgtgggaggaagaagatggattatttgaaggtgcaggtggtagagtcatcatttgtagtgccgagcgagccgacgccaacgaaggcgctctggctctcttgcttggacatggttcagtccaacaaagcccacaccccaactatccacttgtacagctccaacgatgctgcggcggctgattttttcgacctgggtagactcaagaaggctacggccaaagccttggtggccttctaccccctcgccggcccgcctcgttgacagcgacgatggtaggaaggagatcagctgcaacggcgaaggtgcactctttgttgtcgctcgcgcggatggtgatctcactatcgatgaagtcaagaaattcaagccatcgccagagttgaggaggctgtttattccactcatcgagccatcctccatcataatggccatacaggtgactttcttgaagtgtggaggtgtggtgttaggaacagctatccaccacgccgccacagacgtttcaagcgcgttccacttttttcagacatggtcggcgttctgcaagcatggtgacagtgctgccgtggagctcccgtgccacgaccgcaccctactccgcgcacggtccccgcccacagtccaccccgacgcgctctcgacattgcagcctcggctcgtcctcactgaacccgaggggcctcttgccatcgaaatcttcaccatttccagggaccatgtcgcctccctgaagcagctctgcggtggcacgagcaccttttgcgccgtcagcgctctcatctggcagtgcgcgtgcgttgcacgacggatcccaccggactctcaggtgcgcgtgatgttcccggccgacgtccgccgccggatgaggccgcccctcccgacccactacttcggcaacgcagtgatcaggctatacgccgctggcccggcaggggacattggcacggcggcgttggcatccgtcgctgcccgcatcaagggcgccgtcgagcggatggatgacgagctggtgcggtccgcgattgactactacgagatggccgagacgaacaagagacggactgggacaggcatcttaccacggacggacctgaatattaccagctggttgggtaggccacagcacgacgcagattttggctggggaaagccgcaatccatgtcgcgggcggagtctgtccgcggcggctctatgcacttgatgaacgacgacggtggtaccggcaacgtccgcgtgctcgtgtgcttggaggctgaaaatataaaggagctaggacggctgctttatgcaaagctctagcaagctgctagtgctatgctctaaaaataataatattaataataaggtttgttactatgcttaaggggaaccatactttttccctcgcgatttattattattatggcagtttcaatattgaaaaccatttgtaattcctgtgacaattaatttatgcctccacactagaaataaaaacttgtttgtaataaactacagaatatttttttgttatggcagtttcaataatg

SEQ ID NO: 16712 - DNA, 1527 bp, Zea mays
  Clone ID: LIB3066-044-C5_FLI
gcagcagctcaccgtcgtgcctcctccatcggcatccacccggccgagagcacaacgtgtaccgtctctccccagcgtgcgcgcgcgcgtggtcggaggctgccgtcgctcgcgtcggccgcccccgccggccagcgagagcgagggacaacgaccgaccgaccgaccagctcgaggtgaatgaacagccgcataccgttcctccagaaaatgcaccgctggatcatccctagctgcggcgacacccgccagccgcgcccttcctcccgccatcgagatgcgttcccgaggccggcgtcggcgtcggcgtcggcgtcggcggccccgtcccctcagaagctgaggaaggtggggtcggaggggacgctggtgctgtccgtgcccaaggacgtagaggagatccggaccatgtcggcgtacggccgcctcaagctcttcacctaccacgagctcaggaaggccaccggcaacttcaacccggggcagatcgtcggcgagggcggcttcggcgtcgtgtacagaggggtcatcgacggctccgtgcggaagggctacccgtccaccgcggtcgccgtcaaggtgctcaacccgcagggactccagggtgacagggagtggctgacggaggtgagctacctcggacagtacagccacccgaacctggtggagctcatcggctactgctgcgaggacgaccaccggctgctggtgtacgagttcatggccaagggcagcctggagcaccacctgttccgccgctcctgcagactctcgtggacgacgcgggtggccatcgcgctcgacgtcgccaggggcctcgccttcctccacgggcccgaccgccccatcatctaccgggacttcaagagctccaacatcttgctcgacgcgaaattcaacgccaagctgtcggacttcgggctcgccaaggaagggccgatgggcggtgagacgcacgtgtccaccagggtcatgggcacctacggctacgccgcgccggagtacatagccaccgggcacctgacggtgatgagcgacgtgtacggcttcggcgtggtgctgctggagatgctggtgggacggcgcgcgctggagccgagccgggcgggaggccgcgacggcagcctggtggactgggcgcggcccatccttatccggcccaaaaagttggagcggatcctggaccggcggatgggcgaggtctgctcggagatgggcctgcagcgcgtggcccgcctcgcgtacgactgcctcagccagaaccccaaggtccggccctccatggccagggtcgtcaccacgctcgaggcagtcctcgccgccggtgccggtgccgccgacgccgcgccgcggtgagaccggaggttgatgtaggtagtagggtcggcatacggattaattaggtgcgtacgggtatatgcttgggcggaggaggcatgtttaatttggtgtaatcatttgatcgaatcgattattcatggagtttaaatatattaaagttgtaaaagaatagaaaaacaattctgc

SEQ ID NO: 16713 - DNA, 715 bp, Zea mays
  Clone ID: LIB3066-044-D6_FLI
ttgtacgccaagaaggactacaagaccccctcatggaagaggtatttgcagatctcgcggcggttcttcttggagggggtcttgtacgccaagaaggactacaacctggccaagcaccccaagcttgatgtgcccaacttggaggtgattaagctcatgcagagcttcaagtcgaaggagtatgtgagggaaaccttctcatggcagtactactactggtacctcaccaacgatggcattgagcacctccgcagcttcctcaacctgccatcagaggttgtgcctaataccctcaagaagtcttccaagcccccgtctcgccccttcggctctggcccacctggtgaccgccccaggggccctcctcgttatgaaggtgacaggcctaggtttggtgatagggatggttacagaggaggtccacgtggcgctccaggtgactttggtggtgataagggtggtgctcctgcagatttccaaccatcttttaggggtagcagacctggctttggccgcggtggcggcggtgctttcggtgctggtggatcttccatggagtgatgtgtcaacatgagctagcataacattcgtctttgaactatgagaacaatgagattttgttttgttttaccgagctgttgccgtgggttgacatggttttgtgatcgtttttgtttagatgaaattattgaaatcaagcagcgagttatcagtc

SEQ ID NO: 16714 - DNA, 683 bp, Zea mays
  Clone ID: LIB3066-044-E10_FLI
cgaagactggcgggcaccaataaccctgttcctacaggggtactatcatccaactgacgtcagtgaggcaaagcgcctcagacatcgaagccgggacttcgcactgattgagggccaattatacaagaaaggggtcagtcagccaatgctcaaatgcgtcaccgaaaccgaaggcatgcagatcctacgcgaagtccacagtggcacgtgcggctcgcacgcagggccaagggccctggctgccaaggtgatccgacaagggttttactggcccgcaatgatctgcgccgcaaatcgggtcacgaggtcctgcgaagcctgccagaagttctctcctcggtcaggcaacccctcgcaatatacaaagctgatcgcccatacatggcctctccagcgctggggcctggacatcgtcgggcccctgcccaccgctcaggggaaccttaagttcgccttcgtagccgtcgaatacttcaccaaatggattgaagcgagggctgtttccacaatcacatccaagactgcccagaaattcttctggcagaacatcgtttgccgcttcggagtaccaccgcaccacgcttaccaacaccatcaggaagtacaaatcgtacctcctccacccccaccaccacaccagcaaccgcctaacaaacaacaacgttacctgagcctcccaggtt

SEQ ID NO: 16715 - DNA, 300 bp, Zea mays
  Clone ID: LIB3066-044-G12_FLI
gcgtctccttctccctccttcctccagcacgagcggcagctgtcggagcacgacagttgcagcgtccttcaggggaggaagaaaggggacgacggcacgagtttaaaccaacaatctctcgtcatatatatcataatagagagtaggacgacaaaagccatgggcagtaatggcagagatcataggcgcggagtcccacgcccgccacctttaccactttacagggattgggaggaggaagaggtcgtcaaggctggtagacgtcggcagtcgccgttggcgcagtcgtcaacgtcgccc

SEQ ID NO: 16716 - DNA, 1169 bp, Zea mays
  Clone ID: LIB3066-044-G3_FLI
ttcttcttctattctattctttcaccccagaccaccgctttcctctacgagtacgtcgctaaaggaagcatcctcgacatcctgtgtagccaggaggatttcccgctggatctacgcatgaggatcgcgatcaagaccgcggaagcgttgcagtacctgcattcgtcggaaactggcgtcaccggacacggcagcgtctcggcgtccaccatactcctcgacaacaacctcgtaccgaagctcaccgagttctcgaggtcatgtacgctgttcaagaagagcgagactacttctgttgttggtgctggagtgatgatcactggcagccttctagagaaagctctgaacgacgacccgtcccgctacggctcggtgttgatgaacctggagagcgacgtgtacaggttcggcggcgtcctgatggcgctggtcagcagggacggcgacggcgaccacgacggcctcctcgccaggttcaccagagcgtacgagacggaagagaccgggagggcgttgttcgacagggacgtcataacggcggaggaagacgtcgccctgctcgacgagctggggaggctggcgctcaagtgtagcgttctggacgcggacaggatcgctgtgaggccgacgatgaaggaggtggcggatgagcttcggacgatgaggaggtcttggaaggagcgtagccgtagcaccgaggcggctgctgcgtacgtagacgtagctactgcaggtgcgggtgcggcggtggtgccggcggaggcaaggctgccgaacctgatgcgccacatgttcgggtaccgtcggatctccgttggtgatcctatacgcgtgtgctaagtaggacaccgaggtgtgtagtactgtgtagcgatgtttgcttgtctttgtctttcctgttttgttcttttttgttttaaatttatacgatgtactccctccgtttctttttatttgtcgttggatagacaaataaaaagaaacggagggagtatctgtttctagacttggatagcttgttgtgatgccggaattgtacatatatttgctaccctttctattcagacaacgttgagttgtgaagtaatagtctttgtattccgtgatcttcacaacgttgatgtaaaaattgttttttttatataaaaaaattcaaagcggcgtgatcc

SEQ ID NO: 16717 - DNA, 1231 bp, Zea mays
  Clone ID: LIB3066-044-H10_FLI
tgaagctgaacagccaaaggacactaagaccagtgtctcattccttgggtcggctgatgatggtaacacattcttgcattcctcagtctacatgccaagtgctccaccagtacttgatgaagaagccttaaattacaacatttatagggctgtactggaagcagagccaccagaatggcttcctgacagttatgctagtgcgtgtatgcagtgcgctgctctttttactgcccttacacgtggaaggcatcattgtcgattctgtggagggatattttgcagggcatgctcaaagggacgatcgctgttgcctgccaagttccgtgagcggaatccgcaaagagtctgtgatgcttgttatgataggcttgatccattgcagaacttattgattaattctgtcagcaatgcctcacaaactgcaaagcatgatgtcatggattggacttgtgcaagagggtggttaaattttcccattggattaacaatggagcatgagatatacaaggcagcgaataccttgacaagttacagccaggtggcaagaataaaccctgagaagtctattccccatgcagttcttagtggagcaagtgggcttgccatattgacagttgtaaaagctggtgctattcttacttacaaacttggaactggcctagtagttgctcgaagatctgatggatcatggtctgcaccatctgctatactttctgctggttttggatggggagcacaggttggtggtgagcttatggatttcatcatagtgcttcgtggcccagaagctgtccaaactttctgcagtcgaatgcatttttcacttggggcaggtgtaagtgctgcagcaggacctgtgggcagagtagcagaagcagacctgagagctggtgataaaggatcaggagtttgctatacatacagctgcagcaaaggtgcatttattggtgtctcattagaagggaatctagttgccacacggatggatgctaatctgcggttttatggtgacccatatctaacaaccagcgacattctcacggggaatgtggaacagccaaatgctgccaaatttctttacactgcactggataatctatactcagggctggattggtagtgtacatatgtactttgaattttttttcgattgtaaaagttgtatatatccacaaaatgctttcgtttgttcggcgtggcaaaataattaatgaaatgctctgtattaatg

SEQ ID NO: 16718 - DNA, 931 bp, Zea mays; identical to SEQ ID NO: 13516
  Clone ID: LIB3066-045-C11_FLI

SEQ ID NO: 16719 - DNA, 592 bp, Zea mays
  Clone ID: LIB3066-045-C8_FLI
ggcacacgatccaggtgtacccaaggtcgtggacggcggtgatgatgacgttcgacaacgcgggcatgtggagcgtccgctccaacatctgggagaggcagtacctcggcgagcagctgtacgtgagcgtcatctcgccggagcggtcgctcagggacgagtacaacatgccggagaccagcctccgctgcggcaaggtcgtcggcctgccgatgccaccgtcctaccgcgccgtctagagcgtcgaccgatcgcgcacggtgctgtacacaactaaaggagagcgagaggggactttttctcgcgtttccttctctagccagccttgtctgtcccctcctcgtttattctctctctctcttttttcgttcgcttccgaggaataatacccaaacaaaaaaaacaaaggggctcaagacttcatcatgcatgcatgcataacacctcgagtaggagttgaagtacatgatcattgatggtatatatatagaggaagcatgtctatctaataagtccctcatccaaaattgttctttatgtcatgtatatgtacgtgcatatatatatatataaaaatacgtctccttttatt

SEQ ID NO: 16720 - DNA, 290 bp, Zea mays
  Clone ID: LIB3066-045-D11_FLI
cgctcatggtcggcaagaggagcaccaaggtgggatgcgcacgagcagagtgcttcaagggaggcgtcttcatcacatgcaactactatgccacggacctcaagaagaagaacaagaagaagaagaagagcaccaccaactgaactcatgatttccagctagcttcttccagttttgagccaagcatggatcttgtacaattaattgatctcagtataccttcaaaattatcatcactacaatatataattcgcccaagcatagatatataataatcaatcagttcatcc

SEQ ID NO: 16721 - DNA, 738 bp, Zea mays
  Clone ID: LIB3066-045-G5_FLI
aacgaattgtttgtccaggagaaggcccccgacgggattattctttctccccgcgtgctctctatctctcccctctttctctccctctgcccgacgactaggccgccgccgccaccgccccgccgccgccgccgccgccgtgcccaggtctttgtcggtccttgtccggcaacgagcaccctacagatggctgggaggcacaccattattctgatgcagccatctcaaaatagggcttctagaacatttatggattacaattcgattaatcatgcattggatggaatctgtgggctttatgaaaggaaaattagggatatcaacccaatgatcccaaacataacttatgacatcagcgacctctataacttcattgatggcctagccgacattagtgcgctggtttatgatcactcgattcaggcattcctgccatatgatcgacagtggataaagcaaaagttgtttcaacacctgaagaaattggctcagcggtagcacaactgttgtttgttctgatgccttttatccaacaagcaagcatgcgtgacaataggtgtccaatcagtggtattgggagttgtttcttgtaaactttgtaatgttacatggcagatttgctcccttgtattctggatgtttgactcggatttcattggtggcttgcttgtggttgtggtatgctaaacttgttttgtttcgcagtgctgggaatcagataacccttttgcctgttgt

SEQ ID NO: 16722 - DNA, 1068 bp, Zea mays
  Clone ID: LIB3066-045-G6_FLI
tgctgtttatgctcctgcaacaatgaatatgctccaaactcctccatttcatagcaacagccatgaaaaagagtcaggtgcagttttttcaaatagctttaacatggccccatcagtgacacctacctccccttttcaacttatgtctccaagctcaaccaactacacttccactcaaatcttcgaggaaaccaacaatttagaggacacttcaagagtctttggaggtggggataacgaaagcaacaacagtgaggaaccggatcccaagccggctgtggagatggaagacctaaaccaaggcaatgatcatacttcgaataaaacagctaactgtcaagattaccgtatggtcctgcgcaaggacttgacaaacagtgatgttggaaacattggaagaatcgtgctgccaaagaaagatgcagagcctaaccttccaatcttggaagataaggatggcctgatactggaaatggacgattttgaactcccggttgtatggaatttcaagtacaggtactggcctaataacaagagtaggatgtatatattggaaagtactggtgaatttgttaagaggcatgggcttcaagctaaggacatcctcatcatttacaggaacaagaaatctggcagatatgttgcccgtgcggtgaaggctgaggacatagcgccgccagaatgcgagtgcgtcgaggcaggaaaccctagagaagagtgcggcttctccgtcagtccttcgatcaataagaagatcatcacgtagatggctggagcatcagaaatgtatggtgtaggctgtttgccgcgcaggagcacaccgagaatcggcggttgctgggagccaagcaactgtttcgatcgaggttgtgtcgtcaaagctgaattcccacccaacctgcgtaggcctgtactatactgtttcccttgtttttgtcggccgtttcgtgtagttcgagataaatgatgagtttgcttttgtacctgtatatatttcgtctttggataattcggtgacaaacaagtcaaggtcgttatataccgtctttttgaataattattacgatt

SEQ ID NO: 16723 - DNA, 1028 bp, Zea mays
  Clone ID: LIB3066-046-B2_FLI
acccagttccagaagtcggagcacgacgcggagatcaaccactccctccccggggacgccttcgacgccgtggtgcgcgccaagctggccctggagctggagtgccccggggtggtgtcctgcgccgacatcctcgcactggcgtcgggcgtgctgattaccatgaccggcgggccccggtacccggttccgctggggcgcagggactcgctgtcgtcgtcgcccacggcgcccgacgtggagctgccgcacgccaacttcaccgtggaccgcctcatccagatgttcggcgccaaggggttcacggtgcaggagctggtggcgctgtccggcgcccacacgctgggcttctcccactgcaaggagttcgccgaccgcctctacaacttccgcaaccagggcgggaagccggagcagttcgaccccagcatgaacccgtcctacgccagggggctgcaggacgtgtgcagggactacctcaaggaccccaccatcgccgcgttcaacgacatcatgacgcccggcaagttcgacaacatgtacttcgtcaacctcgagcgcggcctcggcctgctcagcaccgacgaggagctgtggacggacccacgcaccaagcccctggtgcagctctatgcatccaacgccacagccttcttcgacgacttcggccgcgccatggagaagctcagcttgttcggcgtcaagaccggcgccgacggcgaggtcaggcggcgctgcgacgcctacaacagcggccccgccgtcgccgccaccatacccaagatgtgacgacgctgcgcgtggtacgacgacgggcgcgcacgtgcttgtctgcatgcggatcgatcgacggccgagctgtctggcacgacgacggcgtgttgatcgagggcctcggctcctcctgcgacggtcacgatggtgttaagatttcgtgccgaaatgtgatatgtttcatgctcgatcaagtaatttattcctaatctgtgtgctgcgcaaaaaaaaaaaaaacttcgaagtgttgcgct

SEQ ID NO: 16724 - DNA, 1099 bp, Zea mays
  Clone ID: LIB3066-046-C3_FLI
ctcgtattaacggtcggcggtgggtgtggagcgggacggggcggcgagatcacgacgagatggagactgacatctcttcatgcggaggcggcggcgcccaacagcggggtataggacctgtggaggtgcaagcggcgacggcagcactgcggcggtcagaggtgttccacgtcttgaaggagctcgtaggcttcgtcctctacatgcaccaccagatcccctcggttttgccgagtcttgaaaatgaatttgcaagtttaaaggaggaaatgacagaaatggcattacaaccagctgaactcaaaccatctgatcggagaaagtacaacacacgaaaaacggaggttagacgtagaataaagaagcacgagaagttgatgaatggcatctctaccttactctgttctcttcagcacgcacttgatgaagtttctagcattgaaggagttgtcctgatacttggaggaagccttgtacggcccctatttgtttatgacattacaatttctcatggtatctttggtccaggaagtgccaaagaacatgctctaaccaagttagcccaatctgtttctcggaaggctatccgtgctcttgtatcacgtggagctgggagtctgtcctacacaggacctagcaagttgtttttgttggtaagatgctccagtacattaaagctaccactggatttcctgccaaagcttgattttcgttacagcaaaaaggttgtacctcttcaaatgcatataaagtgcagtaaatcagggtgttcagggcataaccagcaccatatgcctcttgttgattccccatgttcgacttcagaatcttctctttcagatgttatttggttccagtgcaagcatacaataagaggtttaccaggcaaggcgtcactagaagggtgatgtgttcatgatatcaaagtttacccaacatgtctttgttgttgtagcgagtaatataacatatatgtacagtagatgatgcttattactttgatgaattgtagcgagtaatatcaaatcagttactacgtccttgtgtaaagcaacttttgctagttttcaggcaaattaatccgatgttcggttggagc

SEQ ID NO: 16725 - DNA, 2735 bp, Zea mays
  Clone ID: LIB3066-046-E6_FLI
gtgggactgggcttttcaaatcaacagatgaagaatccccactgatatccatggacgacgaaggatggatcacaattccgtgcaaggcacttcctgaaagttggaacgacatatcagaaatggttcagttgcaggctctggaccgttccttcctttttccagttatcaggcgagcaggttcctatactggcgtgcctgtcagcttctaagcaagatgtacaggttatatccccctttagaattgccgcagtaatgtctaagaatggaacttctatgcaaaactttacaaataaatctagccctgtcagtgcaaatggtcatgataatggagcagctggagaaagtggctatgaggatgttgaacccaatggtgaagcatctccttcaggacatgatattttggagactcaatctctccttcagatggaggatcataagcagcagatcgaacatgtgttgcgaagatttagagaatcaaatttttttgtccggattgcggaatcagtggaacctctatggtccaagaaaagtgtaacttcaactacgatagcagatgaacgatcagataaccagggaaatagtaagagatcaaggagtaatgtttataataccatttctgataaaggggtttttgatggtaacacatctgggggagttgctcgagatgttgtcaagtgttattctctgcaaaatggagacatagcggttgttttgcaagtgaatgttagcgttaacaaattggaagatcctgtgcttgaagtccttcagtttgagaaaagtatatcaaacaattgtatgcctgggaatcttgtggatggacattgtgacagtaacgatgatccatgtcaggagctgcttagttggttgctccctttagatcgcacattaccacctcgttctttggcaccccctactctcaatccaagtgtatcacacaagcaatcttattctgcttctggttctcaaatattcaacttcagaagttactccatgccttcagcctcttctgttcagacaccaaataatataagaccaccaccaatatctgaaagtcaagaatttatgcctgaaaaacctgcaaaaaccccagatattataaatgatgggcaactttcgtttagaggagttcctttagaacctgaacggtattctgtacgttgtggtttagaaggtgtgtatctaccagggaaaagatggcggagaaaagttgaaatcattcaaccaattgaggttcattcttttgctgcaaaatgtactgtggaaaatcttctctgtgtcacagtaaagaatattgctcctactcatgcaaaagatatagtcgtattcatcgatgcaattactattgtatttgaggaggcatccaaaggaggtgctcctttgtctttaccaattgctagtattgaggttgggcatggtcacagcttgccaaacctagcactcaggaggggcgaggaacactcttttattctcaaaccagcaactatgtcctcaagggaacggaagaccaacagtcatgcacctctggccttatcactcccaacgatgaccggtgctactttaaatactcatacaccaaaggctggtgagccgtatgctgatctaagcgaccaatatgctgtactggtatcttatcgctgtaattacacagaatcgaaactttttttcaagcaagcaacaagttggcgaccctctgcagccagcgatcttatgatctcagtatcatccgaactgtctttacggaatcctagtcttggtgctcgtgttcctcaactccccgtgcagatactaacactcgaagctactaatatgacatccgaaaaccttacattaactgtccttgctcctgaagcatctggttcttcttcagttttatccttgaactcatctccaaccaccccaaatggttcttttgatggtgttaatgagtcatcaaaaagatctgggctgggaaaagatggaattggctttcgaagattgaattctgtcctagctactccaaaagaaggtgataatggaggaaacagaatgagtaatgcttcaggctgtactcatctgtggttgcaaagtgcagtgcccctagggtgtgttcctgcccgctcaagcaccactgtcaaacttgagctgctaccattatcagatggaattatcacacttgatactctgcaaataaccgcaagggaaaaaggccttgcttacattccggagcactccttggagatacatgccacctctggtatgtcatcaggaaggtcataggataggagagcatcaagaggtatactgttctgtatattgggggcctgggactcagcctgtacaaatgagttggaaacaaccaggccaagcatgttttttttttatctcatttgtattggatggacataaggcgctcaccttggagagaaactacccccagattttaccgaaggatggttgctgccaacatggggaaactaccccagatgaatcattatgtatcacaattgtgttacaaatccattcatttcatactgaggtcgccgagacactggtgttcgtcttcacaaaggcttatgaaattcgtaacgtgttgcttagttttgatccgttattgttgttggtggtgttcatttaatcccactcatgttgctgagttgtaccatatgcgggctctgatcataatatactggagaaatagaaacatgtgtgtccattggccattgctcatcttcatgatgatatatcagttgctcatg

SEQ ID NO: 16726 - DNA, 1083 bp, Zea mays
  Clone ID: LIB3066-046-E8_FLI
acccaccattcaagggtcttagcagaaatgatgtactggatggttcagatagtgctgaagcccaaaacacacaagaaccttctactcgatggggtctaggggactcatctaatttggcatctggccttgaggatgcaaacccttcatatccttatcttcctacagttcttgaggaacctggttcttctttctccgaagctgcagaggatgatccattgccaggcatagaagggcttcgaatcacaggtgaaccttttcctggacaagaacttcaagcaggtggatactccatcaatggtaccacaacttgtaattttgagtgggtgcgccatttagaagacggctcagtaaatttcatagaaggagcaaagcagcctagctatgttgttactgccgatgatgtggacactttactcgccattgaagtccagcccctagatgataggaaaaggaagggagactttatcaaggtttatgctaacgggcagaggaaaatttcatgtgatcctgaaacaaaggagcttattaagagaacccttgacattgggcatgtgacctatgaagtccaagtccaactgcctcaggtcagatttttagacatatgggaaccagctgttctagcaataaagagggaaggttacagcattaaatgtaatgggcagcgtggtgttctaatcacagagaagtttcagcaaggaactgctattcatattccatatgggcgtccaacagagttctcgattacatctgctgcgtctgctgatggtgtcagttataatctgaagccagtagaaaatacactattgcgggataccattgttctagtactaaggttgttcaaaaatatggctcttgagagaagaggaagaagaaagaagggtcttttcttcaagtagtttcagctatattacacttgtttctacgctgcttctaatgtatgtatgtagcattttggttgatcggcgtggtgcacaagtgttctgtttctgtaaaatactagacgattgtgttgtaaaactaaccaaaatgccaagtacacatgttaatattttctgccccactcagaagagctagagttttgcc

SEQ ID NO: 16727 - DNA, 793 bp, Zea mays
  Clone ID: LIB3066-046-F2_FLI
atcatcgacacgtacggcggctggggagcccacggcggtggcgccttctccggcaaggaccccaccaaggtggaccgcagcggcgcctacgtggccaggcaggccgccaagagcatcgtggccagcggcctcgcccgccgctgcctcgtgcaggtgtcgtacgccatcggcgtgccggagcccctgtccgtgttcgtcgactcgtacggcaccggcacgatccccgacaaggagatcctcaagatcgtgaaggagaacttcgacttcaggcccgggatgatcagcatcaacctcgacctgaagaagggcggcaacaggttcatcaagaccgccgcctacggccacttcggccgtgacgacgccgacttcacctgggaggtggtgaagcccctcaagttcgacaaggcatcggcttaaggttgggagtgttcactgtggacatgaggactaccttcctctggctctgctgttacctgcaagcattgctgctgctggatgtgtgtgtttgatcagtgactggctgctgctccatagaagatgaacggagagaaggatgatgaagaagggctttggcaatcgccgctgcaactgcaacccatgccatgccggcttagtgattgggtataatttggcttggcagcagccagcattattatgtgctgatcttttatctttactagtttggtcgtccgatatctttctttctttctccccccccccccccctttcgactctgtactgaaactgctgagagattcgcagtattgttgtatcgtattcgtatgctactgtt

SEQ ID NO: 16728 - DNA, 2185 bp, Zea mays
  Clone ID: LIB3066-047-B4_FLI
ctctcctctctcatcaggagtatattgggcgggatccgagacggccgtgccgcttgcattgctcgatcgaggagggaaaaaaaacaaaagggaagcaggcaggtcgtcgagaggggaggaattcgcaaaccatgctttcagcctccgatccttcctcgagtgcttgctgtctggcggaacttcaactgaaacagctgacctgactactagtgaagcaaataaccaggagagctctgtccaggacggtttagacaccacttgtgctaaggaaaacaagggaaacgacggtgtcgataatgctgctgagaactcgactcaaatttcagaatcctctgatggtggccaactatcactgcaggacaacaagatgggtgattctgatgctgcagatgcgaatagatcatcagcatcttcgacgatcgtgtctgaaggcaaggaaagcatactcaaacacgactgtgacagcgtccaggctccaaagctgggtgcttcagctgctaacggtccatcgtccaagagcaaaagaagttaccgagtcaacattcttcgctgcgagagcttagcttctctggccccatcgacgctagagagactccttgctagggactacgacatcgtagtgtccatgatccctctcccatcttcctcagtcctgccctgcccatctggtctagtgcattttggtccgccttcctactcttccatgacaccttggatgaaactggcgctgtacacatcagggacctgtggcccggtatctgccgttttcatgaaggggcagcggctgaggttgctgcctgaaccattggccagctgcgagaaggcgctgatatggtcctgggatcagtctgtggtgggcggactaggcggcaagttcgaagggaacttggtgaaaggaagccttcttctgcactacctgaactcgatgacaaagcattctgctgtggtggtgcagccattaagcgaacacgatcttgacgagacagggagcatcgtcaccatagacgtcccgctgccgctgaaaaatgccgatgggtcgattccatccacggtagtcggcaccgacttgccggaggaccaggtctcgagtctgatcctcttgttagaggacctgtccaatagagtcgagctgagcacggttgggtaccttcggttgctaaggcttcacagggcgaatgagtcgtccgagcacggaagctttgagtgggtgcctctgaccatagagttcggcatccctttgtttagcccacagctctgcgagaggatctgcgagagggtcgtcgagtcacagatgcttcagaaagacgacatcgctgagcactacgagacgatgcagaacgtgaggaggaggctgagagagctgtgcaccgagtaccaagcgaccggcccaacggcgaggctgttcaatcagcggggaggctccaagaacaactccccgcgcaaactggtgcagattgtcagcggcagatggagcccgttccatgatccgtctacgcccactcactccagtagcccccccgctgaacacgaaagagccaaaccagcgagacggcagagatgcttcaccgaagttctgagctttgatgggaggatcctcaggtcatatgcgctcactcctgtgtatgaggctgctacaagatcggtctccgaagagcagcctaccacgcccgcagcgaaaccggatcacgaggacgccaacaccaaggacgtggccttgccaggagtcaatctgatattcgatggaactgagttgcacccgtttgacatcgttgcctgcctccaagctcgccagcctctctcgttgatcgccgaggcgtcggccacatctttggcaatgaaatgacgacgagctgtccagtacgtactagtaaatttttcggtaggtgacggagtttagtagtgtatgccattgcattccttcttgctgctgtatgcagaattgcattcttcaagggggagcttctcaaagcaggcatttttctttaaaaaagaagcttgctgcaaggacctgttttgcactagcgttaggttttattgttattattatacctagagaaattttcgcacatttatcccctatcgtgttggggtccaggactcatgtaagcgtcagtcctaggtctaaattttatggccatcaaagggtcttttgttttggttgatgtttaaaagtcactttttagtc

SEQ ID NO: 16729 - DNA, 2662 bp, Zea mays
  Clone ID: LIB3066-047-C8_FLI
caggttataccgccttgcttcaatgggctttgcaacatttggtgccttccttcttgcaaagcgtgcaatacaacattttctagaaagaaagcgccggcatgaactgcaaaaaaggtgcctaactccttatgtcatttccttttagaacattcaaatccaattgaaatgtagtagcattatttaagtgtttgggtttttaaagaggtttatatttctgttttagccatggatagaatgtaagtgacttgtgctgttacgatttatttgtaagaactttgtaacctctgtatgcctatctattgacacatgtgcaacgtgtagctaattttaaatttgtagacgtcacatgaaattggagaagactatactgcagggtgattaggtgaatatgctgtatgttcttaagcctggacacacagattcagtgatttgcctcttgcaagtaacgccgtgacttaccgtgctgtatgcaccgtccaaagatagtccaagggctcccaacaatttcatcctaggataggatttggcttttcacctgtgaaaggcagcccatgagggcctttctctgtacatggacgtgttgcgtcgtcatcctgcaacccacaacaccctgtgcactgcatcggactggaagagctggaggcccttgcttcaccccaaaggagagggagaagtgcaggcagacatcagaacgccatcgatgagaagcaagcaagccaccgctagggcaccacgtagtcgccgaggaaaggatgagctctagcgagatttaagatgagcctgtggaagcggactcttgtgtccatccttatgtgtgcagactcggagaatacagtgaaaggccaggcctccaccaaggattcccacaccacgccagaggacacccacgccacaccatgccacgctatatggatataataatgccagtgctaagagattctgtttgcgtttagtgttactgttaccactgactaatactaatgcatgtatttgcatactaaggctttagtgagcacagaagattctgatattattttatccatatagggttcttaatgcagcagcacaaaggcaagctagagaagctgaagggagcattggttcatcggacacagagcctaacagtaaaaaagaccaattagtgttggacatatgtgtcatatgccttgagcaagagtacaatgctgtttttgtgccgtaagtattgtatgttttccagagcataaatgttcttcgttgagaatgaagcagctggatttcctctatttttctatttcctttttttttcataattccaaatagactggtagcgttattatggttgccctgtttcctgtctactagtagttttttttcttaacagctcaacttgacaaaacttgaatactgctaaggccttttttggatgttgtagtcttaagaaactgcaattttagaacccattgatctgcaaaaccatggtttagaaaaaaagaggtctagagtggatttttacgaactccaaaaagactatagttttagtaataacatggtattcaaagccataatgtttgttgtatccgaagttctgaacactttgtcactctaaaaccaaagcatttcacaaaactacaatatttttctaaaaaggccagaccaagtgaccagagctccaacatgagggggatctagggaacggataaaccaaggtaatccttcctaccacaaatgcgagaggctgcttcgtatccgtgacttgaacttactgagtcgccaggtcacagttcgaagcagcctttccgcgtttacggaaggaaggcttgccccggtttatctcttcttcagacctcactcgtcactggttctgcccctagtattttttctagaagtctaaaaataatttgtatccaaacagggtctaaaagggttaaaaaactggataagcattgttttgcatcatacttcaccaagaagcccgaggaaatagtcgaactgcagatatgtgaaattcgttcataatttgtccttgctatcactgttgtcacccctgaaagtttctgtttggactttaaaagtgattaatccaatgttacacaggtgcggtcacatgtgttgctgtatggcatgctcttcacatttgacaaactgcccgctttgccggagaagaattgaccaagctgtcagaacattccgccattgacggtgataccacgtgcactgcttttgaaaccagttggctattggaagtgctggctcctgtcaaccaacgatatgaactgcaaaactgggtcgtagcagcttcttcatggagtttgcttttcgaacagaacagcgagtgatgcaagttgcaagctcatgattggcagttaagaaagataccctactgagatagtgccaatgggtgctcttgcatgtaatgtactactactacaactgtgtacaggacacttgtgtaaatgcacataggttagcagcttgcttcttgactaacacctaatgggcatttatgttgtgctaaccgaatgacaaaattagctcgtttagttgtgataatcgttttttctagtgagtggggaatgatacggatatctccgttcttttgtgctcacaggatcataagaaacagaaaagatttgtaacatgttctatattttactgctcattttgtaacctgaatgtgagg

SEQ ID NO: 16730 - DNA, 1196 bp, Zea mays
  Clone ID: LIB3066-047-C9_FLI
ggggttcgcggagatccaggcggccacccagaacttcgacgagaaggccatcatcggcgtgggcgggttcggcaacgtgtacgtcggggagatcgacgacggcaccaaggtggcggtgaagcgcgggagcgcggagtcggagcagggcatcaacgagttcaacacggagatccagatgctgtcgaagctgcggcaccggcacctggtgtccctgatcggctactgcgacgagaaccaggagatgatcctggtgtacgagtacatgcacaacggcgtgttccgggaccacatctacggcagcgaggggaaggcgccgctgccgtggaagcagcggctggagatctgcatcggcgccgcccgggggctgcactacctgcacacgggcacggcgcaggggatcatccaccgcgacgtgaagaccaccaacatcctgctggacgacaacttcgtggccaaggtgtcggacttcgggctgtccaaggacgggcccgggatgaaccagctgcacgtgagcaccgccgtgaagggcagcttcgggtacctggacccggagtacttccggtgccagcagctgacggacaagtccgacgtgtactccttcggtgtggtgctgctggaggcgctgtgcgcgcggccccccatcgacccgcagctgccccgggagcaggtcagcctggcggagtggggcatgcagtggaagcgcaagggcctcatcgagaagatcatggaccccaagctcgccggcaccgtcaacccggagtcgctcgccaagttcgccgagaccgccgagaagtgcctcgccgagttcggcagcgaccgcatctccatgggcgacgtgctgtggaacctcgagtacgcgctgcagctgcaggacgccaacccgcccgagggcgcgcggcagggctgcgacggggacgaccaggacggcgccgcggcggcgggcggcggcggcgctgtcgtacccgcgggcggtgccgtgcccgacgcgtccaccgccgccgccggggagctcttccagcagctcgccgacatgcaggggaggtgaggtcgatcgccggtcgtacgtcaaaactctacacacactgcacactgtacgtggcatggcaatctgactgagctcgtctcgtgcacgtcgacacatcgatagatgcatgtgtactgcacccggtgaaaatttgaaacgatgaatattcact

SEQ ID NO: 16731 - DNA, 293 bp, Zea mays
  Clone ID: LIB3066-047-E7_FLI
attcaaagtctagtagaattcccttcgattcatcccgctgtgccggatgaatcgaagggaattcaaagtctagtagaattggaattcccttcgattcatccggcacagcgggctatggaccttcagcagcaagctaattaagttggcagcatgcaccgctaaccttatatactactgagacttccaaattctagtatatgtaatccttttgttcgggttcatgatcgaattccaaagagtggaaaacaagcaaaaggttaaatatacatgccatttttggaggcatttttttc

SEQ ID NO: 16732 - DNA, 1548 bp, Zea mays
  Clone ID: LIB3066-047-H12_FLI
actggactccctggtggtaaaaatgctgagccactgaaagttgatataattgggcatgacctacaaatgtgcactcttttccaggcacaaataaatggaaactggtattccacagtaatagagactctaccatcagctacttcatactcaccaaatggagaactgcaacccacattacagaaaatgcggattcttgttggacaaccactaaagcagcctccaaattacattagtggggatttcatgattcctgtgatggcaggtgctgattcaacacccgactttggatttgagtcattttttgaagataaagattgctgcaagggtttgagtggatttctaatatatgggacaagtgattttgtaactgtacgtaaagaggtccacgttaggactcggagagtgcgattgcttggattagagggggcaggcaaaacatccctgcttaaagcaatgttaggacaagttaaagaaagaaatagcactgttcttgaatgcatacatgtcgatttgcatggcaagggaatatcaaatggattgtgctacatagattcgacaacggtaaacttgcaggagctacctttggaggttgggcggttcaaagaagaactgttgttaggactccatgatatcagcaggaagactgaccttgttattgcggtgcataacctagcacaccgaattccacagtatcaacggtccaatacttctcagcctcagcctgctctttcacttctcttggatgaagctaaggcgctaagcattccttggattcttgcaataaccaacaaattctctgttagtgcgcatgagcagaacagattgatcagctcagctatggaagcatatcaagtttctcctgagatgacaaaagttgttaactcttccccatttctgatgccaagtgctagaaacagtttgcagcagatcagatcagctactgggaagttgaagaaggatccagcaaatagatctggttatcttcctgtaaactttggattgtcatcatttcagaggaaggacattgttatgcatgtggagggtgttagttcccttcgtcaacttgtacatcaagtagtcctcaacaatgaagaaacagcatttgaggaacttgctcgtgagagattgttgaaggagctagcgtcagagaaagcagcgtccctgcaagtgaagcagaagccccggaaaagagatggctctgttacagctgctgctgtaggtgcatctctgggcgcgggcctgggaattgtaatggctgtgataatgggggcagcatcagcccttcgaaagccgtgattcatgtattcttttgatccattatttacttcttgatttaaggatgtctgaacaaaagcactagtgtaggcatgaaaaatgaaattttagggcagaatagttagctgataccgtagtgccacattttggctgtgtatagaatgtaggttgagcctttttttttgctgatctgaattttgttgtgttactggagtatggcttggatatgttctacatcatgttttaatttagttataaatctgtatcatgtct

SEQ ID NO: 16733 - DNA, 2070 bp, Zea mays
  Clone ID: LIB3066-048-B3_FLI
ggcttgctgagctggagctgatggatctagggtttgggttgcggtgatggtcctgcagcgcaggaggagctcatggcggaagctccggcgagccctggcggcggcggcgggagccacgagagcgggagccccaggggaggcggaggcggtggcagcgtcagggagcaggacaggttcctgcccatcgccaacatcagtcgcatcatgaagaaggccatcccggctaacgggaagatcgccaaggacgctaaggagaccgtgcaggagtgcgtctccgagttcatctccttcatcactagcgaagcgagtgacaagtgccagagggagaagcggaagaccatcaatggcgacgatctgctgtgggccatggccacgctggggtttgaagactacattgaacccctcaaggtgtacctacagaagtacagagaggtgcgtacggtgtttgggaatttgggggtcaggtcgtgcaatcgccaatctgtcaccttgtcgatcgtacctctgattgaacttaaataatcctgttgggcatcagcacgctaataagtgataagtgagctatccacttcccttccaatgcttcggccacatatttatacttctttagttgaggacataaagagaccccctgttcctgtgtactactccagtaaatacagctagtaaacacattatttttataaggtgaaccaattcgaaagcacttttatccatttaatactgaacagtgatcgaaacctctatttgatgttcttacatgggattgagttagcactcgtgcttggtaagatattataactactcacagccctatgtggctgtgtctgttctatgatgaaaagtagatgtaatgcaaatggataagagcggaaagagctcctacagtagtgtaattagagcatgttgtagtgcaagcttttggttgtttacacaaaagatacatgaaaccattccactgtaggtcatatacaatcttgcttagggtcctgaacatatctggtgcacatggttcacatattaaattatcaccatccattctagatctaacgtctttagttgtccattctagatctaacatctttagttgctctgtataattgtatattttgcaaagaaccccttccaccactactctctaccacttctaccctgctcggagggtgttctctgcaaaaatatatagaacaaccatagatgttagatataggatgaatgatggtgatctaatatgtacaccatgtgcaccaaactcagtgcaccagatatattctcgagtttatttagctgtatttttctatacgctcttcgtattggttgaataatctgtctaatgaggtttctcttttggtcttatgtctggtggatgacatcacggattgcagatggagggtgatagcaagttaactgctaaatctagcgatggctcgattaaaaaggatgctcttggtcatgtgggagcaagtagctcagctgcagaagggatgggccaacagggagcatacaaccaaggaatgggttatatgcaacctcagtaccataacggggatatctcaaactaatgaaggtatggaccttttctgcgacagctgctcttacctgaggcgattttttttgtcttagttatttactaagacaccttgcggtgaccattaaagagtaaccaatcgccctcaataggtccgtttttatctgccagaactgatgaggtcgctcactaggagtaagtcgcttccctgggaacggttgtcggctagcaccgctcttgtatgtatattaagagtaacttaatgattggtcttttggctgcgatttgattatatgtatttgtatcgggaggcataaatattgtgtaatttgtgttaaagactagtgtaattgaactatgggaagagctgctttggttgtaaccatattttgatgcccgtatattaggcaaaaacagaaggctgtgggcgtgcacaacatatttactgttcaccgaaatacttgtattgatgtatttccgcatcaattatagtcatcgtcagcttgtaactacggcaatgaataaataaaaattcactgagt

SEQ ID NO: 16734 - DNA, 2293 bp, Zea mays
  Clone ID: LIB3066-048-B7_FLI
acccatcgtccgctcgcgtgtcctttgcgctcgcgaactccgtcgccggacacgagccagggacaccgagtgtggtgaggttgccccttcccttcccccacccccatcgtcgtcttggaccagctctgtacgtaccgtccgtcgatcgtcctttcccgtcccctctagcatcgatcgcagcctcctctgctactgccacgtctctgtgcctgccgagacaagcaagggggtcgtcggtcggggctaggttgttcccttaattcattctaggggcagatcagatcgaaagaaatcaaactaacgtagccatggaagaagctccacgtcattccatgtagttacttcttcagagcgcgcggtggcggccggctagaagctttgttcgttgcatttgaattcaccaccaaaggagaaggcgcctgttggcgttccaccaattccatcccatcgccacaaggtcgtcgatcacgcggatcgtcgcgactgaccggccggcctcctcagccgtccttgttgtgctacaagatcgaggcgacaggatccagccagccacgatgtcggcggccggcgccaccgccgtctgcacgagggacggcggcctcctcccgctgcgtccgcactgcgcgaggtcgtcctcctccttcgccgccgccgccgccgccatcgtgatctacctgacggcgccgggcctggccgtgttgccgatgcgggtgatggcgtccgactccatcgcctcggtgaagctccgcgtgcagacgtcccggggcgtgagggcgcgcaagcagaagctcgtcttcggcgggcgcgagctggcgcgcgacgacgggcgcatccgggactacggcgtggcggacggcaacgtggtgcacctggtcatccgcgtcccggacgtgcgcctcatcaccgtggagaccgtgcagggcggcaagttcaggttccgcgtggagcccgggcgcaccgtcgggtacgtgaagcagcagatcgccaaggaccaccccgcggcggcgcgccccggcgagcagcggctcgtgctcgagggcgaggacctcgacgaccgccacctcatccacgacgtgtgcagggccgacggcgccgtgatccacctgctggtgcggcgctccgtcgtcgcgcgcgacgccgggtccgggcggccgtcgccaccgccacggcgtgacgacgtcaggatcgagcccgtaggcggcgaccataaggcggcggtgcgtggcatggtcgacgcggcgctcgccgggatggagagcgggaacgcgcccatcatgtcgtcggagggcacggggggagcctacttcatgcgggacgcgacggggcagcggcacgtggccgtgttcaagccggcggacgaggagcccatggccgccaacaacccgcgcggcctccccgtgtcgtccaccggcgaaggcctgaagaaagggacgcgcgtcggggagggggcgctgagggaggtcgcggcctacatcctcgaccacccacccaggagcgggaccgcggatgatgggttcgccggtgtgccgccgaccgcgctcgtccggtgcacgcacggagccttcaggcagggcggagccggagccggagcgagggcgccggtgcccaagctggggtccatgcaggccttcgttagtaactgcggcagctgcgaggacatgggacccagcgcgttcccggtgcaggaggtccacaagatctgcgtgctggacatacggctcgccaacgccgatcgccacgccggaaacatactcgtccgcaagcacgacggcggcggaggcggaggcatgtcgctggttcccatcgaccatggatactgtctgccggagagcttcgaggactgcactttcgagtggctctactggcctcagtgccgggagcccttcagcgacgagacggtggagtacgtgcggtccctggacgcggaggaggacgtggctatgctgaggctccacgggtgggaggtgtcgcgcgagtgcgcgcgcacgctgcgcgtcgccaccatgctgctgaagaagggtgtggagaggggcctcaccgccttccacatcgggagcatcatgtgcagagagaccctgaccaaggagtccgccatcgaagagatcgtccgtgaggcggcggaacggggaggaggatgcgagactgtcttcttgcaggctgtctcggagatcatggaccgccgtctcgacgacatatcaaaggacatgttagcctctagatatgcacatggctgacaaaataacgatgtaatcaactcaatggctaatgcaaagaatggtgtactatttcctcc

SEQ ID NO: 16735 - DNA, 1557 bp, Zea mays
  Clone ID: LIB3066-048-D11_FLI
gctgcatcccggttatgggcggcgtgcttgagcttggcacaactgacacggtgccggaggccccggacttggtcagccgagcaaccgcggctttctgggagccgcagtgcccgacgtactcggaagagccgagctccagcccgtcagaagcaaacgagaccggcgaggccgcagcagacgacggcacgtttgcgttcgaggaactcgaccacaataatggcatggacatagaggcgatgaccgccgccgggggacacgggcaggaggaggagctaagagaagccgaggccctgccagacgatgcaagcctggagcacatcaccaaggagatcgaggagttctacagcctctgcgaggaaatggacctgcaggcgctaccgctaccactagaggacggctggaccgtggacgcgtccaatttcgaggtcccctgctcttccccgaacccagcgccgcccccggtggacagggctaccgctaacgtcgccgccgacgcctcaagggcacccgtctacggctctcgcgcgaccagtttcatggcttggacgaggtcctcgcggcagtcgtcgtgctccgacgaagcggcgccggcagtagtgccggccatcgaggagccgcagagattgctgaagaaagtggtggccggcggcggcggtgcttgggagagctgtggcggcgcgacgggagcagcacaggaaatgagtgccaccaagaaccacgtcatgtcggagcgaaagcgacgagagaagctcaacgagatgttcctcgtcctcaagtcactgcttccgtccattcacagggtgaacaaagcgtcgatcctcgccgaaaccatagcctacctcaaggagcttcagcgaagggtgcaagagctggagtccggtagggaacctgcgtcgcggccatccgaaacgacgacaaggctaataacaaggccctcccgtggcaatgagagtgtgaggaaggaagcctgcgcgggctccaagaggaagagcccagagctcggcagagacgacgtggagcgccccccggtcctcaccatggacgccggcaccagcaacgtcaccgtcaccgtctcggacaaggacgtgctcctggaggtgcagtgccggtgggaggagctcctgatgacgcgagtgttcgacgctatcaagggcctccatctggacgtcctctcggttcaggcttcagcgccagatggcttcatggggcttaagatacgagctcagtttgctggctccggtgccgtcgtgccctggatgatcagcgaggctcttcgcaaagctatagggaagcggtgaaggggcagctggaaatttggacatcgacgggcatggaaggcttcatgggatcgaagcaaagatgtatttcttgtttctttagataacagacatgaattggacctctatatcaacaattatattggcatgaatacttagactccagcccttaacacgtagaaactcaaaaaagaagaaaggaagctaaagactaagcgtaaggtatatttggaagtaaattgtttttgatagtttctaagcgatcccatggttttatagg

SEQ ID NO: 16736 - DNA, 972 bp, Zea mays
  Clone ID: LIB3066-048-E2_FLI
gcagcgccggccatgatcgagacaggatgacgtccccgccgacgccgctgccggcgcttgcgcgccaggccatgcagtcgccgtcgccgccgacgaaggtgggaccaccgccgctgccaccgccgccgctgccggccgtggacgcggccgtcatcatgggcgtgctcacggccgtgctgctggcgctcttcctcttcctcatctacgccaagcactgcaagcagcgcggccccggcgagcggcccggcggcctgggcctcggcttcgcgccctcctcgtgcgaccgctgccgctcggggctcagcagctccgcggtgggcgcgcttccggcggtccggttcggcgacggtgacgtcgacgtgggccgcgccaccgagtgcgcggtgtgcctgggcgccttcgacgccgccgagctgctccgcgtcctgcccgcctgtcgccacgccttccacgccgagtgcatcgacacctggctgctggcgcactccacgtgccccgtctgccgccgccgcgtcaccgggggccacgtggacgactccgagccggaggactcggcggcgacgcggcagcacggccggcgctcggcggacgacgcggaggtgcaagtggttgtgcaccgcgcgtgggaccagcggtagtccaccgaaggcttggtgggccgggccgcgtacctcgaggccgccaggcatcggagcgacgacctcggcgtcctggtggtcaccgccgacgggtcctgctaggtagctggatgcgctcgtctgctgctccgagatcgatggagcttctgaatcctaggtagctcacgctcgttcacctatcggtcccgtgcatgtacatagttggggacacacgtcgctaggacgatgagagagagagcatggtagggtgaagactggaagatgcttgtaaactgtaatttgatcttggctagagattgggccacctgaagtttaatattaaaaaaagcctgcc

SEQ ID NO: 16737 - DNA, 2148 bp, Zea mays
  Clone ID: LIB3066-048-F2_FLI
cagaccaaagctcctagtgatgtgattcctacctgcaatgggaggaactgtggagatacatggccaggtccaatgaacaagagcatgcccctcttgtggactgagaactggacagcacagtacagagtattcggtgacccaccatcccagcgttctgctgaggacattgcatttgccgtggcgcgcttcttctccgtgggcggtactatgacaaactactacatgtaccatggtggaacaaactttggaaggacatctgctgcctttgtgatgccaaaatactacgacgaggcacctctcgatgaattcggtctgtacaaggagcctaagtggggccatctgagggacctgcacctggcgctgaagctgtgcaagaaggccctgctctgggggaagacatcgacggagaagctgggcaagcagttcgaggcgagggtgttcgagatcccggagcagaaggtgtgcgtggcgttcctctccaaccacaacaccaaggacgacgtgacgctgacgttccggggccagtcctacttcgtgccgcgccactccatcagcatcctcgccgactgcaagaccgtcgtcttcggcacccagcacgtgaacgcgcagcacaaccagaggacgttccacttcgcggaccagacgacgcagaacaacgtgtggcagatgttcgacgaggagaaggtgcccaagtacaagcagtccaagatcaggctgcgcaaggccggcgatctctacaacctcaccaaggacaagaccgactacgtctggtacacctccagcttcaagttggaggcggacgacatgccgatccgccgcgacatcaagacggtgctcgaggtcaacagccacgggcacgccagcgtggcgtttgtgaacaccaaattcgtaggatgtgggcacgggaccaagatgaacaaggcgttcacgctcgagaagcccatggacctgaaaaagggcgtgaaccacgtcgccgtcttggcgtcgacgatgggaatgatggacagtggcgcttacctggagcaccgtctggccggcgtcgacagggtgcagatcaagggcctcaacgcgggcacgctggacctgacgaataacggctggggccacatcgtcggcctcgtcggcgagcagaagcagatctacaccgataagggcatgggcagcgtcacatggaagccagccgtgaacgacaggccgctcacctggtacaagaggcacttcgacatgccgtcgggagaggacccgatcgtgctggatatgagcacaatgggcaagggcttgatgttcgtcaacggccagggcatcggccgctactggatctcctacaagcacgccctcggccggccatcgcagcagctgtaccatattccacggtccttcttgcggcagaaggacaacgtgctggtgctgttcgaggaggagttcgggcggccggatgcgatcatgatcctgacggtgaagcgcgacaacatctgcactttcatctcggagaggaacccggcgcacatcaagtcgtgggagcgcaaggacagccagatcacggtgaccgccgccgacctcaagccccgggccacgctgacgtgctctcccaagaagctcatccagcaggtggtgttcgcgagctacggcaaccccatgggcatctgcggcaactacaccatcggcagctgccacacgccgcgcgccaaggagctggtggagaaggcctgcctcggcaagcgcatctgcacgctgcccgtgtccgccgacgtctacggcggcgacgtcaactgccctggcaccaccgccacgctcgccgtgcaggccaagtgctccaagaggtcgcccagagccgcgcagtaattcggtagtcgtcggcttcggcctcggcttgctacctcccgtcgtctttcattcttcattgctgatgctgctgctgtaccatgggaccattatctgaccggagacgtcgattcggatttcggacccatccatgcgtggctgggtggggaaacagattgtcggtactgtcactgtatgctttattatacacaaatatattatctataggaatagattgttaatttgatgagcaaacatatatgcagatatcaatttggtgattaataatggcaataatatatagcctagtggcctaactgacagatt

SEQ ID NO: 16738 - DNA, 1236 bp, Zea mays
  Clone ID: LIB3066-048-H6_FLI
ggcgtggccccgccgctgcccctgctggtgatgcccaggttcaggttcgccagcatgacccccgggggcgtgctgacggcgacggcgcggcgcgcttggatgccgcaggaggtggatgccgactgcgtgggatcttccgacgcgtggctcgtgggcgccaggcaggccggcggcgagtgcttcttggtgaacgccttctcccacgaggtgcaccacctgccacgcctgggcgattccgatctcagccattccgcctgctcgcttcgcaaagtggtgctgtctggttcacctcagtcgggacccgagtgcatcgtggccgctttcgcgttctgcaggtccaagcctgaactggcgctctggagacccgggatgaagtcatggtgtgtttggcagcactctttgattgccgggcacatcgacatggccttttatcaggggaggctgtacatgctctggaggttcacgccgtccctcttcgtctttgaaatcgcggaggatgggcatggggtcaagttctctcgcatgaaggattgcctgctcgagaagctcctcgctacccctcttgggtccagtcatgtattgagctgcaacatggtggagtggcacggaaggctgctgttaatcatccgatactatggcggttaccaagtcagacacagagttctgaaggtccaagtgttcgcgatcgacctgaacacgaagccaaatagcctcactgagatccacagcttcggtggcgactgcgtctttgttggttcaggcggctgcaagtcctttcctgctggtcagtaccgtggagttgaaggtgaccttatctactttgttcctgaccattacaaccctcacgacgcgttcgtgtacaacatgatggatggcaagacaaggttcatcgccgagccattgccttgcagcatttctgcaccagagcagagctccggtttcccggtgtggttgtttccgcccgagtgatctccgtcagtcacaaatctgatctgaccagctggtggatgctgcagtttgctgtcaaagataatgtgtgttgtcatgcattctgtatcgcaacccaatttgtatgagaaagttgcatctcgttcccagtttcctgcctgtatggtgagggattgcgcacttgcagaagaactgagatcagagtaagaacttggtctctgcaatacttacgtatgtgcctcaaatgcttgaaatgcaagtattttgttggcgcttctgatggtattt

SEQ ID NO: 16739 - DNA, 1509 bp, Zea mays
  Clone ID: LIB3066-049-B3_FLI
cttctctagatctcctcctcctcttcctctctatctctctctctccccaaccaacaacctgtcgattaagctagctctcagctcatcccggcctcagaaccaaccaattcctgttttagacggttaacaacctacaacaacagttagcatggccacaacacagagcaggggcggcggcggtgttgttcccgttgaggtggacgaggagcacggccgccgccggcagggaggagcagcgccgcaggaggaggaggaggaggaggcggccgagaagccggagctccggcgtggcccgtggaccgtggacgaggaccacaccctcgtcaactacatcgccgacaacggcgagggccgctggaactccctcgcccgcgccgccggtctgaagcgcacgggcaagagctgccggttgcggtggctcaactacctccggcccgacgtgaagcgcggcaacttcaccgccgacgagcagctgctcatcctcgacctccacacccgctggggcaaccggtggtcgaagatagcgcagcacctgccggggaggacggacaacgagatcaagaactactggaggacgcgggtgcagaagcacgccaagcagctcaactgcgacgccagcagcaagcgcttcaaggacgccatgcgctacctctggatgccgcacctcgtcgacgccaccgctaccaccgccgacgacgaataccaccaccaccaacaccaacaccaagccgctgcagcaggcaacatcgacggcctgctcgccggcggcgacgtcgacgacgtccagaacgctctggcggcgggcgtggccgctgctatggcgtcgtcgtcgtccgactcgctcgcgtcggagccgtactcgtacgaggacggtggcctcctcgcgagcgtgcgcgccggcgaggacatgcagctggtgatgagcggcggcggttgggcgatggcgcaggaggccaacgaccaagggctgtggccgtcgtcgtcagctggtcatggtctgtcgtcgtcggtgcaggccgctgccggtggtgccggccagtttgaggacccggagctcagtggatgggtgcaaggtttctccgacagcattattactggtaacctttgggccttggaggaaatttggaagatgcaatgagcaattttgcgttttccatacgcatccaacgaagagctagaggaaatgtatacgagtagtgatgttgacagtagatagaacatgaggttgtcatatataattctcgatctctccctctctctctctatctatctctctctctctctctctctctctctctatatatatatatatatatatatatatatatatatatatatatatatatatatatatatatatatatatatatactctaactccaaatatactatacggtatactaaagttgtatagcattttcatttttttcctcgtttttttatttcgcctcttaaggttcattcttatagaggttggaaaaggagggtattgtttatgcaagtcgaaac

SEQ ID NO: 16740 - DNA, 671 bp, Zea mays
  Clone ID: LIB3066-049-D8_FLI
gattggtaggcctcttgaaagtccgggtggtgaggggcatcaaccttgcctaccgcgacgcaagaggcagcgatccgtatgtcgtcctacgacttggcaagaagaaacttaagacgagcgtgaagaagagatctgtgaaccccatctggcacgaggagctaactctgaccgtcacagatcccagcctagctctgaagctggaggtgttcgacaaggacacgttcagcagggacgacccgatgggggacgcggagatcgacgtggcgccgctggtggaggcggcgaacgcgagcccggaggcgagcctgaggaacggcgccatcatcctgtcggtgcggccgagcgccacgaactgcctcgccgacgagagccacgtgtgctggaggaacggcaagttcgcgcaggacatgatcctccgcctcaggaacgtggagagcggggagattcagctgcagctgcagtgggtcagcatccctcctgctgcagccagcaggtgaaggaaggaagaacaggcgacacgaagcaatcgcattttcacctcttgtgaatgtcggattgtaaacttaatggtgtctgggtcagtcagggtagttcatgtgttgcctattaatgtacagttggggacagcatgaaatccaagccaagtcactcaagtgttgtaggatccttcc

SEQ ID NO: 16741 - DNA, 572 bp, Zea mays
  Clone ID: LIB3066-049-F3_FLI
acaaattcatatgaagtggttgataaagactagcatcagccttaaacccctgctggcacaacttcatcattgtggtcacgacttgactccagatgaatggaggatcatctataaccgccatgaccgtgaccttgttagttcgtctgcacaagatgatattgatgatgaatgggactttgaaaatgctcatgagattgtccttgaagcacctaacaatgttaatgactggtaccctatagattttctcgtatttcatccttacaaggagattgtcttcttttccttatcatggaagacaatatcttataatttgaataccacaaaggttcgacagctgggctgcgcagctcatataccggtgggcataaaaacttgttttccatacacaccctgctacctgacgatggagaaattaactaacagttgatcgtcctccgcccaccacttttgatgatgattagtgcttataatgacttacttaactagagagtgcacatctttcttccactttacattatatttgtcagattatctttaattttggcaatacatattttacttccgtttttttt

SEQ ID NO: 16742 - DNA, 307 bp, Zea mays
  Clone ID: LIB3066-049-G8_FLI
ccaaacaaaaaaaacaaaggggctcaagacttcatcatgcatgcatgcataacacctcgagtaggagttgaagtacatgatcattgatggtatatatatagaggaagcatgtctatctaataagtccctcatccaaaattgttctttatgtcatgtatatgtacgtgcatatatatatatataaaaatacgtctccttttattaagtgtctttcgctttcgtgccgaactctgtaacttgagatatggatcaaatagattgtaatcactgcatatctactatgggtctatggcttcccgttccagct

SEQ ID NO: 16743 - DNA, 758 bp, Zea mays
  Clone ID: LIB3066-050-F1_FLI
ctaccctcgtcgtcgtctcactcaccccgccttcacgcctccctcaccaaataaggtcccgcccttttccgacattcacaggggggacaggaaatcagcggccatggcctcgattccggcgacgaccttcgccgtcatcttatccgtcctcttctgtgccgcggctggcaccgccgtcgacaacgacctccccgactacgtcatccagggccgcgtctactgcgacacctgccgcgccgggttcgtgaccaatgtcaccgagtacatcgcgggcgccaaggtgaggctggagtgcaagcacttcggcaccggcaagctcgagcgctccatcgacggggtgaccgacgcgaacggcacgtacacgatcgagctcaaggacagccacgaggaggacatctgcgaggtggtcttggtggagagcccgcgcaaggactgcgaccaggtgcaggcggacagggaccgcgccggcgtcctgctcaccaggaacgtcggcatcagcgacaacctgcgccccgccaacccgctcggctacttcaaggacgtgccgctgcccatctgcgcctcgctgctcaagcagttggactcggacgacgacgacgatcagtaatagcacatcgtcgacgaccgcagactggctggcactaaaccacaaatcctcttcacctggattacaaatatgtaactgagaaaggaaaggaaaacaaaaatgtaactgcgtggctgtaccaaattctgagtgctggattcttgctattgtc

SEQ ID NO: 16744 - DNA, 512 bp, Zea mays
  Clone ID: LIB3066-050-H10_FLI
ccacagtatggctgtaggtaatcctgcaaaggtagttggttatacagagaaagaagatccttctttaactatgaaacatgatgcaaggagagattattttgagcatgctgccatcagattgagatgattgatacacctaatgacgagtcttctttctattcgtctgtggaatactgtggagtaaaaaaagttccaaatcgccttattggcaagaagttttgtggagttaaaaaaaggtttcgtcgtcttactcgcaggaaaccttgtgaagttaaaaaaaaaatgtttgacgaaacgcatacggatgccattccggacatttcgtcacaggcacaaggctggatagtcgatgagctctgtgtttccctttctgcccagacaaccaaatgaagatggaaaagggtcacccagggctccaaaatctagagtgtagacaagcatgtccttaatgcgccttaaattggtctggatggcacttttttgtgataaactatctatctaaaccattgact

SEQ ID NO: 16745 - DNA, 3387 bp, Zea mays
  Clone ID: LIB3066-050-H9_FLI
gtccgttgagtcggcggtcgattccaaagacagcagcggaggcggaggcatccaagtcctctccgctcactttcctgctcgacgcggtcttggccaagctcggttgcgtgctggaccggctacgcgaaaacgacagcgaggaatctgccatgtaccggggcaccatcaggcgccatgtggacttggagactctgcggcgtcggctgaacgcgtcggccggctcgcgcgccgacgatgacagccactcctctgcgcacgagctctatcgcgacctgctgctgctctgcaccaacatcgtggtcttcttcccgggtggcacccccgagaactccgcggccgtcgaggcctgcgcgctcgtcaccgggcacgcatcggcggtgctccacaagccgaagcaggagcacgtggctgtggctgtggctgcgccggcaccggcaagcgccgacatcgttggttcgctgatcgagaaggggaagccgctgattgtgtgccgcaagcggagctccatcgcgaaggccgcagcgtctgcgagaaaggaggagagcacgatgaagggtgagacggcggaagagacggaggacgagaagatatccgtggctgcggcgaccaaggacaagacgtggggggtgaggacgaagaagagccgcggtggcaagaactccgcgggtccaggccgaaacctagcggacggtgctgacgggccgaggaagggcgccggtgctggcactgacgggctcgccaagaagcggaacgccgtagacttcctaaagcgcctgaaccagtcgccccccaggaagcggggttcggggtcccacctgggtacgacgcgaaagcggccggcggcgatggacgagcagacgactaaacgcaagagaggaaccggacggaaggagggcaccggacgcggtggatccaggaggggcggcaaggctgccggggcgaagagaggcgtcgggcggccgcgcgggggaccggaggcgaccttccgggaggacgtcggtcacgccgccgccgagacgtacctcgtcacgggacttgccttcaccctgctcggatacctcggggctgattatcggtggatataaggatatcacatcttattgcactccgtgtatatgctgttttactcatgcccggtttcataaaaggtcaggttattagaagtgtagtactgtagtctatggagaacaaccaagaaatgggtcagcaaagtttaaagaaagtcacgtgctatatagcgtcctctagcacttataacagtagatccagagaaattatgtgtgttggatttgtacatgcccagagataacagcaaatcaagtccgttgtggcatttgtaactggtggagcttggatcatcggaaatttccctcgaggaacaataagtgacgtggtcagtgatggtctgaggcaatatcattcatttgtaacaatgttgttagctttgtaggggatcctaataaaatttacttgatgggtcaatcagcaggagcacatattgtggcctgggtgctcttagagcaagcagttaaagaatctaagggagagagtacctattgtaatgtggctcaaataaaagtatatttttgtttatctggaggttattatgatcagtgctgaatattgcattgagggacagccgacaaaattattcaggaagtgtgtcttcagttctgttcaacacttcaccatcaaactctctgtccaggacgccagttgtctgttgaggcctgttatcaacttatcatctttgtggtgttgttggtgcctgggttgattaggtgtcctctggtatttaaatttacttctctccaggacccttcgttgaatattggcaataacagctgctatgtcaactgttgtgttcacttgaggttcaactacagctctgatctcatcttttaagccacatacgcagttacgtacttggaagcaaagaacaaatcatcaaggtgacagcagtgcatagtgatatcaaactgtaaggactgaaactgagttgtgtagtccttcacaatgccagtctgccttggagccaataagtctgtgacagcagttctgtaatcatccttgccaaatttggcctcaatagcttcaaagagttgcttccatgatttgaaggttatttataagcttgagactatttggtagcattgccctgcaaatgcatagtggctgcttgaatccacagattttcagggatgctgaagagagcgaagtaattatgttacttgtccaaccagattcagggatcagtgccatctaatataggaaattgcattttggtaaagcatgatgggggcaaggtttctcttttgcatgtctcatgagttggacttggagtgctcggccttgtgactgtttttgctggtggcaaacacattgatgaagggtggttcttcctcatatatcagggacgcagaatcactccctgaacttctcttcatctttaaagttgcgcagtgccagatgggcgacggcttggccattggtctgaacttgcttggagatgaactgttgttcccctcaacatctgtccatcttaaggttgttccgatccatttgggttttcagctcctgttgaatcaatccaatgacattgactctgacgaagagcgtgtcgaaattctccatgacttgtcatcctccgtgctcttggacatggcggtgtccaacaagatcttgatctgcatccaaggttttaggtggagccgtggtgactgatgcaagaaacctctgcaacccataccctatttcgtgcttagcactgtcttcgcctgccgactgcctgccatgtcgcgtcggtgtcgccggacggcatgggcctgccgttctgtagctccgtggcaccctccagtacccatcgcagtgagaccatgtttggtcttgttgtgcctcctcattctgcctgtcagctgtcaccgtccttccagaattcccaccgtgctgcatgttaggtggccggcattggttgggacggccgtgctgtgccggcagccgtatcggcatgcgatgcgactatgcgaggaaaggaaattctccggcccaaaggattctgctggccgtatggctggctgcatcacgtcacatctgcacttctaccatgataggttatttcctcacctaattgtaaatacgtgtacggtgctagagagtcaaaacggtcgttgatgacacgtcatgcccatcaccagtatttatacgcaggtgtacttacccgttgatttgattttagtagagatgaatttctaggtataatttgtgtgtgtacaatgatctgtcgctgcgggagacgcagattgggatgtatcatgtacacggctaaatttgggccgttcgatcgatcgtcattgatgagtggaaggacaaggactgttggtgtactgt

SEQ ID NO: 16746 - DNA, 983 bp, Zea mays
  Clone ID: LIB3066-051-D10_FLI
ccggcctctacgacgagatcgtcatggtccccaaggacaaggtcaacatcttcatgtacggcgacgggcctaagcaaagccgcgtgaccggccgcaagagcttcgccgacggcatcaccaccatgaagaccgccaccttctccgtcgaggcgtccgggttcatctgcaagaacatggggttccacaacacggccggcgcggagcggcaccaggcggtggcgctccgggtgcagggggacctcgcggcgttctacaactgccggttcgacgcgttccaggacacgctgtacgtgcacgcgcggcggcagttcttccgcaactgcgtggtctccggcaccatcgacttcatcttcggcaactcggcggcggtgttccagaactgcctcatcatcacgcggcggcccatggacaaccagcagaactcggtgacggcgcacgggcgcaccgaccccaacatgaagtccgggctcgtcatccagaactgccgcctggtgcccgaccagaagctgttcccggaccgcttcaagatcccctcgtacctgggccgcccctggaaggagttctcgcgcctcgtcatcatggagagcaccatcgccgacttcgtcaagccagaggggtacatgccctggaacggcgacttcgccctcaagacgctctactacgccgagtacaacaaccgcgggcccggcgccggcaccagcaagagggtcaactggcccggcttccacgtcatcggacggaaggaggccgagccgttcaccgccgggccgttcatcgacggcgccatgtggctcaagtacaccggcgcgccgcacatacttggtttcaagttctaaaggccgcatggcatggcatacatcacatcatatatagtgaggtggcacacgcgcgcgagcgcacacacatgtttgtgtgtatgtacaatgactgagacttgcaaacagaggggtcgcagaacaggagggctgacattgatttgttgc

SEQ ID NO: 16747 - DNA, 1344 bp, Zea mays
  Clone ID: LIB3066-051-D9_FLI
cgcacattccgaagtggaggcattaatgtagatcatatcgctttcgatccaaaggagaccaaccgctttgttgctaccgattgcttggatggcaaagtgatgatttggagcctcgactctcccgaacctgaatatcatctgcctaagacggattttaagggtatcatgttcctggaattcttcacacgttatggtcggcagtgtttgattattgctcatgaagatcataaagcacacgtatgggactttcggttgcgcaaatttgtttctgagaagcgaaaattattatctcgtgaagcttctgtcttcttacgtcctaatgtatcgttactacttacaccttcatctaaaggcacttgccgtttctgggacgctaagaaattcagtttttatggagtcattgacaattctgctggaggagatgtgctgggtatcgcttgtttgatggggtctaaaacaaggtttgtgattggacaatattatgcattaacaatattgcatcttgataatgcattatatcaaaaggacccaaggcaatctattgagccacaattatgtgctcatacaaggcaaggagacacaagttctgaggagaaatatggggaggagatggtttggcatcatggcccaaacttcgattggcagcatgaaccatttgatgccgcaatcatgcgagctagtggtggcgagaacgcacatgaacagtacacgcttttcgacataatgattgactcaacagaggtgagagctcaaaggatgagttcttcattctgtagcatgagcctttcatctcatcagcccaaggagcaggagttggaggtggctaggctgcgcgaggagctgagacagcgtgacgagcatcataaagtgcaacaagactacatgttctctttcatacagcagcaacacgcgattattcaagaattatcccagcaacatggcttggatgtagtcctcccagagtttcgaccgccactgccaccgatgctgccacaattgagtccttttctatctacaatatctcaagctacgactgatgcaagtgggacggaacctactggaatggcttttgtggagtccttcgcctaccctcctcctgcaacagatagcaaccacaactctaataatccatgtagcgattttggtgcctgagtaacattgcatgtttctttgcatttaaacttgtgctttttccaattatgtatgatggtcaatatgaattgaattgaatctctatagtttgttgaacgaaagacttgaatatgtgagatgtgattctggctttgaaaggatatgtgagctatgacgagcattgatgaatttaaagtattatgtatatgatgt

SEQ ID NO: 16748 - DNA, 599 bp, Zea mays
  Clone ID: LIB3066-051-F6_FLI
gagctgcaatggaaagtgcatctatctgagggaccacatgtgggtgaaaatgagaaccggttatctggcggtggtctaggctatcctttctatgtcactgtccttcaaggtgtctaagtaattatcaggattcaagaagtaccttcttgagcgtcaatatagaccagtgcaaaactcaggaactacacccaattgcaacgggccgatgataataggtgccagccagtccagtttgtgcaaagatctgccccggtagttccctgactgaatatacttggatacgctcatggttctgcttcggtaccgatatatttacacgtcattttgaaggatgacttctggtgagtacatgtatacaattgtcgctgggaacaaaaactaacggtaattgctggtggatttttggcagacagaatataccgatagaagttttgcttgtctaattgttgatggtggctagtaggagcatatactattcctgtacatcctgtttaacttgtcgctgctagacgatttcgcaaatgtagtatgtagtggtagatggatccgataaattttctgtaattttgacgaggtaatcaggcaattgtctcgaaaac

SEQ ID NO: 16749 - DNA, 516 bp, Zea mays
  Clone ID: LIB3066-051-H12_FLI
aaccagaaagcaaacgcaaacaagaagcaaaccagcaatggcccgcgcctgcgtcttcctcgtcgtgctcctcctagccgccgtcgccatggcgccgttcgcgggcgcggcgcgcatcgacgtcgtcgagggcaggtccatggcgtccgcggacgcaccggaggccgccgccgacgctcccgctcctgctcctggccccgactcctcctcgaccccgtcgccggcaccctccagcagcagctcttccgactagccgcccggcagagatatctacggcgtccgatcagtctttggcgccacctataacctatcggatcctgcaaagctatatatgattctatggtataatgtgtggttgcggcaaacgcgcggaaataatgtgcttgcgtgattgtttttctctctctttttttgtttaataatgtaaaacaggcatacggcgatgttttaacatgtaaactgagatgttgttactctttctcaaagcgagtatgtagccccagtttccatcatggc

SEQ ID NO: 16750 - DNA, 1015 bp, Zea mays
  Clone ID: LIB3066-052-B10_FLI
cctgccgctcctgcggcggttcgacgtgctcggggtgaggaacaagatcagggacgttgtcggcaggagggacgccttcctgcagcggctcatcgacgcggagcggcggaggctggacggcgacggcgacggcgacgagaagaagagcatgatcgccgtgatgctctcgctgcagaagtcggagccggacgtgtacacggacaccatgatcatggcactgtgcgggaacttgtttacagccggaacggagacgacgtcgtccacgatagaatgggccatgtcgctgctgctgaaccacccggaggcgctgaagaaggccgaggcagagatcgaggcggccgtgggcgcgtcccgcctcatcaccatggacgacgtgcccgggctgggctacctgcagtgcgtcatcaacgagacgctgcgcctgtacccggtggccccgctgctgctgccgcacgagtcggcggcggactgcacggtcggcggctacgacgtgccccgcggcacgctgctgttcgtcaacgcgtacgccatccacagggacccggcggcgtgggaggagccggacgagttcaggccggagcggttccgcgacggcaaggccgagggccggctgatgctgccgttcgggatgggacggcgcaggtgccccggggagacgctcgctctgcggaccgccggcctcgtgctcgccacgctcatccagtgcttccactgggacaggatcgatgacgctgagatcgacatgaccgagagcggcgggctcaccatgccccgggccgtcccgttggaggccacctgcaagcctcgcgaagccatgcgtcatgttcttcagcagctctgattggtctatgtgctaaacattctcatccctattctctcttgtgtgtgtggcagtacgaacagcacgtgctagctaaataagctgcgagcaatagctatccgcgtaacagtatggttcgtctaagttgttatctttcaaaagttatctagtacaataaacaaattgttcgtgtct

SEQ ID NO: 16751 - DNA, 1143 bp, Zea mays
  Clone ID: LIB3066-052-D2_FLI
ctcttatccacccgcgcgcccaccgccgcgcgcagcaccgcgccgcccacccgcggccaccccagcgccccaaatgccgctccaaccctagcctctcgccatgcctttcgatctcgggcggccatgggaaactgatgccgctcgccggtcgccgtcgcgcgggaggacgtcagctcctcgcacttccccgcatccacctcgtcatggagctctgcgagggcggcgagttcttcgaccgcatcgtcgcgcgggggcactacaccgagcgcgccgccaccaatgtcactcgcaccatcgtcgaggtcgtccatttctgccatcggcacgacgtcatccaccgtgacctcaagccggagaacttccttttcgccaataagaaggagaactcgccgccgcgcagcgcccctctcgatatgccgccctgcttcctcctctcctcttgatccatctgccatcccatccccgctctgccagttgcccctcgcttcctcttcggctcttcatccccctcgatccgtcgcccgtgcttcctcctcactatgtcccgtcccctctccatcttgtcgccctgcctccccgcgtctgcgtctgcgcctgccttcggcgtccagagccatatccgcgttggcctccacctacgcacccgcctctagccataagagctcctcccgtgtctgcctttagagatctgctacctccacatcggtgtctagggctcctccattgcctagatctactagagaggcagatgaaagtatttccgtctcatcaactgtgctgaagaggaggaaaacacctcacttgttgaagggagcagtggagacccggaggaagatcatttggagtctgcagctactaatcttcagcctggcagtgacacttgcattgcaagggaagagttgccagatcagaaggatctggtgaaactgcaagctgttatccgtggacatctagaggcggcccatgcctcacggccaaagcagatcagttaggaggataaaagaagacactaccttggcacatgcctgttgtcacaatggacaaaagaagattagtgttgtgtgagatttttttcattcctttgatctattgcatgctatttgtaccctaatcgacaaaatagatgagactcaattcaggagc

SEQ ID NO: 16752 - DNA, 1197 bp, Zea mays
  Clone ID: LIB3066-052-G6_FLI
tgctccggcccgacgcggcgcagggccggtcgcagttccagcaggaggtggaggtgctgagctgcatccggcaccccaacatggtgctcctcctcggcgcgtgcccggagtacggctgcctcgtgtacgagtacatggccagcggcagcctggacgactgcctgttccgcgctccggcggcgccggcgggcccgtcatcccgtggcagcaccggttccgcatctgcgccgagatcgcgacggggctgctgttcctgcaccagaccaagcccgagccgctggtgcaccgggacctcaagccggggaacatcctgctggaccgcaactacgtgagcaagatcagcgacgtcgggctggcgcggctcgtgccgccgtccgtcgccgacaccgtgacgcagtaccggatgacgtccaccgcggggaccttctgctacatcgacccggagtaccagcagacgggcatgctcggcgtcaagtccgacgtctactccttcggcgtcatgctgctgcagatcatcacggcgaagccgcccatggggctgtcgcaccacgtcggccgcgccctggagcgcggcgagctgcaggacatgctggaccccgccgtgcccgactggcccctggaggaggcgcagtgcctcgccgaaatggcgctccggtgctgcgagctgcgccgcaaggaccggccggacctcggcgccgtcgtgctcccggagctcaaccggctgcgcgcgctcggcgaggacaacatgcagtactgcggcgccatcatcagggggggcggcggcggcggcggcggcatgcacagctcgtcgccgttccacagcaacatctcacggtcacacgccgagatgatgatcgattcccagtacccaagatcagtgttcagctcaagagcgggcgattcgcccatgccgccgagaaggtcgaacgcttgacgggcatgaaatggacttttatttccagcatcggtgacggggtggtggtgatgtcttgtgcaggtgcataagctgcctagcatgagggggagctagagcaggtgttgtttctagcatgagtttggtgcagaattttattacacgaggtacgagctatgtattagtaaatacagaaccgtatggctctgccattgccgtgtacctgttcttgtaacctgtggagcttcctcttttgtgtaatggatttttttttcagttttgtg

SEQ ID NO: 16753 - DNA, 880 bp, Zea mays
  Clone ID: LIB3066-053-A4_FLI
gagacagtgtacacatacatactctgctcgtctgctgaggatcgatcgcttggtctcgttgttgcgtagataggtactagaggactatagctactagtaggactaggagaggatccgagggagagagagtaaggccaagatgatgcgcgcgaaccgggagcagagagtggccttctcgtcgacgaaggaggccgccgcggtgcccaaggaggaggtgtgggaggtccggcccggcgggatgctggtgcagaagcggagccccgacgcggacccaccccccggcggcgcgcccgtgcccaccatccgcctcaaggtcaagttcaacggcgtctaccacgagatctacatcaactcccaggcatccttcggcgagctcaagaagctgctgtcggagaagacgggcctgcacccggacgaccagaaggtggtgtacaaggacaaggagagggactccaaggcgttcctggacatggccggcgtcaaggaccgctccaagatggtcatgctcgaggaccccgccgccaaggccaagcgcctcctcgaggagcgccggaccggcaaggccgagcgcgccgccaaggccatcgcccgcgccgccctcgacgtcgacaagctcgcaaccaaggtgtcggcgctggagacgatcgtgagcaagggcggcaaggtcgtggacgcggacgtggtgacgctgaccgaggcgctgatgaacgagctggtgaagctggactccgtcgccgccgaaggggaggtgaaggcggcgcggcgggcgcaggagaagcgggtgcagaagtacgtggagacgctggacgccatccgcgccaagaacaaggcggcggcggcggcggcgccggccaaggcccgcagcggcagcaacaaggcc

SEQ ID NO: 16754 - DNA, 1145 bp, Zea mays
  Clone ID: LIB3066-053-E4_FLI
ctcggcgccaggtaccacgccgccgacaacgaggacctgccggagtccgtcgactggagggccaagggcgccgtcgccgaggtcaaggaccagggcagctgcgggagctgttgggctttctcaacaatagcagctgtggaaggcatcaaccagattgttacaggcgacttgatctccttatctgagcaagagcttgtcgactgtgatacttcgtacaatcaggggtgcaatggaggtctgatggactatgcgtttgagttcatcatcaacaatggcggaatcgacaccgagaaggattacccttacaagggcacggacggacggtgtgatgtcaacaggaaaaacgcgaaggttgtcactattgacagctacgaagatataccagcgaacgatgagaagagtctgcagaaggcagttgcaaaccagcctgtcagtgtcgcaattgaggctgctggcacagcatttcagctctacagctcgggtatcttcactggaagctgtggaacagcgctggaccatggtgtcacggccgtcggctacggcacagagaacggcaaggactactggatcgtgaagaactcatggggcagcagctggggcgagtccgggtacgtgaggatggagcgcaacatcaaggcgtccagcggcaagtgcggtatcgcggttgagccgtcatacccgttgaaggaggcgccaacccgccgaaccctggccccagcccgccgtccccgaccccggcgcccgccgtgtgcgacaactactactcgtgccctgacagcaccacctgctgctgtatctacgagtacggtaagtactgcttcgcctggggctgctgcccgctcgagggcgccacctgctgcgacgatcactacagctgctgcccccatgactaccccatctgcaacgtcaggcagggaacctgcctcatgggcaaggacagcccactgtcactgtcagtgaaggctacgaagcgaaccctggccaagccgcactgggctttctccggcaacacagctgacggaatgaagagcagcgcatgagaaaacgcagcgtggcattaggtcgtcagcagcctgggtgatcgattagagcccctgcgtgggaaatggtcacctggcccccctgattgacgacggaagcatggc

SEQ ID NO: 16755 - DNA, 397 bp, Zea mays
  Clone ID: LIB3066-054-A7_FLI
agatctgccgcacgctctccaacatgatcccttacgaacatgtccattgatttgtttgtttctttttcccgacccccctactacgttcagtaacgtggtcgtcgtcgtcgttaagtgcggcggcctaaaacatatgtaatttgatgctggtcgggtgtgtctgtcagtcgatagactggacgcatgccgacttcatgcggacctagcgcgtgtccttcttttcggtgttgcctcatgcggcgtggcacatgtcttgagaccgtgggatggaacggctcgttgagaggcacgcgtgtagggcagcctatatatatgattctataacatgctaaatttgtgcttctttattactatatatatagccattcatcaatcaattcaactagaaacattcctc

SEQ ID NO: 16756 - DNA, 860 bp, Zea mays
  Clone ID: LIB3066-054-B10_FLI
gttcttgcttctgcttactcgcatgagttgccacgatatggtcttgaagttggtctgaccaactatgcagctgcctactgcactggccttctgttggctcgccgtgtgctcaagacccgtggtttagataaggaatatgagggcaatgttgaggccactggtgaggatttctctgttgagccagctgatgagaggaggcctttccgtgctctcttggatgttggccttattaggactacaactgggaaccgtgtctttggtgccctcaagggagctttggatggtggcctggatattcctcacagcgagaagaggtttgctggtttcaagaaggatgacaagcagctggatgctgatatccatcgcaagtacatctatggtggccatgttgctgactacatgaggaacctcgctgaagaggagccagagaagtaccagtctcacttcagtgagtacattaagaagggaattgaggctgatgacatggaagctctgtacaagaaggtccatgctgccatccgtgctgatccttctgtggtcaagtcaaccaagcagccaccaaaggagcacaagaggtacaaccccaagaaactgacatacgagcagaggaaggccagtctcattgaaaggctcaaccaactcaactcctcgggcggcgcagatgacgacgatgaggatgacgagtaaagtttggtcccatcgaagtagtgctatcttatgcggcgatcagtatttgtgctatggcatttatcgctacctgtagtcgtgcaacatgcatttttgtttaagtttgtcgatgcgaacaaagttgtttctgttagtttggagctggagttctgaatatttacttttataatatt

SEQ ID NO: 16757 - DNA, 843 bp, Zea mays
  Clone ID: LIB3066-054-E2_FLI
ctagaactagtctatcaccctcgaggtggagtcgtctgacaccattgacaacgtcaaggagggcatcccaccggaccagcagcgcctcatcttcgccggcaagcagctggaggatggccgcaccctggcggactacaacatccagaaggagagcaccctccacctggtgctccgcctcaggggtggcatgcagatttttgtgaagacattgactggcaagaccatcaccttggaggtggagagctctgacaccattgacaatgtgaaggccaagatccaggacaaggagggcattcccccagaccagcagcgtctgatctttgctggcaagcagctggaggatggtcgcaccctcgcggactacaacatccagaaggagagtacccttcaccttgttctccgcctcaggggtggtatgcagatctttgtgaagaccctgactggaaaaaccataaccctggaggttgagagctcggacaccatcgacaatgtgaaggcgaagatccaggacaaggagggcatccccccggaccagcagcgtctgatcttcgccggcaaacagctggaggatggccgcaccttagcagactacaacatccaaaaggagagcaccctccaccttgtgctccgtctccgtggtggtcagtaagtcatgggtcgtttaagctgccgatgtgcctgcgtcgtctggtgccctctccatatggaggttgtcaaagtatctgctgttcgtgtcatgagtcgtgtcagtgttggtttaataatggaccggttgtgttgtgtgtgcgtactacccagaactatgacaaatcatgaataagtttgttgtttgaaattgaagcc

SEQ ID NO: 16758 - DNA, 1377 bp, Zea mays
  Clone ID: LIB3066-054-F10_FLI
atcgaggccccgtacagatggttcttccagtgaaggatctcctagccccggtaccagtgaaggatctcctagccccggtaccagcgctccgaacgaagagagcaaccctgcgactgcgagcaagaggccgtatctcgagaggaactactccgtgctggaaccttcagaagggagccagctcgccgacgacgtggaaggggaaagctctctcgagaacgtgaagaaacagcttgagatcaacaagaaggcgatggccgctctttacaaggagcttgaggaagaacggagcgcttcggcggtcgcggctagccagacgatggccatgatcaataggctgcaggaggagaaggctgcaatgcagatggaggctctgcaatacctgaggatgatggaacagcaggctgaccacgaccacctggcgattcaggacctgcacgatttgcttacggagagggagaaagagttgcttgacttggacgctgagctcgcgcactgcaggaggctcctgcagaacgatccgttcaacggcgacggacgtaatggcgctgacacagtgaacacaacgattgacggcagaaatccggcggcgatcgaatgcttggatggcgcggaccttgtggggagcgccatgtcgcttttcgaagacgacaaggcgttcattttggagtccttgagcagactggaggaaaaccttggcattttcacaaacaggcttgcttccggtgacgccagaggtagtcaagaagacgtgctgtttgaagagcatacaacagctgatgggtccccttccaacggtgacaagttgagcggcgtagcgaatcttaagactgggatctctctgctcaatataagactgagggcacttgaagatgaccaggagtttctcaagcaggtgttgagttccctccaatgccgtagtgatggactgcagtgtatacaggagataagcggccatctagcagagttgcgaagagttgtgactcgctaaggaaaatggttttgccccgagtccacactgttaggtcatcgtgaggtcttctcatgcagcagactaacgagggtgcttccagtgagtgcccacaatcccatctatctgaagatggatgccgttgcaggaaatacccatgctcttcacttctgatcgggctcaacagcagaccaaaattttccatctcttgcacttgagttcctcatcgacatttgcagactactgaagcagatggaactctaaaagaagtgctgaaagagacgaaccatctcttgtatgtgatatggtggttgttgagaaagtaggagcaagcctgtaactgtagatgtaaccaaccttgatggttcctgccaaggagttaaattgtacatgatatatgcagttgacgt

SEQ ID NO: 16759 - DNA, 640 bp, Zea mays
  Clone ID: LIB3066-054-G7_FLI
ctcgtttcgttgcggcggcctcttcctcctcgtcctcgtgccccctcgcccgcctaatctctcgccgcggccttgccggtgccgcagacggccatggacctgcgaaggtgcccttgtggaaagatccgttgagcccgagcaagtggaaggaagagcactttgttctagcaagcctctctatgtggggggctcttttttatggtggtttcaagttttttggtggaaagaaggaagacaagattgaggtggcatcaggacagacataggtggctgggatgggagttcttgcctatttctgtggccaggcaacaatgttaaataaaaggaatgtgttatattgtgctttcaagatgataaattgtggcaaccaggttttgattatgtaggcaatattttgacaagctactcttatccagcatgaatgacttcatgttagtgcgattgagtagatgttttacttctgttgccatcaccagttcaacgctgtactttcaattgattcggtcccgtgttttctagtttgcgttgttacagatgaatttgacttaagttttattgataattctatttgtattgcttgcaattagaaattgcaatgtgggtttttggatgtatctacgtgccaccataatttggtgtt

SEQ ID NO: 16760 - DNA, 1383 bp, Zea mays
  Clone ID: LIB3066-055-A3_FLI
attatttccggtttaggcttggattgtttgtggtagcctcggcctttggagttcattcagatcggtgattcctgcgtcggccaacagttttgaggtggtaatggcggaccaggctaaccaacccactgtccttcataagctaggtggccagttccacctgagctccagcttctctgaaggtgtacgggcccgtaacatctgcctttctttctcatcttatgaaaggagatttgccacgaggaactacatgacccagagcctttggggcccttcaatgtctgttagcggtggcatcaatgttccagtgatgccgactccgctttttgccaatgctccagccgagaaaggtggcaaaaacttcatgattgatttcatgatgggcggtgtttcagctgctgtttcgaagactgcagctgctcccattgaacgagtgaagctgcttattcagaatcaggatgagatgatcaagtctggtaggctatcagagccgtacaagggtattgctgattgcttcaaacgtaccatcaaggatgagggtttctcttccttgtggaggggtaacactgctaatgttattcgttacttccctactcaggctttgaactttgcgtttaaggactacttcaagaggctgttcaacttcaagaaggacagggatggttactggaagtggtttgctggcaacctggcctctggtggtgctgctggtgcttcctctttgttttttgtgtactccctggattatgcgaggacaaggttggccaatgatgccaaggctgccaagggaggaggcgatagacaattcaatggtcttgtggatgtctaccgcaagacactcaaatctgatggtattgctaggctttaccgtggatttaacatatcttgtgttggaattattgtttatcgtggcctgtatttcggactttacgattctatcaagccagttgtcctcactggcagcctccaggacaacttctttgccagttttgctctgggttggctgatcaccaacggtgctggtcttgcatcttaccccattgatactgtccgcagaaggatgatgatgacttctggtgaggctgtcaagtacaagagctccttggacgcattccagcagatccttaagaaggaaggccccaagtccctgttcaagggtgctggtgctaacattcttcgtgccattgctggcgctggtgtgctttctggctacgaccagctccagatcctcttcttcggaaagaagtacggctccggcggtgcttaaatggagaaaaatgatgacgaacaagagcagttcgctcccggtccagcccagtcaggatctggtcaagtttttgcctttcatatcgaagaaattaataatttatgtaggagaatttttcc

SEQ ID NO: 16761 - DNA, 732 bp, Zea mays
  Clone ID: LIB3066-055-E1_FLI
gatcctgtcgtcaaggtgatgtccaagggaacgccaagacggaaggcggagctagaacatctggtgctcatgttgtccacaattaatgccatgcagatcgagacgaggtcgctcgacgtcatgacatccagggtgtgcatggctgatcaagttatgcatcttaatgagaagaagatgttccctactgatcacgacaaaggcaacaatgtatgggtccttgacacaggggctagcaatcacatgaaagggtgtctcgaggcgctcgcgccactcaacatatctgtgcgcgacacaatgcgttttggcgatggatcactcgttgagattgagggtattggctttatgatgctctagaccaagacaaagagctataaggtgctcgttgaagtctactttattccaaaattgaagagcaacattgttagtctaggtcaattggaggagggggctgcaagattgtggttgaggatggattctgcaatgtgtttggcatcgagcgctcactgctatggcatgtttgctatgaacacctcaattttcaggcactgagctcggcacaaaagagtaaagcacttcaccacgacgccatacataccacaacaaaatggtgtcatagagcaccataatcatacactaggggtgtaatcggatcggatacgaacggatactactcgttccatatttgtatccatattttctctcgaataaggatattatcgaattgtattgaat

SEQ ID NO: 16762 - DNA, 391 bp, Zea mays
  Clone ID: LIB3066-055-F3_FLI
gtgaggtgagtaatatgaagcaagagaataacaaggtcaccaaagagctacaagctgggctcgagcatgtaaggggcctccaagtggaaattgggaggacagttctgaagctcagagacaatattgaactatccattgggagaagcagtcgagcacatcagaacttcagatatctatcagggaaggccggggtacctcaacgaacttccttatttggttctaggacgaaaaagacatcattattttcatgtatgcctcccattgccaaagccgatttctgacatgaggtcaagtctttttagataacattggttagagggttagctaattttttcttctattcgatatgggtggttctctatgaacatgcttaaaaaaattgatgcaaggt

SEQ ID NO: 16763 - DNA, 1367 bp, Zea mays
  Clone ID: LIB3066-055-H9_FLI
ccatcttcgtcgaccttgagcccactgtcattgatgaggttcgcactggctcgtaccgccaactcttccacccagagcagctcatctcgggcaaggaagacgcagctaacaactttgcccgtggccactacactgttgggaaggagattgtcgatctatgcctggaccgtgtgcgcaagcttgcagacaactgcactgggctgcagggattcttggtgttcaatgctgttggtggtgggactggctctggacttgggtcacttttattggagcgcctttcagttgattatggcaagaaatccaagcttggtttcaccatttatccttccccacaggtgtcaacagctgttgtagagccatacaacagtgtcctctccacccactccttgcttgagcacactgatgttgcagtcctcctggacaacgaggctatctatgacatatgcaggaggtcccttgacatcgaaaggccaacctacaccaacttgaacaggctgatctcacagatcatatcatctctaaccacctccctgaggtttgatggtgctatcaatgtggatgtcaccgagttccagaccaaccttgttccatacccacgtatacatttcatgctttcctcatatgcccctgtaatctctgctgagaaggcttaccatgagcagctctctgttcctgaaatcaccaatgccgtctttgagccctcaagcatgatggccaagtgtgacccaaggcatgggaagtacatggcttgctgcttgatgtaccgtggtgatgttgttcccaaggatgtcaatgctgcagtcgcaaccatcaagaccaagagaactgtccagtttgtggactggtgccccaccggattcaagtgtggcatcaactaccagccaccgtctgttgtccctggaggcgacctggcaaaggtccagcgtgccgtgtgtatgatcagcaacaacactgccgttgctgaggtgttctcgcgcatcgatcacaagttcgaccttatgtacgccaagcgggcgttcgttcactggtacgtcggtgagggtatggaagagggtgagttctccgaggcccgtgaggacttggctgctcttgagaaggactatgaggaagtcggcgcagagggtgcagatgacgagggtgacgagggcgatgactattgagtagccggttaataattagttcgctggtgcttaatggttgagttattttgagtatactctgtatgggtccactccattgcgtgctgctgctgtgtgtttccattttgtattttgtgataaattgttcgtagccccctattggccatgattgttgttcatatcatcctgttttgatttgcaatgctattcatcgaagttcgatgtagt

SEQ ID NO: 16764 - DNA, 526 bp, Zea mays
  Clone ID: LIB3067-001-A11_FLI
aaggatggcatccgtcccctctgggaggatcctgcaaaccagaatggtggcaagtggataattagattcaaaaaggcagtttcaggtcgattttgggaggatttggtgctagtggtagtaggcgaccagcttgagtatagcgatgatgtctgtggtgttgtgcttagtgtccgtttcaatgaagacattctgagcgtctggaaccggaacgcatcagaccatcaggctgtgatggcattgagggattctatcaagaggcacctcaagctgccgcacagctatctgatggagtacaaaccccatgatgcttcgcggcgtgacaactcgtcctacaggaacacatggctgagaggatagataaacctcatgatactcggcagcttcactgcgacggttctgaagcaaagagactcttttatgtaccaagaacgcagactattatgcaatgtagtactactactactactactcaaaagcccctacaatgtgacgcgcaacaattttactatctaatgtgtttttttgc

SEQ ID NO: 16765 - DNA, 377 bp, Zea mays
  Clone ID: LIB3067-001-B12_FLI
gggcgccctcgagtgcggcgggaacaaccccgcccagatgaacgcgcgcgtcggctactacaggcagtactgccgccagctcggcgtcgacccggggcccaacctcacctgctaggctagctaggcggcatcggtggacggcggggccttcaggccttgtgctcggcgtcgcaccccctcgcgcgcgaaaccgagcaatagtgacaataaaacgcccgggctagctgagcctgtttgttcgacctgaataatgaagcagctgtgtgatatgcatgttgtttcgacacaacgtgtacgcttgcacatcgcttgtactttacgattgcattgcatgcaacaagggtttaaaggctgaatcaataaacggtgtgtaggcc

SEQ ID NO: 16766 - DNA, 429 bp, Zea mays
  Clone ID: LIB3067-001-C4_FLI
agcactccagctgcatcgacgaggaccgccgtagcgatttgcgaagcaagggacgggagaggaacccgaggaaggcgaaaatgatctaccgcaactggtcgctgctctcgtccacagtcgtcatttggggcggcgtcgccaccgccggcctcgccggtatcttcctcttgggcggcaaggagaaattcaatggttatctgtgccgcgaaggcgagaggcttaggcagcaggacagagccgcgatgggccgaagctaagcgttagcttctttggtatctcaagggagcaatagcccttcgaaatttcacaagattcctgcgtccctaccagaacaagtccctatctagggactaggatggaatccatccttctgcaggctttcactttcctgataataacagtaacaataaattgacaatggtttgtgtt

SEQ ID NO: 16767 - DNA, 503 bp, Zea mays
  Clone ID: LIB3067-001-H10_FLI
gtccttgagtaccttaaagattgaagaaacaaaaaaacaagtttcagcacaaggttccaagtcagcacaaacatcaagcaaggcccctgcaattacagcgccaaaacctacagcataccgcccacctcatgctaagggttctgcagaacttcaggacaagctctttggtggactagctcctgctgggggggagatgagcaaaaatgcattgcgaaacaagaagcgcagagagaaacagaaggaaaagaaagctgctgaagcgtcaggctctcctgctgatgaaagttgatctgtgccggattactttcagcattgccaaccaccgagtataacagtgacaaatgatttctttcaatctggtgaaacggccatgcaccgattcacgtttacaatatgaaactttttggtagtttggtgcagacactcggttattttttcagaactatactgagtttgtataaccatagcgaagaaacataaaaagtgagctatttcatattttc

SEQ ID NO: 16768 - DNA, 879 bp, Zea mays
  Clone ID: LIB3067-002-B1_FLI
caattggagacgtggaattgaaacagaacaaattcctgcctcccgagaagcaaattgtgacggccaatcctgatatcaacgtcgtggagctctgcgatgatgacgactttgttgttgtagcatgtgatggcatttgggactgcatgtcaagccaacagctggtggattttatccacgagcgtataaacacggagagcagcctgtctgccgtgtgcgagagagtgctggacagatgcctggctccatcaacgatcgctggagacggatgcgacaacatgaccatgatcctggtgcagttcaaaaaacctgtcgatcggaacaagaaggccgaagcagcagggcaatctgccagcaatgtggacgaagccaagagtcgtgttgctgaggagtgaagcatggctggcactcaccagggcgcaaccatttgctttcataaggcaggtgaaaaaaaggaacgaagaaacctgcagtgtacgtatctcaactgtacgtggcatgccatgcaaatcctgcctaagttaccccggacaatggcattgcctagtgcagtggtggatcttcagatcacaacctttcttgtgccagctttcggtcatctccactctccagccctcggaaccatggctgagtctgtctattctttgtgtggtgtgtagcattcctcgtgttttcgttgtccaaaatggtgtcaaatccagttttttgttgcgagaatgaaccgtgacgttagtgtgttttgctggcggttaggtgcaaaatactcgaaacctgaattgcccgctcgctatttcgggttgtaagtatatgatgaatctgattttagttgcatggtgtacccatcttatctgaaaataatgaaagatctgtttgtggttgact

SEQ ID NO: 16769 - DNA, 585 bp, Zea mays
  Clone ID: LIB3067-002-B11_FLI
gcgaagcaaagcaaagcttcaaagcatcctcccctgcgagaagagaggaggacaatggggttcgtgctggtggtctctttgcacttcatcttcctctccatccttctcggcttcggctgcttcttcctcggcaagcacaggggccgggaggagatgcgaaccggcgtcggcgcgcaggtctacggcacgccgctgccgccgcccggcgtcgtcggagtctcatcgccgccgcctgagccgattcacgccaagaaacaagggcccgaagccgtctgattgagatccattcgtttctacctactactgcctatgttttggtgatgttggatttattctttcttctttattttcgtccagaccgtgtcgacgggtgtaagctgagagtgaatatatgtttgtgtctaaaaattgttcattgttacgacttacgaggggagggggtgatggtgtgtgtatgttgtgatatgatttgcaatcacggcaagcaaaaaccagatgtcttgtgtcactgtcctgactagctggtgattggtgatggtgtgtgtatggatatcacatattttataaagtgtttttagagattac

SEQ ID NO: 16770 - DNA, 933 bp, Zea mays
  Clone ID: LIB3067-002-B7_FLI
cttcccgcgccgacgcagccgccatggaccccgtcgccacatgggggctaaccccgctcgcgggcgccgacccggagatctacgacctcctggagcgcgagaagcggcgccagcgtcgcggcatcgagctcatcgcctccgagaacttcacctccttcgccgtcatggaagcgctcggctccgcgctcactaacaagtactccgagggcatgcccggcgcccgctactacggcggcaacgacgtcatcgacgagatcgagaacctctgccggtcacgcgcgctcgctgccttccgccttgacgccgcgtcctggggcgtcaacgtgcagccctactcgggctcccccgccaacttcgccgcctacaccgcgctgctcaacccgcacgaccggatcatggggctcgaccttccctccggcggacacctcactcacgggtactacacggccggcggtaagaagatctccgccacctcgatctactttgagagcctgccgtacaaggtgagcgccgcaacgggatacggtggtggaaaccgcggcggcggctacggcaacaacgacgggaactggaggaactgagcggtggggtccgctgaggcctagttatcttgttcgcttctgctaccgtgttcaccctagtctagagggggtttatcttcgtctgtggtcgtctcgtgtccgtttgtttcgtttcgtgttcattgttgttgttgcccatctgtgtttttgaccgcaagctcgctcctctgatgttgttagtgatgtctacaatcgtccaatcccgagcctgcattgagctccaccgattatcttatctggctatacctgcagttgtgcatttgattccgacgggcctaaacctgaacacgccaatattaaacattgtacaaactacaagtgctccaataaagaacacaaagattcaggaaac

SEQ ID NO: 16771 - DNA, 2415 bp, Zea mays
  Clone ID: LIB3067-002-C10_FLI
gaccggaggagcccactcctgcatgtaactcagatactccacccgagagtccgcaccaactcacatcacacctcaccttccactccagaagaagaagccagaccggaatcccgagagccctgcccctgctccctcggttcctcctccgttgggcgtttggccgccgggggtggtgggccgagaccgagatgatatcgtggaacgatgtatacacggtgctgaccgcgatggtgcccctgtacgtggccatgttcctggcgtacgggtcggtgcggtggtggcgcatcttcacggcggaccagtgctccggcatcaaccgcttcgtggccatcttcgccgtgccgctgctgtccttccacttcatctccaccaacgacccgtacgccatgaacctccggttcctggccgcggacacgctgcagaagctggtcgtcctcgcggggctggccgcgtgctcgcgcctgccctccaggctggcggcgccgcggctggactggtccatcacgctcttctccgtgtcgacgctgcccaacacgctggtgatgggcatcccgctgctgatcgccatgtacggtccctacgccgggtccctgatggtgcaggtggtggtgctccagtgcatcatctggtacacgctgctgctgttcctcttcgagttccgcgccgcgcggacgctcatcgcggaccagttcccggacaccgcggcggccatcgcgtcgctgcacgtggacccggacgtggtgtcgctggagggcgggcgcgccgagacggaggccgaggtggcggaggacggccggctccacgtgacggtgcgccggtcgtcggcgtcgcggcggtcgctgctgatggcgacgccgcggccgtccaacctgacgggcgcggagatatactcatgagctcgtcgcggcagcacagcccgcggggctccaacttcaaccacgccgacttcttcgccatggtcgacggcgcgccgcccccgccggcgcccggcgcgcgcgcctcgagcttcggcgccgccgagctgtactcgatgcactcgtcgcgggggccgacgccgcggcagtccaacttcgacgagcgctcggcctcggcccggtcgtcgaggcccgcggccgtgcccagccacgacgccaaggagctccacatgttcgtgtggagctcgggcgcctcccccgtctcggacgtcagcggcctgccggccttcaacggtggtggcgcgggtggcgtcaacgtcggcgccaaggaaattcgcatggttgtccccgccgagatgccgcagaacggctcggccggcaaagagaacgagaacaacggtgcagcagcagcagcgacgggggaagccgagggtttcggcttcagatcaggcggcaagacgacggcggaggacgccgaggcgggagaagcagcagggcccgagcagctaacgaagctggggtccaggtgctcgacggccgagctgcgcgcgaaggacgacggcggtggtggcgcgggctcggcggcgcagcagatgccgccggcgagcgtgatgacccgcctgatactaatcatggtgtggcgcaagctgatccgcaacccgaacacgtactccagcctcatcggcctcgcctggtccctcgtcgcgttccggtggcacatctccatgccggcggtcgtggccaagtccatcgccatcctctcggacgccgggctggggatggccatgtttagcctgggattgtttatggcgctgcagccgaagctcatcgcgtgcggatggcgcgccacaggcgtctccatggccgtccgcttcctcgccggccctgccgtcatggccgccgcgtccctggccatcggcctccgagggacccttttgcggatcgccattgtgcaggcggctctaccgcaagggatcgtgcccttcgtgttcgcgaaagaatacaacgtccaccctgccatcctgagcactatggtaatttttggcatgctgatagcgctgccgatcaccttgatctactacatccttcttggactgaagccagtgtagtgtagctgcttcgtcctgctccacacatgatgaggcatgagcgaggtagtagaccaccatggacgacgctgagctggttgaactcgagcgtggcccacatgcatggctggagccttgtaattttgagtcagctccagtgttccctttgtggggtgattagacatgcatgcggtttttgttgcttattactaatccatcctgtcgtttgaggattgcatgtagtgtccatgcccatataaaccctagtttaagctttgagggccctctatcctagagatctcgatttgcccgtagcgagaaatgaaccatacatgcgtgacgatatttgctcgctgcattgggatttgggagacggatatacatactgcgaagacgagaagtttactgtgcgc

SEQ ID NO: 16772 - DNA, 531 bp, Zea mays
  Clone ID: LIB3067-002-D10_FLI
ggagattttgtccatgttataggggatgctcatgtctatagaaatcacgttcgagctctggaggaacagattcagaagatgcctaaaccatttccaattttaaagataaatccttcgaaaaaggatatagattctttcatggcgtcagacttcaagctggttggctatgatcctcaccagaagctagagatgaaaatggcagtgtaacggtggcttagctctggagcccccagccttggaacctcggtgggtgaaatcagtcgaacgaactggtactacataaaaaatgaaccggacatcgcactagcttgtttttggtgatggtgctgaatgttgtgcgggaggcgttttcccccgttattagtagcgatctgcgtgctatatatggtcgctgaagtcaaaattgtctctcttttatttttatctactactactactcaattgcgagtgagagatggtctgggcacaccattcaattgcaacggcctactggtgtgttgccccccctatgagggctgtgacgattgcgcc

SEQ ID NO: 16773 - DNA, 757 bp, Zea mays
  Clone ID: LIB3067-002-D4_FLI
atctcggagcttgaacggagcgtcaccagtctccagatggaggtgtcggcgctgtccccaaaagggtcaagaggatattggcaaacaggcagtcggctcagaggtcacgagtgaggaagctgcagtacatctcggagcttgaacggagcgtcaccagtctccagatggaggtgtcggcgctgtcccctcgcgtggccttcctcgaccaccaccgctcactgctcaccgtcggcaacagccatctcaagcaaagaatcgcggcgctcgcccaggacaagatcttcaaagacgctcaccaagaggcgctggagaaggagatccagcggctgcgccaagtgtaccagcagcagcaggtcaaggtggccaccaccggcggcgccgacatcgccaccgccgcctcgccgtcgatgcaggccaggcaagagctgctcgcgtgcgagggcgctgctattcgatagcggaggcggcggcggcggcggcggcgttcacgcccctgttactgttagtagcttaattaacttttgtgcagtctgatcaatacgtgttggcttgtttgtttgctgcttcttaatttaattcgtatgtgatgtattctgctcaccctagcaaaaaaaaaaaaaaaatgcatcgatgccaagttgtgaatgaattgtactattcagttatttggaccggcttagtcggaatatagtgagacggagtttgttggtgtgagttatccgttcttaatttattgttgtttagattgattttattt

SEQ ID NO: 16774 - DNA, 647 bp, Zea mays
  Clone ID: LIB3067-002-F10_FLI
cgcgctgttccgctgcagcgacgccgccggcgaccagcagcgggacagcagctactacgagcgcgagaacgcgctcacggtcatcgggagcaacccgctgcggcgccacctggccctgggctacgacgactcccactcccacgacgacggcgcgtcgtcagctggctctgaccgcgtggacggcatagagctcgccgcggcggcgccggcgccggcggtcgttaagaagcaggtgaggttcgcggtggctccgcccaggagccccggtgtggacgagaccgtgttggaggagctgcacgagctgtgcgaggcgcgcgaggccggcacggcgttcatcctgggccactcgcacgtgaagaccaagcccgggtcgtcgatactcaagaggctggccgtcggcgtcggctacaacttcttgcgacggaactgccgcggcccggacgtggtgctgcgcgtgccgccggcgtcgctgctcgaggtgggaatggtgtacgtgctgtgaccagaacgtggcggtgatgggtgactgcgatctctgcgtccggttttcgctgcgtgaactacggatctctctgctctgtgatgtgctattcctattatgcacatctcgacttgcccatgtataaattgtaacgagatgcgatggt

SEQ ID NO: 16775 - DNA, 864 bp, Zea mays
  Clone ID: LIB3067-002-G5_FLI
aaacagggctttcctgtgacatatgcgtcaataatcttttagcagttgttaacacaaaacttttgcgagattatggacaaatagataaaaggttacagcagttggcattcattgtgaagcattgggctaaaactcgacgtgtaaatgaaacttatcaaggaacactttctagttatgcctatgtgattatgtgcattcacctcctacagctgcgaagaatactcccatgtctacaggaaatggaggccacttattatgtcaaggtggaagaaattaactgcgcttactttgaccaagtggacaagctaaataattatggtgctcacaacagagatacagtatcaaggctgctctggtcctttttccattactgggcatatgagcacgattacacaagagatgtcatatcaattcgtactggaaggattatcagtaaggaacggaaggactggactagacgagttggaaatgacaggcatctcatatgcatcgaagatccgtttgagatctcccatgatctcggtcgcgtagttgacaagttcaccatcaaaatactcagggaggaattcgagcgagcagctaatatattacagttcgatccaaaccccagcgtaacactctttgagccctacgtgccccctccatcgccgagcctgctgcaagaagaaactgcgaatgctgcagaaattgaactatcatagcgtttggttcgtccccaggtattgtaataggaaatagaatcaactcaaggattttgatccttgcatcactggttgcagcctttggttggatgtgtaaatggtattgtttaccgttacagctgtttggtttctatctcaggatcacaagtcagttcccgaactt

SEQ ID NO: 16776 - DNA, 516 bp, Zea mays
  Clone ID: LIB3067-004-A4_FLI
gccgcggcaacccgacctgtgtcaatctccatgactacctcaaggcgtcttgctgataggaagatatcacgatttgagaagaatatcacaaagaggggcgctgttcctgagacagccaagaaggcaaacgattatcctgttgggcctattcttcttgggttctttgtcttcgtggttgttggatcatctctctttcagatcatcaagacagcatcaaacgctggtctattctgaggagaatcggttgacacatgcagtttgtcactagaaactatacaagtgtagggcgtggctcaatgtcgcctttttaatgttgtaccgtggagagttttaagttatatatgtaatggaagtgctaatttaagtcacctgtctgacaggaaagatgttggagtagtccacaatacatatcgagtatagttatagttcgtgctaaatatttttatgctcaaattggtcgcagcattgggctattgtactcttcgatttatcgagtaatttggtaatctttcgcag

SEQ ID NO: 16777 - DNA, 670 bp, Zea mays
  Clone ID: LIB3067-004-B3_FLI
gcgataatccgccggcgctgagatgttggtttatcaagacctcctatctggcgacgagctcctgtcggattcattcacctacaaggagctcgagaacggcgtcctgtgggaggtcgagggaaagtgggtcacccaaggtcctgttgatgtagacattggtgccaatccatccgccgagggtggtgaggatgaaagcgttgatgacacagccgtgaaggtggttgatattgttgacacattccgtctacaggagcaacctccttttgacaagaaatcatttgtctcttacataaaaaaatacatcaagaatctcactgctgtgttggagccagagaaagcggatgagttcaaaaagggtgtcgagggtgcaaccaagtttctccttagcaagctgaaggaccttcaattttttgttggtgagagcatgaaggacgaagcgtccgtggtattcgcctattacaaggatggtgccactaatccgacattcctctatttctctcatggtcttaaggagatcaagtgctagattagttacccatgttgggtactatatatgttctattgttatagccacaactatagctgccctgcctgaactgaactcaaaggttttttttaagaaaaaactgtccaagattggattgcttgttaaagctaaatattgttattg

SEQ ID NO: 16778 - DNA, 533 bp, Zea mays
  Clone ID: LIB3067-004-C5_FLI
gtccttggcagaaacgctggctgggtcccttggtccatcaggatcttctggaaacgtggcaaactatatgggtcaaatggctatggccatgggaaaacttggcacactcgagaatttccttcgccaggctgacaatctacgacagcagaccttacatcagatgcaacgtatcctgacaatccgacaagctgctcgtgcgcttcttgcaatccatgactacttttcacgtttgcgcgcactgagttctctttggcttgctaggccacgagagtaacatcacccccgttggggtcacttgatgaactgatctgtgaatgtgggactgctggctgcaaactcgcaaagcatttgcagatgactggaggatcagtcctctctgtacaagttgtattaacatcttctggtctcatattgtgctccagtgttgtacaatttagggaaaagcttggattaacttgtaagttatcatgaatttgttattggcatattgtacaattgtattagcaataaaaatagaagtacataagtgctgg

SEQ ID NO: 16779 - DNA, 830 bp, Zea mays
  Clone ID: LIB3067-004-H5_FLI
gacaaagtgaaccgaccaccagcgaccttcgtgaaggtttacaaatctggaacctacgggaggtcgcttgatatcactaggtttagcagctatcacgagctccgtagggaactggggcgcctatttggccttgagggccagttggaagacccattgagatcaggctggcagcttgtattcgtcgaccgtgaggaggacgtccttctcgtgggcgacgacccttggcagtaagcactgcatgcgacgttgtttcttttttttttctgcattcttcctcacattgcgttggcaacccaaccccacagggaattcgtgagcacggtgtcctgcataaagatcctctccccgcaggaggtgcagcagatggggaagcagggcctggagctcctgagctcggcccccgcgcggaggctcggtagcagctgtgacgactacgtcagcaggcaggagtcgagaagcctgagcaccgggatcgcgtccgtcggttcggtcgagttgggatgagtagcaagatagcgcgcacgcagcagcagcagcaggttacgcatcctcagcctcagggtaggtaggggactgaagggttggtctgcgacttgatgacccacgagctcctcgttgcgcgcttcgttcgcctccatgcgatggatagaagttcagcgcagatcaagccttagctctgcgagctatgtatcatctaataattctgtccgtgtcgtaccatgtcaactcctaagtagaagaattgaagaaactaccagcagccgctgtctggtatacacgctgaaacattttttcttgtatggagaaatactaatcatctggatgtagcc

SEQ ID NO: 16780 - DNA, 492 bp, Zea mays
  Clone ID: LIB3067-005-A7_FLI
caagcaaagcaatcagagccaagcacccaccgtcctcctttctttccttcgactcatcaaagcatgtcttgctgcggcggcaactgcgcgtgcacctccggctgcaactgcggcagcggatgcggcggctgcaagatgttccctgacgtggagaccgccggcgtcggcggcgtgaagcccacggtcctcgccgcccccgccaccaaggcgagcgccggcgggttcgaggcggccgccgagggcggcggctgcgactgcaacacctgcaactgcggcaccagctgcggctgctcctgctgcagctgcaactgagccacccgcgatgacgagacaaccacccggcctcccccccacccatcgtactacaactatgtagcggcgtctaaataagatccctccaccggccaccgccattgttccttcctgtcgctgcatggtcgcctgcctcgtgcccgggctaatatacatatacatactatgtgtttcagcatt

SEQ ID NO: 16781 - DNA, 1115 bp, Zea mays
  Clone ID: LIB3067-005-G11_FLI
gcaagatcaacgtcgtcgttcaagccagccagcggtagagccggtagtagagactacgaccgaggctagctaagctaagagatggcggatcaccagtactcggcgtggacgacttccgctgctcgtcatcgggtcttctcctgtgcgctcatggctcttgttagttttgtggctgcaggacgacccattgtgctcgccgacgccatcgtctttcacgtggcgaacaggtgcccgttcccggtgtggccggcgtccgcccctaacaccggccacccagtgctcgccggcggcggcttctacgtcccgcagggcaagtcgaggcgcgtcgtcgcgccggccaactggaacgggcgcttctgggctcgcaccgggtgcaacttcaccgcgaacggcatgggcgtcgcgggctgcctcaccggcgactgcgagggccggctcgcctgtaacgggtccgtgggcgccccgcccgccacgctagtcgaggtgagcctgcacgaggacgccgcgaaggggagctcctacgacgtgagcctggtggacgggtataacctccccgtggccgtctccgccaagccagccacgggcggcgcggacccgaacaagtgcgccatcgccggctgcgccaagaacgtgaacgcggtgtgcccgccggagctgcaggtgaccgctaccggcagcggcggcggcggcaagacggtggtggcgtgcaagagcgcgtgcctagcgttcgggctcgacgccttctgctgccgcggcgcgtacgcgacgccggccacgtgccgaggcaccgtgtactcgcgcctcttcaaggacgcctgcccggcatactacagctatgcctacgacaccgccgccgcgacggccagcgggtgctacgcgcaggagtacatcatgacgttctgcccgtccagatggggcgacgagcccggggatcgtgctgctcagatttgaatttggtgtcgtcatcgtcagtcaggcaatcaccaatcaccattgcgtcgagcttttcgcacgtctttatatgtatgtgtgtaggcttgtgtctgcttctagtgggctttcacgtaaatttctacatacatatacacatacaacaataaaaataaggtagtgct

SEQ ID NO: 16782 - DNA, 1367 bp, Zea mays
  Clone ID: LIB3067-006-A11_FLI
gcgggaggggagaggggcaagtgcgagtggtggtggtcgctgcgtcgtcggcggcggaggcacccagacccagcagctattgtggtcgtccctcagccgcgtcgcaccgcatcgcattctacgattcgaagctctctctgctcgcagccatggcgaagaattacccaaccgtgagcgccgagtacagcgaggccgtcgagaaggccaggcgcaagctccgcgccctcatcgccgagaagagctgcgcgcccctcatgctccgcctcgcgtggcactccgcggggacgttcgacgtgtcgtcgaggaccggcggtcccttcggtactatgaagtgcccggcggaactggctcacggcgccaacgcggggctggacatcgcggtgcggctgctcgagcccatcaaggaggagttccccaccctctcctatgccgatttctaccagcttgccggagttgtggccgtcgaggtcaccggtgggcctgagatccccttccaccccggcagggaggacaagcctcagccgccacctgagggccgtcttcctgatgccaccaagggttctgaccacctgaggcaagtctttggcaagcagatgggtttgagtgatcaggacattgttgccctctctggtggccacaccttgggaaggtgccacaaagagcggtctggttttgagggggcctggactacgaaccctttggtctttgacaactcttacttcaaggaacttctgagtggcgacaaggagggtcttcttcagctcccaagtgacaaagccctgctgagcgaccctgtcttccgccctcttgtggagaaatatgctgcagatgagaaggcattctttgatgactacaaagaggcccacctcaagctctccgaactggggtatgctgatgcttaaatgtccatatcctggagcgggacacaaactgctgcctgtatggactcgtgcgattcagggtgaaccatcagattgtctagtgtcttctttgtaataaatttatctgttcttggtactttgtctatggttgaatcggaacccattttccgtttgcctagattcttaatttctggtgctgtatccagctgaaactagtagatctatgatcttgtggctgcagcatgttcttgtcacttttatctggtctccgttggttcggttcacaggttgtgtgctttaaaaggctgtgcttaagtcctgcaattcgagtccaccaaactgtagggtgcaagtcgagattttattagtgatgcaagttgctggtattggtgcattatcgggctaatacgcttgcgttgccttctgattttataagtgatgtaaattgctggttttaacgtgcattacctggtgggctggttctat

SEQ ID NO: 16783 - DNA, 629 bp, Zea mays
  Clone ID: LIB3067-006-A3_FLI
atttcagccattcaggagggccaccgtacgcagcgagaccagccagcaggcggcgatgttcgcgacggcggtgcggtgggcggcgaagaaggggaagcccaagatggcgccgatcgagctgacggcgccgccggagcaggcgcagtccatcacgcgcgccatcttcgacgccgtccgggagcacggcccgctcaccgtctccgacgtctgggaccacgtcaaggatgtcgggcttcgaggtctggcaagcaagaggcagatgaagatcatgctgcggtggatgagggagcgccagaagctaaagctcatctgcgaccacgacggcccgcacaagcagttcctctacaccacctggtttaccaaccccaggaacgcgccgcagaggcccaatccgaagcccaatgtcaaagcggataagctccccaccttccctttccccttcgaagcaactgtgacgaggacttgtttctgtgctctctgcacttgtttctgctgcccccgacataatgttcagcatggaaacaaatgctagatttgttcaggcgaatttaggcttgttatggctatattgttctatgcaaacacctaattgttgtctatgcatatataaaccatattatttgagatgt

SEQ ID NO: 16784 - DNA, 559 bp, Zea mays
  Clone ID: LIB3067-006-A4_FLI
gctccccccgcaaaaaccctagctttacctccccacaagcgcctccaagatgaagctcgtcaggttcttgatgaagctgaacaacgaaacggtgaccatcgagcttaagaacggcaccgtcgtacacggaaccattaccggttatccggtcgattatggtttacatatacggacagctatcttcagatagtgttgacatcagcatgaatactcatctgaagactgtgaagctgacactaaaagggaaaaatcctgttacccttgatcaccttagtgtgaggggaaacaacatccgctattatatccttcctgacagcctaaacctggagactttgctggttgaggaaacaccaagggtcaagcctaagaagcctacttctgggaagcccttgggccgtgggcgtggccgtggtcgtgggcgcggtcggggtcggggacgttgagcatgctagctgcttttggaaattgcattgcgtgcatctgcagtgtaatctacattcctatcaattgtacgaagtatgcctttgattatgcaaccatgtatcaattgttttttttt

SEQ ID NO: 16785 - DNA, 201 bp, Zea mays
  Clone ID: LIB3067-006-C2_FLI
ttcatgttgaacttatatatatttccatccttttgcagttagtttgagtcgtatttgctgtgtaccaaacatgtattgcaaatttggaatttttgtaagctataataaggccagcacggcaatatccccacatgataaccccgaaatttgtatcgttcaaagttcaaaccatggtatcctaattcaaaaattttgcctttt

SEQ ID NO: 16786 - DNA, 488 bp, Zea mays
  Clone ID: LIB3067-006-D6_FLI
tctcctgatcctcgttcctctccgccccgcttgcgccgcgcctccgcccccgtctcctgtgagatcagctccggcggcacgcggatatgactacttcaaggcgtcttgctgacaggaagagtgcaaagttccagaagaacatcacaaagaggggttctgtgcctgagaccacggtgaaaaagagcaatgactaccctgttggacctatagttcttggattcttcatttttgtggtcattggatcatccttgttccagataatcaggacagcgacaagcggtgggctggcctgaattcactgagctaaaaccagaaatttatctgtccgtgagctgggaggcagtatctgtgttgtgtagcaaacttgttcatggatatgtagtgcgaatgtcactactgttctgtttgcagtatcaaaagagtttaaactgatgttgtaaccatgcaaaggctgaaaattttaaagagtatgggagaaaccttaatct

SEQ ID NO: 16787 - DNA, 1199 bp, Zea mays
  Clone ID: LIB3067-006-F1_FLI
cctttcttgatcccaaaactaccgccaagatacatgttcttgggaacaaataccaaagtaagctgcttgaaataattgacgccagtgaattgccggaattccttggtggcacttgtacctgtcctgaatacggaggctgccttaaggctgaaaagggaccatggaaggacccaaacatacttaagatagtccaaagtggtgaggttcattgtgctcgtcaaattgtaactatttccaatggtgaagaaaaatttattacttatgccaaaccgaagcaccattcaatgcgagggagtgacacatcaactgctgagtctggctcagaagctgacgatgctatctcccccaaagctctcagaagttacatacaacatcctaagttgaccccagttcgtgaagaggtcaaaattgtcagggctacgagcttttctactcgtctccctgaatatgatgtacctgttgttgacaaggctgtggatgctacatggagaagagagcagccacgaaagataccattcatgccccaagatgcagactcttctgtgaaaactatgtccaggccatctgattcctcctgggataagatcgttgcaactctgatggcttgtcttatggctattgtaatgttggttcgatcagtcaaagatcttgttacaaggagattgccatataaaggcgggtcagaagaaatccactctacgctgtacccagaccccatccagaaagaggaattccgtcctccttctccgatccctggatttgctgaagccgacctgttcgccgtggtcttgcaaaggctgggagagcttgaagagaaggttcagatgcttcaagaaaagccttccgaaatgccttgcgagaaagaagagttgcttaacgccgctgtgcgtcgtgtcgatgcattggaagccgaactaattgtaacaaagaaggctttgcacgaggctcttatcaggcaagaggaactgcttgcgtacatcgaccgcaaagagattgccaaggctcagagaaagaagaaagcaatgctttgctactaggacaaggagggagatacttctgcttcctcagaggagatgccaaagatggcgcctgagatgtaaccagcgatccccttcattttcctgacacttgtgaatcttctacaagtttccgttgtaaatcgagaatattctgacatgaataaagtgttttttggcatc

SEQ ID NO: 16788 - DNA, 878 bp, Zea mays
  Clone ID: LIB3067-006-F10_FLI
gctccagcccatagtgaatctcccggagtcgcccaaacaacagcgacaaccatggccgccgccgcctgctattcgccagcgcgcatcatcatctcctgctcagctaccaccacctcctcaccgtcgtcagcgcgcacgctgcgcgtcgccgtagtggggggtggccccgcgggcgcgtcggctgccgaggcgctggcctcggcgggggcccggacgttcctcctcgagcgcagccccgcgggcgccaagccctgcggcggcgccatcccactctgtatgctggacgagttcgccatcccgcgggacctcgttgaccgccgcgtcacccggatgcgcgtgctctccccctccaacctcgccgccgacttctcccgcgcgctgccccccggggcgcacatccccatgctccgccgcgaggtgctcgattccttcctccgccgccgcgccgttgaggccggggccgagctcgtcccgggcctcgtcacctcgctctcgctccccgcggggcccgccgacccctacctcgtccactacatctcgtcctccccggagggcgtgggagcgggacggagcgtgctggaggtggacgccatcgtcggcgcggacggcgccaacagccgcgtggcgcgcgaggtcggggccggggactacacgacggccatcgcgttccaggagcgcatctgcctccccgacgccggcatggcgtactacgacgaccttgccgagatgtacgtgggcggggacgtgtccccggacttctacggctgggtgttccccaagtgcgaccacgtggccgtcgggaccggcaccgtcgccgccaagccggagatcaagcgcctccagtccggcatccgggcgcgcgcgggccccaagatcgc

SEQ ID NO: 16789 - DNA, 1257 bp, Zea mays
  Clone ID: LIB3067-006-F12_FLI
ggtaattgctgtaacagttattgtcatgagtctcatgagtcatggaccatacacttccacttcagtagttcagttgcctgtgatggggaaatatcaagtactgattggaatagcatccgaaggggctaatcttgttcttgtatgtagcgcattgaaacaagtactaaaggaaaggtcgtgatttggtttgcgtaccttttattcacttccctatattatttttaaaagcacttcgtgattttcagatgaatagcaatgtctgcatattagtgcgttcattgatgaatttgtttctaggtttcctctcatacaatataatggtgtcaaagcctgtagtgcttgtcttcctgttggtggtactcataatcacatcccagtttgaatggaagcaacagcttgtaaacgagttggaatctacggctcgcaaccagaaacatgtttcaagtagagaagagcttgtcaaggatcaggtgaggcgactcactttgtgtatctgaatgctttaagcgatttttttttagttttagatagtggcaaaatttgagatgaaaaggagcttgaatagcagggctctaataacatgcaaattattgcttccaagaccttattttcatggtaagtgtaagcgttgagatgtgttcagtaacctcatattagatatagtcttatgttgttgtcccagcacattgcaatttggttagaaagaaaattattgtgtcgtactagaggactggaagagatctttttttggcagcagtattcaaatttggctataaccttatacttgtttcagataatcttcactcaagaaaagatgattcaaagattgaataattttgtccgaaatcttcagcaacagttggtgcagtgtcgtggcaacaacaggacagttaatcgttctggaacttctttgacatcttatattagtgagatccagatgccgcagatgatggatgactgacaatgtcgcgcggcatgaactatacggataaaaagataggatattcacagagtcatgtggacagcgaagttctcccagtaaaagcagtcataatgtagtattagcctggacagaacaatattcgatcagttccagagagaaaggaacgctgatcctttgaaaacccgtgtaattttatttcccttttcctctttttcccccctaagagaactgaaaattctttgttttatgataggcatctatatatacttattatcctctacagatattgtgatatgaaggtgttttagaagtgt

SEQ ID NO: 16790 - DNA, 730 bp, Zea mays
  Clone ID: LIB3067-007-C7_FLI
gggctggcttctcctccccctcttaccaagtcctcctcgggttagggttccttagggttttgtggaggggcgatggcggcggctgatgtggagtaccgttgcttcgtcggcgggcttgcctgggccaccagcaacgagtcgctggagaatgccttcgcctcctacggcgagatcctcgactccaaggtcatcaccgaccgggagacggggaggtctcgcggcttcggcttcgttaccttctcctccgagaactccatgctcgacgctatcgagaacatgaacggcaaggagctcgacggccgtaacatcaccgttaaccaggcccagtcccgtggcggtggcggtggcggcggtggctacggcggcggtcgcggcggcggcggctatggtggcgggcgccgtgacggcggttatggcggcggtggcggctacggcggtcggcgcgagggtggtggcggcggctacggaggcggtggcggctacggcggtcggcgcgagggtggtggtggcggctacggcggcggcggcggcggctggagggactgatgtgtgggcccatcctggcttcggccgagttatcttatctatctatagtatcgtgttaccgttcgcttctgtcaccgtgttagtgtccgttctacctttggattaggtgttggtacccctgttgttccctttgtttgctcccgctatgaaacgagacgagagaagaatgagcaaggtttttgtt

SEQ ID NO: 16791 - DNA, 475 bp, Zea mays
  Clone ID: LIB3067-007-D4_FLI
ctaacttttggaaaatcaaaaattcatggatatggtgtctttgccaaggttgcacacaaggccggagatatgatggttgaatacataggggagattgttagaccaccgatatcagacactagagagcggcgaatttacaactcactagtgggtgctgggacatatatgttcaggatagatgatgaacgtgttatagatgccactcgggttggaagtatagcccgtctgatcaatcactcatgcgagcctaattgctattcacgtgccataactattcttggagatgaacacatcatcatttttgcgaaacgggacatagatccatgggaagagctgacatatgattataggtttttttcaagtgatcaacgacttccatgtttttgtggattccccaaatgccgtggagtagttaatgatgttgaggcagaggaacagtcggctaaaatcagagttaagagaagtgaattatttg

SEQ ID NO: 16792 - DNA, 1932 bp, Zea mays
  Clone ID: LIB3067-007-F4_FLI
cttaaacgagaggcctgatttaggtatcaagaagatattgattgtcgattgggatgttcaccatggaaatggcacacagaaaatgttttacgatgatcctcgtgtattgttcttctcagttcacagatttgattatggaagcttctatcctgctgaaggggatgcttctcattgtttcatcggggaagaagctggtaaagggtataacatcaatgttccctgggagcatggcaagtgtggtgatgctgattatattgctgcatgggaccatgtactgcttcctgtcactaaagtttttgatcctgatataattctggtatcagcggggtttgatgcagcattgggtgatcctctcggtgggtgctgcattacaccaaatggatatgcactgctactaacaaagttgttaggatttgctcaaggaaggatagtgatggcccttgaaggaggttataaccttaggtccatagcgaactcagtttgtgcttgtgcaaaagttctcttgggagacaaattcacattcaacactccagagatgcaaccatttgaatctacatggagagtaatacaagcggtacgcaatgaattgaagacatgctggcctgttctgagtagcaagttgccagaaaatgtatcattgaggattaagcctgcaccaagcgagctctacgcttcttctgattccgaatctgatagtgaagatgttgatgagctccttggcactgttgcatctgtcaatgttattgaagctactggtgttgctataagtgaacacctctcaaagatgaaacttgatgatgacagccttgcagtgaagactaactcaagttgctcagcagcagaacagcatccagttgattcagtaaaagtacataacaatgcatctgttgtgctgaccaaaaaaatatctgatttatctcttgagtggcgatcagatttatcgaaaactgatgtctggtatgccagttttggatcaaacatgtggagaccaagatttctatgctatattcaaggagggaaggctgagggtatgaatataccatgctgcggatcacgtgacacaagctcaccaaagggaaccgtgtggaagactgtacctcacaggttgcttttcggtagatcgtctaccccttgttggggaactggtggtgtggcttttctcaaccctgagataaactacaatgagaagttgtatgtctgcatgtacaaaataacgttggagcagttcaatgacatcttgtttcaggagaatcgtttagtgctggaggatggcaaagacggaaacactgtgtatcctgactctcctttgattggttcatctgaaatcaagtttatatctacaaacagagctgttcatcttgaacctattaaggatagctggtactccaatgtactttatcttgggaatgaggatgaagttccaattctaactatgacgtgccccgcatcagatattgagaggtataaatctggtgagctgcgtttagcacctccatcagagacgtatgcggccactctgataaagggactagtggaaggcaagcaaatggatgcggacggagctgccagctacatcaacgctgctgctgcaagagccttgtgaaggctgcttcagcgtgtgcttttgtacagccagtaaggagtagtaaggatacactatctgttagcgtggcgacaccaggaaaccttcattgtccgcaaatggagaacttggatccaatttgaattgggcagcatgattcgagctcgccctagcttgattactggtgaacggtgatctcccctggctggttgattctgggagaaacactagctgtgtcggggtggagcaacactagttggcggttgcaacaggtgctctcactgcactggtatcgtgcttgtctgacataccgtagtatttgcatggcatgctggtgatgttatttgtgc

SEQ ID NO: 16793 - DNA, 1632 bp, Zea mays
  Clone ID: LIB3067-007-G2_FLI
catcggccatctactccagtctcccactcacctatctcgcagcgcccgagcaatcgccacgcccacgccccaatggaagacagcgccaccaatggccatggggttgtgacggctgtcccggcctcgtggaacttcgagccaaacgagaccctcctgggtcttccggcgctctcggttcgcggcgtgctgaccagagtcatggccgggatgttgcccgacggtgggcgggcggtggtccggttgggcagcggcgacccgacagcgttcccgtgcttccggacggcgccagaggccgtggacgccgtcgccagcgcggtccagtccgggcagtacaactcctattccactagcgtcggccttgagcccgcacggaggtccattgctcagtacttatcctgtgatttgccatataaactgtcacctgatgatgtctacctcacaagtggttgcactcaagcaattgagatactctgctctgcgttagctcgtcctggtgcaaacatcctgcttccaagacctggatttatgttctatgaggcgcgtgctatcttcaatggcatggaagcccggtacttcaatcttctacctgggaacggctgggaggttgacattgatggcgtccaagctcttgccgacaagaatactgttgccatggtcattgtgaacccaggaaacccatgtggcaatgtgtactcctatgagcacctggccaaggtcgctgagaccgcgcgaaagcttggcatattcgtcatagcagatgaggtttacgcacacttgacatttggagagaggaaatttgtgccgatgggtgtgtttggggctgtggctccagtgttaacactggggtccatatcaaagagatggatggtgcctggatggcggcttggatggattgttaccaatgatccgaatggtgtatttcagaggactaaggtagtgcacagcatcaagagctaccttgatatctcctctgatcctgcaacatttgtccagggagcaataccaaaactcgtggagaacacaaaggaggaattcttcgaaaaaactatcgaaattctaaaacgatgtgtagatatatgctgtgaaaagctgaagggcatcaatgcaatcacgtgcccaagcaaaccagagggatccatgtttgtaatggtgaaactggatctgtcctgcctggagggcatcaaagatgacatggacttctgctgccggctggcaaaggaagaattagttgttgttctgccaggatgtgctgtcggatacaaggattggcttcgcatcacctttgcgattgatccatcttctctggaagaggggcttgacaggctcaagtccttctgcttgcgatacagaaagccaacaaagtgataagataaagtcaccagttctatgcaacagagacaaaaattgttatgaacttctgcacagatgtatgatattgtatcatcttcactcgaagatgatatatttgatgctctttgtctatagtaaataaatgatgtctcttctctgtcatctacttatctactgtttgtaggcgcaacacaaattttaggggatatgaagtgtagaagactctgcctcttgcacgaaaccatcatgcaagtttggcataataactttcgaagtgaaatc

SEQ ID NO: 16794 - DNA, 1114 bp, Zea mays
  Clone ID: LIB3067-007-H4_FLI
ccaattccccattgctcgccgtgtattaaacatactcgcactccagctccccatttctctcctcccctccccttccctaatcatctcagcgaatccaatcgaggcgatggaccagcagggtgcgggcggggacgcggaggtgccggcggggctgggtctgacggcggcggagtacgagcagctgcggtcgacggtggacgcgcaccaccgctacgccgtgggggagggtcaatgctcctcgctgctggcgcagcgcatccacgcgccgccggaggccgtctgggccgtcgtccgccgcttcgactgcccgcaggtgtacaagcacttcatccggagctgcgcgctccgcccagaccccgaagccggcgacgccctctgccccggccgcctccgcgaggtcagcgtcatctcgggcctgcccgctagcaccagcaccgagcgcctcgacctactcgacgacgccgctagggtcttcggcttctccatcaccggaggcgagcaccgccttcggaactaccgctccgtcaccaccgtctccgagctcgaagaccccgcgatctgcaccgtcgtgctcgagtcctacgtcgttgacgtccccgacggcaacaccgaggacgacacccgcctcttcgccgacaccgtcatcaggctcaacctccagaagctcaagtccgtcgccgaggccaacgccgccgaggccgccgcaaccaccaattccgtccttctgccgcggccggcggagtagcggcggctgccatcggcaagggaagaaagcaacagcaagttttgtgcgtttctgttatttcaattctctgggaaagggtttctctgaattaaatctgatcatggatggatttggactggacaaggaggggccgggtcagcctaaattaggtgtgattgcaagggcgcgacctgtaataatctctctttcatctcctagattccttcttttcatctttacttcttccagaatttggttaattcctgctttatgtgattggaatcattccttaggaattgctgcttctcatatgtctttgcattgcatgtttgatgtggctatcttgaggcatgtgatccatgcctaattcgatcctcttagattgctagc

SEQ ID NO: 16795 - DNA, 1946 bp, Zea mays
  Clone ID: LIB3067-008-A2_FLI
cttatatttgccgttccgtcacggctttgctcgccaaactgactgattgtctgattgtgattgcggcagcaccgccgaccacgagcccgccgaaaggctcctccgcctgccgttccagggtgcactgccgccattgctcatctccccgtggtgcggaggtccacccgggcgccaattggtctcctctttcgttggcagactgagtggcatccaatcctgaatcaatgaggggctggggtttgctcgtgttatcgctacatgttctttcatgcctggttagtggcgttgcttctggtcgaacaagctcttatgtgcgcacagagtttccatctacagatatacctctagaaagtgaatggtttgctattccaaagggatacaatgctccacagcaggttcatatcactcaaggtgattatgatggaaaggcagttatagtatcttgggttactccagaagaacctgggccaagtgaagtattttatggcaaggagaagctatatgaccagaaagcagaaggaacaacaacaaactatacgttttacgattacaaatctggatacatacaccattgccttgtcgatggccttgagtataacactaaatattattacaagattggaagcggaaattcagctcgagaattctggtttgaaacgcctccagcaattgatccagatgcatcatacacatttggcatcataggtgatctggggcaaacatttaattctctctcaactcttcaacattatgagaaaactggaggtcaaactgttctatttgttggggatttgtcgtatgctgatagatatgaacataatgatggcattcgttgggattcctggggtcgattcgttgagcacagtactgcataccagccatggatttggaatactggaaaccatgaaatagagtacaggcctgatctgggagaaacttctgtattcaagccatatttgcataggtacatgactccatatttagcatcaaagagcagttctcctatgtggtatgctgtcaggcgtgcatctgctcacatcatcgtgttgtctagctactctccatttgtaaaatacactcctcaatggctgtggctgaagaacgaattcaagcgcgtggacagggaaaagacaccctggcttatcgttctcatgcattctcccatgtacaacagcaacgaggcacattacatggagggtgagagtatgagggctgctttcgagaaatggtttgtgaagtacaaggttgacttggtgtttgcagggcacgttcatgcttatgagagatcataccgcatttctaatgtcaactacaacataacgtcgggaaatcggtatccagtgccggacaaatctgctcccgtttacataacggtcggtgatggaggcaaccaggaaggacttgcttcaaggttttataacccccagccggattactcagcgttcagggaggccagctatggtcactcagttttacagctgaaaaacaggacccatgctatctaccagtggaatagaaacgatgatgggaatcctgttccagcagacaccgtaatgttccataaccaatattggacgagcagcacgcgccgcaggaggctgaagaagaaccatctccatctcgaggaccttgaggatttgatctccctattatagaaaaccgggttcgcaggacgcatgaactgtgtgtgggggaataatcgcaggttagcactgttgctagtgtgcccgcctctcttggaatggaagcagcagagccagctatcagactggcagtgaccaccacctcctcagctacctggttgcatgccacagatctgaaattctgaaatgctgtgactgtgactgtgaggtatgaaaaaacagtgtaaataacgcggttgcctccgtacatgtgtgacattttatacacgtgcaagaaagcatcggtgtccaccgttgtccgtg

SEQ ID NO: 16796 - DNA, 621 bp, Zea mays
  Clone ID: LIB3067-008-C7_FLI
cctcctcaacctccagcccaacctccagcccggaatcgagagcaatggcgctcgccaaggccaaggagatcgttgcctccgctcccctcgtcgtcttcagcaaaacttcctgccctttctgcgtccgtgtgaagcagttgttcgagaagctcggagcaagctacaaggccattgagttggataaggaaagtgatggagctgagctccagaatgccctgaaggagtggactggacagaggactgtcccaaatgtcttcatcaatgggaagcatattggcggctgtgatgatactatggcactgaacaatgatgggaagctggtgcctctgctgactgaggctggagccatcgccggttctgcctcgaagacaaccatcactgcttgacatgtgtgttaccattcccgtgcttaaaaataatgatgctttgcaagtgctgaacttgcagatgctatgtgggagtgactgttcgttccctgtgtaaaactccctagacatcagtcgagtcgtgttgctgtggtggttgtgaaatctacaataatcattgctacaataatgtcgtgttccctagacatcagatgagaaagatgagaagaaataacattataatcttattcgaact

SEQ ID NO: 16797 - DNA, 832 bp, Zea mays
  Clone ID: LIB3067-008-D1_FLI
tctctgttttccaaaggtttcaagaacacgagcagccagatcacggcggcctacacctcggacgggcggtacgccgtgtgcgcgagcgaggactcgcacgtctacctgtggcggaccacccgggtgccgcctgccgcggccatcggcatcggcatgaagcccaaggcgtggtgcaccatccgctcctacgagaacttctactgcaaggacgtgtccgccgcggtcccctggacgcagtcgccgtccccgccgggcgccggcgacggcagccccactggcggcagcccggcgtcggcggacaagccgccgcaggtcgcgtcatgcaacgacgagtcctgcagcgtcgccgccaagccggagggcggcgatccgagcagctgcagcgccgccgctgccgagcccagcagctccgcgcggcagggtggcgccaagggcgacggcggcaacgcgtggggcctggtggtggtcacggcgagcttgggcggggagatcagggtgtaccagaactttgggatgccgttcaggatcaaaggccaggccaattttttctagtgattttgggcactcccgagactgcaattcgtttggctgttcctgttggtgacttctcttctcctaactatatcattttgtgtatgtgatgtgcaatgaaaatagtcaagggtgccatgatttggcgtgttttagctgctgagaagggatttttacttgtaccaaaattagtcaaagaaagaactttttaatatataacatgataatgcaagaaataagaggtttatatatagactagtataatggatagttcgttataccggcatataaattattcgat

SEQ ID NO: 16798 - DNA, 731 bp, Zea mays
  Clone ID: LIB3067-008-E2_FLI
agggcttcggatcccacaccgaggaaaggagaagagagggtcggaataatggcggccgaggagggtgccgtgatcgcgtgccacaccaaggacgagttcgacgcccgcatggccaaggccaaggagcagggcaagctggtggtcatcgacttcatggccccctggtgcagtgggtgccagatgatggccccggtgtacgcggactgcgccagcaagtacccttccgcggtcttcctcgaggtcgacgtcgacgaactgctggaagtcgcgaagatctacggcgtccatgtgatgccgaccttctgcttcatcaggaacggcgagacgctcgagagctttgctaccgtcgacgaggacgagctccgggacgccgtcaggaagtacgccgccgctggcactacgacggctcctgcctcggcgtccgcctaattcaggagatgtgatgtgtagcaaatagcgcgcgcgcaccagtcgtcaataaataaataaataaataaataaataaataaataaaggccaacgtacgacgacaaattagtggcgcgcgcggtagtagctagcagagtatgcgccgccactgtgtcgatctgcagtttggtcgtttaaaagtgattgtagtgtgtactatgttcagctcgatgatctcggagtcgctatatacgctcgctcccgtgctggacgggttatcgatctgatgaacaagaatacaataatatgtatggatacttgtg

SEQ ID NO: 16799 - DNA, 810 bp, Zea mays
  Clone ID: LIB3067-008-F3_FLI
gtttctagagccctctctgccactcgtgatcccactagtcacaatgcctgccctcgccaagcccgcctcccgcaccgccaagcccgccgcggctccgaagccgaagcctgccgccgccaagccgaaggcggccaccgctggtgcctcccacccgccttacttcgagatgatcaaggaggctatcacggcgctcaaggagaggaccggctccagctcgcaagcgatcgccaagtatgtgggggacaagcacggcgcgtctctgccggccaacttcaagaagatgctttccatccagctccgtgggtccgcagccaagggcaagctcgtgaaggtcaaggcttcgtacaagctctcggacgccgccaagaaggcatcccccaagaccaaggctaagccggcaaaggccgccgctgccaagaccaccgcccccaagccggccaaggccgccgccgccaagtcaaagaaggcagcggctgccaagccaaagaaggccgctgctgctgggaccaagcgcaaagtgcccgagaagaaggtcgtggcgaagccgaagaagtcccccgccgccaaggccaaggccaagccgaagaccgtgaagtcccctgcctccaagaaggcacggaaggcctccgcatgagatgggttgctttaggtctaagctctgattgtggttggtgtcagttaggtactgtacaaactaagtgtgtgcccaaagtgtctcaggcggtgtgttatgtgcttagcaagttctatctatcagagtgttttagtttaacaatggttttacctctggcttttgtagtcaggtttctg

SEQ ID NO: 16800 - DNA, 851 bp, Zea mays
  Clone ID: LIB3067-008-G4_FLI
cgcccgagccgcccgctagatccatggcgcggctgctaccgacggccgcggcagcggccatcgtggccgccgtcctggtggcgggcctgccgggcgcccgggcggcgtctgcctcgccggcggcggacgacgcgccgccgtacaggaaccacaccgttggcggcggcgatgggtggttcttcgacgccaacaccaacgcctcgtccgggaactactccgactgggccgccggcgagaccttctacctcggtgactacctcattttcaagacgaacgacaactcgtcggtggtgcagaccaccaacgccacgacattcgggctctgcgacgccagcgacgacctggcggagacgacgtccatctacggcggcggcggcggcgggggcggcggcctcgagcagaacagcaccatcgcggtggcgctcaccgccgagggcgccaactacttcttctccgaggccgacgggggcgcgcagtgccagcaggggatgcggttcgagatcaaggtcgagcacggccggggcctgccgccgtcgctcctgcaccagccgccggcgcccaagggccgcgtcctcgcgccgccgccggcgggcacggcgttctcgggcaccggcggggtcgagcccggcgacggcgccggggacaacggcggcgctggcaggagcggcgcgtgcagggcggcggcggcggccagcgcccggttattgggggtggtggctgctgctgctgcggctctggccgttttggttctttgagtagcgatggtttaaaggcattcgtcatttggaaccactgttctgcttatgtatgtgtctgtatttaaattcatcatttaatggagatttgtgttc

SEQ ID NO: 16801 - DNA, 730 bp, Zea mays
  Clone ID: LIB3067-008-H4_FLI
gttcgacttcacctcgcagaacgtcccgcgcgcgctgtggcagcccgtcaagggcacccgcctgtaccgcgtcaggtacggcgccgtggtgcagatcgtgttccaggacacgggcatcttcgccgccgaggagcaccccatgcacatccacggctaccacttctacgtgctggccacggggttcggcaactacgacccgcgccgcgacgccgccaggttcaacctggtggacccgcccagccgcaacaccatcggagtgcccgtcggcggctgggccgtcgtgcgcttcgtggccgacaaccccggggtgtggctcgtgcactgccacatcgacgcgcacctcacgggagggctcgccatggctctgctggtggaggacggcgagtccgagctcgaggccaccgtggcgccgccgctcgacttgcccatctgcgtgctgtagagatttttcagtttgttgctggcgtgcgtcactacgtggagttacagggaggctgtgtcctgtgtgcatcgttctgtgtgtttgcatcggtagttgggcatttgcattcttggatttccatttgaatttgcaaaggaaaaggggaagtaaagtagtatatgactgaatacggatcacgctcatcggctttatttccgcaatgggctttcttgagactactatgtgacctgggccttccaaattagagtcagaggcctatttgagtgtttactactttcaatatacatg

SEQ ID NO: 16802 - DNA, 593 bp, Zea mays
  Clone ID: LIB3067-009-A3_FLI
ccctctcctagtctcctctccacactcccgctctcctgctactctgctccgtgatctggtctggtgagatcggggatcggaccgtcgactcggcgagacatggcggactggggccccgtggtggtgggcgtggtgctgttcgtgctgctctcgccgggcctgctctgcgagctgccgggcacccaccgccacgtcgacttcggcggcttccacaccaacggcaaggccatcttcgtccacaccctcgtcttcttcgccgccttcaccatcctcacgctcgcgctccacatccacatctacaccggctagctagctagctagtgcggagcacatgccgccggtctggactcgcggaggtctcagatcagaaaggaacgccggccggcggcgcgtcctgtgttgctgctcttgttcctctgcagttcgatcgattcgacgaagtgcttgtaactgcctaagcttcctccttgctatgctagttactctctatctatcatgtaaaggccgccatggtcgtccatctgtagctgggcttgcagcaacaggaactagtgcgtgccctttaattaatcgaatctgttggttggttgctt

SEQ ID NO: 16803 - DNA, 889 bp, Zea mays
  Clone ID: LIB3067-009-B7_FLI
tcgctggtatatgtactgcgcagtcggtgtaggtgacgacgaatgaaaactgaaatcttggtctcctgaatacctgaaacagggtcgtttcgagatactgtctctgtccgggtcgtttcttctgtcagagaacggtggccagcgcagtcgaactggtgggctcagcgtttcgctagcaggccccgacggccgtgtcctgggtggctgtgttgccggactcctgacggctgcttcaccggtacaggtctgctgtcgtcctctggatcctgctggctgaaaaatcactaccttcctggttccattcatttcgtcgtggtagcgtaaattacagagcgttgtcggtcgtcgactgtatctccagatttcctcgtcgacgccactcaattgccttcctccgactgcactgtgatcagtgaccaccattgttatctgtactgtgcagatcgtagtggggagcttcgacgccggtggaaagaagcagccgaagcagcagcagcagcagcttgctccgtcaccggcgccactaaatctcgcgccgacgggcgtggcggcagggccgagcagcccgccgtccagaggcacattgagcctaagcgagtcgtccagtggcgccccgccgagcccgccgcacgcaggagccagcggcggcggtggcggccatgggcagcagcagcagccaggtggcttctccggtctgttctggaaatgacgagacccctggacaccgtctgaccgtggtagaactggcactcggtgagaactgagaagcagcggtagcttgtaggtggtgtcaagactgtgtagctcttgctgttgctgtaggtgtcaatcgtgcgttgtgattgtgaggtggttgcttattgtcgtctggaatggatgccgtgtactg

SEQ ID NO: 16804 - DNA, 1374 bp, Zea mays
  Clone ID: LIB3067-009-C1_FLI
gttgaccttcaccagcgccaccttccacgccaaggctacgacgacaatggtggcgaggagcccgaacgccaagccggacaggcagaaggctgcagccctcgccgcggctgccgcgctcaacccggctctcctcagggagacgctcaagaaggttgaccgatgcatggcacggctgcaggagctgcagtacacggtagccggcggcgccaaggtcgtctccggcgtcagtctcagcccccgcagcacgcgcgggtacctccggaccagcctccggtgcaagcaggagaccgtcaggatgaggggcggcgcgtcggcgcagaagaggtccccaagcggcaagttcgggggcggcgtcggcggagagggcgcgcagtggcgacgaatgtcgctgccggcgatgctgctcggcgagaccgtgctagagatcgtgcaggccagccagttcgcgcgggacatcgtgacggccgccggcgctacgaatcgggagcccccaaggaccccgaaaccggctcccaggaccaggaagccggcggcgggcgagccgacgcctctccgcgcgcggcgtgcccgggagaaggagagccatcggggtggcgccgcgacacggggcgccgacgccgccacgccgccgtcgcgcagccgcgtgcggtcccggatccagttcaagcccgtgtcgccggtcgccgtcggccggccgtccgtgtccgccaaccgcgtctcccccaagaaccggccgtgggcaaagaaggcggtgatgttcccgaaccccacgttccacgcctccacctctgccgccaccgacccgtgcgcgacgccgtcgccttccaagaagcagaagcggctctacaagacgcggtccccggtcgcggcccggcagacgccgcacaagttcctggtcaagtcgccaccgagcgcgctgggatcgaagctcaggatgcacgggaaggccctgcccgcgagacccgccgccgtgtcaccgccgccgcccgtgaaggcgcaggcatcacctgcaaaaacgcggcgctgctcgttctcgccgtcgaggttggcgacaaggctcatgtcgcctatcaaagcgaggctgtcgctgggcaggagcagggacagcggcgtcggtgtcggcggtggcccgatgagcgggctgaagcagcggccaggtgttagcttgacggtgcggacggtgtcgagcaagatatcatcgaggtgatgatcttcgtttgtcttcggcgtcatgtgaagacgagagggggtacagattgcagagaagagaattgcgttgatcttcttcagaaataagatattctctgctgggaaagcctcctgtcttggggtgcttgtacacacactcgttacggttatatgtaattttcgttg

SEQ ID NO: 16805 - DNA, 1705 bp, Zea mays
  Clone ID: LIB3067-009-D2_FLI
aaaccacacaccccacctaccccggccggaccggcaggcagcacaacatggacctcgccctcctggagaaggccctgctgggcctgttcgccgcggctgtggtggccatcgccgtggccaagctgagcggcaagcggtaccgcctcccaccggggcccccgggcgcccccgtggttggaaactggctgcaggtgggcgacgacctgaaccaccgcaacctgatggccatggcgaagcggttcggcgacatcttcctgctgcgcatgggcgtgcgcaacctggtggtggtgtcgaccccggagctggccaaggaggtgctccacacgcagggcgtggagttcggctcccgcacccgcaacgtggtgttcgacatcttcacgggcaaggggcaggacatggtgttcacggtgtacggcgaccactggcgcaagatgcggcgcatcatgaccgtccccttcttcaccaacaaggtggtggcccagaaccgcgccgggtgggaggaggaggcccggctggtggtggaggacgtgaggaaggaccccgaggccgcggccggcggcgtcgtgctccgccgccgcctccagctgatgatgtacaacgacatgttccgcatcatgttcgaccgccggttcgacagcgagcacgacccgctcttcaacaagctcaaggcgctcaacgcggagcgcagccgcctgtcgcagagcttcgagtacaactacggcgacttcatccccgtgctccgccccttcctccgcggctacctcaaccgctgccacgacctcaagacgcgccgcatgaaggtcttcgaggacaacttcgtacaggagcgcaagaaggtgatggctcagactggtgagatccggtgcgccatggatcacatcctcgaggccgagaggaagggcgagatcaaccacgacaacgtcctctacatcgtcgagaacatcaacgtcgcagcgatcgagacgacactgtggtcgatcgagtggggcatcgccgagctggtgaaccacccggccatccagcacaagctccgggaggagctcgcctcggtgctgggcgccggcgtgcctgtgacggagccggacctcgagcgcctcccctaccttcaggccatcgtcaaggagacgctccgcctgcgcatggccatcccgctgctggtcccccacatgaacctcaacgacggcaagctcgccggctacgacatccccgccgagtccaagatcctcgtcaatgcctggttcctcgccaacgaccccaagaggtgggtgcggcccgacgagttccggcccgagcgcttcctggaggaggagaagtccgtggaggcccacggcaacgacttccgcttcgtgccctttggggtcggccgccggagctgccctgggatcatcctcgcgctgcctatcatcggcatcaccctgggccggctggtgcagaacttccagctgctgccgccgccggggctggacaagatcgacaccacggagaagcccggccagttcagcaaccagatcgccaagcatgccaccatcgtctgcaagcccctcgaggcctagaaatcaatgcctgtttcctgcacgcgcccccgcagatgaagcactatgtattttgtcttttttttgtgtgttgtgtttttttactaagaggagatgtatttcttgtttgtaaaatgcacttagtcaaatgagtcgagattatgttgatcatc

SEQ ID NO: 16806 - DNA, 1021 bp, Zea mays
  Clone ID: LIB3067-009-D6_FLI
ggaagaaccagttcaggggtatccgccggcgcccgtggggcaaatgggctgctgagatcagagatcctcgcaagggcgtgcgcgtctggctcggtacattcaactctcccgaagaagctgccagagcttacgacgccgaggcacgcaggatccgcggcaagaaggctaaagtcaacttcccggatgaggttcctacggcggtttctcagaagcgccgtgctgctgggcttgcctctctgaaagcgcctaagatggacgttgaggaggagaagccgatcatcaagccggcagtgaacaatatgaccaactcaaacgcatatcactaccctgccgtcgtcggccaccacaacatcatacccgagccattcatgcagactcaggacatgccattcgctcctctggtgaattatgctgccctcgtgaacctgtcttcagaccaaggcagcaactcgttcggttgctcggacttcagcctcgagaacgactccaggacccctgacataacttcggtgcctgcacccgttgctaccttggccgccgttggtgagtctgcgttcgtccagaacaccgccggccatgctgtggcgcctcctgcgacggggaacgctggtgttgatctcgccgagttggagccgtatatgaatttcctgatggacggtggttcagacgactcgatcagcactctcttgagctgtgatggatcccaggacgtggtcagcaacatggacctttggagcttcgaggacatgcccatgtctgctggtttctactgaggctgaggcccagcgactggtgcttgtgtacatagggggggacaaagggtaagagcctgcagtaacagagattggctctttctggtacttgcaatttctatcccttcaactctttcttccgcccccgtgtttcaggaataatgttctggagatgaagaaacgcttgcgtgggcgtgcctgcaggcacgcgtgtagtagctgcggtattagtatatatgcttagatgttcagtcactttctttaagtac

SEQ ID NO: 16807 - DNA, 1070 bp, Zea mays
  Clone ID: LIB3067-009-F10_FLI
cggaactaggaaggcgaagccgaaggcgcggcgcggcgcggcacggatcgagcgatggcggtggcccctcctacggcggcggcgctggagcagctaagcagcagcaagatgttcgacggcttcaatctccgcttccgccaccagagcgccacccttggctgcgccatgactttctccatctacctgcccccgtccccggcgtccaaccttcccgtgctgtactggctctcgggtctcacctgcaccgacgagaatttcatcataaagtccggcgcccagcgcgccgccgctgcccacggcatcgccctcgtggcacctgacacctccccacgtgggttaaatattgaaggagagtcagacagctatgattttggtgtgggtgccgggttttatttgaatgccacaaatgaaaagtggaaaaactggcgcatgtatgactacattgtgaaggaacttccaaaagttttaagtgataactttgaacaactcaacacgtcacaggcatcaatttttgggcactcaatgggagggcatggcgcgctgacaatttacttgaaaaacactgataaatacaagtcggtgtcagcatttgctccaattgccaatccgataaactgcccttggggtcagaaagcattctcaaattacctgggctcaactaaatcagattgggaggaatatgacgcaacctgcctgattaaaaagaacagcaaagttcccactactatcctaattgaccagggggaggccgacaagttcctggctgagcagcagttgctacctcacaagttcgaggaggcgtgcaaggccgcaggggctgctctgaccttgcgcatgcagcctggatatgaccactcgtactatttcatcgctacgttcgtggacgatcacattgcgcaccatgctcagtttctcaagagcgcctgactgtaaatgtgtagcgtgaggaagacaaggaggcagcctagcatgggtgttttatctatgccgacagtgttgtctcgtgtggcagcttgaggagaggtgaacagcacaccccacatgcgaaataagatggaagatttgctgtt

SEQ ID NO: 16808 - DNA, 4087 bp, Zea mays
  Clone ID: LIB3067-009-G2_FLI
ggaaataaaaaaacattttccggaggagaaaaaacccccgagaagaagaattcctctcgctcgaggggtgggaaagaagcggaaggggagacgagtcgagaggaagccctcgcctccggcacacgccatggtggagactcgccggagctccgccgccgccgccgggaagcgcacgtctccatcgccatcctcttcgtccgtacctcccccgaagcgccccaaggcggagtcctcggggtcaccgacggcgtccgcgcccggcagggccgaggaggattctgtggcgggagcggcacccgcgaggagcgccggctcggtcgatgacgcggcagcgatcgcacagaaagatcaaggagtcgataagccgtcttccgctgttgcagagagttcaaagcggaggaaggagcaggagcaacagcaacccgcagtgccatgggcgaagctgctctcggagtgctcacagactcctcactatcccatcagtgtggatcagatttctgttggtcaaagcaaaaactgtaatttgtggctgaaagaccaacctgttagcaaagtgctttgcaagctgcggcgccttgagcaaggaggtccatgtgagttagaagttatagggaagaagggtatggtccaattaaatggaaggtctgtaagtccaggcacaaaagttccccttacaggaggggatgaagtcatattcagttcatgcggcaagcatacttatatttttctttatcctttgaatgacaaagttcctaaactgtgctatcatctgctgttagccttctagaagctcctgttgctagtgtaaagcgtatccgtacagataagagaacaggagacacttcagctgttgctggtacagagatgatgacatctacatctaatcagaaggatgtagcagcagtacctcccgcgtcagctggagagaacagccaaagagtagtgcggccaatggcatcatctgcttctgataaatcgaaagggcgtgctgtgagccctgaaaaggaatttgcgaatggggaaaatgctaatgaggttaattctaacatcgaagactctccaatggttgttgctgcagcccccatatctcctgatgctgctgcgaacgatacctgtcaacaaaatggctttgtctctgattctcatctcggtgcggaaatcgctcttgaagatcagagggatcacatcatcagggagcttaacgcttcaaccaacgtgcctccaagtagatgccaagcctttaaggatgggatgaaacaaggaattatcaatccaagtgatattgatgtcacctttgagaattttccttattatctcagtgagaatacaaagaatgtgctcttgtcatctgcgttcatacacttaaaaaagaaggagttcatcaagcaatttgttgagatctcatcaataaaccagcgaattttgttatctggtccagcaggttccgagatttatcaggaaacattggtaaaggcacttgccaaacattttagtgctagactccttgtggtggattcacttttgctgcctggggcaccttcaaaggatccagaattccagaaagatgttgggaaggctgataaatcaggggataaggcagctgccgagaagtttgcaatatatcagaagcatcgttcttcgttggcagacactgttcacttcaggaggccagctgcaccaacttctagtgtgaatgctgatattgtaggaacatccactctgcattctgcatctctaccgaaacaggaatcgtcaacagctacatccaagagttatacttttagagaaggtgatagggtgcgttatgtgggtccagctcaaccatgctcgttgtcacaaaggggaccaagttatggttatcgaggtagagtgatgcttgcttttgaagataatggatcctcaaaaattggagtccggtttgacaagcagatccctgatggtaatgatcttggtggtttgtgcgaggaagatcatggcttcttctgctctgctgaattactgcgcccagacttttctgctggtgaagaagttgagaggctagctatgaccgagttaatagaggtcatttcagaagagaacaaatctggacctctgatagtgttacttaaggatgtcgagaaatcattcacgggagttacagagtcactatcatctttgaggagcaaacttgaatcgcttccacctggtgttcttattataggatcccacacccagatggacagccgcaaagagaaggcacatcctggaggttttcttttcacgaagtttgccagtagtagccagactctttttgaccttttcccggatagctttggtagcaggttgcatgaaagaagcaaagaaagtccgaaaacaatgaaacatctaaataaacttttcccaaacaaaattttgatccagcttccacaggatgaagctctacttacagattggaagcagcagttggatcgtgatgttgaaacccttaaagccaaatcaaatattggtagcattcgcatgtttctgagccgcaatggaattgaatgcaatgatcttgaagaattattcatcaaagaccaatcattgagtaatgaaaatgtggacaagattgttgggtacgcagtgagttatcaccttaatcagaataaaattgaaacctccaaggatgccaaacttgtactcacaactgaaagccttaagcatgggctcaacatgctccaaagcatgcaaaatgataacaagagctccaaaaaatcactgaaggatgttgtcacagagaatgagtttgagaaaaggcttttggcagatgttatacctccaaatgacattggagttacctttgatgatattggagccttggagaatgtaaaggacacgttaaaggagctggtgatgctccctttgcaaagacctgagttgttctgcaaagggcagttaacaaagccttgcaaggggatattgcttttcggacctcctggcactggaaaaactatgcttgccaaagcagtagcaactgaagcaggcgctaatttcatcaatatatcaatgtcgagcattacatctaagtggtttggtgaaggggagaagtatgtaaaggctgttttctcactagcaagtaaaatagcacccagtgttatatttattgatgaggtcgatagtatgctaggaaggagagaaaatccaggggagcatgaagcgatgcgcaagatgaagaatgaatttatggtaaattgggatgggttgcgcactaaagataaggagcgtgtgcttgttcttggtgctacaaatagaccttttgacctcgacgaggctgtgattaggaggttcccccgcaggttaatggtaaacttgcccgatgcatcaaacagagagaaaattctaaaagtaattttggcaaaagaagagctgggatctgatgttgatatggactcgcttgccaatatgactgatggttattcaggaagcgacctgaagaatctgtgtgtgaccgcggcgcattaccccatccgagaaattctggagaaggaaaagaaggagaagaatttggctaaaacagaaggtaagccggagcctgcattatatggaagcgaggacatccgtcctctcagcatagatgacttcaaatctgcccatgagcaggtttgtgcgagcgtttcgtccgactcggcgaacatgaacgagctccttcaatggaacgacctgtacggcgaaggcgggtcaaggaagaagaaagcgctgagctacttcatgtgatggggtgagagcatagaatccagaaggatcacagccgtggcataagatcagaaggaacacagagcggccatagtaccacacccactatggccctaaatccagtcaagttttcgctccttccccctccctcagtagccgccgccgccccgccgccgcctggtgtaattagaactgtgtacggagtcgagttggtttgccagctgtttcaaggttacagagttgagatttggaattacaatggcgccattgccctcctccaacccccctttttcttcctcccataagttgcgatcactgtccttcttggactctctcgcctttgttcttgtaaatgcgaaatgaagggatgtgaaat

SEQ ID NO: 16809 - DNA, 1079 bp, Zea mays
  Clone ID: LIB3067-009-H8_FLI
atgttctggagctttcagagggatgggattcattggtcactgcacgtgcagctgaactcctaagtttaaatcttgaaaccatggagaagttgaaggaatcagaagagctattggaacgatgccttgcagtcaagaaaaagattctacctgaagatcatcttcaggtagcttatacgttggtacacctggcaaggttaacattgcacagagttgtaaaggatcgggatgtaaacagcgatgtaactgcatattacctcgcaaaagcaaaacagttcagcaatgattcaatcaggattacagaaggacaattaaattcttcaagaaaagatcagaataaaattaacaacacatcaactgcagatacagataagagtgcagcaataattctttttcaagcacttcatgtttttggactcattgatattgcagcgaagcagttgctagggcaagggttggtactgttgctaaggcttccactggaacatttgaagcatggattcttcaaaattgaagctgtacatataccaggcacacctcggccatttatatggaccgacacatataccatatatgcccgatatagcgcactgcaaatccattttaaaaataagtttggaaaggagcaagactataattctgttcaagatgctctgcagaagtgtgtttcactttacaaagagcctcatacacgaaggttggtgaaaaatgctgccaagcaggactacatgatatgcctgacgagcctgatcgatatggttcagagcttgtttcccattccacacataccggggttgcaggagttgctttgcgaggccgaacaaattttaggagagctagaagaagagagtactaggaagaagcaatgatacgtaggaaccaacacccatatgggtggaagcatttgttaattgcaagttgtgagccatatattttttcagttggtcgagatcgcccacctatatgggtggaagcatttgtttgacgaggtgctgaatcgagtgacgggttaaagagtttaatgcttgtttgcgcagtggtgttatgacgtggtcttcaacatagagtcctagtttctcggt

SEQ ID NO: 16810 - DNA, 1554 bp, Zea mays
  Clone ID: LIB3067-010-A6_FLI
ccagtctcccgggcagaagaggcacgagaggaaggtggggaaggaaaccacagccgcttctggcgggcgctcaccctgccccttccacctcgcctcgcctcgcaatggaggtttccaggtggaccccggcggccggcctcctgctcctgttgctcctcccgctcgcggccaccccgtcacgcgccgccacgatggcgagatcgccgtcgtcgtccactgccgtgttccagctccagggagacgtataccccaccggccactactatgtcacgatgaacattgggaacccagcgaagccctacttcctggacgtggacactggcagcgatctcacctggctgcagtgcgacgcaccctgtcggagttgcaacaaggtgccacatcccttgtatcgaccaacggcaaaccgccttgtaccgtgtgcaaacgcactctgcactgcacttcacagcggacagggctctaataacaagtgcccttcaccaaaacaatgcgactatcagataaagtacaccgacagtgcatcttctcagggtgtgctgatcaacgacagcttctcactgcccatgagatcctccaacattcgtcctggcctcacatttggctgtggatatgaccagcaagtggggaaaaatggcgctgtgcaggcagcgattgacggcatgcttgggctcgggaggggatcagttagccttgtttcacagctcaagcagcaagggatcaccaaaaatgtcgtcggccattgcctaagcacgaatggaggggggttcctcttctttggggatgatgttgtgccttcatcacgtgtaacttgggtgccgatggctcagaggacatctgggaactactactcacctggctcaggaacactgtacttcgatagacgttcactaggcgtgaagccaatggaggtggtatttgacagtggtagcacctatacttattttactgctcaaccataccaagctgttgtttctgcgctcaaaggtggtctcagcaaatcacttaaacaggtgtcagatcccactctgcctctgtgctggaaagggcagaaagcattcaaatctgtgtttgacgtcaagaatgaattcaagtcaatgtttctgagctttgccagtgccaagaatgccgccatggagatcccacctgaaaactacctcattgtcacaaaaaatggaaatgtgtgcctgggcattcttgatggaacggctgccaagctgagtttcaacgtaattggagacatcacgatgcaggatcagatggtgatctatgacaacgagaaatcgcagctgggatgggcgcgtggggcatgcactaggagcgccaagtctattctgtcttcctttccctgagctcagttctatgtacttctgatagagtttaagaaaatcactatatcaaacctcctcgcaatgcatgaatttcctaactgaagagggagggagagagagagagagaatgttcctgtttatgtagagatggagtccaaaatttgtgtgcctgatgagttcttccccatatgatattaactgaaatagtatatcaattgaatgt

SEQ ID NO: 16811 - DNA, 733 bp, Zea mays
  Clone ID: LIB3067-010-A8_FLI
gaacaacgcgaccgccgccgccgacgacgacgactcagctactcgcctggtgatgggggtcgaactggcgcaaccgaccgccgccgcggctgcggtgaccaccgctgagcaggctcaggatctcatcgacgccgctaggtacgacgacttggaggacgtcgtcgccctgttctccgctggtgtctcgctggactccacagattcgcaaggccgcacagctcttcacatggcttctgccaatggtcaccttgctgtggtggaatacttgattcaaaatggagcgaatgttaatgccaccaacatggagaagaacacaccactccactgggcatgccttaatggacgtatagaggtaatcagggctttgatctcagcgggggctagcgtgagtgctctgaacagccacgagaaaacgccaatggacgaagcggtgaccacaggcaagatggacgtgatcgacgcgatcggtgcggcagtagctcaagccgagctcgacgccgttactgtctcctaaaaggacctgatgagtacctggagctttgaatgacttgcagccttgttcttatctcccagcggttctgtctgtatcactcgcgaacctggatcccccgacgggccagtatccgggcaatatctatactgacggcaatcgcctgttagtgtcattggcacgaggacccgacctgtcgttgtaaaccagatgtgcagatgtcaaagatcaggattttctcct

SEQ ID NO: 16812 - DNA, 410 bp, Zea mays
  Clone ID: LIB3067-010-F10_FLI
aggaggagtccccgagcaggtggcgaggctgtgcagcttcgaggtgctcagcggcctggagaaaaaccaaaccggaggtgtcgcttttggaaacgatttagtcattggcaagtctacgttcttcagggaaggcaaggtgggggactgggaaaaccacatgaccaaagagcagggacagaggttggatgacgttttggaggacaagcttaagggatctggtctcgtgttttgattaattcatatagcatgttgtttgtcatgaataatcattcgctcacacatgtagtggtattttatgtaattggatcttttttttttctacatagattacgttatggtaatgcagaattatggtgtagctcgatttatcatgtgcatctgtatgtaaggaattgaggtcctttctggtg

SEQ ID NO: 16813 - DNA, 1097 bp, Zea mays
  Clone ID: LIB3067-011-A5_FLI
cctgagtcctgcctgcgctcgcctcctttcttcccccccggccccttggcttttgcttggttgcatcgggccggtcgagccggagaggccggaaaagctagctagctaccagctctccggtgtggtagtacgtctgcctgcagctggggttagctgcaagggttgggagccatggggaggggtcgggtggagctcaagcggatcgagaacaagatcaaccgccaggtcaccttcgccaagcgccgcaacggcctgctcaagaaggcgtacgagctctccgtgctctgcgacgccgaagtcgcgctcatcatcttctccaaccgcggcaagctctacgagttctgcagcggacagagcatcaccaaaacacttgagaggtatgaaaaaaacagttatggaggaccagatactgctgtacagaacaaggagaacgagttagtccagagcagtcgtaatgagtacctcaagctgaaagcgagggtggataatttacagaggactcagaggaatttgcttggtgaagatctggggtcacttggtgtcaaagagcttgagcagcttgagaagcaacttgattcatccttaaggcacataagatccacaaggacacaacatatgcttgatcagctcactgatcttcagaggagggagcaaatgctgtgtgaagcaaataagtgccttagaagaaagctggaggagaccagcaaccaggtgcatggccaagtgtgggagcacggtgccaacttactcggctacgagaggcactctcctcaacagcaggccccatcacatgttggcaatggtttgttctttcatcccctggaagctgcagcagagccaaccctgcagatcgggttcgctcctgagcatatgaataacttcatgccaacatggctaccctgaagatggatcttgaggcaaaggaaataaataaagatgcggtggcagcatcatactctatgcaagctaagagtgacagctgtgtttcagtcacatatatgatctagtctgtgtgtcaatgtgtcgaaaaacatgtctgtgattttgttatatgaatgtaacgcgcaatgaaacatacaggactagctgcttgcttg

SEQ ID NO: 16814 - DNA, 526 bp, Zea mays
  Clone ID: LIB3067-011-F9_FLI
caggggatcacgaagccggcgatccggaggctggcgaggaggggtggcgtgaagcgcatctccgggctgatctacgaggagacccgcggcgtgctcaagatctttctcgagaatgtcatccgcgacgctgtgacctacacggagcacgcccgtcgcaaaaccgtcaccgctatggacgtcgtgtacgccctcaaacgccagggccgcactctctatggcttcggcggctaggttaggtgtgggtaattgcctgtccaggtgtctcggatctgtggtactagtttggctgccttcctgtgttcgtattgtagtagttgtggtagctggttgctttgtcgtcctgtagtcgtgcttctttgggtctgtaagaaccgctggttcgatgggattggattggacggtgaagtaggaatgttggcatgttagacttttctccaacgtagcgttgcctctaatttgatctctcaatttattttcaattggggtgcactgtaattcttcctgtctaattcaaatcccctttctg

SEQ ID NO: 16815 - DNA, 336 bp, Zea mays
  Clone ID: LIB3067-012-F9_FLI
gaaagacgaacaactgatgaatgcgccagcagcatttccagttaccacgtgctaccgtgtagatttccctgttcattcttgtaaccaaattgctccggtaggcctacaatcctgttgcattggctttcttgcgtcttgctagctagggcacctgtagaaaccttcagttcttcccgatcttgtaacagcatgtaaagctttttctccctctcccagtctccatgtattttgttcattttttgttgttgtacgagtaaagttgttcttgaggccgaacctactctactgaaacattggatcgtgaagttaatgtgaatatgtgctgcaacttatccc

SEQ ID NO: 16816 - DNA, 937 bp, Zea mays
  Clone ID: LIB3067-013-A12_FLI
attggccgtgcgtccgtggctttgcatctgcaaccccgcccgatcaatcttcctcgttccgccgctccctcgcctccggcagcgaggtgaggccaccgatcggaccttccctagcggcggcgcctaccaacctcaaggagcgatggctctgtctgcgacgctacggatttctcttagcgtcgcgttctttggggttctggcgttcgtgcttggtgtcatcgccgaaaacaaaaagcctgcttccgggactcctatcctaggaaaggatgtcgtcatctgcacgtttccaagtgatccgactcttgcgatggggagcctgtccattgtggcacttgtggtagctgccatcgtaggccatgttgccatcttctttccatacttgggcaagtcagttcctcgtggagcgctgtttcaaagcaccagcttgatagtgttctttgttgttgctgagcttgtctcagccctggctcttgcaatgtcgttgtgggcaactgtcactgagggacttcaccgcagcaagaacatccaccacgacatggactaccagtgccctactgccaagaccggcctgttcggcggcgccgctttcctcgcccttgacgctgctctcttctggcttgtttgccagatgctggccctcaatgcaagggctgactaccttgacgaggatgacggcaagggagaatatggccagatttatgctgctcaagtcgatgatggctcgaaggtctgagcctatgtggtcatgctcggcagggttctatgattagtgtcatttggctacattatgccatcaacaaagtcgctttagctctcagtaaatttgtatataagttgcaaagtcttacataaggctggtggttattctgcactttcgtgtttcagtgtgatcaataaacagtatctcagtacaatcggtttgctatgccccttggtg

SEQ ID NO: 16817 - DNA, 594 bp, Zea mays
  Clone ID: LIB3067-013-E5_FLI
cttacaaacaactcagagaaatctacttggtgaggacttgggtccacttagcgtgaaggagttagagcaacttgagaaccaaattgagatatctctcaagcaaatccgatcatcaaagaaccagcagatgctcgaccagctctttgatctcaagcgcaaggaacaacaactgcaagatgctaacaaagatttaagaatgaagatagaagaaactagtgaagaaaatgtgctgcgactgtctagccaggatattgggtgtagtggatctagtgggcatggtgatgaagccaaccaagaacaccttcaacttgctcttgatccttcgctgcatatagggtatcaagcttacatggaccacctgaacaatgattaagttgcttctttgtgcgctgtgtgctctagtggccatggatcttctatatatgttggacgtaatgcttttgataaatcctctatatataaccatatcggtcctagctttatgcatgctactgtatgtactaaactaagaagccctacgacttctgttgaggaagaatgttctgacgatcatgactttttcttgctaaataataactactgtatctcattttg

SEQ ID NO: 16818 - DNA, 1334 bp, Zea mays
  Clone ID: LIB3067-013-F4_FLI
caaagagatggacgatggaaacaagagcatggttgaacttccctccaaaactgttttggcatgttatattgatctttctgcagaggagcgtgaatactatgatcagatggaacaggaagggaggaacaaaatgcaggaattcggtgacagagattcgattctgagtaattactcaaccgtgctttatttcattctgaggctccgccagctctgtgatgatgttgctttgtgtcctttagacatgaaagcatggtttcctgcaagctctatcgaagatgtgtctaaacacccagagctgttgaagaaactggccttattggttgatgatggagatgactttgactgtcctatttgcctctctccaccaactaaaactgtcataaccagctgcactcacatatactgccaaacctgcatcctaaaaatcctcaagagctccagttcccgctgtccaatatgcaggcgcaccttatctaaagaggacctcttccttgctccagaggtaaagcatcctgatgaagatggttcaggcaaccttgagtctgacagacccctctcatccaaggtgcaagcactgctgaagctgctgacggcttcacagaacgaagacccctcatcgaagtctgttgttttttcccagttcaggaagatgctgatcttgctggaagcgcccctcagaagggcaggctttaagacactacgcctcgatggctcaatgagtgcgaagaagaggctgcaagtcatccaagaattcagtcacggtggctctgactccccaactgtgctactggccagtctgaaagccgcgggagccggcgtgaacctcacagctgcctcgacggtgtacctgttcgacccctggtggaaccctggggtagaggagcaggccatggacagggtgcaccggatcggacagaagaaagaagtgaaggtgataaggctcatcgtgaagggcagcatcgaggagaggatactggccctgcaggagaggaagaagcggctgatcagcggcgcattcgggaagaagggaggcaagaacgagaaggagatgcgtgtcgaagagctccggatgatgttgggcctaggtaagtaaggaaaaggctggttggtggtgataggaggagtgatgcttgtgttgcttgtgatatagctctggcggtagaagttgtagctagggcgatggagtttcagtgtaggcatagggtagggctggaagaaaacgaaatccaggcacgcgtgcatgtatctctgatgctaaacattagcactagatcagtgctaaatgattgggtcctcacttcctcagctgtgatggtcaattactgaacacggtc

SEQ ID NO: 16819 - DNA, 1898 bp, Zea mays
  Clone ID: LIB3067-014-D4_FLI
gccgaccaccgtccgcacggtgctctcgctggcccttgctcgctcctggccaggtcaccagctcgatttcaagaacgccttcctgcacggcgccctcaccgagaccgtctactgctgtcagccggtggggttcgtggactcctctcgccctgacatggtctgccgactcaacaggtccctctacggcctcaagcaggcccctcgggcgtggcactccagacttgctacgttcctggtgaccctgggcttcgtggaggccaagtcagacatgtctctgttcgtccaccatcatggaacagagactgcctacttgcttctctacgtggatgacattgtcctcactgcctccagtcagtctcttcttcgccgccttgtcgacgcgcttcagcgggagttcccggtcaaggatctgggcgtgcttcaccatttcctgggggtcactgttgaggctcgtccctccggactcctacttcaccagcggcagtacactcttgaccttctggagcgggccaagatgattgcctgcaagccctgctctaccccagtcgacacgcaggcgaagctctctgaggcccagggtgacccagtcgaggaccccaccgggtacaggagtctcgctggtgctcttcagtacctcacctacaccaggccggacatctcctacgcagtgcagcagatctgtctccatatgcacgacccccgggagccccacctcgcggctctcaagcgcctcctccgctacctccggggcactgtcgactacgagctgcttcttcaccggtctacctcctccgagttggtcgtctataccgacgctgactgggccgggtgcccagacactcgacgctccacctccggctacgccgtcttcttaggcggcaacctggtgtcctggtcgtcgaagcgccagccggtcgtctcccgctcgagcgccgaggcggagtaccgtgtcgtggccaacggcgtggcggaggctgcctggctccggcagctcctcgccgagcttcacagtcccctctccaggagcacattggtctactgcgacaacgtcagtgcggtctacctctccaccaacccagtgcagcaccagcggaccaagcatgtagagatcaatctacatttcgtccgcgattatgtcgccgccggtgctgttcgggtcctccacgtcccgaccacctcccagtttgctgatatcttcaccaagggtcttccgtcctcgaccttcgccgagtttcgctccagcctcaacatcagtagtggctagttgcgtctgtgggggatcctatggtgtaatgtgtcttccttttgcgtccagtctgtgaactccgcttcgacagaagttcagactgcgggggggtgttagagtatatggttaggcccatgtacaaacaatatatagctaccctctagggttagccctaataatcaagtcatttacgctgacacttgtagtacaattcctagtccagttaccaacatcaaaaaaataatcacttactctctccatacaaatatatgacatattttccgtccattcttaggctttgccaaataattgctacttaataagttcactatgtgatgcaaaatcgcaatcgtaagtcagcacttgtaaaaatcaatctaataacaccacaaaaaatatgcactaaggttgtccgcagtagaccatgtaaaatagtgaatctgcaatgtaaattactgtttgcagagtaaagtttgaaatagagaacatgataggggtaggataggatagctgctgaagacagccgaatagagtaattgttgttcgggtttggtgcggggaaggctggtttcggtttagcccttccctcatatcccactcatgtggtagcctccagcaatgggtctacccttttttagagtaattgttggtc

SEQ ID NO: 16820 - DNA, 314 bp, Zea mays
  Clone ID: LIB3067-014-G10_FLI
gtgagcgtccagttcaacaagatcttctaggctgttttggtgctgccattgtttattctctcctgctcccatcccgatctttcttaatcctgttttggtgcttgtatccagaccagttttaaccctgtctcagctctaccgtatgtaccattgcccgttggtgtcgttttagtgcctaacaatatttatgaattttgtgatgagctagctactgtcctgccgatgactatgtttgcttccaaaggacacggcttatcgtcgctgatataccactgtgtcgaggtattatgttataacgtcattgtggtcttgac

SEQ ID NO: 16821 - DNA, 847 bp, Zea mays
  Clone ID: LIB3067-016-F1_FLI
gcccggcctccgcctgcagcttgaacgcgagttttccagactggtcatcgccggagttggggcactgcaagagcagcaaggagaaggagcctgcccctgcctacctcaccttgagcgcgcagcctgcgccacgcgggaagcagcctcctcctgcgctcccctcgatcaaactcccggagttgggtcactggggcgtcatgcagcctcctcagcacgggagcgcttcggcgtcgtcgtccgcgtcggcgtcgcggccgttctacagcttcatgccggctggtccggttcgcatcgacagaccccggatcgggatcaaggccgacgacgcctctgacggcgtcgacctggaactgaagctgtgaaggcgctcatcgctggacccctctgttcctagctggtaaatttgacgccgaacctgaagcgggaactgggaacagagctcgtcgtcgtcgagaagaaaagtttctggcgccgtgttctcggtttgtaacctgaaacacgatgtatcggtatttgcgttcttttttttttctcctcaacattttcccgctcccaataaacatctggtgcgcatggagatggagtgtgtgcagcgtcgagcaggtcttcagtgaggaaaggagagcacgtgcacgatcggggttgcaagcttgcagctggcctctgtggggggtcttttctgtacagatctagcaaggcagcgtcgtggcacacccagatacgcaccagacagtcaggtagatgtctgccaagatatgcaaatatggttgtagatgttctggttttcctttggatcatttgtgtttgtggatgtagtgctacgtgcaatggaatcaccacatttccc

SEQ ID NO: 16822 - DNA, 592 bp, Zea mays
  Clone ID: LIB3067-016-F3_FLI
ggaaatggcaaccgttccaggggatctgatctggcaggttgtgaggaagaacaactccttccttgtgaagcagttcggcaacggcaatgccaaggtgcagttcaccaaggagccgaacaacctctacaacatccactccttcaaacactcgggtttggcgaacaagaagactgtgacgatccagccagctgcaaaggactcggctgtggtcctctctactaccaagaccaagaagcagaacgcacctgcgaagctcagccacaagtctgtgatgcgcaaggagttccgcaagatggccaaggctgtgaaaaaccaggttagtgacaactactacaggcctgatctgaccaagccagctcttgctaggctaagctcggtgtaccgcagcctccaggttgccaagtccggtgtcaagaagaagaacaggcagtcctaagcgctaagtttgtgttctgtcagggggcatgttggtgctcgtagtcccagcttatatttatctatgttccaacagttgagacttgttagaactgagcaaaccatgttaagatgctgctgtgtgtcattccttaaaaaaattgccttgcactttgtg

SEQ ID NO: 16823 - DNA, 684 bp, Zea mays
  Clone ID: LIB3067-017-B7_FLI
ctttaagattattttgggagttcctgcacagggtaacaagctataacaaataaaatgtgaagaagacagttttctccaaatgttaggtctttgacatttttctataacacttcagcttaaatatgtacttttttcttttaatttgcgctgaacttgatgctaccttggtgacaagagcagatgtacgtttagtgcgatcaccaaggtcgtccgtatcccacggctgggctgttattttcttgtaatactgctttcagatgtaatgactattcatttctttttcctggtacggaataccggtagttggatggaaatcggcaacagcattagccatttcggaatagtgagcgcccaagtggtcttcgttttgctgctttttgccctcacgaatatatacactagagatattttggtctcgtctcggcaactaaccgcacggaaagttatgtaaatcgttcagtttatttagaaatccaaatacatccatccttttatttattcatttttgggtcgactttcattttgggatcaagtttgtagcttagcttttggctaaagttttgtagcttagcttttttgttttctgtgaatggaccttggtgtcaaatttttgtgctaatttcattcgcttacttacagcctgaacagattataactatattagctttcctctcgggctatcat

SEQ ID NO: 16824 - DNA, 681 bp, Zea mays
  Clone ID: LIB3067-017-C12_FLI
cgcaacgcacgttctctccactggtcctacaacactctccctaccacaccgaaccaacaagaggagcaagaggtagctatagcagcctagcacacaccaccacccaccaccgccaccgcgccacagagctgccgagagtgtgctgtgctttgctcatcgaccgaccgatcgatctcggcatggcggactgggggccggtgctgatcgggctggtgctcttcatcctgctctccccgggcctgctcttccagatccccggcaagggccggatcatcgagttcggcaacttccagaccagcggcctctccatcctcgtccacgccgtcatctacttcgccctcctcgccatcttcctcctcgccgtcggcgtccacatttacctcggctagctagtcgccggcgggcggccggctgagcgaggctagctgctggcgcgcggcggcccggcccggctttatttgacatcatctgggtggctggattaggtactgcgtggttcagaggcatatactactatatacatttacatgttcatctccatctgcttgctagctgtatgttgatttatttagctactactttatcaacgacatcctcgagtccagatacagtatatccaattaatcccttatgagcatgcttctgatgtccattaataatacatatgtcgtgtttttaatt

SEQ ID NO: 16825 - DNA, 1661 bp, Zea mays
  Clone ID: LIB3067-017-C9_FLI
ccccgatctcggcgacatcgaagaggcccacaggttcgggctctcggtgattgccatcatgatggccgcgtgcctgctggagcccggggacaaccaccgctacaacatgttcccgtcagacactcacgtcaggatgcacgatgtcgtgcgcgacgcggcgctccggctcgcgcccgccaagtggctggtccgcgcaggcgctgggctcagggagcccccgcgcgaggaggcgctgtggcggggcgcgcagcgcgtgtccctgatgcacaacaccatcgaggacgtgccggcgaaggtgggtggcgccctagcggacgcgcagccggcgtcgctgatgctccagtgcaacaaggccctgccgaagaggatgctccaggcgatccagcatttcaccaagctcacgtacctggacctcgaggacaccggcattcaggacgccttccccatggagatctgctgtttggtcagcttgaagcacctcaacctatccaagaacaagatcctgtcgctgccgatggagctgggcaacctgagccagctcgagtacttctacctgcgcgacaactactacatccagatcaccataccaccggggctgatctcgcggcttgggaagctgcaggtgctggaggttttcaccgcgagcatcgtctccgtcgcggacaactacgtcgcgccagtcattgacgacctcgagagcagcggcgcgcgcatggcgtcgctcggcatctggctcgacaccacccgcgacttggagcgcctcgcgcggctagcgccgggcgtgcgcgcccggtcgctgcacctgcgcaagttagaagggacgcgcgccctgccgctgctgtccgcggagcacgcgccggaacttgccggcgtgcaggagagcctgcgggagctggtggtctactcctccgacgtcgaggaggtcacggccgacgcgcacgtgcccatgctggaggtcatcaagtttgggttccttacgaagctgcgcgtcatggcgtggtcccacgccgccgggtccaacctccgcgaggtcgccatgggcgcgtgccacagtctaactcacctgacgtgggtgcagaacctcccctgcctagaatcgctgaacctcagcgggtgcaacgggctgacgagactgctgggtggcgcggaggacagcggcagcgccacggaggaggtgatcgtgttcccgcgtctgaagctgctggccctgctggggctgccgaagctggaggccgtgcgagtcgagggagagtgcgcgttcccggagctgcggcgcctgcagacgagggggtgcccgcggctgaagaggattcctatgcgcccggcgcgcgggcagcaaggtaccgtgcggatcgagtgcgacaagcactggtggaacgctctacagtgggcgggcgaggacgtcaaggcctgcttcgtccctgtgctgtgagtcatttcactaggcggacggagctgcaattttggcgccagttgatatgttcgacgaccacggtccacgggttgcaccacggttcaaggcaagatgagcgatgagattggaaatatctctcgaacagcgaaaaggcggtttgttttggatttcttctaagaacaattcaaattttggcttaattcccgttatgttgagaactggtgacctagttaaaggcgcttttgtc

SEQ ID NO: 16826 - DNA, 538 bp, Zea mays
  Clone ID: LIB3067-017-D1_FLI
caaaaacctcgtcagtttgggaacagcggaaaaccggccccccgcccgcctgctaggtgctagcaacagcagtcgccgccgatgggggtggactactacaaggtgctgggcgtcggccgcggcgccaccgacgacgagctcaagaaggcctaccgccgcctagccatgaagtaccatcccgataagaaccctacgccgcaggccgacaccctcttcaagcaggtctccgaggcctacgacgtgctcagcgacccgcagaagcgagccatctacgaccagtacggcgaggaaggcctcaaggccggcgcgcctccgcccgccgcctccacgcacggcgccggcgccggcgtccacaggttccgcttcaacacgaggagcgccgaggagatcttctccgagatattcggcggcgggtttgctggggcaggcccccgtacccccggcggcggcgtcccctccgggttcccgatgttcggcggcgctgctggggcaggggaggcgtcgagcgcggcgtcgcagaggaaggcgccgccgatcg

SEQ ID NO: 16827 - DNA, 256 bp, Zea mays
  Clone ID: LIB3067-017-G4_FLI
ctggacctcaatgaaaaggacttgattttgttcgcatctgtgcaggatcacaggatctgagtggttaggaaatatcaccatcttttttttgtgtgtgtgtggatggagttcatagctggagttgtcctgcgagattgaagcgaggtgttcctaggagccagaaggggcaccgcattggtttctgatgtacgcacactaacggtttctgaaatttgagctagtaatctgaatgaaatccaaaccgaataaccgatac

SEQ ID NO: 16828 - DNA, 1236 bp, Zea mays
  Clone ID: LIB3067-017-H1_FLI
cgaagagggccttcttaaaaatcttccaaaggatcttagaagagagataaagagacatctttgtttgtcacttctcatgaaggttccaatgtttgaaaacatggatgaacagctgttggatgccatgtgtgatcgtctaaagcctatgctctacacagaaggaagctgcatcattcgcgaaggtgatccagtgaatgaaatgctcttcatcatgagaggaacactagagagtaccacaacaaatggtgggcaaactggtttcttcaactctaatgttctaaaaggtggagacttctgtggtgaagagctcctcacgtgggcccttgaccccacttcagcttcaaatcttcctggctcaactaggacagtgaagacgttgtctgaagtcgaagcttttgctctgagggctgacgacttgaagtttgttgccacacaatttaggaggctccacagcaaacaacttcagcataccttccggttttactcacagcaatggaggacctgggctgcttgcttcatacaggcagcttggcacagatactgtaggaagaagctggaagaggctttatatgagaaggagaagaggttacaagcagcaattgtaagtgatggcactacttcgctcagtcttggtgcagcgctctatgcttcacgttttgctggcaacatgatgcggatcttacggagaaatgccaccagaaaggcccgtttgcaggaaagagtacctgcaagactgttgcaaaagccagcagaacccaacttcttcgctgaagatagctgaacttgtaccctgtagcaagcagggattcatggtccaaccggtgaagtttgtgcagaagttaagattggatgctgtagatagacagatcaggtgctctaaagccgtctggtttaaatcacctaattcgcgaaaaggcctggtccgagttagattctccgttgaaataaatttgaagctgacgttaaaaaaaaatccgcttttgctccacgttaaatcctggcttccatagtggtcggactagggtgctgagataagggtattgagattttttagatctgtgtgaaaagattttctgtaacgtaatatctgaaggctgtcttatcctctataggttattttaaaaaatcacgtatatttcgattgtatacaggtttcatgtattataaacactctaatttaccttgtgcatttgaaaaaagagagaagatgctgtgaatataatcgattaattgttt

SEQ ID NO: 16829 - DNA, 2108 bp, Zea mays
  Clone ID: LIB3067-017-H3_FLI
cgcgatctagtcaagctccagatgggcagtctctagcaacctctccaacccgggacggtgctccgtttcgggagtcttgagttcatgtccttcgaccgcagctacgacatgatactccttccaccgccgcgcgacaacgacaatggcgaccgacagcccgcccgccggcggcggaatcgacgacgtcttccccgcgtggcggaagaacaaccttcgagctcgtcccgccttcttccccgccgacggaggggaaggcagggcaaccaaggccaagcaggaggcagcgcctcgtcggctgtcgagcaagtcgacagcgccagcaccccaacggggggcgcaccgggtatcgacttcgcgcttgagacgaagacgagcgccgtctccccgcgacacaccaatcccgagcaagcggacgacgccagcatgctcgcgaaaagcttgctggacgtcaccctcgtacctgagacgacggtgcgatcagttcccgacgtgactttatcgccgctcgtcgaccaagaggtaccgaccgattcccatcccacgtcatttggattcagcctcaacccgcctagcgacctcgctttggcgggcgctctcgtagaggtgagtccaaaccctctggggtttcgcatgcggtcgccttgggaccggctgacggacgtctcgacctacgggccctctgggtccaaggaagacgacgagcccagcatatgttgggatttctctggacttggcaaccccagtgccatgcgggacttcatgaccgcatgtgactactgcctcttcgactgttccgatggtagccgcagcctcggcgacgaggactgcggcccaagccgcgaatgtttccacgtcgatctagggggcccctccgaaggcaatcatctcggcatgccggaggacggtgatctccctaggccggtgccccgcgttgacatcccacgggagctagctgtggtccccgttcaggcggggggccatgacccacagctcgagcaaatccgcggggtgcaggccaggctcgacgagggagcaggagcgcttgagccgatccgccgggacgtcgggcaggcatgggcgggccaacccccggccggagaaatacgtcatctgccccagggcttccagcaccgcgtcgctgatgacgtcagggtcaggtcgccacccgcatctagtggggtcggccagaacctggctgcagcagcgatgcttctccgcgcgatgccggagccatcaaccaccgagggccggcgaatccagggggagctcaagaatctcctggaaggcgctgcggtccaacgggccgagagctctgcctcccgaaggcaggggtacccctcggaacctcatgccgcgacttcccgattcatgcgggaagcctcggtctacaccgggcgcacgcgcaacaccgcgcctgcggccccgggccgcctcggcaacgagcaccatcaccgcgaccgtcgggcccacctcgacgagagggtgcgccgaggctaccaccccaggcgtgggggacgctacgacagcggggaggatcggagcccctcgcccgagccacccggtccgcaggccttcagccgggccatccgacgggcaccgttcccgacccggttccgacccctgactactatcacaaagtactcgggggagacgagaccggaactgtggctcgcggactatcgtctggcctgccaactgggtggaacggacgatgacaacctcatcatccgcaacctccccctgttcctctccgacaccgctcgcgcctggttggagcacctgcctccggggcagatctccaactgggacgacctagtccaagctttcgccggcaatttccagggcacgtacgtgcgccccgggaattcctgggatctccgaagctgccggcagtagccgggagagtctctccgggactacatccggcgattctcgaagcagcgcaccgagctgcccaacatcaccgactcggatgtcatcggcgcgttcctcgccggcaccacctgccgtgacctggtgagcaagttgggtcgcaagacccccaccagggcgagcgagctgatggacatcgccaccaagttcgcctccggccaggaggcggtcgaggc

SEQ ID NO: 16830 - DNA, 565 bp, Zea mays
  Clone ID: LIB3067-018-A4_FLI
gcaatatgaaagcctgatgctttcgttcttcgttttatttaagatcactttcctcccttgttcttatgaaatgtgcaactctttaatcagggatggcaaccgatagtgaagcctcgaaggcagctgaggttgtggttgactggcataaacaggacaaaaagaggatgctccatgcagtttaccgtgttggggatctggaccgcacaatcaagtactacacagaatgctttgggatgaaactgctgaggaaaagggatgttcctgatgagaagtacaccaacgccttccttggctttgggccagagaacaccaactttgcagttgaattgaccaactttgcggaggtctcgcgtcctacgtgcgtcgcgccgttgcctggctccgtcctcgccgttcctctgtagaagctggccgctgaccctcgccgtcgcgccgtttttttattagatgaagaatgaatcaacccttgtagaagctaaagatagaagataacactactctgtttttgaatgtctgaagtgtaattttgcagccttgcaactataaaacaaacaatgtatggctt

SEQ ID NO: 16831 - DNA, 635 bp, Zea mays
  Clone ID: LIB3067-018-A5_FLI
gattcaacaaagacgtacgtacatgcacaaaactagagcgagctgtgtgtgtgtgtgttcgtcatctcctcgatcatggcgaaggcgcaggcgccagggccgcaccctctacggcttcggcggctaggctgagtaccatcgccgaggacgacagggagatgctggcgctgtgcgggtcaccgtcggaccacggccacgcgcaggcgcaggtggcggcgaggttcatgacggaggtggcgccgccgcaggtggtgtcggtcatgcggcgaaggaaggcgccgaggagcctggacaccatcgccgaggacgacagggagcagcagctggcgtgcgggtcgccatcggaccacggcctcgcgacggcgtggtcgtcgctccagaggataccgacgccaccgcagccgccgcgggagcgcgcaggtgggtccgtgacgagggacctcagcaagaacttcttggacgcccacggctgccagcaggccagcggctgggagggtttacacatgctaggccaccggcgagccgtgcatgcgctggagcttcacaaggtcggagcttgttgaagagggaagagagaaaatctagcttagctgcagtgagcttgttcgggagaaatatatttgtaccacttccac

SEQ ID NO: 16832 - DNA, 972 bp, Zea mays
  Clone ID: LIB3067-018-F7_FLI
cgagtactctagccattccagcatggaaggcattcttgagcgttaccagcgttactcatttgaagaaagggcagtacttaacccaagtattgaagaccaggcaaattggggagatgaatatgtccggttaaaatccaaacttgatgcacttcagaagagtcaaaggcagctgttaggagaacaattgagttcactgaccataaaagaactccagcaactggagcaacaactggacagttctttgaagcatattaggtcaagaaagaatcagctcatgttcgattcaatttccgcgcttcagaaaaaggagaaagcacttacagatcaaaacggtgtcctgcaaaagttcatggaggcagagaaggagaaaaacaaggctttgatgaacgcgcagctccgggagcagcaaaatggagcatcaacaagctccccatcactttcaccaccaatagttccagattccatgccaactctaaatatagggccatgtcaacctagagggggcgcagaatctgagtctgaaccgtctcctgctcctgcacaagcaaacaggggcaacctgccaccatggatgctccgcactgtcaagtaacaggtgaggtcttcccagtgtagttttgcagctgatctcgacagcaacacacctgtcaccgaaatgcttcggtgaccctagatatcaaccgatgcacgatccatctcgatcctgtgatcgaataccggcgtaggtactactaataaagtcaggccccgtcaaatgctttacatggtgattgaagtctggagcttctcagcaccaccatatattgtgttcagttcttgtgtttattgccatagctaccttttttttctctgatctacgagctagacgtagctttgtgcttggagattccactactatgtttcctctgtcctgtgtatgctttaacggagatgcacgttgtacccgtggtaatatatataaatttgcgttgt

SEQ ID NO: 16833 - DNA, 1606 bp, Zea mays
  Clone ID: LIB3067-018-G6_FLI
tgtcctcctaaaaccctaaccctccgccgcccctcggacccccaaccagcagctgccgcggccatccgccggcgagatggcgctgtacctgctgttcgagtcggcgtccggctacggtctattccacgcgtacggcatcgatgagatcgggcagagcgtggaggccgttcgctcctccgtgctggacctcgatcgcttcggcaaggccgtcaagctcaccgccttcaaccctttctcctctgccgtcgatgcactcaatcagtgcaacgctatatccgaagggatcatgaccgatgaactgaggagtttcctggagctgaacctgccgaagcccaaggaggggaagaaggccaaatacagcctcggggtcgtcgagcccaaggtcggttctcacatctccgaggtcaccggcattccctgccagagcaacgaattcgtccaggagctgctccgcggtgtccgcctccacttcgaccgtttcatcaacgagcttaaggattctgacttggagaaggcccagcttggcctggggcatagctacagcagggccaaggtgaagttcaatgtgaatcgtgttgacaacatggtgatccaggcaatctttctattggatacgcttgacaaggacatcaattccttctccatgagagtcagggaatggttctcatggcacttccctgagcttgtcaagattgtgaacgacaattacctatatgccaagcttgctaagtttatcgtgaacaaatctgatttgacggaaaaagatattcctgctttggctgatatagttggcgacgaggacaaggctaaagaaattgttgaagcagcaaaggcttcaatgggccaggatctgtcaccagttgatttgatcaatgtccagcaatttgcccaaagggttatgaatctctctgagtatcgcaaaaacctttatgagtatcttgtgactaagatgaatgatattgcacccaacctgacatcgttgattggtgaagtagttggagctcgcctaatctctcatgctggcagtctttcaaaccttgctaagtgtgcagcctccacccttcaaatacttggtgctgagaaggccctattcagagcactgaaaactcgagggaacacaccaaagtatgggcttatattccactcctcctttattggccgtgcttcaactaagaacaagggcagaatggctcgttacctggcaaacaaatgctcgattgcttcacgcattgactgctactcggaggctagcacctctgtctttgggcaaaagttgcgtgagcaagtcgaggagagactggaattctatgacaagggtgttgcgcctcgtaaaaaccttgatgtgatgaaagccgctattgacagcatggtcaatggcacctcaatggatgatgatgatatcgagaagaccgatgcatctcccaagaaaagcaagaaaaagaagaccaaaaccaaggctgatggtgatgcaatggacgtggataaaccctccaacgttgctggtggagaagctgagcctggaactgagaagaagaagaagaaaaagaagcataagctggaggaggaggcacaggaggagaacggtgcagcagatactacccctaag

SEQ ID NO: 16834 - DNA, 398 bp, Zea mays
  Clone ID: LIB3067-018-H11_FLI
cggcagccagcaggaagctggaggaggacgcacttctgggaagcctggccccagcccccgcgccggccgttggcggtgccgcggggctgcctggcggcaagccgggggcgtgggccgtcgccgctctggtctctctcgtcgccttcctcgtgatctgagggcgtggggatcgtgctgcgcatcgcgggagatggagggacgaatcctgcgatctggatcgcagagagagaggagagggggatatttatgttcgttctgtttgttctagggtgcctctcttttgcctgtataagagaggatcatgattttttttatataataataccgtttatttgtcattctttttataatatatgtattccttctgggttgagctagcaaattttattatgcgcgac

SEQ ID NO: 16835 - DNA, 897 bp, Zea mays
  Clone ID: LIB3067-019-B2_FLI
attccgttccgagagccaaaaactccactgctttcatcaactccggcgacttggagaatacgaagttccagaatccgatcggaagtttggtgctcgcgccttgacggattgatttcggtgcgccgatggggcaggcgttccgcaagctgttcgatgccttcttcggcaccagcgagatgagggttgtgatgcttggtctggatgccgccggtaaaaccaccatattgtacaagctgcatatcggggaggttttgtcgactgttcccacgattggtttcaacgtcgagaaagttcaatacaagaatgtgatgtttactgtgtgggatgttggtggccaagaaaagttgaggcccttgtggaggcactacttcaacaatactgatggcctgatctacgtagttgattcgttggatcgggagagaattggaaaagccaaagctgaatttcaggcaataatcaaagatcctttgatgcttaacagtgtaatactggtacttgccaataagcaagatatgaaaggggcaatgacaccaatggaggtgtgtgagggtcttggcctctacgatttgaagaaccgcatctggcacatccaaggctcttgtgcgctcaaaggtgatggcctttatgagggcttggactggctggcaagcacactgaaggaattgcaagcttcaggtcgcctaccttctggagggacatcgttgttctaagtagcaagcctgcctgtaagatccttcggctgatagcagtaataatggatcaagagcgtttttttttttttgtcatggatctgtactcatccctcgggatttcttgtcagtgatctaacctatgatatagatcttgtaaattctgttactagttcatacaaagctaaccggcggatgcatgtcacat

SEQ ID NO: 16836 - DNA, 294 bp, Zea mays
  Clone ID: LIB3067-019-B6_FLI
gagcttatttgttcctcccttcatcttcacgtacgccaacggcagaatttcccatttcgtttcacttcctcctccccccctcgtcttttaaccttttttggctgagatatccatcgattctcgctggaatggtcttcccctccttcggtcagaagaaaccctccctggttgtactgtactaggcaatgcgcatcctgctagatcgcctccgctgaaatggaaagcgtatgtgtgatggtgacatgaagttcacttgtgtaattattaccatttcagtaaatccatgcttcttgc

SEQ ID NO: 16837 - DNA, 518 bp, Zea mays
  Clone ID: LIB3067-019-C12_FLI
atctcctcgcatttcttcccatcccccttcgcaacccaaaccccaactcgccccgcatcgatggcgcccaaggccgagaagaagcccgcggcgaagaagccggcggaggaggagcccgcggccgagaaggcgcccgccgggaagaagccgaaggcggagaagcgggtccccgctggcaagtccgctgccaaggagggcggcgagggcaagaggggcaagaagaagggcaagaagagcgtggagacctacaagatctacatcttcaaggtgctgaagcaggtgcacccggacattggcatctcctccaaggccatgtcgatcatgaactccttcattaacgatatcttcgagaagctcgctgctgaggccgccaagctcgcgcgctataacaagaagcctaccatcacctcccgtgagatccagacctccgtgcgcctcgtccttcccggggagctcgccaagcacgccgtctccgagggcaccaaggccgtcaccaagttcacctcggcctaggctgc

SEQ ID NO: 16838 - DNA, 808 bp, Zea mays
  Clone ID: LIB3067-019-D11_FLI
aacacagggcacacgcacggcacgcagatacatatagagagaggttagctatagcttgcacatctatttaactaactaactaactggctagctagctcgatcggcagagcaaagcgaaagcagcaagaagcaaagcaatggagaaccctgcgagtgtgctagttctaccagcgcagttcaccaaactcaccttccgaaacctgtacatccgccgggccgggccgggcagcagggagataaccgaggagggcaggtgcgacctggacaagagatacgtgagtgacttccccgtctacgacggccgcggccccgacgccagccttgtggcccgcgtgcaggggatcaccagcgaaatcgggaacgcgcaccaactgttcgtcgttgttttcgacaccgacaggtatactgctcgaacggattgcttgcttgcatgtgtttgtggcgacgcgcgcgttctagctaattgcttttccagctgttcgtctcgccctgcatatgcgtctctctgctgccaggctcaagggctccacgctcgtcaccaatggcgtgataacggccgggtctgacgagtgggcgatctacggcggaaccggggtgtttgccatggcgaggggcgtcataaggagaaggtatctcgccgacagggccggcgggaacactgatgagctcaacatggatgtcttctgccggccgtttggctcacagtcagagctgcaagataagatgcaggtgcaggggcagggctctagcgtcaccaagattggactatggggtggaccgggagggtcggcacaggacatcacggcgg

SEQ ID NO: 16839 - DNA, 2123 bp, Zea mays
  Clone ID: LIB3067-019-D5_FLI
gtcgaatctctgccagttgaaccgttggagcctagtgatttgaagccagagaacagtagatatgatgcacaaattagtgtctttggggctaagcttcaaaagaaactggagcagtcaaaaatcttcatggttggttctggggctcttggatgtgaattcttgaagaaccttgcgttaatgggtatttcttgcagtcaaaatgggaagctgactgtgacagatgatgatgttatagagaaaagcaatctcagtcgccagtttctctttcgtgactggaacatcggacagcccaagtccacagttgctgcaactgctgctatggcaattaatcctaagcttcatgtggaggcccttcagaatagagcaagtcctgagactgaaaatgtgtttaatgatgccttttgggagagtttggatgttgtcgttaatgcattggacaatgtcactgcaagaatgtacattgattccagatgtgtatattttcagaaaccacttcttgaatcgggtactcttggtgccaagtgcaacacacagatggtcattcctcacctaacagaaaactatggggcatccagggatccaccagaaaagcaggcacctatgtgcactgtacattcatttcctcacaatattgatcactgccttacgtgggccaggtctgagtttgagggtctacttgagaagactcccactgaagtaaatgctttcctgtcaaaccctggtggatatgcaaccgcagcaagaactgctggtgatgcacaggctagggatcaacttgagcgagttattgaatgccttgagacagacaagtgtgagacattccaagattgtattacctgggcccggcttaagtttgaggattatttctcgaaccgtgtaaagcagctgacattcactttccccgaagatgcaatgactagctctggtgctcctttctggtctgctcctaagcggttcccacgacctctggagttctcgtcttccgactcaagtcaccttaacttcttgttggctgcgtccgtattaagggcagagacatttggaatccccatacctgattgggctaagaacccaaaaaaactggctgaagctgtggacaaggtcattgttccagatttccaaccaaaacaaggtgttaagatagagacagatgagaaggctactagcctatcctctgcgtctgttgatgatgctgctgtcattgaagagcttattgcaaagctggaagcaatttttaaaacattgccaccaagattccatatgaaccctatacagtttgagaaggatgatgataccaatttccatatggacttgatcgctggttttgccaacatgcgggctaggaactacagcatccctgaagttgacaagttgaaggcgaagttcatagcgggaagaatcatcccagccatcgccacctcaactgcaatggccactggccttgtctgcctggagctttacaaagtcctcgctggtgggcacaaggtcgaagactaccggaacacatttgcaaacctggcaatccccctcttctccatggcggaacctgtgccacccaagaccattaagcaccaagacatgtcgtggactgtctgggaccgctggaccataaccggcaacatcacgctgagggggctcctggggtggctcaaggagaagggcttgaacgcctacagcatatcctgtgggacctcgctgctgtacaactccatgttccccaggcacaaggaccggctggacaagaaggtggtggatgtggccagggaggtggccaaggtggaggtgccatcataccgccgccatctggacgttgtggtggcctgtgaggatgacgacgacaatgatgtcgacgtcccacttgtgtccatttactttcggtaaagaggggctcacggcccgtttacatgttgatcctgtgcgatatttgtcaatgtttgtcagaaggatcaagtgtataatttgcgattgcaaccctgaactagattgtgtttaagcacatactgatgatttcctgtgctgccatctgggtagagttggctgggaattgtcgctgagattggaccactgttatggaattcttgagcataacattatgatagctgttgcatgatactgtcgtcgct

SEQ ID NO: 16840 - DNA, 521 bp, Zea mays
  Clone ID: LIB3067-019-D7_FLI
ataacctgcagtcgcccccaaatttccccgaaccaaatcactcccaccgtctccacagcaaccagcacacatttccctttggcggatcgaaggaaggaaggaggagatgggtggcggcatggaggtgcacaaaaaccggtggatcgaagagtggaacgccggccgcgagaacctcgagttcaatttccgctggacccgccgcagcctcgccgtcgtcggcctcttcggcctcgctgtccccatcctcgtctacaagggcatcgtccgcgaattccatatgcaggacgaggatgcaggccggccatacaggaagttcctgtaagcggcgtccagggccgcaggagacgtcgatccctcgaccggggctgcgaggaggggagtttccattcagtttgtgtcggtattgttttagtctgaatctgatggagcagtttggaatgctgaactattgtgcctgatccaaatgaataaggtgtaatgactcgtcttttcaattactgaaactgaacatgtttgaattt

SEQ ID NO: 16841 - DNA, 1384 bp, Zea mays
  Clone ID: LIB3067-019-F11_FLI
gggctctctttccgagctctctcgctgtctctcacccagccgccaccatgtcaggcctctacaaccagggcttctcccctgcaagaaccctctccccccagattaggagcaaccccgacgctgatagccagtacttggccgagcttctcgccgagcaccagaagttggggccattcatgcaggtgctgccgatatgcagccggctgctcaaccaagaaatcatgcgggtgtcaagcatggttcatgaccatggatttagtgatcttgacagacgccggtttagaagtcctagccctatgtcttcaccgattgtccggcctaatctacatggaaatggttttggtccttggaatgggatgcaccaagagagattgggctttcctcctcctggaacaagtatggactggcaaggagcaccaccgagccctggctcttatattgtcaagaagatcatgcgcttggaagttcccgtcgactcttaccctaatttcaactttgtgggacgcattctagggccaaggggtaattctctaaagcgagttgaatcatcaactggctgccgtgtttttattagagggaagggttccgtcaaagatacagaaaaggaggacaaacttaaaggaaaacctgggtatgaacatctgaacgagccactgcatatattaatcgaggctgagttaccagcgaacattgttgatacaagactgagacaggcacaagaagtcatggaggaattgctaaagccagtggacgagtcacaagatttgtacaagaggcaacagctgagggagttggctatgctaaactctactctgagagaagacagtcctcaccctggaagtgtctcccctttcagcaacggcggcatgaagcgcgcaaaaccaagccagtagagaaaggtttcaggctctcctccaccctcctccactccagtcgttcttggtgcagcaccagcaaggtgtgcctgcccttgaacctgcgctgcttcgtgtcgtgggtgcttgtgtaagaaaaaaaaggtatatgcattttgctgctgctggacggacaggtggtcgagacgaggaggaaatcgctggtcgttgaactgtctccatcttcggtggatccggccattttgctgctgtaaggtgatgggcattcgttctattcgttactgactgttgaccagattatgatgccgtggtttcaggggagactagctatgcctatggccctgataattagtgtgagctggttcgtttaggtgtttaattagtttgtattattattattcgcgttacgttgtggagtagtagcaaacgtcacagctggtgatgcactccgctctgacagtttgatgaggacagctttgaataaaccatgtgaattcagaatgttactg

SEQ ID NO: 16842 - DNA, 922 bp, Zea mays
  Clone ID: LIB3067-019-F4_FLI
gagagagaggaggcagcccatagcagtttcctttggacatttctgggcgggtgctctgttttgctgcgatctcctgcgcaacgacgacgaccctttatgatccgctgtgctttacgccttttccctcctcgatctcttctccctccttcccaatgcaagcaaacagtcgtgtgtctgcagctttactttcttggtcattcttttcttgctgctccttttccagatgtataggaccgtgaagagcactgataagccgcctgcagcaacctcatcaggagggggagggccgcctgtggacggtggtggcgggtccggcgacgacgaccacccgagcgattggcggcgggctccatcctcatcagctggtcgggacgtcagcccgcaggcgttcactggacaccggtcagcctcctcggacggcgcggcaagccatgcgggcggcgacgttgaatgctcctccgccgacgattccgacggtggcaggccgcgcagtgcttctccgccaaggctgccgccaccaagtgcgtgcaatgcagacacccttcattcagttggcgtaccatccactactgaggatatggagcctgcttgtcgatcagctggcttacaacattcactcaaccatgaaatgagctgccctcctagcctggagttcacgctagggcggccaaactggaatggtgcagaacatgactagcatcaccagctagctagacacatatgcatggatatatggcacattattagttcaacacttcatctagtactgcttacaacacctgattggttttttgcatctattagaaatttagatagttccatgtttaatccaaaaatatcatatagtagatttatgacaacatgtacgtgcacgtgtgaaatattactactcacaacaataacagacacctacatgaaaaat

SEQ ID NO: 16843 - DNA, 891 bp, Zea mays
  Clone ID: LIB3067-019-G8_FLI
acacagtacgtacaagcctctcatcagcaatggagtccaccaagctctccgcgctgctggtgctcgccatgctcgcgctctcctcgtccccgctcgctctcgcgtgggagaaggcggaaccggagtgccactcgtgcgagtccggctcgccaccctcgaccggcggcgtccccctgcctcccgtcagcataccgtcagtcccgctgccccctgtcagcataccgtcggtccccctgccccctgtcagcataccgtcagtgcccctgccgccggtgaccctccctcccattccgatcgttgggggaagcccgagcccgacgaagaagggacaccggaaggcgtgcccaccgcctccgtctcccccgacgcccacgcccacgcccacgccgtcctcggacaagtgccccatcgacgcgctgaagctcggcgcctgcgtggacgttctcgggaacgaggtgcacgtcggcgacgccaacgtccagtgctgcccgctcgtgaagggcatcgcagggctctccgcggcggcgtgcctttgcaccgccatcaaggccaaggtgctcgacatctccgtctacgtgcccatcgcgctcgaggtgctcgtcaactgcggctgcgccgtcccgccaggctacaaatgcacttgaacgattccatcccattccatttccatttccatttccacacagcacacgtgcacagcaaaacgtctccttttgccctcccgatgcaaagtttgaaaaggctcgtcgacggatttgggtggtagccgcccgcgcgccgccgggctgttcagcaagtgcattccttcatttgttttgctattctcgttgcatgcctgtatatgcatcgtccgatccggtgtctcctcaaattccacttgtactttgtgtg

SEQ ID NO: 16844 - DNA, 2701 bp, Zea mays
  Clone ID: LIB3067-019-H7_FLI
cagcggtgactgttgcggtgttgccgcatccacgccctagtcgaccacgccgcccccagcagcccgctgctgccgcggctcgcgcccccaggagcccccgccgtcgcggctcgcgcctcgtatccgtaacagctacaccgcgccgcctacccccgcttcctgctggctgcatcgtcctcaggtcttccgaaggcgagctccaatccccaaccactattcacaagatgactacaaaacttgagcaatcttctgcggagcatcgcccagcaaaattcgcagcaccatcgtctttgacccccaagatctcaatgtttggggcaaaagctggattcatcatacctaagaacaagctggccggctcactcgtaatccggagcaccagtgacaagaatgaaacaccaactgcatccaacgaagatagcagcaggcatgttcacagaaagacaaagtgggggcctgaccttgctttggaccctgtcgtgtgcaaaggaagggctttggcctaccagactcgagtggagcaaatttccaagcagctgaagtctggagctttggacacgtccgaaattgatggttcagtgtctgctggaaatgaattgaattctattggtcctgacatcttgaaagagaacgagctgggaaatgttgaactattggaacttgaaagacgagagcttatcggtgaaatactccgtttgaatccgggatataagacacctgagaactacaaaccagtacttagggagacaaaaatccctgttccggcagaagcacacccaggaaataatattattggagttcttctaggatctgagagcaatacccagaagagactacatgaagaaactggtgctgtcattcgagtgtatgggactaagaaaatcaatggagagaagagtgagattcgtcatcaagacataaatgaaacacaagatgcttatgaagacctatacatcaatgtatcggctgactcttatgataaagtagatgctgcagttgtgttgattgagctgcttcttgctcctgtttccgtaaagtcgacagctacttcaacagctgctactgtttcttcagcagatacatccaaggatgcagtttcagctaatgtgcaactggagcagaataccacgtcacagccagatctacttcattaccaatcacacaacgcaccttggctgcccacaccccagaccaatgctccatcaattccttccacggggcctgttttgagtacattacctaacaatccatcgcagccacaaccgcctgctggttctttcagtatgcctccatatactggtcaacctcctcacatgaatagcatgccagcaaatccatttcctgttcctgggcctcagcaaccagtaccaagcaatcaacaacatccacctcaatttcgagctaactcctcgattgggccttttttcggtcaaccacctggtattgtaagccaacaaatgccaccatcttcctcaatgccaccgccagttagaccccttcaaataccccatgcctctggtggctggccccctttctctcctgttacatcacaatctcataggcctctgcaagctccaccgacttttatggcagtgagacctcctatttccgtctctcctcttggtgcaactccaccgcaaggtcccattgcattgacaccaccaaatatgcccaccatgtaccgcggccagcatccaccagtaccaaatttcactggttcagcgccattggtttccaggcctcctggtggtggggctcagtcttttcctacagctgcgcctcaaggcccttcctcagtagcatttcccggtggaccatcgctgcggccaccttaccctccggcgcctgatcaagcgagggggccacctccagctttctctccagttggatcaactcctggcatggtgcctccacctattgcatcttccggcctgcctgccccgcgtcctgcgaacacgagctgcatccagacacaagtagtagcccctttgagacctccgctcccagccgcgggcgattttactttccggcctgccataccaccggcgcatgctccagagttcgcagcaccaggcagtcaaatgggagcaatacatggcagaactcaccaccctggaccattctcctcccatcctggtgaccagaagaaccccagccaaggtttccaagggccgtttgatggcagcaggcccatgtacacgacgaatcaggctcggatgcacgctccacctcctccacacttccacggagccttccccaggaacgcatctcctcttgagttcccagcggggttccggggagcctggccgtccgtgcaggcacctccgatgccggcaccgtcacatccatcgtctttcccgccgtttcagttgaggccaccgccaccgccgcagcaggatatgtctggcgcaggcggcaccaggtggcccggtggcaatcaaatctacaacccttttgcaccaacggctgcggcggcggctcagagagcggaggctgaccctgagtacgaggatctcatggcatcagttggcatgaagtagcgaagactgctggctggcccctgatctgtctgtggcacaaacacagaggcttcttcctattgcttgccaagatgtgcgggttactaatctcctccaatgtatctctagatggtactgaattccgttccatcatagacaggtgccatgcttgaacgaaaaac

SEQ ID NO: 16845 - DNA, 1169 bp, Zea mays
  Clone ID: LIB3067-020-F12_FLI
ggcaagtgcaagaacatcgttctggaagggccaagagaagtgacaccaacggttttgaaggagatgaccggtttggaagctgaaaaacttgcgccgaagaaatggggtctgtcgggaagttcaccgtatgttctcattggatttcttggaggcgtatcctttctactaacacaaggggtcgatctacggcctaaactgagtgctgtattgggattagcagcagccgatgcaatgttgctcggtggtacttgtcttgctcaaatctcatgtttttggcctccgtataaacgtcggatccttgtacacgaagcaggccatcttcttactgcttatctaatgggctgcccgatacgaggagtcattttggatccatttgtggcattgcgaatgggcatccagggccaggcagggactcaattctgggatgaaaagatggaaaaagaactagctgagggccatctatcaagcacagcgtttgacaggtactgcatgattatgttcgccggaattgctgctgaggcacttgtttacggggaggcagaaggtggagaaaacgacgagaacttattcaggagtctgtgcattctactgaacccaccccctgctgttgcacagatggcgaaccgagctcgatggtccgtcatgcagtcttacaacctcctgaagtggcacaagaaagctcatagagccgcagtcaaggcgctggaagacgggcacagtctcagcgttgtgatcagaaggatagaagaagccatcgcttctgacagcaaataaatatgaccgttgatcctttacatgtgttcttgtcaaccaagctttgttggcagcttccacaggacgcggaagaaggagaactttcttaattcgcgcgaagggttagtgtgtgttggaacatgagtggcgcttttcaaagaaagaaaggcagaagatccttggagctggagggaatagcggagaccacgaccagggcgtctgatggacggactagatcgagtgatacatccgttggagattttaaggaagtcaaaaggccgttgtgaacttgtgattagtgtcgatgccagatatggcagatgtgcatagggagatatgactatatgatgtcttgatgagtatgcagacatgagctattttgcaatggatggataagtaccgttggtacttgaggt

SEQ ID NO: 16846 - DNA, 401 bp, Zea mays
  Clone ID: LIB3067-021-C12_FLI
gctacgcttcaggatcgcctgaaggaaaatgaacttcggctatcaatgttacaagaggaggctaagcaacttgaggctgatacccaaaacatgagaaacggttctcctcgtcgcctcatgaatcatggagctggtggcaagagttcacctacggctcagagcaggcatcctttctccaaccaagggagccctagaagcccgagcggtggcagccggaggagggcttgttgatgatcctgttccgcctgatccattggcttgtggcttaaccagatgctccctgaatccccgatatatgatggatggacgaagtgccccggcaatagcactgtacctgtacatacccattgccgtccagcgctgtgctgttgtggaatcccaacggtctcactttgttttgt

SEQ ID NO: 16847 - DNA, 1461 bp, Zea mays
  Clone ID: LIB3067-022-A11_FLI
cttcgccacacacacacacggctgctagtgtacacagaggcacagcagcaggaggatggccgtagtgccggcggcgccggtggttcttggagtggccatggtgctcgtcgtcctggccgccagcgccggcgcggccgggcagctcaggatggggttctacgccgagagctgcccgggcgtggagcgcgtggtgggcgacttcgtccggcagcacgtccgccgcgtgcccaccgtcgccgccgcgttgctccggctgcacttccacgactgcttcgtcaggggctgcgacgcctccgtcctgctcaactccaccgccggcagcgtggccgagaaggacgcgccgccgaacctgacgctgcgcggcttcgacctcgtcgaccgcgtcaaggcgctcgtcgaggatgcctgccccggcgtcgtctcctgcgccgacgtcctcgcgctcgccgcccgggacgcggtcgtcgccatcggcgggccgtcgtggcgcgtggcgacggggaggagggacggcacggtgtccgccatgcaggaagcgctcgacgacatccccaagcacaccatgaccttcccgcagctggccagcctgttcgccagcaaaggcctcggcgtccgtgacctcgtctggctctcaggcgcgcacacgatcggcatcgcgcactgctcctccttcgcggaccgcctgtacggctacccaggcggcggcgttggcgcggccgggaacgacacggccgaggccgacccggccctggacgcgacctacgcggccaacctgcggaggcgcaagtgccgggcggcgagcggcgggtacgcggaggacggcgtggtggagatggacccgggcagccacctgacgttcgacctgggctactaccgcgcgctgctcaagcgcaggggcctgctccgctccgacgccgcgctgctcaccgacgcggcggcgcgcgccgacgtcgagggcgtcgcggccgggcccgaggaggtcttcttccagctgttcgcgcggtccatggccaggctggcggcgctgcaggtcaagaccggcgccgagggggaggtcaggaggaactgcgctgtcgtcaacggcggctaatgcattgactaaaatatgaagaagcagagagacattgcctctctttttcgcaatcatgctgcaaagaaacaaaagtttattgattcttcattatctccggatgttactcaagcgtcgacacatcaagaacaagagaaagagatgataaatgaagaaattgtgaatccaatgccatctgcaccgccaccgccaacaatttatgatgtcagtcatcttccacacgatccaggtgaaaggaaacctattgcaagttaccatgctaatgatcacggtgcaattcgaagaacatatattcttagaggtccatttcaaccatatgcacatgaattcccaaataggaaaattggagatagagatcgccattttaattt

SEQ ID NO: 16848 - DNA, 1066 bp, Zea mays
  Clone ID: LIB3067-022-B12_FLI
ccgcggcgggcgtgtccgcggccgtcgcggcgcaggtggtgtggacccccgtagacgtcatcagccagcggctcatggtccagaccccggacgcctgccgctaccgcggcggcgcggacgccttccggaagatcctcctcgcggacggcgtccgcggcctgtaccgcgggtttggcctgtccatcctcacctacgcgccgtcgaacgcggtgtggtggtccacctacgccgtggcgcagcggtgcctgtggcgcgccgtggggaccgagcgctccgagagctgcgcctgcctgatggctgtgcagggcgcgagcgcggccctggccgggggcaccgcggcgctggtgacgatgccgctggacaccgtgaagacgcggctgcaggtgatggaggccgacgcggcggcgcggcccacgctggccagcaccgtgcgcgggctgctcaaggagggcggctgggcggcgtgctaccgtgggctggggcccaggtgggggtccatgtcgctgtccgcggccaccatggtgaccacctacgagttcctcaagcggctctccgccaaggagggctccttgggctagatccttccttggccgtcctcaaacgactctacggtatcgcccgcgcgtctccgccgtcctcgaagtcgaagatcgacgcgatcgatcgatccatggggatgaagttaatgataattaggatcctcttctctcttgtacatattgctcatcaggtttatttcccgtcgttcttgtttccttagatccggcgctatagagggtgggcaggaagaagaactagaaggggttttaggatgcagaattttgctggcctttgctgtggccctgctgccgatgccgatgatgatgatgaaaacctgcgtgaaatgcagaacttgtatccaaagcttgcgtcgatttccctgtccagtacagtactccgatgtcttgcatctgccagtggacagctctcagtggtggtagctctagccgcgtcaatgtcatggcgttgcttcatggaatggaagacccgatgcgcttctgctgtcgcgtcgcttcgtcttttcgcc

SEQ ID NO: 16849 - DNA, 710 bp, Zea mays
  Clone ID: LIB3067-022-C6_FLI
gaacaaggacaaggaaaaggtagccagtggcctgccagatcggaatttgctgtttacccttttgacctggcgaaatcgaatcagaataaaagaaagctctgcacttcgttcatcgagagcatccatagcaagaggaagcggctgaggttggctcgggtgagcaacatggcggagaagctgacgccggagcaggtggacgagtgcaaggaaatcttcgacctgttcgacgccgacgaggacggtcgcatcgccacgggcgagctcgtgacggcgctgcgctccctgggccagaacgtggacgaggcggaggcgcggcgcttcctggaggacgcgggcatcgcggcgggcgccggcgacatcgacctcgcggcgttcctggccgtggcggcgcgcaagatgggcgccaggcagtcggaggcgcgcctcgccgagtgcttcgacgtgttcgacgacgcctgcagcgggtccatccccgcggagcagctgcggcaggtgatggtaagccacggcgaccgactcacggaggaggaggccgacgcgatgctccgcgaggccgacccgcgcggcgagggccgcatcgagtacaaacactacgtcaaagtgctgctcagggacaataagtgatccggtgatccttcgcccgccggtggccacggccggccacgagtgggggaggaggatgtcaactcgatctgctctttgatcatgtg

SEQ ID NO: 16850 - DNA, 1097 bp, Zea mays
  Clone ID: LIB3067-022-D2_FLI
aatcccttcagatttggccaaaaatgtgaagatcttgaaccttgatttggggaataactttattgagaggagttcagatttgaaggtactttctgaattgcgctacttgaggaaccttaatttgcagggaaatcctgtttccaagaaagacagtcttgtcaaaaaggttaagaaatctgtgccaaccttgcgcatactgaacgcaaagcccctagaggccacctccaagagtgatacgaggtctacaaaagagaatcctcctagcaaagatgaagaccccattgggattgatgcaaagaaggataaaaggaagggatctaaacaagaggtaaagggccttgaagagcttgaagtccagagtgtttctacaggtatcaccacttcgaaccctggtaaacttgaagtgccagacggtaaggaaaagaaaaaggtcaaggaagctaagacgaagaaatctgaagagccgtaccatgccaataacagtagcttaaagaacaaagaagttcaatcttttgtctatgataccagcacgaaggacaagaaggaagccaagaggaagaaatttgttgacgaagaagatgtagatgctgaaggaattgacaatacagaaatctcgtttgcagatttaatgttttccaatgtgggcaatccagagactaagctaaagaacatctcaaccctggaagcagctcctgatggaaaatctgttggaggtctggtaattgatcacacaaagaagagaaagaaaccaaaaggtgttgtcaccatcactgactcctcagctcttaagatgttttcctcaatgccagaggtaggagcaggagggcttggcctgtcaggatgggatgagtagcgtctagctctctagtaccataagtttgctgcctgatgaatatcgttttttggtgaaaacctcaattttatgtgaactgagcagcattttcttctcttcccatcaagtgcatttatgatgtgtgatttgaggaaccaagcccctctagatgagtggtgcatcttcggttcaaccaataatttagtggaataactacttttctcacgcttgcatgaattataaactactccgtccattctaaatt

SEQ ID NO: 16851 - DNA, 682 bp, Zea mays
  Clone ID: LIB3067-022-E8_FLI
gggtccagatctcccttcgcagccgccgaggaaccccttcacagcgcggaagatggctgaacaggaggccccagtcgtggttgaggcaccaaccccagttcttggggagcctatggacttgatgactgctctgcagctcgtgatgaagaagtcaagtgctcatgacggacttgtgaagggtctccgtgaggctgccaaggccatcgagaagcacgccgctcagctttgcgtgcttgctgaggactgtgaccagccagattacgtcaagctggtgaaggcactctgcgctgagcacaatgttcacctggtcactgttcctgccgcgaagactcttggcgagtgggccgggctttgcaagattgactctgagggcaaggcaaggaaggttgtaggctgctcctgtgtcgtcgtcaaggactacggtgaagaatctgagggccttaacatagtgcaggagtatgtcaagtcgcactagatgtgtgacatgtttcagtgatactcttgatttggacctgggcttaaaattatgcttttgcatctggggcttgcctaggagattagaacattttactagaagagccgaagaggatatgtatgagcaatttggacatctgaatttttttttgtttatggtgctgtcgtctggttttaatgcaaatcatgaagagccgagtttatgctt

SEQ ID NO: 16852 - DNA, 1266 bp, Zea mays
  Clone ID: LIB3067-022-F4_FLI
gggcaacacaccaaccgatgtgagtcttggccggctggttggtgggatccggcggacagcgtcgccaggctgtgttccccccaccctccagccagcctgactcggggtctcgggcaggttccgccgcatcgtgtcgtttcttccctttcccgtttcccccgttcagttcagcttcggttggctcgccgtactcgggtttgttcctcgcctcgcttcgcttccttcctccgcagtcctcgtctcgaattcgctcgcggtgggagaaatcggggcgcgaggatgaccgtgatcgacatcctcacccgggtggacgcgatctgccagaagtacgacaggtacgacgtcgacaagctcaacggcgcgaacgtcgccggcgacgacccgttcgcccgcctctacgcgtccgtcgacgcggacatcaaccaatgcgtcgataaagcggaaacggcgaagcaagagaagaaccgggccgcggtggtggcgcttaacgccgagatccggcgcaccaaggccaagctcctcgaggaggacctccccaagctgcagcgcctcgccgttaagaaggtgaaagggctgacaagagaagaaattgcgacccgtagtgatctggttgccgctttacctgacagaatacaatcaatcccagatggtagttctactgccacaaagaaaaatggaagttggggagcctcaggatctcgcactggaggagccataaagttcgactctactgctgatggaaactttgatgatgagtattttaaggggacagaagaatctaatcagttccgtcgggaatatgagatgcgcagaatgaaacaggatgaaggtttggacgttattggtgaaggactggaaactttgaaaaacatggcatctgatatgaatgaggaattggacagacaagtccctctgatggacgaaatggatgataaggtggatagagccaatgcagatttgaagaataccaacgtgagactgaaggagactgttcttcaacttagatcaagtcgcaacttttgcatcgacatcatccttctgtgtgtcattcttggtattgcggcctacctttacaatgttctaaaaaagtgaggtggagtcttcttgccttggaaccgctcatgtcgtggtccctttgtcaccatggttctacccagttctttgagcgatttgtggcttgttttgtcttatatctgtattattatggtgtccaagttgaaccttgactaggcttgttgaagagaacgctggtaacatgtttgctat

SEQ ID NO: 16853 - DNA, 699 bp, Zea mays
  Clone ID: LIB3067-022-F8_FLI
cataaatttgccatcagatccgtatttagattgacccataatccatagacacagtcgcaattaaaatgaggcaaaatactaattatttcgtaccacactctctctcaacctcgtacgtactcgtacacatgtaggtacgtacccaggcgtatccacgaatgcagtgcacgtagcatagctagtacaagaggggcttcccggcgtggaggtcgcggaagtaaagccgggggttgttctcgaacgcgccccgcggcatgcgcgcgccgccgcggcccggcgcagccataaagcggcggccaccgcgcgtcctgcggcaggcgcagcagcagcagcgccagcagcagcaaagcacgagggcgaccactagggccgggatcaccacggagacggcgacgcgcatccactgccggagcgtctccgagcgggtctccggcgggaagatctcgtccgccttctccgccagcgccgcgaagagggcagcgaggtaggccgctgcctcggcggccttcgccttgatgagctgccacaggccccagaaaaagtcgccggcgccgtccaggtcgaagctaagagcgccgccgctggccacggcggttcgtgctgcggtgaagccgcctggtacgatcttcctcgccggagtccctgggaaggccatggtgtctgtgtgtttgtggcttaaccggaggcaaccacttgcgc

SEQ ID NO: 16854 - DNA, 553 bp, Zea mays
  Clone ID: LIB3067-023-C3_FLI
atttttccctcttcgactgaagttcgacatgttcaccaccctcacccacttctttgcctgggtccccacccagtttcgtcgcttggtctttgccctccagtgtgataatggttgcgagttcgacaacgccactcactccttcctcacccatggcatccagttgcgtcgctcgtgcccctacacttctcccagaacggccgagccgaacgcatcattcgcagcaccaccaaacagaatgtgcttgaaaatgcattcatcatcccagctacctagaagtggccatcaacaggcttcatatatacagtttcaaaacatttagggcctgtttggttcgatgcataacttgcaacactttgcctaacttttctttctaaggttagttattcaattcaaacaactaaacttaggcaaagtttggcgcagttagccgcgaaccaaatagacccttagtcctgcaaaattgttgtgtgctgaggcatattttgtggatgccacgtgtttgctgttttacacgactgtatattttgcagacctcaaacatgcttatttcaat

SEQ ID NO: 16855 - DNA, 759 bp, Zea mays
  Clone ID: LIB3067-023-C4_FLI
gcatcaagagccatgtcattttctgggaatggatgggctgtttgtatcctgacagccaatggcactgtatctaatgtgaccctgcgtcaaggagagtcttctggtggaacagtaacttatgagggccgttttgagattctctctttggctgggtcatatcttctgtctgaaagtactggcatgagcagtcgaacgggtggacttagtgtttctcttgctagtcctgatgggcatgttttaggtggtgctgtcgcaggacctctaactgcagcttcgccagttcaggtggtcattgggagctttctggctgatacaaaaatggagcttgaccctggatcagcacctgagaaacatgttttcagcaggtttcaaactaccagcagtccatctaggggtaccgaatcctcgggtgggcatgcaagcccaccaaacaccacaggctccttcagcaccagcacacagccaggcttcccaagctttcccacctggaaatgagcttaccttctatggtggagtgggaccgtggcctctggggatgagggaggaatttggaactgacggtcctcgatgtagtttcatgagatgttatgagagtcgatcctatttaggtacttctaactggttacaatgaagttccggtttgctgcttgtcttgacattttgcatcattgaggcacttcaaactccaaagtggtggtaacatacagtatattagatgatttaccccctacaaatgccttttgtcattctactgctctt

SEQ ID NO: 16856 - DNA, 1252 bp, Zea mays
  Clone ID: LIB3067-023-D4_FLI
tgaggtaattgtagcgtaaaatgcaagctaaccatctacaggagaactgtttcagattttgcaataagatataagagataattattcctgtactcaactatgataatgtcgtgtttacattttagctgttggtacatacacacaaaactctgtttcaccacaacaccactattagcaaaaaaactgagttcaaaaggctcttccagctttcctaatgtggagaaaaccaccgaggtccatatctatagcacagatgtcatgtgattctgactattttaggaccaacaaaccatttggaagccaaacaaatccctgttcaatttgcctcaaagcaacatataagaaattagataattagcttctgaatatgtgcactgctcttggaatacattctaagagttttgaaaagccttttcttgagtgcatttctgaatttgatgctacagaaggtgttaaatatatacaacaatctgatattctagactacctgaagcatgtagaatcaaggttgcaagaacatgaaaggtgtacgtgaaggatcctgacaacctgtgtgtactgagttgctagtcactcttgttacttatttatggcatattcatggtgtggtttaccatggtatatataagacaaatgaacctaaaaggcttaaggcaggtgaaagttgatgagtaattaagtcacagcagttagctagtttctgtcccttacaaacaatgcagctggagaagcctagtggacagtaagaagctatgaacctatataaaccctatagtcgtagcaagtgctaagatcataaattaacccatggaagtgaggacatttcattctttaataaccttaatttacaaaaatacaatggataaactgccagcaagtgaggacttttctttctttaataaactctgttatgcacttatgcatacttccagtattacaggacttgagaatcgaagccctattatgcacatatgctgaatacaaaattcattctttttcctgaaccctccctaacacatagttgtaatacttaagttgtctctactagaaattatataactaaagaataacaaatcttacacttcaaaaggctggtgaggttaccgaacagcgtcgggtggagcacgccggagagcaggttctccccgaggtcgagcacctgtaacccgaaccattgtcacatatccatgaagagcttgtgatatcgccattgcaaacaattagaccgttctgtgagcaactcttggtataa

SEQ ID NO: 16857 - DNA, 368 bp, Zea mays
  Clone ID: LIB3067-023-E2_FLI
cggggcgtgcatctgttgctaacggggcggtgccggtgccgcatactattgttgtgtagctgaggtttgtcaaggtggctgctggcaaggttagccgaggaagtggagttcaataacaggatgcggaaactgtgccgctccttgccgaacttaagccccgttacgttgtcgcacaaagtttatttcctagcactgtgcttgctgcttatgtttgtttggatgtgccaacctgcagtgaccctcgtggagcctgggtctcacgctcctcttacctagtgtgatgtgcagaaaaagtgtgatgctgtaaaattatgtgattgcctagcagatgtcaaattttcaatcagtagctaactccttttaatggt

SEQ ID NO: 16858 - DNA, 1998 bp, Zea mays
  Clone ID: LIB3067-023-F10_FLI
gatgggtcccacctcccttgtcgtccaacagaagccctgaacgtgaaaaggaatctacatttgctgctggtagaagcaggcgtgttgaagtggagcgtacattgactgactcacagcgtgatgaatttgaggacatgctgcgagctttgacattagagaggagccaaataaaagacgccatgggatttgccttggataatgctgatgcagctggcgagattgttgaggttcttacagaatccttgacactcaaggagacgtctattccaacaaaggttgctcggcttatgctagtgtctgacatccttcataacagtagcgctcctgtgaagaacgcatctgcattccgaacgaagtttgaagcttctttgccagatgttatggagagctttaatgacttgtatcgcagtatcactggaaggattactgctgaagctctgaaggagagggttatgaaagttctacaagtttgggcagactggttcctgttttctgatgcatttcttaatgggctgagggctacttttcttagatcaggcaactctggtgttgttccgtttcactcgttatgcggtgatgcacccgaaattgaaaagaaaggtagctctgaggatggaaatgatggatttaagcttaatgaagacggtgccttggctactggaaaggcagcagcgacaaaggagctattagggctcccactagctgaacttgaacgccgctgtagacataatggcctctctctgtgtggtggtaaagaaatgatggtcgccaggctgcttaacttggaagaggctgagaaggaacgaatatacgagaaagatgttgacatgaaatatgtgcagggtgaacagcatgtggttggaagagaggacagtggtgtgaatgctcatagtacttcaaggtttggtgaaggttctaatggtgatgaattagatgtctctcggaacagtatgagagctggtaaaggacgttctggtggatctgcttctgccgaacttgaatcatttccaagcaagaagccgaaatacgatcctgttttgccagcttctaaatggagtcgagaggatgacatcagtgacgatgaagataggaaaggtggccgaggcttgggattaagctattcatccggaagcgatattgctgatggtctcggaaaggtcgatacaacagaagctagtactgaccacacaagtcatcatcatgatacgattgttgatgaagagcacaggcagaagttgaggcagattgaaatttctgtcatgcagtaccgtgaatctcttgaggagcagggtctgcgtgacttggatgagattgagaggaaggttgccagccatcgaagacgtctccagtcagaatatggtttatccactccagctgatggtgctaacagcaggcgatcttctgaaagaacatcatcgtcgtcggagcggaaagagaggcatggcgatgcacatgatcatcctaggaaacggcgccggagccagagtagaagcttgagccctccaaggaagtcacaggagagggatcgagagcactatcgcggtagggaccggtctcatggcaacgacgtggggagggatagggtacgcgggaaaagtgcaagccaagggcgagacgaccaccacgacagaagccgagatagagaggacaggagaaaagggaggtgaccgacccgaaaaccctcgtcaccatgcaccatttgccctaagcgaagggcccaggagcattatttgagctgggctacacgcccaccagcatctccaacggtaaacatatcttcgcaccaggcaggttaccctggtctgctccatgcttcgtctgtaataggagtttttgaggattaagttgaggttttttagagaagacttgttcgtaacttttttttctttttttgcggattattcagatgtacccgatgtgtagtttatgctcaaaaccaatgtcgaatacagccagacccagaattgtcagtatcagacaaccgaggtatggactgcg

SEQ ID NO: 16859 - DNA, 1339 bp, Zea mays
  Clone ID: LIB3067-023-F3_FLI
ctccccgagatcgagcccgaccacatcgtctccctgttcgagggcaactcgaacctgttctgggccgagcggctcgggcgcgaccacctcggcgggatgaacgacctgtgggtgaagcactgcggcatctcccacacggggtcgttcaaggacctcggcatgaccgtgctggtgagccaggtgaaccggctccgccgcgcgccgctgtcgcgccccatcgccggcgtcgggtgcgcgtccacgggggacacctcggccgcgctctccgcctactgcgccgccgcggggatcccggccatcgtcttcctccccgccaaccgcatctcgctggagcagctcatccagcccatcgccaacggcgccaccgtgctctcgctcgacaccgacttcgacgggtgcatgaggctcatcagggaggtgaccgccgagctgcctatctacctcgccaactcgctcaactccctccgcctcgaggggcagaagacggcggccatcgagatactgcagcagttcgactgggaggtgcccgactgggtgatcgtgccgggaggcaatctggggaacatatacgccttctacaaggggttcgagatgtgccgtgtcctcgggctcgtcgaccgcgtgccgcgcctcgtctgcgcgcaggcggccaacgcgaacccgctctacggctactacaagtcaggctggaccgaattccagccgcaggtggccaggccgacgttcgcgtcagcgatccagatcggcgacccggtgtccgtcgaccgggccgtggtggcgctcaaggcgacggacggcattgtcgaggaggcgacggaggaagagctcatgaacgcgatgtcgctcgccgaccgcaccgggatgttcgcctgcccgcacaccggggtcgcgctcgccgccctgttcaagctcagggagcagcgcgtcatcgggacgaacgaccgcaccgtggtcgtcagcacggctcacggcctcaagttctcgcagtcgaagatcgactaccatgacagcaagatcgaggacatggcttgcaagtactccaacccgcctgtgagcgtgaaggccgactttggcgccgtcatggatgtgctgaagaagaggctcaagggcaagctctgagcgcatgtgcctggctaatgcaatcaactgattggaatgcagtggtttcgtcggtatcggggggtcttttaggcttcagaaattctgtctgggttagactatctgtttgtggagttagcaggagaatggatgtctctcctgcaagactggcgctctctcttgtgctacgatgtgttaccatggataataagtgacctagttgctgttggattgaataatc

SEQ ID NO: 16860 - DNA, 902 bp, Zea mays
  Clone ID: LIB3067-025-B4_FLI
gaaccgcagaagtgcagcagaacgatcggatctagcagaattctctcaacctcatcggcggcggcgaagagcgtgcggatcggagatggagacaagcgggtggaggaggagagcggcggcgcgggcctcctggagccccgccacggtgtacctgtggctcgcgctcgccgcagcagcactgacgctcgcccaggctaagaaggacctaacggaggttacccacaaggtctacttcgatgtcgagattgacggcaagcccgcaggtcggattgtcatggggctttttgggaagactgttcctaagacagcagagaacttccgagctctttgcacaggagagaaaggaattggcaagagtggcaaagctctccactacaagggaagtacattccacagaatcattcccagcttcatgctccaaggaggtgacttcactcttggggatgggaggggtggtgaatctatctatggcatgaagtttgctgatgagaacttcaagatcaagcacactggaccaggccttctgtccatggccaatgctgggagagatacaaacggatctcagtttttcatcaccaccgtgacaacaagctggttggacgggaagcatgttgtgtttggcaaggtgttgtctggaatggatgttgtgtacaaggtggaagctgagggccggcagagcgggcaaccaaagagcaaggttgtcatagcagatagcggcgagctgccgatgtgatgagctgaactgatgttctatctggaaggatgttaagaagttgctggtgaccatttgtcgttctggaacttttattagtgcctgaaattggactgaaccagtttcttctgtttgctacagtgactttcttatttacttattagttgaaaaggttttaaaaggttgagct

SEQ ID NO: 16861 - DNA, 2290 bp, Zea mays
  Clone ID: LIB3067-025-B5_FLI
cctcagctcccctcgcttccctctaatttccagcccagtagtagggagactagaatcgtcggcgcgacgccttggcagattcgtccgccccgatcccaccaccaccgtgccccgcgggtgacgtcggaccggcggcgatggcaacgtcggcggcggcgggatcgcgcaggaaggcgccgagccctccgaagcaccgccacgacggtacctcgccgctgcctctcggcatggactggagccctcccccgaagagatgggagggaaggaacaccatatggccacacaaccctcaaacaggttggagttactgtgtgatgatgccttcttggatcacccaaacacctgaaactggtgtcacagccgatagctttttgaaatctgtcgttttttacaggatacatgttggtatacaatcttcagaaggctttagctctatccatggaatcctcagaaggtttagtgactttctgaagctatcttctgatcttaagagcgcgtttcccagaaaagatgtcccatcggctcctccgaagcatgctttcttaagaataaattcaagcaggttgcttctagaagagagaaggcatgcattggaggagtggatgcagaagttactttctgacattgacttgtcaagaagtgctcctgttgctgcttttcttgagcttgaagctgctgcgcgttcatatttccaagaacggaatgggcgtccttctgaagtaggtccttctgcaaaaagcagtactaaatcttcctcacattctgatggacctgcttccggttctcttgctgagtccaatgaaataaatcaaggtcttactcgcggtagcagtctgacaggagcaactggtaatggtgtgcttggagaagctatcttagatcagtctgatgagcatgttagcagtgccttgaatcacaggaaagggaaccttgtattggaacatgatggtagaaatggttcggtagcgtcttataggggagttctttcagaagaggaccgtgattcttatcccggccatgctcggaaggactctgctgaaagtattgggagtgatttgagttctttaagaggaagtgaattatctgttccaggggctagtaattccctttgggatggtgctgtggtggatggacatgttagtcaaacagaacatcttactggtttagatatgcatcttttgtatgatatggatgcgcaagtcatccttccaaatgataaaaaacagaagttgactagacttttgatcacaatgcaacgaagaatagggacagcaaaaactgatatggaggatctcatagcacgattaaatcaggaaggagctgttaaagaatatcttactacaaaggttaaagatttagaggttgaattggaagccacaaagcaaaaaggtagagagacactgcaacaagctatcctggctgaaagagagaggattacccagatgcagtgggatatggatgagctccgtaggaagtactctgagatggagtcaaacctgaagaccgaacataatgagaaaactcgtgcggagtcagaaagaacaactgctagtggtgaaaatgaaacattacttgaagaattagaaatcaaacaaaaagaagttgagagtttgaaacagcaacttgtagaagctgaggcaaagtccaaagctgataagaaagttcttgtcaaagaggtcaagtctcttagaaactcccaaactgagatgaagaaagtgttgaatcagtatcttgaggagaagactgatttagagagagttattaatagagataaacagagatcagcacgtacaaagttatcccgagtaaaaattcttcatgagtgtcgactgctgcgggagcggctacaagactgcagtgctaaatttctagcagaagaacaagacaactttactattgatccatcatccttgcctgatgcattagatcttctagcaacatcagacaatagaatacgcctactcgttgctgaggctcaacttctagcacgagatgatgaacaaggctcttctgatggtggcgacgattctgatagtagatcctcattaactatgagcagtgaagatgcaaaagttaccgatgaagatactactaaaatgctttctgatctgctcattgacaatgcgcagctgagactacgcctcaatgctgtcatccgcaatgctgtaaatacttccgtgaagccagagaaagaaggtagtggcgaggttctccccaaaaagacagtccttaactggttgttggacagatgagagaaccaccaatatatatttatgtggattagttcttc

SEQ ID NO: 16862 - DNA, 621 bp, Zea mays
  Clone ID: LIB3067-025-C8_FLI
gcggccgagagaggccgacgcgcaccagcagatcccaaactcaccggggaggagggagtgggcgaccggcggcggcgatgggtttcatcatggagttcgcagagaacctgatcctccgtttgatggaggacccggacaagcgcgaccaggttcggcgggagcatgcctacaagatgaaggagcggtgcgagcgcaccaaggcggcgtggagcctccctctgcgcccctacagcttctggaccttcgaccgcttcaactcgcagctctcctgggacctgcagatcagccaggctgccggtcgccgggacccttacgacgacctcatcacccgccactccggctccccgccgtcttcctaaacgcccgtgtcgatctctgcgcagaaggtctacttgggcatcaataagaatctggtcccgtcaaactgactgtgattccattatcttctgtttgaaaatgttaccgacaaactaccatgttttctttgtcagtttggcatggaagcagaagttgtgtgcttccattctcaagttgttgtctttgtattatgaaattatgaaatattccattattcatatggagcactcgtttgcctttactattcagtaaattctccgagtg

SEQ ID NO: 16863 - DNA, 762 bp, Zea mays
  Clone ID: LIB3067-025-D5_FLI
ccatctcgcccgccgttttcgtccttatcgatctcctcgcacctcgtggcggcacctctccccttcgatccaccaagggtttaggatcggcggcgatggcggcgaggctggcacagctgcgcgctcaggcggtgcaggcggcggagttcgcctcgaagcacggcggctcctactacaaggagctcatggagaagaacaagcagtacgtcgtgcagccccccaccatcgagaaatgccaggagctctccaagcagctcttctacacccgcctcgcaagcctaccaggtcggtatgagtcattctggaaggagcttgatggtgtcaagcaggtatggaagaacaggaaggacctcaaggttgaggaccttgggattgcgactttatttggagttgagctttatgcatggttctgcgtaggcgagattgttggcagaggtttcaccttaaccggctataaggtctagttgatttccagtgatttaagacctgctttataaatcgacactttagctgatgcttgtcgaaacgacgatgatacctgccttccttcacaattttgtttcttgtaagagtctacctagtgctgaatgccagcaaagacgggcacatggttgcaacattgcctcaataatttgcccgcgcaattcttgattttgatgcatgtaattctttgtcagttgcatgtgctgcagtccctgcgtgcagactcatttcgtgtctttcgttctgcccacaaaataaattctttctgcgttacatatg

SEQ ID NO: 16864 - DNA, 391 bp, Zea mays
  Clone ID: LIB3067-025-D9_FLI
cttgagtgtcagcgtggttaaccttaggaggcagtgcaggcaggttgatgacctgaacctacccaacaacggacatcacacagcccattaaaaggcttactggttgtggttgtgggtggctggctctagtgcagtgcacaggaacttccaacggagtatgtgcaagtcgtcagaagttgttcaaggcagcttgtttgtcatcatcaccagggatacaagacatgcttcctcagtaaggtgttatcggaatttttcggttcctgtaaactgatataaatcgatggtggaactgtactgataatcttccgtatggtgttattggaatttgtgtgacagttcctgtaaactaatgcagagagagagatccagcggggctcctgcctcctaaatc

SEQ ID NO: 16865 - DNA, 1302 bp, Zea mays
  Clone ID: LIB3067-026-C11_FLI
agctgctgcaggcgctgtccaaggaggaggaggccgtgcgggcgcgccttcgccgccgggcccgcgcctcccgccagtccgcgcacaacgtcctcgccctcgccgccgcgctcgagattgttgccgttggatacgccatcatgaccacgagatcgccggacatcagctggcagatgagggcagtcagggtgctacccatgttcttggttcctgctctagctgctctcatctactcgaccattacaaacctcacgaaaatgcttgacaacagagaccaacaaactcttgaaaagctacgaactgaaaggcaagccaagattgacgaattgaaggagagaacaaattactacactactcagcaacttatacagagatatgatcttgacccagctgcaaaggcggcagcggcaacagttttggcatcaaagttgggtgcggattctggactgagagtctttttgggagatgaaacaagcagggatgcagcaataggtagaagtaatgataacaatcttggaccaactactggacttaggcaaagaaaaggacacgtaaccaatggtgctggaagggcccaatcccttgagccatttgatggctccaatgtgtatgatggcagtgatgaaggccccagccctcctaatcagactgttgagcactttagaggtccatcgggtaatgatggggggtggcttgcacgagtagcagctctgcttgtaggagaggatccaacacagtgctacgctctaatctgtggcaactgccatatgcataacggtcttgcgaggaaagaggactttgccttcgtcacgtactactgccctcactgtaatgccctcaatggatcccggcaacatgatgaccatgaattggtacctgattctggcaaggagagtcctgattctcaatctggcggaatcattggccaagctggtgcaagccttgcaacctcaggtgctgcgagtcctgttgcaagcagcctaccaacccttgaagaactctctgcagaggaagattctggggagaaggcgagcagtgaccaacctgccaattgaactcatcatttcctgtatattgtgttctttgtggagtattgttttggatttgactctgggtatcgaaattttttgtacctaccatgtagtatatatggactaccatgcttcctgcatgattgtggtggtttttatcgtggcttcccccctagggtaccaggacaacgcccatttgctggcgtcttgtcgcaatcgaagggcttgaacagtgatgcatcaactcaaattggatgtattgttctttgtt

SEQ ID NO: 16866 - DNA, 888 bp, Zea mays
  Clone ID: LIB3067-026-D7_FLI
gcaagcccgcaagcaatcaggagccggggagatgtggagacgccggcgacgaggcgaagaagaaggaggcggcgcttgcatcaagcaggctcctcgacccggcgttcaagccctccaaactatcccaggaccggctcgacaagtttaaggaattacacaagaaacggttacagataactgaaaagccgaagtataaaagaaaactgaaaggaaccgctgggagaagtaccaaagtaaccagtgattacaaattcactaatacggatgcatctgctgatagttctccaagagatgtacatcatacgtcatcaattacaggaatccaaggggatcctgcatcaggcctgtcctcgaggaacaaaagaaagctacattgggggcttgatattaaaggacgatggggaaggaaggcaaacatgtaaaaatctgaagacccaaccgcaaaagcatatccacagttccacaccccacttgattcagatttgaaaggagaaggacagaggaaagtggcaggccttttccacggatcatcagattgcttgtaaggttcatgtttgtgacagcaaccagaaacactggagcgtggacagcagtctcagaactaagcagtaagctatagtatccaaacttacaagtgcgatgatagtttgtttatcggtttcgcttgctgtgtggtgtagtttgtctgtttttgtttgtttttttttggtgaaaaaaacactgatggtgcaagtgcaacagaggcccacgtggctcgtcaaccttttgcaaggcctggcaggcccgcgttgatttagcccttttcccttgtaccttatgtttatgatctgggggttgagcctattatgatcaagatgttgttgaggtatatattaagattattctctc

SEQ ID NO: 16867 - DNA, 661 bp, Zea mays
  Clone ID: LIB3067-026-F6_FLI
tcatcctctcttctggagccctgaattgcgcctttcgtttctaagggataccagtgacagaattgagaaaaccagtgaaacggacctcataaacgcactggaaagcataggaccagtggcgtttggtgggaaatggggagagaaactggatgctgctttagttacagacatgggtcgttataggaaatataactttgagtctactcgtgatcttctgaggtatatcagaaataaatcgggtcattacagagaactttcagatgatctcaagggcatacttgggtcattgccagagggatttgatcactattttgctagccgatttccaaagttgctaattgaggtgtacaaggtcttgtgggtgcactgcaaggacgaagaagctttcagtaaacatttcaatggaagctccttatagctggagaggattgccttttcctactgtaaatactaaccctgatgtagaagttgtatgtacatttgatatgtataccatattacccgtattatagaataaagagagctcagtctgtacattatgtagcatataactgtgttgcctataaatccaagctttactgttgaatggtgaacaatggtaatacaatctgctggatggaaaccagtggtatgtgtaatacccacattgtaagaaaagtct

SEQ ID NO: 16868 - DNA, 678 bp, Zea mays
  Clone ID: LIB3067-026-G8_FLI
ctgttgtctcccggtccaccttttcaccgcccgggccttgctctccttcgacttgccttccctttccttgcacacaccaccagacgaaatcacccaagtcgcgtgcttccattcccagcccaaccgaagcgaagcacgccaccggcctcgaagggatcagcttctctagcactcatcctcgtggccttgttcctcctcttctataagggactgcgtcggagtggagatccgtgccgacatagtccgactttatcgctcgctgcctacgattgatggcctcaccttcaccaaccgagttcagtagggaagcagctcgtcagtctctcatcgcaatctcccagaccattccggagacaccttcacccgagactgtgaaggcaccgatctccattgcagaaaacgggaagctgggcgatggggcggataagttcagatcaaagctgatgtccatcacagacctgtcttctgatgcccaacctgcgcagtgccctcccgaggatattgctgcttgatcgtgtgattttcctgctcgacttgcggacataatgtatcagtgcttgctgatgctctgggcatttaactgtcgtgcattaaactgaacgtccttgtgttactagtcgtttttctttgttaaaatattcagggaaaccggtggaaatatattgtgcaagtttcctt

SEQ ID NO: 16869 - DNA, 698 bp, Zea mays
  Clone ID: LIB3067-026-H9_FLI
ctctgtagtttgtgtttgtctcaaaaagcctttgaccctgttcgctgcaattgtggtgtttgatggaaatgcatatcatggtgaatctgcacccaacaagaaagatgcagagcagaatgcagctcgtgttgtgatcaagtcgattttagctaagcatgacacttgtatggtgagaattgttagatcgaagaaacaacttataactgctgtcagatcttctggaaacaccccagctacttttactcctatacagtttacacggcctgtttcatatgcagcatatggcagaccagatgatacaacacctgttttgccaaatgaatcttcctcattagctgttcaacgaggcatcaatgttgtacctgcagttgggacatctgtgaacccatcgtcagcaaatgtaagtcgctcaaagaagcgcaagggcagagttgaaggagcaggaggcaacgacacatgggttgccaagggtcattaacttctcagccatcaacatctaggatcctgtggtcaaccttttggcattcgattcgtcttggtacctctgcctgtcatgttgtttgctcaaaccactgcatatcgttgtaggttgcttttttaaccttaactttaattcgtaaccactgcattttgtaactgcataacaattcggctggatcagtttccaccaaagatataacgaacgaatggtaacagcc

SEQ ID NO: 16870 - DNA, 379 bp, Zea mays
  Clone ID: LIB3067-027-D1_FLI
cctcaaaggaggacactaagcgtgcaagtcttcggcggcaaccatttggtagagttcaagaaggcaatcaacgaagccgacccgcccaaaatgtacagaattacagacatattcggcttcaaacgatcgaggccgctgtacagctcactcaagggaggtccgggcaggatcaccatggactgacagccggcaatagcatgccttgtttttcatgtatgtagtgtaatggccagtgcatacgaatgatgaattcgattctgaatcctgctcctgcatcagattcggttgcatgattgatctatacttcactgttggtttcacgaccagcgtgtcactttctgggcaaaatctagggagctgtataaagtcatgtatgttc

SEQ ID NO: 16871 - DNA, 811 bp, Zea mays
  Clone ID: LIB3067-027-E6_FLI
gcgagggctcagttcgcacgcttcccaacatggctctcggtgccctagcccgcctcctccgccttgcgcccacccctcgcctcgcgcgccccttcgctgcaaaggtccgtgcgtctcggccgcaggaaccggagcttccgtcggaggacgacaacgacttcgccggcggcgagctcaccgcccccaccgagggcatcggcaagccgctcgccgaggtgctcaaagagctcgggaagagggttccggactcccttgtcaagacccgcgtcgagaataatggcttcgctatcaagtacatcccatggcacattgtgaacaaaattctcaacatacatgctccagagtggtcgggtgaggtacgcagcattgtttactcatttgacgggaaaacagtatctgttgtctatcgagtgactcttcatgggattgatgcagagatctatagagaggctactggaactgcttctgttgatgatacaagctatggtgatcccatacagaaggcagaagctatggcttttcgtcgtgcttgtgcacgtcttggtcttggactccatctctaccatgaagatatgtcatagactcgtagttgactaatgttagtgtttgtggcggaccattgtcccttaatgggctacccatttgcactgggcatgcttctttttcttaaatgtggtatgtatgtgcaagtgtttgaagtttaggctgtcatgctatatgtcagctatcaaagtaccaaatgcaactactgttctgagctgtttgcttgttacgaaacagctttccagtatctaaattcccgagtttcatg

SEQ ID NO: 16872 - DNA, 1961 bp, Zea mays
  Clone ID: LIB3067-027-G6_FLI
cgccgctgttccccgcaacctatagacccaatctcgtccgacccggcgcgtcgtcccctccagatctccgtcgccctctccaggtagcagaaactgttctgcttcagtctgacaaagtggagggcttaggagtttctgcttcttttatgtctgaacaatctttgctttatttgggattgttgggagagtactctcgtgcaacgaggaaaaggcacaaggttccgttccactgcatgcgtcaagagcctgtctggttttcttgttctgatttgtcatttgctggtgctcaaagccggcttggtttcctcgaaggatcagcatctactcttgattgtggactttgtcgcatctgatatcaacttcataaatctttatccaagatggcgctgcaaaacattggtgcttcaaacagggatgatgccttctacaggtacaagatgcccagaatgattaccaagatagaaggccgtggtaatggtatcaagacaaatgttgtgaacatggttgacatagcaaaagcacttgccaggccagcttcctacacaaccaagtactttggatgtgagcttggtgcacagtccaaatttgatgagaagacagggatttccttggttaatggggctcatgatactgcaaagctggctggtctccttgaggtattcatcaagaagtatgtccaatgttatgggtgtgggaatcctgagactgagattctcatctcaaagacccagatgatatcattgaaatgtgcagcctgtgggttcgtctcagatgttgatatgagggacaagctcacaaccttcatcctgaaaaacccaccagaacagaagaagggcggaaaagacaagaaggccatgaggagagctgagaaggaacgcctgaaggaaggtgaggctgctgatgaggagcagaagaaactgaagaaggatgcaaagaagaagggttccaaggattccactgctaagggtttgaagaagaaggctactactgctactggctctgatgaggaccactcatcctctccaactcgcagccatgatggtgacaaagcagctgcagatgatgatgacgatgatgtccagtggcagactgacacttcaattgaggctgcgaagcagcgcatgcaagagcagctgagtgcagcaactgctgaaatggtgatgctgtcgactgaggagactgagaagaagatgaaacaggcaacccacaaagatggaagcactaatggttcagcaaaagaaatccctaatgacaagcctgccgtcactaagcctagtccctatgaagaactgattggagacatcaaggctagcctaggaagtgctccgacccctacccagctcaaggctgtgctggcctcatcaacccttcctccccaggacgtgatgaatgctctcctggaggctctctttggtggtgtgggtaagggattcactaaagaggttgtgaagaacaagaagtaccttgcagttgctgtgccagatgagggtgcccagacccttctggttcaggccattgaggcttttggtgggaagtgcaaccctgaggcgctgaaggaggttcccgttgtcctcaaagccctctacgatggagatatcctggacgaggaaaccattgtggactggtacaatgatgctgtcgcagctgggaaggactcccaggttgtcaagaatgccaagccgttcgtcgagtggctccagagtgccgagtctgatgaagatggtgacgacgagtgaagaagccacgctgctctactgctaatggccaaacttgataatattatttcaataagtttgttttgcttgcctggtgtcggtgtttaaaactgttaattgtcgtgtggcgcagcatactcttatgtgtcgtcgtcagtttgtttgtgtcgtcagtttggttgtctgttggatgtcacggtttacttatgttcttatggattgctactatacaagtatttgttttgg

SEQ ID NO: 16873 - DNA, 622 bp, Zea mays
  Clone ID: LIB3067-027-G7_FLI
gcaggtcgcagctgagcagcaacaaggccggaaaggatgtcgtggcagacctacgtcgacgagcacctcatgtgcgaggtcgagggccaccaccacctcacctccgccgccatcatcggccacgacggcaccgtctgggcccagagcgccgcattcccgctgttcaagcctgaggagatggccaacgtcatgaaggacttcgacgagcccgggttcctggctccgaccggcctcttcctcggccccaccaagtacatggtcatccagggcgagcccggcgccgtcatccgcgggaagaagggatctggaggcataaccgtgaagaagaccggggaggcgctggtggtcggcatctacgacgagcccatgacccccgggcagtgcaacatggtggtcgagaggctcggcgactacctcgtagagcaaggcctgtaaacggaattgcttcagtccaatcggaattgtttataatttgttgttgtcgttccggcaaataattttgtgtggtttcacctaaaagtttggttgtcgtatgatttgtaaaccccgaacagtatctatatgtgattgaactgcgcctacctattcttttattatacgggaatatgtatgtatttcgtgc

SEQ ID NO: 16874 - DNA, 672 bp, Zea mays
  Clone ID: LIB3067-027-G9_FLI
tcttaccttgccctaatgcctcctcgtccgatccattcctcaaacaataaaatatccccagatagctaggctcggccgggacgtacgcatggaggtggaggaggagctgcctgctagcgctgatcttaccggtggctcaaagcaggcgaccactacgacgcccttctacctcgccttagatcacacagcttccgccaggtcgtctccaccgccggcagaggcgccgccgctgccgcgtgctgctgctgccaacagcgagaggggatccgaaataatcaaggcgaagattatgtcccacccactctatccggctgtcttgagagccttcatagactgccggaaggtcggagcgccgccagagattgtcggccggctttccgccctcgctgatgacgtcgaaatgaattcagacgacagacaagaacagcgacgagcagtagacccagagctcgaccagttcatgacaatggatctgcatgtcgtgtgtgaatgtgcgcgcacaggagatctactgtcacatgttggtgaggtacagacaggagctcacaaggccaatccaggaagccgacgaattcttcaggagcatggaggcccagatcgacgcattctcgttattaggtgattatgtttaactaaactgagttaataatcttgagttgtttttttttcgtc

SEQ ID NO: 16875 - DNA, 1165 bp, Zea mays
  Clone ID: LIB3067-028-A3_FLI
ttcatctcttggagatgctgaaggaattgaaaagcttgcttctttggcaaaagaacatggaaaaaacaatgttgctttcctctgcctttttatgcttggtaaagtggaagattgcatacagttgcttgtagacagtagccgtatacctgaagctgcactaatggcgcgatcgtatcttcctagcaaagtaccagaaatagtagcaatttggagaaacgacctcagtaaaattaatccaaaagctgcagagtctctggcagatccttctgaatatccaaatttatttgaagactggcaggttgctctaactgtagaaaaaagcgttgcttctcagagggatcattatcctcctgctgaccaatacttgaatcatgctgagaagtcagacatgattcttgtggaagctttcaaaaggatgcaggtcattgagcacgaggaacctgaagatgcagctgaggaaaatggagaacctgatcaacaggcatcggaagagaaggaaatgcataacacagatcatgctgatgaacatgaagagacagtttcagtaaatgggaaggagggtgaggaacagcaggtgctaactgaacatgaataggggccgagggaagcacaacgcattggctgcaaatgttattttttcccgagggtaacaaatgtggcccccagttttaccctgaagcaccggaaactggtgatgcttgtggccattggaggccacctgatgcttgtccgatctttctgagtgaaccccaagcttgacatattgatgcttgctacacttttgttgtcgatatgcttcttctgccaacaacataggcaattctttcttctcggatcatctgcggacccgatttctatgcgctcgaaccaatgaactgggtggggactgtggagccattttgtgatgaatagttcgaataatcagtatagaggtacgttgtaaaatatgccagattaccatagccatcgaattctcctaggagatgacagtttttgttagccattcattgtaatgatgttacttgataaggaaggttacgtgtagtatatgattgcggttgcgggccgagggttttgcccatgttatacttatatatagtggtatcaatccatcggatcggaggctctcgtctactgatgcctaatcaatgccgatgactgcgag

SEQ ID NO: 16876 - DNA, 592 bp, Zea mays
  Clone ID: LIB3067-028-B10_FLI
agttccatttattattttctccgaggaagccctttccccaggcacagatccggctcctcgccgccgccatggccgcccgcctccccctcctggtcctcgccgttgtcgctgcgtccctcctcgctgccgacgcgcggccgtgccacaccttcttcgtcgccttccgcgccgaccccaaccccagcagaggcgacgacgctgtaccccaccacctcgccgccgcccaggacgccgtgctgcacgctgatccaggggctggcggacctggaggcggcggtgtgcctctgcaccgtcctcagggccaacgtcctgggcatcaacctcaacctgcccatcaacctcagcctcctcgtcaactactgcggcaggcgcgtcccctcgggcttccagtgcttctgactatcacacgcccatcgatcgatcgatctggaggctaaataatttctccaagctgctagtatacgtacgtacgttgatatatatgatgtagtattatatatatgtccatgcatctcgtcgtctatcgcatgttgttgttgttgttgttgtttttcgatgatcctgtctctgttataaatatcattattattac

SEQ ID NO: 16877 - DNA, 674 bp, Zea mays
  Clone ID: LIB3067-028-B2_FLI
gcgtcctgttcatgtcatcttggcccctgttcagcaattcgacagaagcacggtatttcgccgcggttgtcccgttcctgaactccatgaggcttctgatatatggactccgtctctacactgatgaagctctggtaaaatcagtgacacgtgaaggaaaaccagaggaattgctgagaggtccactctattatgtcctggtgctgctgttcagcgttttagtcttctggcgtgagtcccccatcgggatcgtctccttgtcgatgatgagcggtggcgatggttttgctgacattgttgggaggaggtatggctcagcgaagctgccattcaatcggaagaagagctgggccgggagcatctcgatgttcatttctggtttcctgctgtccgcgatgatgatgctctacttctcaagcctgggttacattgatgttatctgggaagaggcacttggtaagctggcgcttgttgcactagcagcgacagtagtggagtgcgttcctgtgaccgaagttgtagatgacaacatatctgttcctttggccaccatgctggtagcttttctcttgtttagctccaaccgcacaatagttaattaaaatactactagtgcattatttaagacatgtgatgagttcttcagtgatgagttgtgcttacttttgcttcct

SEQ ID NO: 16878 - DNA, 1584 bp, Zea mays
  Clone ID: LIB3067-028-B4_FLI
tttgctagtgagtcgagaagagagagagaggcgtccggaattcatcgccagcgatgtctccgtccgccgacgcccccggcccggcctcctccgcctcggcgcccccgctcgcgcccctcatcgccgcgcagctcaactacctcctctcgcactccaagctgcccattagggtggtacagatctggtccggctgccgcaacggtcgccctgccgatcggttcaggctcgccatccccttctgcctcgactacgtccactgggatttcgtgtacaatgcgctgtctcccaaggtggcaccagacgtggtgttcggtccggaggatgagaggttccagccgctggtcgattacgctgctgctggaaatggcgataagagctgcttggcgcgttgggattgccgcgcccccgagggactccatgcgctcgtacaggagcttcgagaattgtacattgaataccaaaaggagcgggttcacatggtggatgacgcgagactagcgtttgaactaagcacagttctctctaaggaggggattgaagtctgcatggtaccttctgctgataggccagatgaggccaaatttgctgtaccacttctggagtctgactttgactttgccaaactggtgccaggatgtccttggagattacctcaaaagatccatctccaggtcatttttcctatcagcaggagttcaagctactcttctatgccttctgctccacgactcaaactaatctcaacaccagatttgaggtcacttctctcagttgaggatgtgaaactccctccatggtcaaatgggatgtgtttggcggagtatcttcctgctttagaagacagtcttaacggtctgcttgtagatgcgtcggcttcaattggttccagaagacgctttattgaggcactagctcccatctttgggagaccattagaggctgatccgattttttgcaggagggctacagttctttccatttctggaatgttcacatttctggttcactttgccatcccccttcaattcccaaagcaacaacctgtcgtcacactgcagagttctcagcactgtaatgccgatgggatgcctatcacgtcgcctccgataaatgactatccctggagtcctagatgggaccaggcagagatggttgaacggatctacgacttcctgaccgacgagtgccaaaatttcaagaagttctgcagcgatgctatcactcagcagaagtagctgacatcgttctgcagcagaaagccgtggtgctgattttctcagcaacaggctttcttattcccagcaagcggcacacgtgtctacttgtgcgcccgccccaagcctgcaaccgttgatgctgttctctttcttgtcatgtgagaggacgcaacctcaggcgttggttaggatcggcataaaccaagcaggacaacacaagacctgttggttgtttacgatgtcgtacccctgtataagctgccgacatggtgactgtttgggatatggtatagatggatacaatccagttcttttgtaaatatgatatgaaggatggtggcactcctacccccgttgcattctcctc

SEQ ID NO: 16879 - DNA, 602 bp, Zea mays
  Clone ID: LIB3067-028-B9_FLI
atggcgatttgctcgatgtgatattgaaaggtctgtgtagccatgaaaaggttgaagaggcttactctttgtttgttgagatggtggataaggctgagttgaggccttggcaaggcacttgccagcatttaattggtgacttgctgagggtaaacaaacttgaggaggccctggcccttctcaagacaatgaaaacctgcaagttcccaccttttgcggacccgttccctccttacattgccaagtatgggacagttgaagatgcaaggaactttttcaaggcattgacagtgaaaacttctccagcacctgctgcctacctgcatgttctcaagttgttctttgcggagggaagatattctgaagctcaagatttactgtacaaatgccctatttacatccgcaagcacccccacgtcgccaaactgtttgaatcaataaaaattgagagtgcctctgcctcttgattgggttcaaccaagcaatgattggtgaggctatggtgaacccttacctttgcttgctagctagctttctgtttttaagtagccttggtattgggtcttttaaagacatatggttcaactaagtcgaattttagt

SEQ ID NO: 16880 - DNA, 708 bp, Zea mays
  Clone ID: LIB3067-028-C1_FLI
cggagaggcaatcaccacgtacgtatacacacgggcacgtaactagctagctagctagcagtcgtagaatgacgatgaggggtctctctgttgcggtcgctctggtcgtggtggtggccgcggcctgccttgccgcgccgcggggcgcggacggcgcgggcgagtgcggtgcgacgccgccggacacggtggcgctgaggctggcgccgtgcgcgtcggcggcggaggaccccggctccgcgccgtccggctcctgctgcagcgcggtgcacgccatcgggaagcagagccccaggtgcctctgcgccgtcatgctgtccaacaccgccaggagcgccgggatcaaggccgaggtcgccatcaccatccccaaacgctgcaacctcgccgaccgccccgttggctacaagtgcggagattacaccctgccatgagcggcggtgagttctccaggccggatttgctgcatggcatgcccgagtatcaccgaagcgcgagctcttgtgtcgtgtgtccgtgtctgtcagtcagtctctatgtgttgcccataataaacaaagacatgcgagtaccagacatgtgcaactctagtagtatggtgcgtgttatcactaggcacgcgtactcgtatagttgtgttcagttctgggtctatagagatatgtagccctgcattgtcgaaataaatactgtgtccactcgttcgtg

SEQ ID NO: 16881 - DNA, 498 bp, Zea mays
  Clone ID: LIB3067-028-C2_FLI
tcagcttccaccaaatgttcgagggcatgggtctaggcggctgcatcgttcaggccaagttcaagctgcggtcgatcgtgacgatggtgctcttcttctgcctgacgacgccggtgggcatcgtggtgggcgtcgggatctcatcggtgtacgacgaggacagccccacggcgctggtcgtggagggcgtgctcaactcggtggcggcggggatcctggtgtacatggcgctggtggacctgctcgccgaggacttcatgaaccccagggtgcagagccggggcaagctgcagctcggcatcaacgcctccatgctcgtcggtgccggcctcatgtccatgctggccaagtgggcctagtttactagccagccactttttgctctctgccctctcgattccagtttttttttttgagttcagttgctgtaaaatactactgttatggagaaacgaacgaatacaacaactgtgacctgacctggccaatctctttctg

SEQ ID NO: 16882 - DNA, 913 bp, Zea mays
  Clone ID: LIB3067-028-C8_FLI
aatatatgaaacttcactgtgacatcaccccgctggctcacgatagtgaagattacaagttaattgagcagtatctcctcaacacacatgctcctactcacaaggactggtcgctggaactggaggaagttttttcacttgatcgagatggagaacttaataagtactcaagatataaaaataatctgcataacaagatgctattatggcacggttcaaggttgacgaattttgtgggaattcttagtcaagggctaagaattgcacctcctgaggcacctgttactggctatatgttcggcaaaggcctctactttgcagatctagtaagcaagagcgcacaatactgttatgtggataggaataatcctgtaggtttgatgcttctttctgaggttgctttaggagacatgtatgaactaaagaaagccacgtccatggacaaacctccaagagggaagcattcgaccaagggattaggcaaaaccgtgccactggagtcagagtttgtgaagtggagggatgatgtcgtagttccctgcggcaagccggtgccatcatcaattaggagctctgaactcatgtacaatgagtacatcgtctacaacacatcccaggtgaagatgcagttcttgctgaaggtgcgtttccatcacaagaggtagctgggagactaggcaagtagagttggaaggtagagaagcagagttaggcgatgcctcttttggtattattagtaagcctggcatgtatttatgggtgctcgcgcttgatccattttggtaagtgttgcttgggcatcagcgcgaatagcaccaatcacacacttttacctaatgacgttttactgtataaatctaccaggagtgagtaatttatatattagcgggactggacctcttggtcgcgtgct

SEQ ID NO: 16883 - DNA, 374 bp, Zea mays
  Clone ID: LIB3067-028-E10_FLI
gcggccgcggcgtcggcggggctggaaacgctaatgccgctgcacagcgcggtggctgccgcgcggcttaggtcctgcatcgccgtcgactcctcctgctggtgctcgctctcacaaggtttaaacaagcgcatctgaccatggctaggagctgagcagaagagaagatatgctttgcctttatgacagcgaggcgagctgcacctgaagaaacaaaagaatcttaggaattacaaacaagggctgtactgtaataatgtggttcttgtaaaccaattttgccttagaattctgtaacttgaatcatccacagatgtgcgactgtcttttgtttatgtggatctatgaattacctgcagctcctcgtttgaact

SEQ ID NO: 16884 - DNA, 800 bp, Zea mays
  Clone ID: LIB3067-028-F7_FLI
tgttgtttctcaatatggacagcagatcctagatcttttgctagctgagacacaaccagcgaagatctgttctcaggttggtctgtgcacttttgatggcacccatggtgtcagcgctggaattcggagcgtagtggatgatgaagctgggaaatcaaatggtggtctcaagagtgatccaatgtgcaatgcttgtgagatggctgtggtatggatgcagaaccaacttgcccagaacaagacacaggagctcatcctgaactacattaatcagctttgcgagcgtcttccgagtccgatgggagaatcagccgtggactgtggcagtcttgcgtccatgcctgacattgcgttcaccattggaggcaagaagttcaagctgaaaccagagcagtacattctgaaggttggtgaaggacaggctgcccagtgcatcagcggattcacagctatggatatcccaccaccccgtggccctctctggatcttgggtgatgttttcatgggagtctaccacaccgtcttcgactatggcaagctgagggttggcttcgcagagtcggcctagggatatggtttggcagcaacccgtccagaggcaaacgcgtaatttgtgtgtttatgcgaccggcgatgtgtgtatatatgctactacatgtttagtgatgctttccgagacctgagacaacgcccgtctgttttaacgtggcgcaagaataattctggttctggatgtattctccgtacacaaaggcgtgtctgatgcaatggtgaccatcttgcggttgcgtgtttgaaat

SEQ ID NO: 16885 - DNA, 647 bp, Zea mays
  Clone ID: LIB3067-028-F8_FLI
ccaaaacacgcccgcgcgcctgtttgttcggccggaggacgccatggccatggaggagggatcaggagcggtggagaaagggccggccgtgggcacggtggctgacgcctccgccagcgtcatcggcgaaggcgccgtgaaggaggaggccgggggcagacggcagccgtcggccggctacgcggccgtcgtgattggcggcaccttcgaccgcctacaccagggccaccatctcttcctgaaggcggcagcggagctggcgagggagaggatcgtggtcggcgtctgcgacggcccgatgctcgccaagaaacagtacgccgacctgatacaaccgatcgagaagcggatgcagaacgccaaggattatattaagtccataaagcccgaccttgatgttcatgtggagcccatcgtcgaccctttcggcccatccatcgttgacccaggccttgaggccatcattgtcagcaaggagacgttgccgggagggcacgctgtcaacaggaagagagcagagagagggctcactcagctgcagatcgaggtgatagagctggtgccagaggagtcgacgggggacaagataagttccacggcattcagaaagatggaagccgagagggcgctgcagcaacagaataaac

SEQ ID NO: 16886 - DNA, 1048 bp, Zea mays
  Clone ID: LIB3067-028-F9_FLI
tgacggtggagtacgtgaacgagggcggcgccatggtgcccgtccgcgtgcacaccgtgctcatctccacccagcacgacgagaccgtcaccaacgacgagatcgccgccgacctcaaggagcacgtcatcaagcccgtgatccctgagaagtacctcgacgagaagaccatcttccacctcaacccgtccgggcgcttcgtcatcggcgggccccacggcgacgccggcctcaccggccgcaagatcatcatcgacacgtacggcggctggggagcccacggcggtggcgccttctccggcaaggaccccaccaaggtggaccgcagcggcgcctacgtggccaggcaggccgccaagagcatcgtggccagcggcctcgcccgccgctgcctcgtgcaggtgtcgtacgccatcggcgtgccggagcccctgtccgtgttcgtcgactcgtacggcaccggcacgatccccgacaaggagatcctcaagatcgtgaaggagaacttcgacttcaggcccgggatgatcagcatcaacctcgacctgaagaagggcggcaacaggttcatcaagaccgccgcctacggccacttcggccgtgacgacgccgacttcacctgggaggtggtgaagcccctcaagttcgacaaggcatcggcttaaggttgggagtgttcactgtggacatgaggactaccttcctctggctctgctgttacctgcaagcattgctgctgctggatgtgtgtgtttgatcagtgactggctgctgctccatagaagatgaacggagagaaggatgatgaagaagggctttggcaatcgccgctgcaactgcaacccatgccatgccggcttagtgattgggtataatttggcttggcagcagccagcattattatgtgctgatcttttatctttactagtttggtcgtccgatatctttctttctttctccccccccccccccctttcgactctgtactgaaactgctgagagattcgcagtattgttgtatcgtattcgtatgctactgttactctgg

SEQ ID NO: 16887 - DNA, 1105 bp, Zea mays
  Clone ID: LIB3067-028-H6_FLI
cgtcgtcgggccaattgagtgtgagagctcgaaaaaacccaggggatcggccggaccagcagcgagcgagcgcgagctctgcgtgcgtgtgtgtgtctgctctagattagatcacctccatcgtcaataattgcaggcagatccatagtctgctggtggcgagacaaagcaacggatcgtcgtcgatccggagagcggaaagcgcgcagatcgcgacggccatggggcgcggcaaggtggtgctgcagcggatcgagaacaagatcagccgccaggtcaccttcgccaagcgccggaacggcctgctcaagaaggcgtacgagctctccatcctctgcgacgccgaggtcgcgctcgtcctcttctcccacgccggccgcctctaccagttctcatcctcctccgatctgcttaagactctagagcggtaccagaggcacatctatgcttcagctgatgctgcagttccatcttgcgatgagatgcagaataactatcaagaatatgtgaagctgaaagcacgagttgaggttttacaacactcacaaaggaatcttcttggtgaagaactggctccacttagcccaagtgaacttgaccagcttgagagtcaagtagacaagaccttgaagcaaataagatcaagaaagactcaggtgttacttgatgaactttgcgacttaaagagaaaggaacaaatgctgcaagacgctaacagggttctgaaaaggaagctgcacgagtttgaggcagaggctgcttctcccccgcaattggcgtggcaaggcggaggcggcatgttgtcccatgaccctccacagccagaacacttcttcgtggctctggagagcaacgcgcctctgcaacctacataccatactatggacatgaaccagcagccagagccagcgccgggcggctgctaccctcctgcgtggatggcttagccagcgctttggttccattgccttgagaagtgccgtgtccttcagagatcgctacgagtgctgttgcctgcccactttgctgcctgccatgcttaccgaactgttcaaataagaaataaccacatggtcctatataggttgctgctgtctttatcttc

SEQ ID NO: 16888 - DNA, 1656 bp, Zea mays
  Clone ID: LIB3067-028-H7_FLI
aaagcgagccgaggggaagagccggaaccctagcccagcaccgcagaggcgcagagacaggcgtcttcgtactcgcctatctccgcgactcaaagcttcttccatttcctaccgccgccgctgcagctccaccccattccgtcgacaccatgagggagtgcatctcgatccacatcggccaagccggtatccaggtcggaaacgcgtgctgggagctttactgcctcgagcatggcattcaggctgatggtcagatgcccggtgacaagaccattgggggtggtgatgatgctttcaacaccttcttcagtgagactggtgctgggaagcacgtccctcgtgctgtttttgttgaccttgaaccaactgtcatcgatgaggtgaggactggcacctaccgccagctcttccaccctgagcagcttatcagtggcaaggaggatgcagccaacaacttcgcccgtggtcactacaccattggcaaggagattgttgacctgtgccttgatcgcatcaggaagcttgccgacaactgcactggtctccagggcttcctcgtcttcaacgctgttggtggaggaacaggctctggccttggttccctcctcctggagcgtctgtctgttgactacggcaagaagtctaagcttggtttcactgtgtacccatccccccaagtttcgacctcagtggttgagccatacaacagtgtcctgtccacccactccctcctcgagcacactgatgtggctatcctgctggacaacgaggccatctatgacatctgccgccgttcccttgacattgagcgcccaacctacaccaacctcaacaggcttgtgtcccaggtcatctcatccctgactgcctccctgaggttcgatggtgctcttaacgtggatgtgaatgagttccagaccaacttggtgccctacccgaggatccacttcatgctttcctcctatgctccagtcatctctgctgagaaggcctaccacgagcagctgtctgtggccgagatcaccaacagcgccttcgagccatcctccatgatggccaagtgcgatccccgccatggtaagtacatggcctgctgcctcatgtaccgtggtgatgtggtccccaaggatgtgaatgctgctgtggccaccatcaagaccaagcgcaccatccagtttgtggactggtgcccaactggctttaagtgcggcattaactaccagcctccaagtgtggtgcctggtggtgacctggccaaggtgcagcgcgctgtgtgcatgatctccaactccaccagtgttgtggaggtgttctcccgcatcgaccacaagttcgacctcatgtacgccaagcgtgccttcgtgcactggtatgtcggtgagggtatggaggagggcgagttctctgaggcccgtgaggatctggcagcgctcgagaaggactacgaggaggttggtgctgagtttgatgagggtgaggaaggtgatgatggtgatgagtactagaagtatcctgatgcggtcatcgtcaggcttgtgtgctgctcttgtccccgttgtggtttgcaacacctgatgttgtaagactttctggttatgtccgccccgctttgccactgggttattaagaacgtcgttatggatggttgtctacact

SEQ ID NO: 16889 - DNA, 1241 bp, Zea mays
  Clone ID: LIB3067-029-B12_FLI
cccaatgcggccgacgccggcgctcgacgccggcggacgcatggtaacaagcttcctatccgccactgaatggatgcttccgtctccggccacgcaagtccacaccatctccgtacttccctcccgtcgcgacttcgccttctccaacctcacgatgtcgctcaggaatagcggcggcaacgagggagagagtggcagtactaagttccacgtagtacgggacgacctcctccacccgctcgccaacggcaacaaggcgcgcaagctcgacgccctcctgcccgtcctccgccgctgcggcgctactgacatcgttacgtgtgggggttgccagagcgcccatgccgcagctatcgcggttcactgtgccgaatggggaatcaggccacatatactactgagaggcgagcaactggatgttcccacagggtataatctcatctcattgatgtttggcaatgtgacatatgtctctcggtctttgtatgcccaaagagatgagatgctttatgagcatgccataaaggttgcaggatatagtggcacagtgatgtgggcagatgaagttataggaaagggtttgggtgtagatgaggacaccactgatggaaatggttcaagaagagtgatgattgttaaggaaggggcaggtagtgttcaagcactgcttgactccagtggagggttactgctgttatgcttgctgacacacttgaaggatataaacagcgagagagatctcttgtatctgattttgagaaggttttcccggaaatctaccatggaatggaggaagatgctactcatgacaatctagttcaatgggtggagcggttttcacctagaagatttggcaaggtgctggatggtgaaatcgcaatgtgccgccaggtagctcaacagaccggtatcctgctggatcctatgtataccttggctgcctgggagcaagctgttgatatatgctgtggagacagtgaagccaaagtcttgatgatccatacgggtggcacccttggcctttttggattggcacaaaggtattcatcacagttcaacacaggcgaacaaccttaagcatgccaatgatgatgttcaaatgttacggtttgtgggtatggactatggaatgtgatctttgactttgaataatcaaaagtacaaagaggtgtttctcccttggggtgggggggggggggggctttgttaaaggaattggtctttatattgatttggaagct

SEQ ID NO: 16890 - DNA, 747 bp, Zea mays
  Clone ID: LIB3067-029-D12_FLI
gggcgccaaggcggacaagaacctgcggttcctgctgcagaaggtgctgaagcagagcgacgtcgggagcctcggccgcatcgtgctccccaaaaaggaagcggaggttcacctgccggagctgaagacgagggatggcatctccatccccatggaggacatcggaacgtcgcgcgtgtggaacatgcggtacaggttttggcccaacaacaagagcagaatgtatctgctggagaacacaggggaatttgttcgttccaacgagcttcaggagggggatttcatagtgatctactccgatgtcaagtcgggcaaatatctgatacggggcgtgaaggtaaggcccccgccggcgcaagagcaaggcagtggttccagcgggggaggcaagcacaggcccctctgtccagcaggtccagggagagccgcagccgccggtgctcctgaagacgccgtcgtcgacggggtcagcggcgcctgcaaggggaggtctccggaaggcgtgcggcgggttcggcagcagggagccggcgccatgagccagatggcggtgagcatctgaaagagcagcagactccgccatatattgatcgatcgaccaatcgatcgttagttctccaagttactattagctagctatagctcgaaacagctgaactgatgatgacgatggtaacctccgtcgtgtgtgctaagcatgtagcgtgctaggagatgatatattaaatataatcgagtagtagagcc

SEQ ID NO: 16891 - DNA, 580 bp, Zea mays
  Clone ID: LIB3067-029-D9_FLI
atcacaagcaaaagcaacaaggcagcagcacaagcaagaaccacacctcctcccttcgcctgtgatcatgtcgtcttgctgcggcggcaagtgcgggtgcggctccagctgctcctgcggcagcggatgcaacggctgcggtatgtaccctgacgtggagaccgccgccaccagcagcgtcaagaccacggtcctcgccgcgccgaccaccaaggccagcgccggcggcttcgaggcggccaccgagggcggcggctgcgactgcaacacctgcaagtgcggcaccagctgcggctgctcctgctgcagctgcaactgagccggcccggctcggcgatggcgcacgagagtcgagaggacgacgacgaggaggcgtataataaatataatagcggcgtccagtaaataagatcctgtcaactgcacccgccattatccatggtcgctcgctcctcgcctgcgtctcctggggttcgtctgaacgtcctcgcggcttcacgacggcgatgccgccgccgtcgatcctgtccgtctcgtgccggatttaatatttagatctatatgcgtgtttttctgcgtt

SEQ ID NO: 16892 - DNA, 212 bp, Zea mays
  Clone ID: LIB3067-030-A12_FLI
cgccgtctttgacaagctttgctacgtttttgtcatggtgcccgctaagccccccggcagtaggttggagttttgcggagctcgcgtttttacaaatctcggtgctctgaaccgagcgtagtagccccctttgctgttgtgcatcccgattgagtgctgttctttgccaccttgtttaatttcgtcacctgacgacataaggttcattttgc

SEQ ID NO: 16893 - DNA, 582 bp, Zea mays
  Clone ID: LIB3067-030-A2_FLI
caccacgacgcggttaactcgggacggaagcaacgcaactcggcacgaagaaggaaaagccaccaccggttcctccgccgtccccgcggtttcagttccttgcttgcttgcttgctcttgctctccctctctcgtggaagccagccacacaaggcagaaagagagagtgacgttgtgttccatcccgttccgctgaagcaaccgctctcctacaccaaaccacccacaccactctaggtctctagccgatgcgatggatgtggatccagcagcggaccagcggaggaagaacaagggcgggctggagtcggagctggagcgccactacgacgacctgcagcgggagatgatgctgatggccgccgatcggccgcacaagcaactgcaacagcatcgacgtcacgggcaccgccccgatctgctccagaactgcgacctgcccccaccggccaagctcttcggccccgtacccaccctgcagaggctggagaccgctgctgccaaggaccacaaggccgacgacggcctgctgcgggcgctgcgcctgtcgcagtcgcgcgcgcgggaggcggaggacaagct

SEQ ID NO: 16894 - DNA, 293 bp, Zea mays
  Clone ID: LIB3067-030-A7_FLI
tcgatttggagctagggatgtaatatgatttagaaaatatccgtccagatccagactcgaagatggtgaatactggttcggatggaattttcggatatccggtctttttttgataacggatacaaatacggatattttattcggatatcgaattcgaatacaatatgtctgatatctgtcggatatcgaatatccggatattttctcggataaatcttctcggatatccggatagctgtgtgtattttgttgatctttttgtagaaagaaattaataatacacaaatattctc

SEQ ID NO: 16895 - DNA, 1272 bp, Zea mays
  Clone ID: LIB3067-030-B4_FLI
gaacatggagatcttttgctctcacgcaagacgcaacaaaaggtttggatagaacactctgcttccccgtccttcggtctagcccgagtggacgtaggaagggacgaggggtcttgacgccggcgagccatggcgggggctctcctctcctctccgcacactctcccgagccccacatctcagtccccgttccgccccaggagcaggggaccactccacgctggggcagcgcgtgttctgccaccgaggaggagggcctttgtgctcgcttcgtgctctcgcgagcctgccgctaggaaccgcgggttggaggtggagaggaggcgccttctcatgtccgggctcgtgtcttctttcgcaatcatgctccccatttcagaagcatatgctgtcatggagactgatgaagacgtgaagatgaacacacaaattgatgagatcaatgcatactcttttctttacccggtggaactgccagggaagaaatttaccttcaaatgggtagagtccagaaaaccagagcgatattcctctgcagcgccactatcgcctgatgcaaggcaacgtatcgtatcagagcgagttgacatgatacacaatgttgtcatctcggtctcgattgggccaccgaattcacgttttttgccttcaaaagacaagagctcgtgggatccaaaagatgttgctgattgcattttatctgatagatctaccatgaaggtgacaactggccagcgcatgacagagagttctgtccttgacgcacacgttgcagaggttgatggagaaccatactggtattatgagtatcttgttcggaaatcaccaacaaaatctgcaccagaaccaaatttgtttcggcacaatgtagcctgcactgctgagcgtgatgggtacctgtactcactgaatgcttccactcttagcaaacagtgggaatctatggggccctttctacaaaagaccgtggcatcctttcgccttctccccggtacagaaaactatgttcctccctacaaggatccttggagattttggtgaatggagattcttcttgtagtcatcatttttatcccttcagatgactttatagcttcaggttttagaccatatttttcacgtcagatgtttagtgagtgtctgtcctttcagcttgacagataaaattcagagacccagtttggtatcagtttcgcccatcgtgttcgttctgattaataacagtcccagactaaaggtgtgtttgaatgcactagaatttttttctcgaac

SEQ ID NO: 16896 - DNA, 814 bp, Zea mays
  Clone ID: LIB3067-030-E10_FLI
ctttggttctgccctcgcacgctatgcccgcgattcccctccccgcgcccgcagcccccgccgccatcccgattcctccgcccgcttcccctccccgcacacgcagccccgccgccatcccgattcctccgtccgcttcccctccccggtccccgcgcccgcagcccccgccgccatcccgattcctccgcccgcttcccctccccgcgcccgcggccccgccgccatcccgattcctccgccagcggcggtgcccaaggggaagaagcgggaggcggaggacgagatcgagatggccgtgagcgcgaagaagcagaaggcggcgccaccggcgaaggccgtgccgacgtccaagaaggacgccaaggaggacgccaagtccaagaagcagccgccccccaagaaggctgagaacagcagcagtgactctgaagaggaccccgagtccgaagaggagaatttttataatttgattgagtcggggagggtagacggagatgaggagtttgacgaggacgaggaggacgggttcgagttcggtgacgctgacgaggcgatgcaatgcgtggtgatggcggaaagcagcaccaccgccgcggcgctgcgtgctcacacgcaggactacgaggcgctagctgcgcacaagcgcaaggcccttgccgaggagcaaccccagagggaggagggtcccaaaaggccaagaccggaccaactttcagaagcagaagcagcaaccatgttcgaccaactgatggaaggctttggtcttaggcgtaaaagaaggtcaaaagatggcaagagaaggggaagaaag

SEQ ID NO: 16897 - DNA, 761 bp, Zea mays
  Clone ID: LIB3067-030-F1_FLI
gtttgtcatcgcgcgaccgattaccccgccgccgccgcgtcggcagcggcgatggcgtcgtcgttgtcgcgggcgctgctccgccgcgtcgcagaactggctagaggacgcctccgcgccaaccaccgcatgctctcatccgcgtcgtccaccgccgccatcgagagggcttcgcagttgccggcggaggcccaggccgtgcgcatgacggagggttgcgtgcggagattaaaagaattacatgctaaaaaaccatctgctgaaggtaagatgctgcgcttaagcgttgaagctggtggatgttctgggttccaatattctttcgctcttgatgacaagaaaaatgcagatgacaggttttttgagactgatggtgttagattggtcgtggatgacatctcatataatttcgtaaaaggtgccactgtggattacgaggaggaacttatacgttcaacatttgtggtttcaacaaatcccagtgctgttggaggctgcagttgcaagagttctttcatggtgaaatagcttcaatgttaccttgaagagatcaataaccggagttctgtagcgaaacatacgctttagatctgagtgtacaattggtattttttggtagctcttgagatgtttctttttgagttttattaccttaaagagaacaataaccagaaatatcaatcacaaactgtctggttcaatttgtatctctaacatgtgaaatgatgacaaatttatgtacatgtaatcttatggctatt

SEQ ID NO: 16898 - DNA, 884 bp, Zea mays
  Clone ID: LIB3067-031-B1_FLI
gtgcccgctgaaaaacaaactcaccaacaaagtgacctgaaactgggagcaagcaaccgagggcgagagccatggcgaagcctcgcagcggcggcggcggcggcctcctggacttagaggggcactacgccttttacggcgcctaccacagcaaccccgtcaacgtgggcatccacgagctcttcgtgtggcccatcttcctcaccgcgctcatgctcctccacctcaccgccccctccacgcacgccgccggcatcagcgccgcggtctacgcggcctactacttcctcctcgaccgccgcgcgggcgcgctcgccgccctcctctgctacctctgctgggccgccagcggcgccctctctgcccgcctcggtttctctgttggatggaaggttgtattggtggcccagttgttctgttggattatgcaattcattggtcatggagttttcgagaagcgagcgcctgctcttcttgacaatcttgtccaggctttcctgatggcaccattctttgtgctgctagagattcttcacacatttggcgggtacgaaccgtatcctggcttccacgacaaggtgagcaagttgattgaggaagcccggaaggaatgggaggacaagaaatcaaagaaatcctcatgagatatgcgtgaattaacggctccgaactgttggggtctgcctgctcgagataacctgctgattggatgaatctattgcaaggatggttaccgaatactgatgctatttatgttgtataagatgatgtgcgctatgttgtctgatgtttttatatatattataatggtgacgaaaccgaggtaaaaaataatttatatatgtatactggtgtgattgccttgctagggcccttgtttctct

SEQ ID NO: 16899 - DNA, 1324 bp, Zea mays
  Clone ID: LIB3067-031-C2_FLI
taaggtaaggggcgacgaaaatggctccaacgaccgccaccaaggacgacagtggctacggcgacgagcgccggcgcgagctgcaggcgttcgacgacacgaagctgggggtgaaaggtctggtggactccggcgtcaagtccatcccgtccatcttccaccacccgccggaagccctgagcgacataatttctccggcgcctctgccgccgtcgccgccctccggcgccgccatcccggtggtggacctctcggtgacgcggcgcgaggacctagtcgagcaggtgaggcacgcggccgggacggtgggcttcttctggctggtgaaccacggagtgccggaggagctgatgggcggcatgctccgcggggtgcgccagttcaacgagggccccgtggaggcgaagcaggcgctctactcgagggacctcgctcgcaacctgcgcttcgcctccaacttcgacctcttcaaggctgctgcggccgactggcgcgacacgctcttctgcgaggtggctccgaacccgccgccgcgggaggagctgccggagccactcaggaacgtgatgctggagtacggcgcggcggtgacgaagctggcgcggttcgtgttcgagctgctgtccgagtccctcggcatgcccagcgaccacctgtacgagatggagtgcacgcagaacctgaacgtggtgtgccagtactacccgccgtgcccggagccgcaccgcaccgtgggcgtcaagaggcacacggaccctggcttcttcaccatcctcctgcaggacggcatgggcggcctgcaggtgcgcctcggcgacgggcagaacggcggctgctgggtggacatcgctccccggcctggggcgctcatggtcaacatcggtgaccttctgcagctcgtgaccaatgaccggttcaggagcgtggagcaccgggtgccggccaacaagagcagcgacacggcgagggtctccgtggcgtccttcttcaacacggacgtgaggaggtccgagaggctgtacggccccattccagaccccagcaagcccccgctgtacaggagcgtcagggcccgagacttcatcgcaaagttcaacaccataggactcgatggccgcgcgctcgaccacttcaggctctagctacctggctacgtttcagattcgtcctttcatttgctttggtctctaattaataattccaaataataagcccgcggatggacctctgtctgtctgtctgtaatttagtttccaagtttagtttgttgtggtaataattcctgtatcaattatgtcataaataaaagctagggaaccttgat

SEQ ID NO: 16900 - DNA, 241 bp, Zea mays
  Clone ID: LIB3067-031-D11_FLI
ttctcaagagcagccaagtcctcacgggcttctgagaaggactatgaggaagtcggtgcagagggtgccgatgatgagggtgacgagggagacgactattgagtagctggctaataagtagttctctggtggttaatggttgggttattttgagtatatactctatggttccactccattggatactgctgctgtgtgtgtttccattttgtactatgtagtaaattgttcgtagccccct

SEQ ID NO: 16901 - DNA, 767 bp, Zea mays
  Clone ID: LIB3067-031-F2_FLI
cgaggacgtctgccggcagtgctcctgctcctcctcctcctcctcctccttcccggccgccgcgcgagcttgggttagtgtctcttcttcgcggagacctgtgaggagagccatcatcatggccgctgttgagactgttgtcctcaaggttgctatgtcatgcgagggctgcgccggggcggtcagaagagtgctctcgaagatggaaggggttgaaaccttcgacatagacctcaaggagcagaaggtgacagtcaaaggcaatgtcaagcctgaggacgtcttccagacggtttccaagtcggggaagaggacctcctactgggagggggaagccacagccccggacgctgcggcggctccagaagccgaagcagctcccagcaccgcggcagaagcgcctcctgctgctgctccggcggcgccagagatcaccccagccaaagctgacgcctgatcgtcacgctattattcactcacatgtgatgctgcggctgcgactcctaaaccttaaatctagaaatagctggggattgagtttgcattgcatcgtgttcttgccggtctagcaagtgactataagaataatggaataaacgatgacccagtgtgtgtatgatttccgttctgaagaacaacacatcccttgcaggattgttgttcagtagattttacttgtaccgcggctttggagttccccaaaggactttgttcaagaacttcttctctcacaggaaataacatgagtgcagtccgtgcttttatct

SEQ ID NO: 16902 - DNA, 1041 bp, Zea mays
  Clone ID: LIB3067-031-H4_FLI
agaaaatggcgtcacttctccgccctctcgtcctcgtgctcctgatcgcctcctgcgcagcgcagcagtcaccgccggcgcagcccccgccaacgccgaacgcgccaccggccaactcgccgccccaggcgcctccagccggaaacccgccgccggcgccccaggcgccgccggcaggcaacccgccacctgcgcccaccgccactccacctccggccccgaccactccgcccccggccccgaccacacctcccccggctcccacaacgccgcccccggcgccgacaactccacctccgacccccaccacgccgcctccgtccccaccggcgtcgccaccgcccgctcccaccactccgccaccgtctcccccggcaagcccgccgcccgctcccgccaccccgccaccgtctccacccatggcgccacctcccgccacgccccctccacccgccaccccgccgccaccggccgcgcccacgccggccccgagcgtggccccgactcccccgcccgtggcgacaccggctgcgtcccccaagagcccgaagacgccgagccccgccgccgcgacgtccccggcgccctcgctctcgcccacgggcacgccgacgaacgaggactcgggtgcaagcgcgcgcgcggtcggcttcgccacggtggtggcgttggcgggcgcgggcctcgccgtcctgctttaaaaactagactccgactcttcctcctgtcctcacgccgatgttgtcaccccctccccgtgcctcgacgttgctgctcgctccatttcagtttcatcttttttttttttcctttggtgttgttatttaattttaccggccctacgatcgattcttgatgtacacgatgatgatgcattggttgctttggatccgcgggcgggtggtggttagtgttctgcccgcgggtgtcgccatgtacttttaccgcactacattttggttctatagagagaggatttgtgtatattctcgtggattatttctatggccgttgaataaaatctctgtgcagattaactcg

SEQ ID NO: 16903 - DNA, 529 bp, Zea mays
  Clone ID: LIB3067-031-H5_FLI
agccagcttatggtcgagtcaatttcagcgctccaacggaaggagaagtcactgcaggaggagaacaaggttctgcagaaggagaaagcgttactcctgcatgcagctcgcggagaagcagaaagaccagcggcagcaagtgcaacgggaccaaactcaacagcagaccagttcgtcttccacgtccttcatgttaagggaagctgccccaacaacaaatgtcagcatcttccctgtggcagcaggcgggagggtggtggaaggggcagcagcgcagccgcaggctcgcgttggactgccaccatggatgcttagccatctgagctgctgaaggtttgccctcaccgtcgcgatgtgatagcccaaaatccagcaagtcttccccggaccccggactgtccccgcttctccgcctggtgcagtatcgtcgtgatcgcgagaagcagcagcagcggtttgccgtattttttaccactgtgtataagtagcatatctgcaatgtgtatattttgttcaccgttcctgctgg

SEQ ID NO: 16904 - DNA, 742 bp, Zea mays
  Clone ID: LIB3067-031-H6_FLI
gggtcggatcccacaccgaggaaaggagaagagagggtcggaataatggcggccgaggagggtgccgtgatcgcgtgccacaccaaggacgagttcgacgcccgcatggccaaggccaaggagcagggcaagctggtggtcatcgacttcatggccccctggtgcagtgggtgccagatgatggccccggtgtacgcggactgcgccagcaagtacccttccgcggtcttcctcgaggtcgacgtcgacgaactgctggaagtcgcgaagatctacggcgtccatgtgatgccgaccttctgcttcatcaggaacggcgagacgctcgagagctttgctaccgtcgacgaggacgagctccgggacgccgtcaggaagtacgccgccgctggcactacgacggctcctgcctcggcgtccgcctaattcaggagatgtgatgtgtagcaaatagcgcgcgcgcaccagtcgtcaataaataaataaataaataaataaataaataaataaaggccaacgtacgacgacaaattagtggcgcgcgcggtagtagctagcagagtatgcgccgccactgtgtcgatctgcagtttggtcgtttaaaagtgattgtagtgtgtactatgttcagctcgatgatctcggagtcgctatatacgctcgctcccgtgctggacgggttatcgatctgatgaacaagaatacaataatatgtatggatacttgtgacggggttccgcgg

SEQ ID NO: 16905 - DNA, 341 bp, Zea mays
  Clone ID: LIB3067-031-H9_FLI
caagttcctccggggcaacgctggcggttcggagtgcatgtccgctatcgccggctcgtacggctacattgctcctgagtacgcctacacgctgaaggtggacgagaagaggacgggggcccggagaagaagcagcagcagcagcaggaagggccacacgactcgccgccgcagcaggatcttcttagtatctagaagcgcagttgcgagagttggtcgtactgatggtacttggtagcatccctgcctgccctgttctttgagtgaagcgttggaacgtggcgtgtgtgtagtgtaactgtgtatgcaggcggtgatttatatgcatgcttcctttaagt

SEQ ID NO: 16906 - DNA, 493 bp, Zea mays
  Clone ID: LIB3067-032-A11_FLI
gacccggcagcgttcggtgacgaaaaaaaaaaaacccaatcgcctccgccccctcccctactccgggcgcagctgccgacgtcgccacgcgcattccgccgcgccaatcgggtacacgagcagggcgggggatgacgtcgtcggcgtccgcgccggcgtccaatggaccgcgctacgcgccgccggatccaacgctgcccaagccgtggagggggctcatcgacggcaacacggggtacctctacttctggaaccctgagaccaaggttacgcagtacgagcgccccgtcgcggccgtgcccaactccccgccgcagccgcctggctactccaggcccgaggagaggccgagaagcagcacaccttccgagcggagctcggaaaccacggtgagccgcccgcagtatgcacctctctcggataacagggcaaggaatgaccactcggagccacattatgcatctggagtgaacccttcacaaattgcagccgt

SEQ ID NO: 16907 - DNA, 568 bp, Zea mays
  Clone ID: LIB3067-032-B1_FLI
gcagctccaactactcacaagaagtaaaaactccactggacactgaaattaactaccaggattatctcaagttgaggacaagggtcgaattcctccaaactacacaaagaaatattcttggcgaggatctgggtccgcttagcatgaaggagctagagcagctggaggaccaaatagagatatctctgaagcatatcagctcaagaaagaatcaaatgctacttgaccagctatttgatctcaaaagcaaggaacaagaattgctggatctcaataaagacctaaggaagcagctgcaagaaacaaggccagagaacgcgctccgtgtctcctgggaggaaggtgggcacagtggcgcaagtgggaatgttcttgatccttatcaggggctccttcagcacctggacaacgatccttccctgcagttcgggtaccatcatcaagcctacatggatcagctgaacaacgaggacctggtggacccgaatgagcatggtcgatctggatggatatgaaatgctctgatgaccccaaataaagttgatgcacagcagggattcaccctgca

SEQ ID NO: 16908 - DNA, 1859 bp, Zea mays
  Clone ID: LIB3067-032-C11_FLI
gctccagcctccagcgtgatctgagtcctgaccaagccctaaacgccaccgccctcgcaaatctcctttcccttcgatccatggccgccgccgtcgccgcccccgcgccatcccgcaagacggagacctacaccgacaccaagcgccgcgacgacgtgcgcggcgccaacatcgccgctgcgcgcgccgtcgccgacgccgtgcgcacctcgctgggcccccgtggcatggataagatgatcgcttcgggcgaccaggctcaggaggtcatcatcaccaatgacggtgccaccatcctctcccgcatggcgctcctccagcccgccgcgcgcatgctcgccgagctatcccgctcccaggacgccgccgctggggacggcaccacgaccgtcgtcgtcctcgctggatccctcctccgccgcgcccagtcgctcctctccgccggggctcaccccaccgccgctgccgacgccctccaccgtctcgccacgcgcgctgttgagatcctccacgccatggccatccccatcgagctatccgaccgggaatccctcgtcaagtccgcgtccacggctctcaactccaaggtcgtctcccagtactccacccttctctcgcccctcgccgtcgacgccgccctctctgtggtggaccccgctcaccctgaccttctcgacctccgggacatccgcatcgtgaagaagcttggtggcaccgtggacgatactgagctcatccctggcctcatctttgacaagaaggctagccatgctgctgggggcccaactcggatggagaatgctaagatcgctgtcatacagttccaaatctcaccacccaagactgacattgagcagagtgtcattgtatccgactacgcacagatggaccgcatcctacgtgaggagcgcaattatatccttgggatggtcaagaagatcaaggcggctggatgcaatgtattgctcattcagaagagcatcttgcgtgatgcagtcactgacttgtctctgcactatcttgctaaggcaaagattctggtggtgaaggacgtggagagggatgagatggagttcatcaccaagaccctaaactgccttcccattgccaacattgagcacttccgcacggataagtttgggtatgcaaatgttgttgaggaagtctctgttggagagggcaaggttgtgaagatcactggaatcaaggacatgggtaggaccgcaactgtacttgtcaggggatctaaccaattggttattgatgaagctgaacgtagtctccatgatgcactctgtgtcataaggtgcttggtcagcaagagatttttgattgctggtggtggtgctccagaaatagagatgtcaatgcagctggctgcttgggcaaaggagcttcgagggatggagagttactgcatcaaggagtttgctgaggcgcttgaggtcatcccttacacattggctgagaatgctgggctcaacccaatctccattgtcaccgaactcaggaatcgccatgccagaggtgagaagaacactggcatcaatgtgaggaaagggcagatcacaaacatcctggaggagaatgtcgtgcagccgttgctggtgagcacaagtgccattacgttagcctgcgagtgtgtcagaatgatcttgaagattgatgacattgtcactgttaggtaagagcgtgaagttggggtcatgtcagcctgctctgttctgtctggattgattattagttaggttactgcttaatgtaaaacttggttcatgggcgtgtttctacacttggttttgatgttagtactatccttgacatgaaactactaccagggttgcacctgcgatctctac

SEQ ID NO: 16909 - DNA, 669 bp, Zea mays
  Clone ID: LIB3067-032-C3_FLI
ggttcatcgaagcgaagggaacttgcggcaagagcacctcttgttgtctcaaccctgcaagctatcagcggactaggtgactcagctttcgagaagaaccttcgccagttctttcctcttctcgctgggctcataagctgcgagcatggttctagtgaagtacaggtggccctgagtgatatgttcagcacttgggttggcccactcgttctccagtcctgctgatgctgaacatcatgttatacatagtagtatacatcccattgtgttcctcctttcctccattatgttatgttaatcttttagtcgctgggagttcatattgttgtgctgaactgatcatgcagatcaaattttcgttgacgttattttcttgttcgtatcgggaggagtgtatgtccctatagagaactgaattatgtacggtagtttagctaaaattgtgcccattctgttcctaatgtgctgatttctagatttttaggcatgttttacatgcttttgctcagtagcgtttctcctttctggaattctggaatgtggtagggttggattataattcttgcgagttgggtgtgttaggctatctccttttatcttaccttctatcttaaactctattatgtaatcagtgcaatttatagtataaaactgtgttttgcccgtccc

SEQ ID NO: 16910 - DNA, 601 bp, Zea mays
  Clone ID: LIB3067-032-D4_FLI
aaaacggggaggctcccctccccaagatcagaccttcgatccgttgctcctccacggcgccagccgccagcgcctccgttcctcaacgcctgtttgtccttgcatggccggagccagacgtcgcaccttgcctccaccctcgcattccgatcacccgcttccagctcctctccgtctcgctgctcctcctccgctcgcagagctgagctgatcgatggaccacgagcagcggcgccagcggcagcagcacagtcccagaggcaatgctcctgggagcgggaggtgcggctcctcgtcgaggaagcacaagggcgggggcaagaaacccatcaaagtggtgtacatctccaaccccgtgcgcgtcaagactagcgccgctggtttccgcgccctcgtccaagagctcaccggccgcgacgctgacccctccaagtacagccccgaggacctcgccggcgccgccgtggcggcgggcgaccctgactgcggcgccgcccaggggctcagccccggggacacgacggctgcgtcgtccgataccatcgtcgccatccccagccctgccgcggtggaccacctgcacgagcacgacgcctcgccc

SEQ ID NO: 16911 - DNA, 822 bp, Zea mays
  Clone ID: LIB3067-032-D6_FLI
atccaggtccggaggcgttggcaccttgttgagctccaacgccatgggtggtgagggccagcaggcccattcagctggctgtggctccggctgtggtggtggctgcggcagcggcatgctcatcgaaggctccaaggccaacaacgccatgtccggtggctgtggctctggttgcggtggtggatgcggcagcgagcttcttgacgcccaccgcatcctcgccgccgtccagaacgcgcagcgcagcgccaagcgccgcggcgcggggcccgcgaggcccgtcattgccgtcaccccgaccaccacctccgcgctccaggtgccatccctgacgtctctggcgcacaccctccgcctcgtcgacgcccagctcgtgtggatcgtcgtcgagccggggcaccgcaccgacgccgtcgccgcggtgctctcccgctccaacctcgacttcctccacatcaccggccctggagactccaccgcaaacctgcgaatgcacgccctcagggagattcgggcgaagcggatggacggcatcgtggtgttcgccgacgagaacagcatcctccgtacggagctgttcgacgaggcgcagaaggtgaccaccgtgggcgccgtgcccgtcggcatcctcggcgaggacgacggcaccagcgagtccttcctccaggcgccgtcgtgcgacgcggaggggaagctggtgggctaccacgtctcggaggagaccgtgctgccggcgaaccggagcgacatgctgatggccagcaggctggagtgggccggcttcgtggtgaacgcgcgggcgctgtgggaggacaccaagga

SEQ ID NO: 16912 - DNA, 663 bp, Zea mays
  Clone ID: LIB3067-032-D9_FLI
aaaactctggatattcaagtatttacattcagcgatctggagacaaacgagatggctgtggtatattctataaacctaaaagtgcagaactggtgcagaaagaagtaatactgtacaatgatttagtagaaaaatatgttcctagtgataatgtaaatagtgctctggaaaataattcttcagcagaagaagacaagaatgcaaagccagataatagcaagcgtggagatccaaatgatccacgcgttagattgaagcgggactgtgttggtttactcgcggctttcaagcttagtgatccttgtgatcaaattttgattgtggcaaacacacatatttattgggacccacaatggatcgatgtaaagttggctcaggcaaaatatcttctttcgagagtatctcagtttgagcaactcatctcaaataaatataattgtaaaccttcagtgatcattgctggtgacttcaattcgacacctggtgacaaggtatgccttgcatttatttcattgcttcctgaagcttattgacttgtaagaacatcatttcgtgctttagctattatttctatctattgtaatacaaagtatagttagaaccatcgtagagatgattctgtgaggtcatttttaatataaaaatcccattattgggtgtatt

SEQ ID NO: 16913 - DNA, 433 bp, Zea mays
  Clone ID: LIB3067-032-E6_FLI
cgcagtcttcagcacgcacaccaatcgcccacaagagctcgcaggagaggtcgaaaccctagcttttgcggcggcggagagaagatgatctacgacgtgaactcccccctcttccgttccttcctcagccagaagggcggcgccgacaagaggaaaatggaggagcataaaccaaaggagcagaggcccaaggctaacgagaacaagcctgtgatgaacgaatgaatatctccagaagctttgttcaatgtgcaaccaagtccgatgtccgtctgctctggtcagcttaaaaccaacgcttccaataatcctattggtgtcttagtttccccttatagtgttatttgctcggcttgaacatggcaacggaaatgaaacttgaactatggtactgtcatcaatttgagacccccatgattgacaacttttgtgc

SEQ ID NO: 16914 - DNA, 462 bp, Zea mays
  Clone ID: LIB3067-032-F8_FLI
cactggcggagtcgacggggctggagcagaagcagatcaacaactggttcatcaaccagcggaagcggcactggaagccgtcggaggagatgcagttcgcggtgatggatgggttccacccggccccgcccaacgccgccgcgttctacgtcgacgcacgcctcgtgggagcaacgccggcgatgttctacgcccggccggatcatggggctcatcatggcctctggcacaattgattcagcccacgcacgctaccatgaagtattgaagtgtgcgcctgaaaacctgcatgcatgccgtagcttaattagcctataaatatgaatgatctgcacaatgaactggagatcgagaaagaaccctactgcattactgtacccccgttgttgcaccaagaaactttacatgtcatgaacagcaaagactgtgcctccttaatgctacaggtttgcggcattttgc

SEQ ID NO: 16915 - DNA, 947 bp, Zea mays
  Clone ID: LIB3067-033-A2_FLI
cccaattctaagcgagacggggcacaggaagaggagagcctaaaaccctaaccccccgaatcggatccggccgccggagcgcggaaccccaccccggccgccatggagatgggagggatgagcgacgctgagcggctgttcttcttcgagatggcctgcaagaactccgaggtcgcgtacgagcagaaccccaacgacgccgacaacctgacgcggtggggcggcgcgctgctggagctgtcgcaggtccgaaccggccccgacagcctcaagcttcttgaagatgcggaagccaaactggaggaggcacttcaaattgatcccaacaagtccgatgcactctggtgcttgggaaatgctcagacctctcatggattcttcactccagacaatgcaatagctaatgagttctttacaaaggcaaccggatgtttccagaaggctgttgatgtggaacctgcaaatgagctgtacaggaagtctctagacttgtcaatgaaggcacctgaactgcatttggagatccagaggcaaatggtttctcaagcggcaacacaagcatcctcagcctcaaatccaaggcaatcaaggaagaagaaggacaatgacttctggtacgatgtttgtggatgggtgatccttggcgccggcattgttgcttgggttggattggcaagagcaagcatgcctcccccgacgccaccagccaggtgagaactgatcgagtgacgagtgccaagaacgctttgcaaatgatggcatgcctatattaaggtgtcccagaaccttctaggtgctagtgttgtatggagaggagagaggtgtttccatacggtttgctcaaattttcatgcttgttcttttcgagcctcatgtgctgctggatagttttgtactttgcttaccttgataccgttttgaggcaaaaaacatacagtgttgcgact

SEQ ID NO: 16916 - DNA, 1067 bp, Zea mays
  Clone ID: LIB3067-033-B6_FLI
ttcaccaaactaaatgggatagttattcaagggaacggcattataaatggcagagggcaacaatggtggacctactcagacccagaggatgaggatgatgatgacacgtaccatgtagagtttcaaagaatgccacagattaaacctacagcgttgaggttttatggtagtttcaacgttgtagtgtctggtatcactattgtcaacagctcacagtgccatcttaagttcgacaactgtcaaggagtgatggtccatgatgtgaccatatcctcccctgagaacagtctcaacactgacggaatacacctgcagaactccaaagatgtcagcattcatcatacaaccctggcttgtggtgatgattgcatctccatccagacaggatgcagcaacataaatatacacaacgtgaattgtggaccaggccatggaatcagcataggtggactaggccgagacaacacaaaagcatgtgtatcaaatgttacagtaagagatgtcaacatgttcagaaccatgaatggtgtcagaatcaagacctggcagggtggcgtaggatcggttcaagacataaggttctcaaatatacaagtctcagaggttcaaacacccattatcatagatcagttttattgtgacagaagcacttgcagaaatcaaacatcagcagtggcagtatcaggggttcaatacgagaatatcagaggaacatttacaatcaagcctgtccattttgcatgcagtgacagcttaccttgttcaggaatctctcttactggtgtgcaactcaggccagtgcaagtaccccactaccacctgaataacccattctgctggcaagcttttggggagctctacactccaaccgtccctcccatagcttgcttgcagattggaaaacctgctggcaataacttacagtcatatgacgacatatgttgagaaactgaaagtgcctttgtctgttcattggtgcttattcatgagtggtcgttgtgatacatgcgaccccatttgcaccattgcttgttgatgtgcacatatacagttattttgaggtcatc

SEQ ID NO: 16917 - DNA, 1231 bp, Zea mays
  Clone ID: LIB3067-033-C11_FLI
cactgtcaaatccttgctgtggcaactgctcaacggcctcaactatcttcacagtaactggattatacatcgagatctaaagccttccaacatactggtcatgggagaaggagatgaacatggaattataaagatagccgattttggacttgctaggatatatcaagctccactgaaaccattatgtgataatggggttgttgtaactatctggtatcgtgctcctgagctgttacttggggggaaacactacaccagtgctgtcgatatgtgggcagttggttgcatttttgctgaactgcttacactgaaacctctattccaaggtgtggaagcaaaaaatcctccgaacccattccagcttgatcaactcgacaagatttttaaggtcttaggccaccctacagttgaaaagtggcctacccttgccaatcttccatggtggcaaaacgaccaccaacacattcaaggacataagtatgagaacccaggtttccataacattgttcatttaccaccaaagagtcctgcatttgatcttctctcaaaaatgcttgagtatgatccccgaaagcgtataacagctgcacaagctttggagcatgaatactttcggatggacccactacctggacgaaacgcgcttttaccatcccagccaggggagaaaattgtacagtatcctattcgtccagtagatactacaacagattttgaaggaacaacaagccttcaaccaactcaaccgccatcagggaacgctcctcctggaggtcaatctgtagcaagacccatgccacgacaaatgccgcagcaacctatggttggggggattccaagagtggcaggtggagtaaccatggctgccttcaacgctgcctcacaggctggcatggctgggctaaatcctggtaacatgcctatgcagagaggcgcaggtggtcagtctcatccgcaccagttgagaaggaaggcggatcaagggatggggatgcagaaccctgggtatcctcagcagaagagacgattctgacgctatcaagatggagccatctgctgtatatcaggtgtttgaaacacgttgcctgtgtaagctgctgtagttttgttatcagcatccgaatgccaatgctggcacctgtaaaacacattaatcagtcgagagtccagataccagttgtccttatgggttatgatctaagctgctcgaatttggctgatttggtttgcc

SEQ ID NO: 16918 - DNA, 548 bp, Zea mays
  Clone ID: LIB3067-033-C12_FLI
gccaagacaaacctgaacgtggagcaagtgttcttctccatcgcacgtgacatcaagcagaggcttgcagagactgattcaaagccagaggacaaggcaatcaaaattaacaagccagaccagggttccgaggcaccagctgcccagcgatctgcatgctgcggttcataagcagacgcacgatagccataatcattggttatttgacactatttatttcctgcttggcttttataggaagaatttgaggaagccacttatgatatactgatgatgtggttgtactcttgtttgcttccactcttcgaagcaaacacctcttgctgttgacgtagctattgcactctggacatccgttggaacaacctctctcctccctacagactacagtgtgtaatggacgaattccatgtcgttgggtttgcattatcgatcaatgcatggattaacgtatcgcccttgtgtgaattgttgtgtttttttttcatgttgctgttcctttagattgaatttgttgggaaggaaaatatattttccttttcttatgt

SEQ ID NO: 16919 - DNA, 1212 bp, Zea mays
  Clone ID: LIB3067-033-C2_FLI
cacaggagcgctcgacacggggtcgccagcgccgggcgacccctctcgtcgccatcacgccccaataattcactgcccacgcccgccatcgccaccactggcgtccgcagcccgccaataataacgctcccaaagcagaggccgaaacccgcgacgcgcagcgcagggccagtggcgacctccagctccagctccagctccacacgcgggcgccaccaaggagctgagccgagcccggcactgtcggcggccatgtccgcgccgcgtcgccgcatggccactgcctccccgtcgctccgcttcctcggcctgctcaagcaacccgacgacgccagctcccagtcccacggcgtccaggagctggagctcgacgagcgcgacgtcgtctggtcctccggcagcgcgacctcctcgtcctcgacctccgcggcctcctcgccgtccccgaccgcgtccccgaccgccagcctcgggaggccgatttccgcctcgtcccgccacttccccgccggcagcatggggctgtccgcgctcctcgccgacgccgacgaccaccacgcgcccaccgcgcccgtcccggccgccgcgcgcccggagaagcagcacgccccgcgcccgtgccaccagtcggcccccgtcgccgtgccggcctggcccaaggcgatgacggccgcggacaggcgccgccgcgaagcggagctgcagctgcaggccgcggatgacgaggacgacgacggcgagcccgtggtgccgccgcacgagatggccgcgcggcgcgctgcggcggcggcgtcggtcatggaaggcgccggacgcacactcaagggacgcgacctccggcgcgtgcgcaacgccgtgtggcgcaccaccggcttcctcgacctgtgaaaaaggacgttccttgcctttggaggtttcgtttcgttcgttcgctggccacgtcactccactccacttgagctgcctgcttcggatcggacggaccttggccgctgggcagcttcttcttgcgtagcgtagtgctgtgccagctgctaggcactcaaaaaaggtgggagtttccttgctaggtttggagtactactaggggcgttatatattgagctaaatttgctggggaagtagccgcaggtgcttcggtattttcatgtaagagaactgctgtgatcagtctgcaactagtatgttttaagatgtctgcaactctttggc

SEQ ID NO: 16920 - DNA, 794 bp, Zea mays
  Clone ID: LIB3067-033-D11_FLI
gcgctggtggagatcgcgtgcgcgcgcacgcccgcgcagctctttgcggtcaagcaggcgtaccatgaccggtttaagcgatcgctcgaggaggacgttgccgcgcatgtcaccggcgacttccgaaagcttttagtgcctcttgttagtgcgtaccgctatgatggcccagaggtgaacacatctttggctcattctgaagccaaaatacttcatgagaagatccataagaaggcttacagtgatgaggagatcattagaattctcaccacacggagcaaagctcagctacttgcaacattcaatagctacaaggatcagttcactcatgcaatcaacaaggatctgaaagctgaccccaaggatgagtttctttcaacactgcgggcgatcatccggtgcttcacctgccctgacagatacttcgagaaagtcattcgactggctcttggaggcatgggcactgatgaggatgacctcaccagggtcgtaactactcgcgccgaggtcgacctgaagctgataaaggaggcttatcagaagagaaacagtgtgccgctggagcgtgctgtggccaaagatacaactagagattatgaggatattatgcttgccctccttgggcggagtgaggaggcgtgcctcaactcgatctcatctgctcctacttgtttgatggggccaaaaaactgcatcgacgtggtatccacatggccgtggttttgaataataataaatttgtaacacgtagcctgcattagcagcgcgttttaaataaaggaacttcctgatat

SEQ ID NO: 16921 - DNA, 828 bp, Zea mays
  Clone ID: LIB3067-033-E11_FLI
cgcgagacgcgagtcgtcctcctctctgtcttcgctcggcgatctatcaaggagggtgagggggagatggcggagaatccgcagctgtttgggaacgggatgccggtgccgttctacggcgagatgttcgtcctcgtccgcgacggcgtcgagttccacgtcgacaagatcccgtcagctcctggaggtcatgtgaaaacaaaaggcacaatttacctgtccaatataaggatggtgtttgttgccagcaagcctgttggcaacttctttgcttttgatatgccactgttgtttgtgcatggtgagaagttcaatcagcccatatttcactgcaacaacatctctggattcgttgaaccagtcgttccagacaatcagaacagggccctgtactcaactcacaccttcaagatcttgttcaaggaaggcggctgtggtactttcgttcctctcttccttaacctgactgcatctgtgcggcgctacaatgagtttgaagcccagtctgctgctaacatggcaccgcgtgtggatcctctgcaagccgcgcagactcctgtcgatgatatgatgcgtcatgcgtatgttgacccaaatgatcctaccaagatttaccttcagcaacctgccccagaatcgcagctgaggaggagaaactaccacggcccagctgatgcgaattagcgcttgctggattggcaaaactcatggccaatgaactgttgtatctgtttgaacaatttatcacaactggcttcaatatccgggagcccccgtatactgcgaatctgtggccgttacatcgtacataatgttttgagttcgctc

SEQ ID NO: 16922 - DNA, 792 bp, Zea mays
  Clone ID: LIB3067-033-E4_FLI
gcattcatcaaactggctatgtttgaaaaggagcaggctgcgtgtagttctcagaaaagacgagctgctgacatcagtaattttgccagtgctgttattagagttagcagatcacagacaaaactaaacactgaaattgtaaaacatctgggtattatccatgagtacatggagacaatggcttctgttcataatgcttttactgatcgttccaatgctttgcttcgtgtgcaaaatttgtcagcagatctatatttcttgcatacccgggcaggaaaacttgaatctgtatcagcgagaggaatggatcaggagagatcaaggtatcaaaagatagaagaattgaaagaaacagtaagagccacggaagatgcaaaaacacgtgcacttaaagaattggaacttatcaaggaaaataacatgaatgaaattaaaagatttaacaaggaaaggcgccaggatttggtggagatgctaaaaggctttgtattggatcaggccacatactcggatcattttgctaccatatggacaaaggtagcagaagaaacaaaaggatatgcaaacagcagcagttgaagtaggatgtacatattcaggtgaatttgagctgttactgtgcagcgtgaatagctacactcattgagaatcatgcgactggcttatacacaaacaggaccacactcttcattcccgaaggatacatttctatggatttttctggggattggtatctcaagttgtgtacctgaattttttcagaaaatatagcaataccattttccacggctt

SEQ ID NO: 16923 - DNA, 610 bp, Zea mays
  Clone ID: LIB3067-033-H5_FLI
gtggtggtggtggaagcggtgggggtgggagtggagggggtggatcgggtggtgggagtggaggcggaggatctggtggaggcggcagcagcggtggaggcggcggatctggtggtggtggaagcggtggcggcggcggatctggcggcgggccgacgagcggtcgttgccccgtggacgcgctgaagctgggcgtgtgcgccaacttgctgaacgggctgatcaacgcgaccctggggacgccgcccaggacgccgtgctgcacgctgatccaggggctggcggacctggaggcggcggtgtgcctctgcaccgtcctcagggccaacgtcctgggcatcaacctcaacctgcccatcaacctcagcctcctcgtcaactactgcggcaggcgcgtcccctcgggcttccagtgcttctgactatcacacgcccatcgatcgatcgatctggaggctaaataatttctccaagctgctagtatacgtacgtacgttgatatatatgatgtagtattatatatatgtccatgcatctcgtcgtctatcgcatgttgttgttgttgttgttgtttttcgatgatcctgtctctgttataaatatcattatt

SEQ ID NO: 16924 - DNA, 567 bp, Zea mays
  Clone ID: LIB3067-034-D8_FLI
caaggtgtgagcatttgattccttcagtttcatgctatcaggtacttcttcattttctgatcagaaacaaaaaaggacgaattgatttgaagagtatatgtggacatacttaaagttggatttggttcttgcaccaaaggaggtattatttattctgttgccatatctttaatcaagaaagatagttttctgcaagctcttggtattcttcggcaactaaagagtttggatcttaaattaagcaagggagccttgtcaactatagaagaagaatttaacaaggaaagcaaattggggatatgatgaatttgttggaaagagtggagatgttcccctgagttgcgtcttcgcaacaaaatctttgtgtctgtgtgtacaaatcttggcactgatcaggcatggttgttattccaaatattggaggccttagggtttgctccagatgcttcgactcttgaaattttcatatttcatagctgtagagaaacgaaactgaaatctgcacatgtatatttatcagagtgcttttctaggcatattaaacctggagtttattcttataatgct

SEQ ID NO: 16925 - DNA, 529 bp, Zea mays
  Clone ID: LIB3067-034-F5_FLI
ggtaactttctggtgggactattttttctggagcttgtgaacaagtttggggttggagcagtctatgcaggttttggtggggtctccctgctgacagcactctttgcctacaatttcatagttgaaacaaaaggacgttcgcttgaggaaattgagatgtccttgagcagtgctacccctggcaagcaagagtagaacatctcaattgtatggacaaactgaacaactgacgggaggaatttaataagagcagagggggcctaatcccatgaatcttcagcagcagcagtttgttgcaaacaacatcaactcctatagataatgagcacaatcaaattcagcttttctttggtagcatgagaatcgttgtacaatattaaaaagggtgaagaaaatgcccctttaaatttgttttttttgtacatctgatgtatatattttagtattttacgccttctgtagtacgtaaaataaagggaacagatctttctgatattactcgattgatgaatttggaatattcgcattc

SEQ ID NO: 16926 - DNA, 1244 bp, Zea mays
  Clone ID: LIB3067-034-H1_FLI
attgtgcaggttaggagagggtatctgcctaaagattttgttgttccaaagtctccagaaagaatattgttttgtggttggcgccgtgatatagaagatatgataatggtacttgatgctttccttgcgccaggatcagagttgtggatgtttaatgatgtccctgaggttgacagagaaagaaagctaattgatggaggtttggacttcagtcgcctcgataatattactttggtgcatcgtgagggaaatgctgttattcgccgtcacttggagagccttcctttagaatcattcgattctatcctgattttggcagatgaatctgtagaagattcagcaatccaagctgactcgaggtcacttgcaactttgctgctgataagagatattcaggcaaaacgtcttccatgcaaggaatcattgatttcacatgttccccgagggaccttttctgaaggttcttggataggggagatgcaacaagcatctgataaatctgtcataatcagtgaaattttggaccccaggacaaaaaatttgttgtcagtgtcaaaaattagtgactacgttctttcaaatgaattagtgagcatggcattggcaatggtcgcagaagatcggcagataaataatgtcttggaggagctcttcgctgaacaaggaaatgaaatgcaaatacgaccttctgatctttaccttagagaagaagaggaattaaatttctttgaggtcattctgcgagctaggcagaggaaagagattgtcattgggtaccgtcttgaggcagctgagcgtgccataatcaatccaatagacaaagtttcaaggcgaaggtggtcacccaaggatgtttttgttgttatatccgagaaagaatgaggtttatcagatcacagttgacacaaaagcaagctcctgaccagtgaccacacctaatgaagaacaggcagctgcgccgcacacacacacacacaccgaccagcgcatagagctatttgattcagatgcgcatttggcagaaggcaagcgctgagcgcgaaggagtaaaagcatgatcagatattcagatctttgatcagtctagactgacaccttaggtcgccctttacaaatatgacttaaaaaggatgtgaacagagtagtacagcacatgctttggaagtttggatattcttgtccgtgtaacttcccacatgaacaacgagcaaagcatctcctgcatatgcatcaattaatggctt

SEQ ID NO: 16927 - DNA, 635 bp, Zea mays
  Clone ID: LIB3067-035-B11_FLI
gcgaatcgacgcgcctatctcagcttgctgcactgcactgcactgccctgccatcatatcgtacgtgagcccggccgagagcgagggagaggcatggctgctccgaagctcgcgacgctggcgctggccgtgctcctggcggcgaccgcggtggctcccccggccgcggtgcgcgcggcgatgtcgtgctccaccgtgtacagcacgctgatgccgtgcctgccgttcgtccagatgggcggggccatgccgccccagccgtgctgcggcggcatccgcagcctgctgcagcaggccaacaacacccccgaccgccgcgccgccgcgctgcccagcaccaacgttaactgcaacacgattaattaaatgaggcgtcctgtgcgcgtccgggcgaggaatgcatgcatggcggagagtaataaagtaatgctactggtattttaagctagatcgaggtgtgcctgtctctagtcatttatggtgtttagcaatcgtctacacagttcgtaaacggtgtatcgtggatgcatgttgccgcgagcagagtacgtaggcatgaaccgatgtgtgcgcttctgtctgtgtactctctctatgtagtaatgtgtggccagtgggtgctttgatccagatgt

SEQ ID NO: 16928 - DNA, 691 bp, Zea mays
  Clone ID: LIB3067-035-C11_FLI
atggtgtgcttcttgtcgcacctatgtgcaagatttcagaagatgtaacaccacctgcacctgtattgaaggcactgagcatattgtcatgtcttcttcctgaggcgaagttatttccgcagaaagatataggagatttggcatttagagatccaaggaaaaggaaagtagctgagtacaatgccatctcatattctgaccaaatgagattaagaacagcagttgaacttttaaaagccacgaaggacattgaatcacagttggaaaagatctcctctccattgctgattcttcacggagccgcagacatggtaaccgatcctcaggtcagcaaattcctttatgagaaagccagcacgaaggacaagaccctcaagctctatgaaggcagctaccattcaatcttagagggagaaccagatgaccggatttcaactgccattaacgacatcatttcatggctagattcacactgttaaatacccctttgtctatagcctctcatgtcctcatccattgttttggatttatagttccttattagagtaccatgggtctctagtgctttaaattttgccatggtgtgcagagataagtatctctcgaattaattagttgtgcttgctatcttgacactgttggttttatgttaattgcggacaccgcattcaatagcttggatcctgtcaac

SEQ ID NO: 16929 - DNA, 648 bp, Zea mays
  Clone ID: LIB3067-035-C8_FLI
gaactccatgaggcttctgatatatggactccgtctctacactgatgaagctctggtaaaatcagtgacacgtgaaggaaaaccagagtaaatccgatgaactgaagatccgtatgatcgtttagcttgctgctctgacgataacgactttgcttctttacagggaattgctgagaggtccactctattatgtcctggtgctgctgttcagcgttttagtcttctggcgtgagtcccccatcgggatcgtctccttgtcgatgatgagcggtggcgatggttttgctgacattgttgggaggaggtatggctcagcgaagctgccattcaatcggaagaagagctgggccgggagcatctcgatgttcatttctggtttcctgctgtccgcgatgatgatgctctacttctcaagcctgggttacattgatgttatctgggaagaggcacttggtaagctggcgcttgttgcactagcagcgacagtagtggagtgcgttcctgtgaccgaagttgtagatgacaacatatctgttcctttggccaccatgctggtagcttttctcttgtttagctccaaccgcacaatagttaattaaaatactactagtgcattatttaagacatgtgatgagttcttcagtgatg

SEQ ID NO: 16930 - DNA, 670 bp, Zea mays
  Clone ID: LIB3067-035-D12_FLI
ctatctgccgctccagcctttcgctagggtttatccaccggcggcgcgcgcgacggcggcaagatggtgcagcgtctgacctaccgcaagcggcacagctatgccacgaagtccaaccagacgcgggtcgtcaagacccctggtggcaagctcgtgtaccagtacaccaagaagagagccagcgggcccaagtgtcccgtgaccgggaagaagatccagggcattccccatctgaggccagctgagtacaaaaggtccaggttgtctaggaaccgcagaactgtgaaccgtccctatgggggagtactatctggaactgcagttagagaaaggatcatccgtgctttcctggttgaagagcagaagattgtcaagaaggtgttgaaattacagaagaccaaagacaagacttcctcaaaaaagtaactctgaaacagaagtgagccactcttctgcagcaagggaagacatttttgtcgacagttattatcaatggcttagtctcttctagctgttctattgttcttgtatcttgagcggacaactggtttctagggcaccttgaaatctgtctacgagatctctaagattatgagatgacatatgaccccctattgcttttgttcactttgctaaaactgaaagtccgagttcacatgagttgggcatc

SEQ ID NO: 16931 - DNA, 741 bp, Zea mays
  Clone ID: LIB3067-035-D9_FLI
gttcaggatccacatcttcccgagcgagttcttggttggcctcttcctcttcggaccacctccaaggctcttggtgtagcttgccactctcaccaatcaagttttcatgtctgatctcgacattcagatcccaactgccttcgatcccttcgctgaggccaatgctggggactctggtgcagcagcagggtcaaaggactacgttcacgtgcgcatccagcagcgtaatggtcgcaagagcctgaccaccgtccagggattgaagaaggagttcagctacagcaagatcctcaaagatctcaagaaagagttctgctgcaatggtacagtggtccaggacccagaacttggacaggtcattcagctccagggtgatcagaggaagaacgtctcgaatttcctcgtccaggccggcattgtgaagaaggagcacatcaagattcatggtttctgagcaaccgccgggtccatatcaaaccaaccctgcatgcagggcatcttattatatataatatctgaggtggagcatatctatctggctgtgtactgcaagcaggcctagtacgccgcctgcgcgttcctcctattacacatataggcccctccctgcgtgtatgcttgttaccgtcgtgtcgaaccttgtactacgaggctccatcgaacatcgatggcttgcttctttatcagaacatgtttgaataaacgctatttggtaatgctgtgtgtcgaatgcttccgctg

SEQ ID NO: 16932 - DNA, 777 bp, Zea mays
  Clone ID: LIB3067-035-H12_FLI
ccactcgcggtcgcggtagccggcggcggcggaggaggaaagcaggcaggccatggcgtcgtcgtcgtcgaccccggcggccgtccgcgagatgcagaaggatctcgaggtccaggccaacgccctcagcaagatccagaaagacatcgccaagaaccaccaggtccgcaagcagtacaccatccaggtcggcgagaacgagctcgtcctcaaggagctggagctgctcagcgatggggccaacgtgtacaagctcatcggacctgtgctggtcaagcaggacctcgcggaggccaaggccaacgtcaagaagcgcatcgagtacatctccgcagagctgaagcggatggatcgggcgctcaaagacttggaggaaaagcaaaacagcaagaaggaatccatattcaagttgcagcagaggatgcaggctgtacaagctaaggcttagacaactgtttgttggttgcaactagtccaaggccatgcttcatttcatcccaatgccctccagggtttttttttggtggggaggaatcaggtgtctgatgttctcgtctccacaacgaaaatgaaagaaaaacggttcctagtgaaatactaggctattctgtatgccctagtataaaagtgtgcctctagtagaactgtagaagatgtagttatcagtatctcttttgtattattggcccacgtttacttctcaatcgaatatttatgcgagggatgtttgtcaacgccttaggcttcatcttgaatttatgactttcattgctaaaa

SEQ ID NO: 16933 - DNA, 860 bp, Zea mays
  Clone ID: LIB3067-036-A9_FLI
agaattcctggagttgagtcagaggggcaataatctgtctgtcgatttgactgtgggggacatatatggggaagaaggttacccgaagattggccttccagcatccactactgcggctagctttggaaaagtgaactcaagcaaactttctgagtataaagtagaggatcttgctgcagccttactgaattctttcacatacaacattggacagatagcctactttgtggctaatctttcaggcctgaagagaattttcttccgaggtgcttatgtctgtggtcatgagaagactatggacaagatttctcgttccctaaaatattggtccaaaggtgaagttcagacgacatttctatgccatgaagggttcttgggaacactaggtgcattttggagttatgagaacatggggatcgacagtttggcggcacatgaagtcatcagggaagtcttgcttggtgcaccatacacagggcaattcccatctttacctgtcactcaacaacaggagaatggagaacatggtactctcgaaggggaagtagaaagcttacgacatgacaatgccttgctgaaggctgaggttgagcgattacaaagggagaatgcgttgctaagagctaagttggtaagatcaggcgagacttcaacattgtgatttgtaacataataaaaaaggcgagccgcagcttgttgtaaattgtatctatttagaaaatggctcaaaatgtaactcatataggaaaactgaattctggaaaagaaatgccaattagcattgttcatctagtgagccttgttgtataattatttatatattctttatacaagagcctatgtatttgctccgttcatgt

SEQ ID NO: 16934 - DNA, 507 bp, Zea mays
  Clone ID: LIB3067-036-C12_FLI
atgataatgaggtgctgagtaaggcgatagaggttgctgaggctattgtgaggaacaaccgcaacttagttgtattgtacaaatcggttataaatgatggatttaagctggatttggagcatgctcaagcacttgagaaggaaagaggtcacaactattacaatggaatgacaaaggaacagttcacggatatgcagaaattcatccagggccggagttctaagaaaacaccatcaaagctgtaggttgctggtgacattttctgtggtccgtgtacgatgtacagctactgaaagcgtgttcagtagtctgaaaaataaagatgtcggtgtggcaatatatacagttaccgtcttctcatacttttacgtaagtttatatttatctaccgtctgattggttggtcgcatcgtctcgtcctggatcactatgtacattgactttatttgaatatttgtttggttgcctgtatatctggagcatgagttccacgagtggatacaaaat

SEQ ID NO: 16935 - DNA, 559 bp, Zea mays
  Clone ID: LIB3067-036-C5_FLI
ctaacgcactctcctccctcccacctgcctctccgtgcgacgggcgcggctctttgtctcgcggcgtcggcgactcggtctcgggcgcggcactcggctgctccctcctcccggagccggagccggagccggaggcctagtagatgaagacgttcgatccgtggccggtcttcttccgccgggagtggaagcgcaattggcccttcctcacggggttcgccatcaccggcttcatcatcactaagatgacggccaacttcaccgaggaggacctcaagaactccaagttcgtccaggagcacaagaagcgctgaccaaccagtaatctatgacatggacgccggatggcactggcagagggatggtgtacggtgttgtccgaattgcctgtctggacagccagttatgttatgctgtttgaatgaaaaattagcttctttttcttcatctaaatgcgtgcagcctatgctccatctgtaatgtaataagaggcaactgacttgatccaaaagctaccagcttctgattatgaatgatacttcaagtttgatctggttct

SEQ ID NO: 16936 - DNA, 898 bp, Zea mays
  Clone ID: LIB3067-036-D10_FLI
gtcaccgatttcctcccattcaattcgtaaatttcgtccatgcatgggcatggaatggatggatgtgaatgccacgaacgattccgccccgccggccaggtgagagatgagcctcacggcggccttccgtgccaccaaaatcccgcgcgctcttcctccaaagtgcggtgagcctgccgcctcctcctcggcctcggcgtccggggatccgccgccgggggccgcgaagagtactaaggcgccgccgccgtggtgcgtgtaccttatagcctcatcccggatccgccgcacgtacgtcggcgtcaccaccgatttccctcgccggctgcggcaacataatggtgagttaaaaggtggtgcaaaagcttcctctgccggcaggccttggaatctcgcatgccttgttgaaggatttgccaacagaagtgaagcctgtgagtttgaatcgaaatggaagatcgtctcccgaaaaattgcacggaaaagaactgagcttagcatgaagtcagtgttgcaacatcgagaagcagctttgagcagagtggaaacattcatggattgtagccacctaaaaatcaaatggcagtcaagttgagaccatttaatcacttgcactatgcaggtggcaggcatctaacttggagaaacataaccacttaagaatcctcctgtcttctagcagctcgtagcaaagataacttataatcttctgctgaacaatcaagatggctgctgctatgctttcttaacatgaaaaaccaagagtagccccagtgaaattctatgtttgatttttttttctatgaacaattgtttccgaacaataatatggatcatgcgacacccgtttgtaaatgtaaattatacttatgtattgtaatcacctatatttcttctc

SEQ ID NO: 16937 - DNA, 698 bp, Zea mays
  Clone ID: LIB3067-036-E10_FLI
tgctttctaaacaaacgcaggtgcagtgtggtttcgggcgcacaggccacctctgggcgcacgaggcgtacggagtggaaccagacataatgaccttagcgaagccactggccaacggcattcccatcggcgttgtcctggtgaaggagaaggtcgccgcagccataaactacggcgaccacggcacgacgttcggcggcgggcctctcgcctgccagaccgcgataacggtgttcgacaagatcacgagacccggtttcctggccgaggtgtccaggaaaggggagagcttgaagctgctgctccgcgccaagctgagcgggaacccgcacgtgagggaggtccgcggggtcggccttctcgtcggcgtcgagctggacgtgccggctggtcctctggtcgacgcgtgcttggacgccggcgtagtcgtgctgactgccggtaagggcaatgtggtgaggctggtgccgccgctcatcgtctcggagaaggagctggagcatgccgcggatgtcataagggactgtctaccggcgctcgatgtcgttgctgctgcctaatgtatatggtggtgcaataggtccggatatgaaacctgattccaaattttggaatcgaataatttcatgtcgggccaatgttgttgtgttcattgaaacaaactctttttttttggaatcgaataattattacatgtc

SEQ ID NO: 16938 - DNA, 985 bp, Zea mays
  Clone ID: LIB3067-036-F6_FLI
catacttctgcattaggttgtcttaaaaatgcattacgtagagcatgtaccaaaatttttattagctataattgatgtttagtacatatagtataaaaggcaaggtttttgttacaaagaaaatactctctgtttgtgtgtgtgtttgcttaagtgttatggattattcattttttgtaaatttagtgatatttttatttgacctgctgcacacctagctaatagttcatttctctgttggcatagcaagaagtggtacacaggttgcatttggacaaggaaactcttattatgcaagaaattttcccatgcccaaaaaggattcttcagcaggtggagcttcgaagttaccaaaagaatatgcagaaccatgggactatagccatgattatcctgttactctcccactaaggaagccctactctggaaatcctgaaattctggatgaggaagaatttggagaatcttctgccagcaggacccaagatgatgaattatctgcagcagagcagcttggattaatggatatgtcgtcggaatcacagttcctcttcttccagttgccatcctctcttcctttaccgaggcagccacaatcaggtgctgaccctaacgaagtccgcgatgagaaacgtgaggacatgaggccatcatcgcacaatggctcgaaactcaaagaggttcctgaaggctatatggggaaaatgctcgtatataagagtggtaaagtgaagatgaagataggagacactctctttgatgtttcatttggctcgaattgcatgttttcccaggaggttgcagcaatcaacatcagagaaaaacattgctgtacggtgggagagatcagcaagcgtgctatcatcaccccagatattaactacatgttgggttctgttgacaagatggaagaatagtccattggtttctttcgcgcaaaccatatagaccatattatgccattacaagatagttttgctttctt

SEQ ID NO: 16939 - DNA, 986 bp, Zea mays
  Clone ID: LIB3067-037-C3_FLI
gatttggctcctagcgatgcaagtggtggcagtccggcttcacctcaggcatcagagagaagcccagatactattctgtctgcccctaggtgcacgacaacaggagcagtgtgttctggtgatgcaattagtaagcatagtagtgttcctcttgttgagaactgcaccactccgactgtagcagtgtgcacaactttgaagcgcgtagctgagaaagttgtttcagagctagttggaagtgaaaggctggggagcaacaacagtgcggaattgttggagagtatggaaaaggaggatgtccttgctgaaaatgttcgttttggcgggaatggagttgcgcaaggtggccttccagaagagttagaggtatgaacaagtgtacattgtggaagtcgtcactgaggcatggtcttgaactcatcccttgtgcattcggtatctacattgccctgttttctttatactcggctgtttggtatttgtgtgctgctttatggcagggttagtggcatcaaccacacaagattggggaaaaatggtgtagagatggataagttctacccccttgctggagggaatggtaagtagctcaactcacaagtttccttctggacacagattcgcaattacgggggtttctatgatgatggatgatgggagattatcggatatcatgtcttgcacaacggcatggcaaaaaaaaaacgacgaagaagattttgtggaaggccatggtcgaatgtcatgtcttgctggtacactctagatgagcatgaaccttaagttttcgttttttttaacttgttgagcagctgactcttgtgtatgaactgagctgcagcgggcttccctgagttgacttgtttgggtctgagatgcttctgccatgttctaggtctagaatagaactagatgcggtggtgtgttctctaccctaagtccccttttgtgccctttccttctgtaatataagatctttgactgtt

SEQ ID NO: 16940 - DNA, 1103 bp, Zea mays
  Clone ID: LIB3067-037-E9_FLI
atccacaggaccaccagaccagagccacagcaccagcggcagccacccaaagcccaggaccgcctcaccgccaatggccgaccgcgtctaccccgccgcgaagccgaacccgcctccaggcgcggcgggcaacagcaacggcgcgcaggcgtcgtcgttccctgcgcccaagtcgcagatgtaccagcggcccatctaccgtccgcaggcccccgcgaagcggcagcgcgggcggtcgtgccggtgcagcttgtgctgctgcttctgctgggcgctggtggtggtgatcctgctggcgttcgtgggcgccgtgtgcggcggcgtcttctacctgctgtaccggccgcagcggccgtcgttcagcgtgtcgtcggtgcggctggcgtcgctgaacctgacgtcgtcggcgacggcgcccgtgctgagcgacgccatcacgctgaccgtgacggcccggaacccgaacaagaagatggtgtacctgtacgacgacctgaccctgctggtggccacggccgccaacgccgtgccgctggggagcgccacggtgcccgggttcgcgcacgcggccggcaacaccaccgtgctgaccgccaccgtctccgccagcgcggtgggcgtggaccccagcggcgccagctccgacatcaagcggtccggcggcgggtcgttctccgtggtggtggacgcggacaccagcgccggcgtccgggtgggcgggctcaagacgaagaagatcggcatccaggtgcactgcgagggcatcaagctgacggcaccgcctccgcctccgccggcgcccaagagggccaaggggaagaacagcaccgccgcgctcgcgcctgctctggcgccgtccgccgccgacgcgacgccggcgaagacggccacggtgagcacggcggcgcactcgtgcaaggttagggtccgcgtcaagatctggaagtggactttctaggtacgggcagcgggaggagaggagacacctttaggggctgcagcgcgcaaaaaaaagattttcgctttcattgctatttatttatctatatatatatataaatatatatacacggcgataagtttgttatcaccatgattactat

SEQ ID NO: 16941 - DNA, 720 bp, Zea mays
  Clone ID: LIB3067-037-H10_FLI
aaaatggtgaggatggtttaatttatgtaggaaacatggtaaatccggctaccctggaacaaatattcggtgtctcttctttggctgcattaccagcccagttggcgttggagcaatttgacaacgaactctcgaggaaggttaacgaagttgtaaatgaaataagacgccagaggtgctcatacttgaggttaagacaatgcagaaggggtgaaccatctggtgattttttccggtcatttttagtggaggacaaggcgcctggcgtcttctcctacgtcgagttccttgtgcatgtccacaggcaaatccaaagcaagatgacctgagggcccaagatcctggttgtaacatttcggtcagtagatggattgtatgtaccccgggagtttgatttctgcataaggagacagcaaagtggcgattccatatcaatgtggagcataaagagtgctcggataatagaactcaggaatagaggcttgtggtgtttacagcaccgtttttggagtgggtggtatatgtgttgtatacagagatgagaggggtggagctttagtttttgtgttgtcttttatcatcgtgcatccttgtttatctcatgtgcaaaaagtgttggattatgttggttggaaggttatagaggtttcgtaataaaatgcacctagctaatcgatagtatgaatcagatatactataatttaactattatgtttgcct

SEQ ID NO: 16942 - DNA, 1030 bp, Zea mays
  Clone ID: LIB3067-037-H2_FLI
ccagcttcgcatcccgcaagttcccagtcagccgagcagccagcggcggtgccaagaaggccgagctgcgagctccactccccacacctcagaagaaaaaggtgatggcgcaactgccgccgcgggcgccgagcgccgcgccgcaggaccactggccgccggcggcgggggagttcctgggcttcgccgcggccaggcgcggcgcgcaccgccgctccgcgagcgactcggccgcgttcctcgaggccgtgcccattgacgacgacgtcgtcattggcggcggcggcggcggcggcgacgacttcgaccgcctcgaccacgaccagctcctgtccatgttctccgacgtcgacgtctccgtctccgtctccgtctccggcagcgccggggagagggcgcagctcatggacgcggggggtgcgggtgcggacgacggggtggcggactcgtcgccggctgccgcggacggcgtcgctgagcccaaaagggtcaagaggatattggcaaacaggcagtcggctcagaggtcacgagtgaggaagctgcagtacatctcggagcttgaacggagcgtcaccagtctccagatggaggtgtcggcgctgtcccctcgcgtggccttcctcgaccaccaccgctcactgctcaccgtcggcaacagccatctcaagcaaagaatcgcggcgctcgcccaggacaagatcttcaaagacgctcaccaagaggcgctggagaaggagatccagcggctgcgccaagtgtaccagcagcagcaggtcaaggtggccaccaccggcggcgccgacatcgccaccgccgcctcgccgtcgatgcaggccaggcaagagctgctcgcgtgcgagggcgctgctattcgatagcggaggcggcggcggcggcggcggcgttcacgcccctgttactgttagtagcttaattaacttttgtgcagtctgatcaatacgtgttggcttgtttgtttgctgcttcttaatttaattcgtatgtgatgtattctgctcaccctagc

SEQ ID NO: 16943 - DNA, 1484 bp, Zea mays
  Clone ID: LIB3067-038-B7_FLI
gtgtttcagacacctaatgcagaactacgtgaagcaatttgttggatccgagtacatgtatcctgcagctagagcatataggagggaggtgttcgaccattacttttccgatgtccaagaaattcccaaggtgtctagttggttacatgagcatcatgatagtttgtggtatcgtagtgggtttaatccagccatcaagtgtgactatgttaccaacaacatagcagaagtgttcaacaattggattaaggattggaaagatctgcctgtttgtgacttggctgacaagataaggaaggaaatcatggagttgtttcaaaagaggagggagataggacagaggttgcaaggtcgaatactaccctccgtggtccatatcctccatgtaaggactagaggtttaggtcacttaacagttaagaaagctgacaattacattgcagaggtgagggataataatgatgagcactctaagcacattgtgaatgctcaattgagacaatgttcatgcaacgagtggcagcatacggggaagccatgtcaccatgcccttcgcttaataacaacacagcaatttagagatgttcggatggaagattttgtggatgactactactcagttgataagttcatgaaggcttactccagggtagtggagccaattggtgacaaatctttctggcctacagtgccatttgcaaaagaggtgtgtgcttctattgggaagcgtggagttggccgtcaaaggaaaaacatgattaaagggtgcctagagggaggaagtggtaagaagccaaacgaaaatgaaaatgtcaaaactaagaagatgattcgtgggaagttcaagtgtccaaactgtggtgaattgggacacaggaaagccagctacaaatgtcctttgaatggaacaaaaaaacggaaaaggagagcaaggaaaaatgttactaaaggttggttcccaaaagatgttgaggcatgatgatggtgcatgcactagccacacaaccacccccatgtgatgattgtgatgccagtattgcaaaaatctctccactttcacctcccagacctatctagaggctagtgctggaccagtgtaccctaggagctgggtgccaggtgcggtggcgggcggggcctagcaaagcatgacgctgtaggagggatccagtcatccgatacgtcagcactccggcacagcagtaggcatctcggaagccggcagggccacagggcaccacgcccaaggcttagccacgcaggcactgagcagccaagtagtcaggcagtcagtgagcagcagcagacggcagcaaggctggaagcgcgaagtacctatataggcatataagtttagttcgaccgggagtttacttctctgttatctgtgacttgcccgaccccgacttgatgtgcattgtagattctcagaaattgattaatgatttaatcacagattttaatcaactcaacacgtcgagaag

SEQ ID NO: 16944 - DNA, 693 bp, Zea mays
  Clone ID: LIB3067-038-D1_FLI
atccggactctctcgctcgagggtagggcagggcagggcagggcaggcggcgatccgaatccaatcgccggagggaggaagccaccggtggccgcagtgagggcggcggaggtagaggcaaagggatgacgcgcgggaagcagaagatcgacgcgcagcggcgtaacgcggagcgaaaccagaaatccaaggggtctcagctcgaggcccgcgccgtcggcctcaagatcgtctgctccatctgcaaggtacaattggcaaatgaaaaacagctgaccgatcactatggatcaaagcatccaaaggagaaacctccgagcacatcgagcaccgaataaccatggctggtcgtgacgcagaaatatagatccttggctggtttgaggatctttaagtccgtctgatccatgccttggacctcaacgtcagttatatactctctagtgtgttcatttcctcttgtttcaggtattgtgttgtcgtgctgccaatgtgtctccaaactggatgtggtcaccatggcattgggatgatgcgaaaaaattatgagcgtatctatgttccaatgtttgtgtggcttacaagatggtttgtgcccgtgcgttcgctccctgtaaagggcttcgcccgtgccgcttgatcggcgccatgcttccgaatgaatgaaatgagggaaattggccggtcgatccc

SEQ ID NO: 16945 - DNA, 720 bp, Zea mays
  Clone ID: LIB3067-038-E1_FLI
ctcgtctttttcctctacggccgccaccatcgcctcgcgaccgcctgccgctccgctcgaaagtttttagtgaagattttttgaagccgagaagatggtgctgaagacggaactctgccgcttcagtggccagaagatctatcctgggaaaggcatccggtttattcgtgctgattctcaggttttcctttttgccaactcgaaatgcaagcgctacttccacaaccgcctgaagcctgcaaagcttacctggacagcaatgtacaggaagcagcacaagaaggacatccatgctgaagctgtcaagaagaggcgccgcgctaccaagaagccatactcgaggtccattgtgggtgcttccttggaagtgatccagaagaagagagctgagaagcctgaagtccgtgatgctgctagagaagctgctcttcgtgagatcaaggagcgcatcaagaagaccaaggatgagaagaaggcgaagaaggctgaggtgtccaagtcccagaaggcgcagacgaagggtgctgttcagaagggttccaaaggccccaagttgggtggcggcggtggcaaacgctgaaaaggaacgaagtgtcattccgagacctcatcaaagccacctttgtagtaccttggttaattttgtattttctttcagagttacttgtgactcttaattttgcatctttatatattgggagaaatgatcgccgttcgttc

SEQ ID NO: 16946 - DNA, 1102 bp, Zea mays
  Clone ID: LIB3067-038-E9_FLI
gatgagataaatacagcattagttcgaccacttcctcatggagttaaacttcatgcactcattgatgcttgtcatagtgggactgcacttgatttgccttatctctgcagaatgaacaggagtgggcaatatgtatgggaagatcaccgaccgcgatctggtgtctggaaaggcactagtggtggggaagctatttcctttagtggttgtgatgatgatcagacctctgcagatacctctgctttatcaaagatcacttcgactggtgcaatgacattctgcttcatccaagctattgaacgtggacagggcaccacctacggtagtatcctgaactctatgcgttccacaatacgcaacacaggtgactcagcgggtgtaggtggcggtgctgttacatcactaattacaatgcttcttactggagggagcctttctgctggtggtctgagacaggagccacaactgacggcgtgcgagccatttgatgtctatgcgaagcccttctccctatgacgtgttcatagtattgcccaatgtactatggggttgtttgtttcggcttctggcagcttctggccaccaaaagctgctgcggactgccaaactctcagcttttcagccagcttctataaaattcgttagggcaaaaaccatccaaaatcaacataaacacataatctgttgagtcgttgtaatagtaggaatctgtcactttctagatcgtaagccctatgaacaactttatcttcctccacatgtaatcataataatactcagattctccccacagccagattctcagaaaagctggttagaaaaaagctgaaccaaacagcccctatatatctcctcccatttcacgttatcattatgtacatttcggtattaaaccttgttcgtttgtgtcggattgcacctggaatcgttccagctaatcaaaatttatataaattagagaagcaatccggtacaaacgaacaagaccttagaagtcctccatccatccagattgttaacaacgcgtggaattgccctttatttccatgccctcacaatgttcagtgcacagttgttaaaggagagtacaatttgatgcctc

SEQ ID NO: 16947 - DNA, 618 bp, Zea mays
  Clone ID: LIB3067-038-F12_FLI
gctcgggaaggagtcaattcatgccattgtattaggggttttctcagtggcaattatgtctgaagatattaagttcaaattcaaatggaaaagtgatggaggaaaatttgtgagcctcacagataaaaaacatgtgattgaaagaggaacaatgataaggttttctgtcaaaagggtggatacagaaatgagttgtcatattactggatctttaatcccacctcacactggatgcatgcgttggttgtcagtacatgatcctaaatatgcatcagaactcaaaagtggtgaaagtagatcaagggatacaagcatcaaaattgagcagaatgaacaagaacatagaatactcaagaatgaagatggtatggtgaaatctgaacggccatataaatcccgaaagagggggcggcacattgagaaatgacatttcattgaggccgtgaagatacaagaatgtgaaagtcatgttcgcttcaatggttctgctacctgtttatgtttcttgtggggggagaaggtgcctccagttggagatcccggtagcttcatagaaatgtacgatgattttgtaaaacgaattgagggttgcatttgcaaattatcaccttttttgac

SEQ ID NO: 16948 - DNA, 409 bp, Zea mays
  Clone ID: LIB3067-038-G6_FLI
gcttttccatgctgggataggagcagtcctgatgctctacgttctcttctggatcaagttggaccttttcacaactctcaagtacctcggcttcctcggcatcttccttgtgtttgtgggccatagggctctatcctacctttcctcggtgtcgacaaaacagaagacggcatgagtggacagagttttttccgaccatccatttcttgagggggggccattgcaggcccttgggtgtcttatgagggagggctcggtttatttcagttggctttgcagaatactgataactagaaaaagtagtaggacctcaccttcgtgtattatgatgatgcacatacaattttctgagtagaatggatgttgaatcatagaactaatgaataatatgaacactcgccttcgcccc

SEQ ID NO: 16949 - DNA, 1503 bp, Zea mays
  Clone ID: LIB3067-038-H7_FLI
aactaagagcgttgcctaggccttaaaaaattctaaaaatgaataaaagaaacaagaagcattatgattttgagttagcaaaaaaaaagatagcagcaaccgactagatcaaaatttgaaaaactcaaatatagattcacggggatagatatgcaataagattcatgctatgttctgttagttgaatggttgaacatgcatgtatctttcttgaattctgtctgcagcaacatttgctgccgtcgtccttggatgtgtcgcaattgttttgcttcagactctaaacaacaggaaaagattcaacagaaatggaggtaaactactgaatgcccagggcataaccacctacaccaaaagggagctgaagaagataactaatggctacagcaaacgccttggaggagggcactttggcaatgtttacgagggcaccatcgtcgacggcagaaaggtcgccgtcaaatgtcctttgcggacaagggtgtcgtcgcaccgctgccattggaagaatttgattcgacctcgccgtgtaccgctaccgcaacagagggtggaggaagatgggtcgttcatgaacgagatcaggttccagttcgaagtcagtcgtcacaagaacttggtccagctcctgggatgctgcctagagaccgacattccgatcctagtcttcgagtttgtcgccaatggaagcctggaggacatacttcatagtgccaagaaaccatgtaccctctcgctgccggagcggctggacatcgccattggctccgcggaagctatcgcctacatgcactcccttgacaatcaaaagcgtgtccatggagacatcaagccttccaacatcctccttgacgatgacctcaatccaaaagtctctgactttggttcctccaagctcctggcaatccatagctactacgttagggcagtggctgcagatataggctacatggacccattatatatgaagaccgagcacttcacattggagtgcgatgtctacagcttcggcgtggtgcttctggagctcatcacgaggagaagggccagctggtatgaacaagatcagcaagggaacaagatcctccccatcgagttcgtcaagtgcttcaaggaccacggtagcggatgtgcgatgtatgatagcagacttgatttctcaggcgaggatactcaatctcgatgcaacaagcgttgcctcgacatgattggcatgttggccgtccgatgcctcaaggaagacaagagggagaggccaaccatggcagaggttgtcgaggagcttaagcgagtgaaggtactactgctgggtacacatatataaaataatggcctctgcagctctcaagcgagttcgaagcacgcagatgaatggaagcgaagcaagcaataagaatggtcggtcggcacatgtgaagcgctgaacatggcggcaataataaaacagcaatgtctatctgtaaacatagtaattcgcatgaattgcttcgctttatacttctt

SEQ ID NO: 16950 - DNA, 465 bp, Zea mays
  Clone ID: LIB3067-039-C11_FLI
caaccaatgaacctggtgcactgatgaatcttgtagaagaatcaactgccgatgatgcagatgatgatgatactaaagattgtaaaggtttatttaagaacttaaagttctacttgagtcgagaggtgcctagggagtccctgttatttataattccagcatttggagggactgtttcatgggaaggagaaggagctccatttaaagaaatagacgaagatatcactcaccaggttgattccatttgcaataatttattacaccaaagtttaactatatagacggagacattgtgtaccatccctaaagtaagatgccactctaagtaccacgacagcaatgccatactagggcaatagttactacaatacaatttttgtatgtggctaactgttcatattttacactctaccatcatatgatcatatctagcgaagtaaaataaaatggcctgtggattttttt

SEQ ID NO: 16951 - DNA, 627 bp, Zea mays
  Clone ID: LIB3067-039-G4_FLI
cgggtgttggtttcctgcagttctgcaacctgaacagcttccgaacaaaattcatcctggggttctctttgtttatgggtttgtcggtgccacagtatttcaacgagtacacttccgtagcaggctttggcccggtacacacgcgtgcaagatggttcaacgatatggtcaacgtggtattctcctcgaaggcgttcgtcggcggggctgtggcgtatttcctggacaatacgctgcagcggcgagatggcgccgtgaggaaggaccgggggcaccatttctgggacaggttcaggtccttcaagacagacccgcgcagcgaggagttctactccctcccattcaacctcaacaagttcttcccgtccttctgatcctgatggctggtaactgaaaatgctgttcggtcaggtggttgtgaattatgattttggcaaaatgccacgcccaaacggctgtttcctctcctgcttctattgtaaccactcgttgagttctgaatcttgtagagctcagcctgaaccatccagaagtagtggaggagaatttggctggtatttttggatgtaaattgggcctgtgttctcccatagatcgataaaatggaaagagaactttctgtagatt

SEQ ID NO: 16952 - DNA, 637 bp, Zea mays
  Clone ID: LIB3067-039-G5_FLI
ctcaccccttgcgttctacctcttgcattctcttttgttcactccgcgtgttctctctctcacggcctcaccctcctccctgtatcccactcgacggcgactgggcgacaaccgatgtctccctaaacctggtgcctaggtatctctgccggcgacgagcacctgccagctgcaggggtatgggaatggaggtcgttggtgctgaagcagcaccagcagagatcaaagtatctgatgatgtgaatctattccaatagaaggaaagcgaagcaactgcaaaagaacgtgaggaggcagctgttttcggttcagagataactaccaatgtcaccgatctggcacctccaaaggatgtgaaggatgagtggcctgaatctaagcagacttatgccttctacttcatcaaggtccgctcatttgaggatcttaaactgagggcaaaaatcgagcagtctaacaaagaattccaaaagaagatccaagctcgttctaaacttatcgaggcagtaacaaccaatgatgtatttttcttacaggtcctcattgaagtaatattcctaactgacgcaccacttttcatcaacgttgaatgctttgtaactcatttgtgtacatatgaacctgttgttgaagcctt

SEQ ID NO: 16953 - DNA, 450 bp, Zea mays
  Clone ID: LIB3067-039-G7_FLI
ggatcgaatgtcacatctttactatttaacaggagttctatacaaaataaataagtaattacattataaggagacaacggtccagcaacccaaagttgactgggagacgacggcctagaccactcacgaactcatcacagcatcctccacgcgcctcatcctgtggtacctgctcttgacctagacatctcaattacgttgctgtaccgaatccatatctaccatcttcaggtaacaagtgatttggtgtcccgtgtgggtaatccaaatgcatgcattgctctgagtattgacaggttggctagtgtaacgtgtaagtccaaaccagatcgtatccaaacatgcgtattgttggtctttgatcgatatttgggccgagttttctgctggtgtgcctgaaactgacgttgcgtcaccgactgttcaattactataacatgttcgcttttt

SEQ ID NO: 16954 - DNA, 857 bp, Zea mays
  Clone ID: LIB3067-039-G9_FLI
ggagcgagaggcgaagcagataaggaagccagccggcaaggggagccactccggcgtcgagaaacctagggcgagcgcctcgacgactcctatcaccccatggcggccttcgctacgggcagcaccacagcgcgcgcgacgctggcatcgccgacttcgtgccagccggccgcgcgccgggcgccggcccgatggatgccgctgcgctgctcgccgccggccctgggcctcaggggaggagcgcgttctcggcggagcgccacgctacgggtggaagctaagaagcaaactttttcttcatttgatgagttgctggagaagtctgagaagccattgttagttgacttctatgcaacttggtgtggtccatgccaatacatggttcccatacttcaagaagtgagtgagaagttaggcgacaaaattcaagttgtgaaaattgatactgagaagtacactagcattgcaagtcgttacagaattgaagcattgccaacttttatcatattcaaggatgggaaaccttgttatcgctttgagggagcattacctgttgaccagatgatcgaacagattgaaaatgctttggcagtcacaaagtagcacatatggtgatgagcagggcagaatcccccccccctcccaaaaaaaaaagaaacttggtggtacctcataacgtgtgcctctacatattgaaaaatcttgattattgtctacaagatcacaacatcaagggcctaacatttgtaaggatttgttggatcttctagattcttatggggagttagatgctctcttccgattagccatgtagatgttggtctgccattggcgtattaatggttccttgtgtcttt

SEQ ID NO: 16955 - DNA, 1238 bp, Zea mays
  Clone ID: LIB3067-039-H2_FLI
aacgaggccgccgacgtctggagcgcgggggtcatactctacatcctcctcagcggcatcccgccgttttggggcaagaccaagtccaagatcttcgactgcatcaggtccatggagctgcggttcccttctgacccatgggacagggtttctgattccgccaaggagctcgtcaccgggatgctgcggcgcgaccctaggctgcggctcacggccaagcaggttctagagcatccgtggatgcaggaacacgcggacccacaagactcgtgcgggcagtgccacgagaccggcctccaacgggagggcgccggctcgtgctccttctccacgccgttggcgtcgcggagcagggacgtgagctttgacacgcgtggccccatcgcgtggaggggtgggggcgaggacgaggcgacctgctgctcgcccacgttcgccgccgtctgcaggtcgtcgttctcggcgttcatcaccgacccggccccgccgccctgctcggcctcctccgccttgggtggctctggcttctcgttcggtgagccctgcgaaccacttgacggaggaggaggaggagggttcccgatgcccatggcttccatgccgagcttctcgttcttctgcgcgcgggacagcagcgagccagctgagccacagccggtcgctgcctcctcgactccgaggacggcgaggggatccacgccacggggcgtcaacggcaggcggaaccacacgatcggcggcggcgggcgggagcacctggacgtggcggtggagtctgtcatccgctgggcgtcgtgcaccaacttctccacggcgccctcacttcgggcctccctcgtatgctagcactagcaacgtcgttccgcgcgccggcgccgccaacgccgggctgagggtgaggaggagaattccgacgagacgagcggtagagagtgtgcagtagcctcgaattgtataatatatatacagacacagtgctgttatagtggtgatgatagattagagagtgaaggtgaagttgctacggagggatggatgcatggagatggagagcgagtggcagagctggaactgatgtgttttattcttcgctgtcacgctgctggtcagataagatttgggaacgctgctggtcagataagatttgggaacacacctggcgacggagagagaaggcgtctgataatttgatatgaacaagaagcaacaatgttcaggatgcatggccaggccccccc

SEQ ID NO: 16956 - DNA, 1396 bp, Zea mays
  Clone ID: LIB3067-040-C1_FLI
tgctgtcttaatcgaccaacaccctttgtgggtctagcgttcaagaggaaatggcagaacaagaggaaggagcaggggaaaccgtgtgacagacccaacatcgtcaccggtgccaacgttcaggtctgctgggagaagttcgcaaggtattttgaggtggagctgaaggaggttaagctatcagaagggtactacgtcatggaccccgtcaaggctgttgagatggtggatgagaacactatctgtgtcgcggcgatcttggggtcgactctcaccggagagttcgaagatgtcaagcagttgaacgaccttcttacagacaagaacaaggaaactgggtgggacgtgcctatccacgtcgacgccgcgagcggagggttcatagcgccattcctctaccctgagctcgagtgggacttcaggctgcctctggtgaagagcatcaatgtcagcgggcacaagtacggcctcgtctaccctggcgttggctgggtcatctggcggagcaaggaggatctgcctgaggagctcatcttccatatcaactacctggggacggaccagcctacgttcacgctcaacttctccaaaggttccagtcagatcattgcgcagtactatcaactcattcgcctaggcttcgaggggtacagaaacatcatgcagaactgccaggacaacgccgcgatactgcgggagggcatcgcggcgacgggccggttcggcgtcctgtccaaggacgccggggtgccgctggtggccttctcgctcagggacagcagccggttcagcgtgttcgacgtctccgagaacctgcggcggttcggctggatcgtgccggcgtacacgatgccggccgacgcggagcacgtggcggtgctccgagtcgtcgtcagggaggacttcagccgcagcctcgccgaacggctggtctcggacgtccgcaagatcctgcgcgagctggacgcgcgcgcgacccacgccgtgagggtcgccaccgccaccgccgagcagtcgggcgacggcgtcgtggccaagaaaagcgtgctggagatcgagcgggaggtcgccgcgcgctggatgaacgccgtgaacaagaagaagacgggggtctgttgatgcgtcgtgggtcggagactgggaggtttcgccatggtagcttcgtctatatgtcgcgtgcttgtttgtgtctgtgcagggcgcttggatgcgttggtccagttccgcgtatgtgaacaaggtgtcgtatgcagtatgcaaatgttcaggatccaggaaccacaaataatggatgtaaatgttgggtttggtgccgtatgttgggtgtggagtatatttcttcgccaggtatttgctgtaatcctgtccctttacgttcgtgcactgcaatgagaat

SEQ ID NO: 16957 - DNA, 944 bp, Zea mays
  Clone ID: LIB3067-040-D12_FLI
gtttttgattttagccgccgccgctgctcatctcacatccctcgagaagacgcctgctcctcgccgatcgatacgatggccgtcttctccgacctccacaccgccgacggcctcaagtccctcgaggctcacctcgccggcaaaacctatgtgtctggtgactccattactaaggatgacattaaggtcttcgccgcggtgccgtcgaagcctggcgctgagtttcctaatgccgcccgctggtacgagaccgtctctgcggctgtagcctcaagattccctggtaaggctgttggtgtaaatctgcctgcgggatcagctcctgcggcagctgctcctgcggatgaggctgaggacgatgatgaccttgatctttttggtgatgaaactgaggaggacaagaaggcagctgatgagcgtgccgccgctgccaaggcctcttctaaaaagaaagaaagtggtaaatcctccgtccttatggatgtcaaaccatgggacgatgagactgatatgaagaagctggaggaggctgtccgcagtgtccagatggagggtctgacttggggagcatcaaagcttgtgcctgttggatacggcatcaagaagatgactatcatgttgacaattgtcgacgatcttgtgtccatcgacactctaattgaggaccaccttacgcaagagcccatcaatgagtacgtccagagttgcgacattgtggctttcaacaagatctagagttcagtttctgagtttgggcaacggcagcggctcagctcgtcaagtttgtgctgggatgccagtttatcccttctagtctattacagaaatgttgttcggagctgagtctattataaacatcttggtctgagtttattgttgagtggtgccagtttttttcaatatacatttatcttaaaaacagcggtactgatgtttttttgtct

SEQ ID NO: 16958 - DNA, 727 bp, Zea mays
  Clone ID: LIB3067-040-D4_FLI
cgcgctccgctccccacgccagcacgcccgagccccgaatcgagtcccctaccccatcgatccccgccgcccgcctttccccgccattcttctagaacctacccagctctcggggaccttctctctcagcccgagatccctccccaccgagatcccgcgccgccatggtgtcgtgacggcggcggaggcggcgtcatggagcgggagcccaagtcccccgacgaccgccctgagcccgctgcggcggcggcgcagccgcagccgctggagtggcggtttgcgcaggtctttggcgagcgcgccgcgggagaagatgtgcaagatggtaataaattcaaccggccgctggcctcttcggatcggcccagtaccgtcgttccctcgcgagatttggtcggtccggtgtgttccggagaggtttagcggaaccatccctttcgtcgccacgggtgtccggggatcgccgggggttccttgggccgctaaacccaatgggtcgtggctggcttttacggtggtttgggtgttgaagcgtttgacttgttcgagtcggagtaagtgctatgcgcagtgtcttaacagggattcaggactgtttattactccttacacctcgacatgttgaggtttctctactgtgtctggttcgagcaactacttcatgtggtggtctttgtcgtgtaattttagctccaacagatcggtactctggtagttgtgcttcagt

SEQ ID NO: 16959 - DNA, 507 bp, Zea mays
  Clone ID: LIB3067-040-F3_FLI
caagagatagagattgctggtcgagaagaagagatgttacatatataataactactgtaggcagcggcatctcctgctgggacgaaggttcaagaagctagctaagagagaagggcataacgagataataagcagcgcgcgaagatgcaagactgggcgccggtgttcgtctcgctggtgctcttcatcctgctgtcgccgggcctgctgttccagatgccgggcaagtgccggatcatcgagttcggcaacttccagaccagcgccatctccatcctcgtccacgccatcctcttcttcgccctcgccgccatcttcctcgtcgccgtcggggtgcacatgtacctcggctcctaggcggcgccggcgcgccgtaccttctctccctctctatctctctctcgctgcacgcgcgccatcgttctcttcttttatgttctctctctatatatatagtctgtatgaatgaatgatatcatataataatgtacgtaccgtcgtccatgc

SEQ ID NO: 16960 - DNA, 455 bp, Zea mays
  Clone ID: LIB3067-040-F7_FLI
acacacaaaaaataattatattgatcaaagataacggtattgtgatgttacagtgccggcactctgctgtacatacttatcgctccctcaaaccgcaactcatctcaaaaacaaaaaagaacacagcaggcagagttgatacacaaaaaaaatcaagcctcagaatcaaacctgtgtgaccttgaatcaatgaagagcacttgacaaaaaaaggaaaaagggaatagcacacctatgaactggaagaataagagagctacttagctagcaaaacaaatccaaactagaaaaaggagaccgatccaggacaatgtgaaaattgatgtggcattgcatatggtgattgcgttctgcaaaatagctgtcgttgtcatgggctaatcagatgtagagtagaactactttcagcaaatggccatttgacccatgaactatgagacattggaagtgttgat

SEQ ID NO: 16961 - DNA, 2287 bp, Zea mays
  Clone ID: LIB3067-040-G3_FLI
ccaatcctttgggcacatttgtcatatggatgcttcttgggtatagcattgctgctgcatattctcgatatgacaaagttactgaagattgcagaaagatggaagagctaaaaacgcaggcagaagctgctgatgttgcaaaatctcagttcctggcaactgtgtcacatgagatcagaacacctatgaatggcgtccttggaatgctggatatgcttttaggaacagatctaactatgacacagaaggattatgctcaaactgctcaaatgtgtggcagagcattgattacactgataaatgatgtccttgatcgagcaaagattgaggctggaaagttagagcttgaagcggtgccttttgacctgcgttctctcatggatgatgttgtttccttgttttcttcaaagtcacgggagaagtgcattgagcttgccgtatttgtatgtgacaatgttccgaaggttgttattggagatccttggaggtttcgacagatactgacaaatttggtcgggaatgcagtcaaattcacagaacgaggtcatgtatttgtgcgggtgtgtttggctgaaaactcaaatatggaagccaatcaggtcctacatggagccatgaatggcaaaggtggtagagttgagtcaacagctaatggtgccttcaatactttgagtgggtttgaagcagcagacagacgaaatagttggcaatattttaaactgctcctctctgataaggagtcgcttttggatgatcttgagagcgaaaactctaatcaaagtgattcagatcgtgtcacactagcaataagtattgaggacacaggtgtcgggataccactgcaagcacaagatcgtgtttttacaccgtttatgcaggctgacagttcaacttcaaggaattatggcggtactggcatcggtttaagcatcagcaagtgtctagctgaacttatgggtgggcagataagtttcaccagccatccttctgttggaagcacgttcactttctcagccacactgaagcactcatacaaagatatttcgggtgattcaagtaggagcttgacagaggcactaccaactgcttttaagggaatgaaggccatcttggtagatgggagacctgtacgtagtgctgttacaagatatcacctcaagaggttgggaatacttcttcaagttgtgaacaatatgaacgcagtagtaaaagctttcccaggacaaaatggagcagccggttctagggaaaaggcatcaattctttttattgagagtgacttctggaggcctgagacagatgttcagttattgaaccatctacgtgagcagaagaacggtcagttgtctgatgggcacaaggtagttcttttggtcacctctgaagccgacaaggacaaatatggatccatatttgatattgtgatgtgtaagcctataagggcaagcacaattgcttcatctattcaacaactgctcaaagtagagatagccgaaagaaaagataatcaaaaccggccgtcgttccttcgaagcttgctggttgggaagaatatattggtcgtagacgataataaagtcaacctcagagttgctgcggctgcactcaagaagtatggtgctaatgttagctgtgttgaaagcggcaaggatgctatcagtctacttcaacccccgcatcgcttcgatgcatgttttatggatgttcagatgccagagatggacgggtttgaggcaaccggacaaataaggcaaatggagttgaaagcgaacgaggaaaggaagaacaagttggcttcgatcgaaggctcgacaactgccgagtaccatctgcctgttctggcaatgacagccgatgttatccaggcaacttacgaagagtgcataaaatcgggaatggatggatacgtatctaaacccttcgacgaggagcagctataccaagcagtctccagattggtagtgggaacgacagattcggctgtttgatgttcaaaatacgatggacctgacttctcattcatcgatcgaagtgaagcatcaccatcttgcctctgtccagctgactctatcccttgacaatgggcctgacatggcctctcacaagactagatgaaaaaaagaagaagatgaaagtgccgtgagttagctacgcgtcacacatgacatgaagttgctgcggcagcccagaacagtgtaggtagatcaccctgtaactctcttgttctttgatgtttataggctgttgtgtcttctgacaattcattggaaataccacatctcgttgc

SEQ ID NO: 16962 - DNA, 1025 bp, Zea mays
  Clone ID: LIB3067-042-A5_FLI
ctaaagaactacagtgatttcaatatccaccaactattattgtcatatggtgatgtgggcacaaagggcgctctaaaggatgagcatgtttttgcatcggcaaaatgtcaggccttaggggagcttttaccttctctggcaaatgatggtcacagagtactcatatttagtcagtggaccacaatgcttgacatccttgaatgggcattggaaattataggagttacatatagacgccttgatggagggaccgctgtgacagaaaggcagactatagtggacacgttcaacaacgatctttctatatttgcatgtttactttctacaagagctggaggccagggtctgaaccttgtaggagctgacacagtcattatacatgatatggattttaacccccagatggatcggcaagctgaggaccgttgccatcgcattggacaacagaaacctgtcactatctataggctagtgacaaaggattcagttgatgaaaacatctatgagattgcaaggcggaagctagtactagacgctgcaattcttcattctggagcagagttggacaatagtaccgatgtaccagagaagacaatgggggagattttggcatctcttctcctggtctgaagttctaaccctggagtttcttgaaggtatacaattctacccgtgggatatcttcaacaatgggtttttggccttcatttaagcttaccattcaccctggttaatgtcttgaatcttgaggtcctaagatgtgcatccatgtatcctttttgctcttgaaacctcccatcttttagtctgccttatccatcttttgttctatgaatggcgtgctataaactgctggatttccgaagtgtttatggttctacataatgacataatgtttaaggttactgtaggttgtaatggagtccggttcccaccccccctctgatataggaagaactgaaatctgaagtaatacatctgtaccaaagttttaacttgttttaaatgaaacgcagaatagttcc

SEQ ID NO: 16963 - DNA, 729 bp, Zea mays
  Clone ID: LIB3067-042-B11_FLI
caagcaaccaccgcctccccgatctcgtcgagaggaagccccatcccgaaaccgccgccgtattccaatggcgcccaaggccgagaagaagcccgccgccaagaagcctgcggaggaggagccggcggcggagaaggccccggcggggaagaagcccaaggccgagaagcggctccctgcgggcaagtccgcgggcaaggagggtggcgagaagaaggggaagaagaaggcgaagaagtcggtggagacgtacaagatctacatcttcaaggtgctgaagcaggtgcacccggatattggcatctcgtccaaggccatgtccatcatgaactccttcatcaacgacatcttcgagaagctggcggcggaggcggccaagctggcgcggtacaacaagaagcctaccattacgtcccgcgagatccagacctccgtccgcctcgtcctccccggcgagctcgccaagcacgccgtctccgagggcaccaaagccgtcaccaagttcactagctcctaggcgagcgatgcgacgtgcactcgtctcctcttcttgcagtagtaccatagtagtacggttaggtgtgttgccgcggtggtagttgccgctgcgtttgctttctgggctcggttgatgtcttttatgtaagaaagtaactgtattgtgtctgcagtatcttaccatgcatgttttaagtagcatcccataatctataaggaatatgttttaat

SEQ ID NO: 16964 - DNA, 459 bp, Zea mays
  Clone ID: LIB3067-042-B12_FLI
agctcatggatccagtggatcgcgccgcgatgcagcgacagaaacgaatgatcaaaaaccgcgagtctgctgcccggtcacgggagaggaagcaggcttatatcgccgagctagaatcgctggtaacgcacctcgaggaggagaatgccgagttgttgagagaacaggaagagcggcaccagaagcggcttaaagagctcttggaacgggtgacgccagtcattctgaggaaaaaaccatcaggagatcttagaagaacgaactcaatgcagtggtagattggagccaagctcagtcgccgtctctttacagttataacatagaatttgcccctgtatgtcatttttctatttatatatgcgccaactaagttgtagtatcttagctgaaatagcatgggcaattagccgacacaaaggttaaacgaaatcatattatgtaggagtgctcatgaccaag

SEQ ID NO: 16965 - DNA, 973 bp, Zea mays
  Clone ID: LIB3067-042-D12_FLI
cgaacaacggaaccaactgcaccgaccgagtcaatcaatccggcgagtgaccgagtggggtaggttgtgtgcggcatgacgaccacgcgcgaccgtggcgccggcggcggatcggcgtcgagggtcggtgacggggacgtcgacctgggcgagggctgggactggggcgccatcccgcggctcctctcctccgcctgcctcttcctctgctccggagcagaggctgttttggttgctgcgataagactgtaaagcaactgggtgaactgtccagaaacttgatcacccaggaccaaattaccattggagagccattttggagcacaaccaccatcgaggttgaaccagcagatctcagtggtgttacttcagtcaatacatctaacttggcctctggaactggtagcagtcataaccttcctggacttggtaataatggacttgttctgtgggaacatacaaggcaggagtggactgaaactagaagtctgcggctgaaggtgaagcaggttcgtgaaccagtattgagttggaatgcagcatatgagagtctgcttggatcaaataagccatttcctcaacccattcctcttcatgagatggtcgatttccttgtggacatctgggagcaggaggggctgtatgactagcgcaaatgatttcatgggataacatctgggataacacatagttgttcctcaagagaggggaaaaagaatgacatagagggtgtaggcttgggatgtggtgatgagttggcctgtcatacttgttttttgtcaatggaggcctgctgtacttgcagaatacagagctgtggttgtaagcttgtaagaagtcctgatactaatagtggctttgtttaatttgtcaaagaaaggtgtgtgaggttgagttgtgacaaaagtggattaggcctgctgatgggtttggattgaaatgagtttaaagggctgtgttttcatgtggttgc

SEQ ID NO: 16966 - DNA, 1274 bp, Zea mays
  Clone ID: LIB3067-042-E1_FLI
gcaagaacaaagggcgcttttataaatgttgcttactttgaacaatttggtgttaccttgatagaggctgccatgcacgggctgcctgttattgcaacaaaaaatggggctcctgttgaaattcatcaggttctggaaaatggtctccttgttgatccccatgatcagcatgcaatcgcagatgccctctataagatgctgtctgaaaagcaattttggtcaagatgtcgagagaatggattaaaaaatatacaccagttttcttggcctgaacattgcaagaattacttgtcaaggatattaactctaggtccaaaacatcctgctttcgcatgcaaagaagaccataaagtgcctgtgaagtgcaggaagcatatattcgttattgctgtagactccgttaacaaggaagatttaattcagattatcagaaattctgttgaggctacacgctctggaactatgtcagatttgacaggttttgtgctgtcgacttcactgacaatagcagagttacagtctgtaatagtacgcacaggcatgctccctactgactttgatgcctttatatgcaatagtgggagtgacatatattatccatcacagtctagtgatgtgccaagcaattcccgtgttacatttgcatcggaccataactaccgatcacatattgagtatcgttggggtggagaaggtttaaggaagtacttagttaagtgggcctcttcagtagtagaaagaagggggagaaccgaaaagcaagtcatctttgaagattcggaacactcttcaacatattgtcttgcatttaaagtgattaatccaagtcatttgcctcctttgaaggagctgcaaaaattgatgagaatccagtcactgcgttgtcatgcactgtataaccatggcgccaccaggttatctgtaattccaattcatgcatcgcgatctcaggctctaaggtatttgtctatttgctggggcatagagttgccagatgctgtggtcattgttggtgaaactggtgattctgattacgaggaactgtttggaggtcttcacaagacagtcatccttaagggtggattcaacactcctgccaataggatccatacggttagaaggtaccctttacaggatgttgttgctcttgatagctcaaatatcattgcaattgagggatttagcactggtgacatcaggtctgctatgcaacaaaagcttggtatacccacacgatgacaccaagtgcgatctattttgttattaatagaaag

SEQ ID NO: 16967 - DNA, 847 bp, Zea mays
  Clone ID: LIB3067-042-G8_FLI
cagtcttgctgccaagttccgtaacagtggacagacatgtgtttgtgcaaacaggatattggtgcaagaaggtatctacgaaaagtttgcaaaagcattcatccaggctgttcagagtttgaaggtcggtaacggtctagaagagagtacatctcagggtcctctgattaacgaagctgctgttcaaaaggtggagaagttcataaatgacgcaacttcaaagggagcaaatgtcatgctaggtggtaaaagacacagcctgggaatgtcattttatgagccaactgtagtagggaatgtcagcaatgatatgcttcttttcagagaagaagtttttggtccagttgcaccccttataccgttcaaaactgaggaagaagcagtccatatggccaacgatacaaacgcaggcttagctgcatacatttttaccaagagcatacctcgttcatggcgtgtatctgaatctcttgagtacggcttagttggggtaaacgaggggattatttcaacggaggtggcgccatttggcggagtaaagcagtctggtctagggagagaaggatcgaagtacggcattgacgagtacttggagctcaagtacatctgcatgggcaacttgggttgagtcctgaagtcggcctctagctcgaaacactcggcagatgatgaacggagaaaccaggcgtgcttagaagggcgtgagttgcgtttagctgcaagatcggtcatgatggctgtgggagagcagttttagaataaatcgaataagccgcggagcattaaataaaagaagtggaaatgagatgtaaatggcgtggaactataaagtatagcttcaccttcg

SEQ ID NO: 16968 - DNA, 2260 bp, Zea mays
  Clone ID: LIB3067-050-E8_FLI
ctagtcccctgctccattctcagccgccgccaatcccttcccgtgctccgcaaccgctgagtgagaagaagagatggccggcaagggcgatggcccggctatcggcatcgatctcggcacgacgtactcttgcgtcggcgtgtggcagcacgaccgcgtcgagatcattgccaacgaccagggtaaccgcaccacgccctcgtacgtcgccttcaccgactccgagcgcctcatcggagatgcggccaagaaccaggtcgccatgaaccccatcaacaccgtctttgatgccaagcgtctcatcggcaggaggttcagtgatgcgtctgtccagagtgatatcaagctgtggcccttcaaggtcatttctgggcctggtgagaagccaatgattgttgtccagcacaagggtgaggagaagcagtttgcagctgaagagatctcctctatggttcttatcaagatgcgtgagattgctgaagcttaccttggtagcacgatcaagaatgctgtggtcacagtccctgcctacttcaatgactcacagaggcaggccacaaaggatgctggggtgattgctggccttaatgtgctgcgtatcatcaacgagccaacagctgcagctatcgcctatggtcttgacaagaaggctaccagtgtcggtgagaagaatgtcctcatctttgatcttggaggtggtacctttgatgtctccctcctcaccattgaggaaggaatctttgaggtcaaggccacagctggtgacacccatcttggtggtgaggactttgacaacaggatggtcaaccacttcgtccaggagttcaagaggaagaacaagaaggatatcactggcaaccccagggctctccggaggctgaggaccgcttgtgagagggcgaagaggactctgtcttccactgcccagaccacgattgagattgactcgctgtatgagggcatcgacttctactccaccatcacccgtgccaggtttgaggagctcaacatggacctgttcaggaagtgcatggagcctgttgagaagtgcctgagggatgccaagatggacaagagcaccgtccatgacgttgtacttgttggtggctccactaggatccccagggtgcagcaactgctccaggacttcttcaacggcaaggagctgtgcaagaacatcaaccccgatgaggctgtcgcctatggtgctgctgtccaggctgccatcctgagcggtgagggcaatgagaaggtgcaggacctgcttctgctggacgtcacccctctgtccctgggtctggagactgctggaggagttatgacagtgctgatcccgaggaacaccaccatccccaccaagaaggagcaggtattctccacctactcggacaaccagcccggtgtcctgatccaggtctacgagggtgagaggacccggacacgcgacaacaacctgctgggcaagttcgagctctccggcatcccccctgcaccccgtggtgtgccacagatcaccgtgtgctttgacatcgacgccaacggcatcctgaacgtgtctgccgaggacaagacaacggggcagaagaacaagatcacaatcaccaacgacaagggccgtctctccaaggaggagatcgagaagatggttcaggacgctgagaagtacaagtctgaggatgaggagcacaagaagaaggtggaggccaagaactcgctggagaactactcctacaacatgcgcaacacgatcaaggacgagaagattgcgtccaagctgccggccgatgacaagaagaagatcgaggacgccatcgacgcggccatcagctggctggacgccaaccagctcgccgaggcggacgagttcgaggacaagatgaaggagctggagagcctctgcaaccccatcatcgccaagatgtaccagggcgcgggtgaagacatgggcggcgctggcggcatggacgaggacgcccccgctggcagcggcggccctggccccaagatcgaggaggtggactaagcggtttgttgtcagtcttgagcgtgctgcagttgctggctggcccagtcgctgccgcgagttatcgtcgtcggtcggtgcggtgtgtccgcttaaactttatttgtggtgggctggtacttttgtggtggttattttttttttggacctcgtgatagtcggtcggttccatgttatcgcggctactggcaaaccttaagtgatacggtaattcttcttttcggtatttgtttctgc

SEQ ID NO: 16969 - DNA, 808 bp, Zea mays
  Clone ID: LIB3067-050-F1_FLI
gtcgcgacccagcgtccatacacacagcagcctttttgttctccccgcgagcgctctctttctctatcgactggcgacgactccgccaccgccgccgctctacgcgagacgcccaggtcttcgccaacgacgagcatccgggttagagaggaagaaattgcaaccgaaacaatggcggcagattccggcgctcgcagacaaccaagcttcaccaaggtcgaccagctgcgccctggaacccacggccacaacctcatcctcaaggttgttgactccaagatggtcgtccagagaggccgcgagggagggccccagggaagacagatgaggattgcggagtgcttggttggtgatgaaaccggcatcattgtcttcactgcaagaaacgatcaagtggatgtaattaggcctggaacaactgttgaactgaggaacgcaaagatcgacatgttcaagggttcgatgcggcttgcagtggacaagtggggaattgtgaaagctgctgaaagctcagctgagtggacagtcaaggaggacaacaacctgtccttaattgagtttgagctggtgaccgtgacggagtgaaaaccgccattgcttaggagtattgttggtttgctgtgttgttgaacctaatcatcatcgccaatcaataaggactcgtggttgatgttctcggcatcggagttgcgtattgctgtaccgttgcttgcttactgtgcgttgtggctacttttgactgctatcgaataataataaattggtgtcatgaagtggaaaatgccatgcgatgatggctactttctgc

SEQ ID NO: 16970 - DNA, 1643 bp, Zea mays
  Clone ID: LIB3067-050-F12_FLI
cgcagagataggcgtcttcgtactcgcctacctccgcggctcaaacctttcccccttctcccaattcccgccgccgctccatcccgtaacgcgacaccatgagggagtgcatttcgatccacatcggccaggccggtatccaggtcggaaacgcgtgctgggagctgtactgccttgagcatggcattcaggctgacggtcagatgcccggtgacaagaccattgggggaggtgatgatgctttcaacaccttcttcagtgagactggtgctgggaagcacgtgccccgtgctgtttttgttgaccttgaacccactgtcatcgatgaggtgaggactggcacctaccgccagctcttccaccctgagcagctcatcagtgggaaggaggatgcagccaacaactttgcccgtggtcactacaccattggcaaggagattgttgacctatgccttgatcgcatcaggaagcttgccgacaactgcactggtctccagggcttcctcgtcttcaacgctgttggtgggggaacaggctctggccttggttccctcctcctagagcgcctgtctgttgactacggcaagaagtccaagcttgggttcactgtgtacccttccccccaagtttctacttcggtagttgagccatacaacagtgtactgtccacccactccctcctcgagcacactgatgtggctatactgctggacaatgaggccatctacgacatttgccgccgatcccttgacattgagcgcccaacctacaccaacctcaacaggcttgtgtcccaggttatctcatcccttactgcctccctgaggttcgatggtgctctgaacgtggatgttaacgagttccagaccaacctggtaccctacccgaggatccacttcatgctttcttcgtacgctccagtcatctctgctgagaaggcctaccacgagcagctctctgtggctgagatcaccaacagcgccttcgagccatcttccatgatggccaagtgcgacccacgccatggcaagtacatggcctgctgcctcatgtaccgtggtgatgtggtccccaaggatgtgaatgctgctgtggccaccatcaagaccaaacgcaccatccagttcgtggattggtgcccgactggcttcaagtgcggcatcaactaccagcctcctagcgttgtgcctggtggcgacctggccaaggtgcagcgtgccgtgtgcatgatctccaactccaccagtgttgtggaggtgttctcccgcatcgaccacaagttcgacctcatgtacgccaagcgtgccttcgtgcactggtacgtcggtgagggtatggaggaaggtgagttctctgaggcccgtgaggacctggcggcgctcgagaaggactacgaggaggtcggtgctgagttcgatgagggcgaggatggcgacgagggtgacgagtattagagaagtttgctgatgacgcagcatcaggccagtgtgctgcccttatcccgtgatctgccgagagttgctcctgctatcgtgttatgtgtgtctgttctgaagtattgtgtggtttacaacacctgatgttgtaagagttgttaattcccctgcattgctaccgggttattgagaataattatggctgtt

SEQ ID NO: 16971 - DNA, 1659 bp, Zea mays
  Clone ID: LIB3068-021-D11_FLI
tagacaggcgtcttcgtactcgcctatctccgcgacccaaagcgttcccccttctcccattcttctctcatttctcaccaccgccgccgctaccccctttcgacaacaccatgagggagtgcatctcgatccacatcggccaggccggtatccaggtcggaaacgcgtgctgggagctgtactgcctcgagcatggcattcaggctgatggtcagatgcccggtgacaagaccattgggggaggtgatgatgctttcaacaccttcttcagtgagactggcgctgggaagcacgtcccccgtgctgtttttgttgaccttgagcccactgtcatcgatgaggtgaggactggcacctatcgccagctcttccatcctgagcagctcatcagtggcaaggaggatgcagccaacaacttcgctcgtggtcactacaccattggcaaggagattgttgacctgtgccttgaccgcatcaggaagcttgcagataattgcactggtctccagggcttcctcgtcttcaacgctgttggtggaggaacgggctctgggcttggttctctcctcctggagcgcctgtctgttgactatggcaagaagtccaagctcggtttcaccgtgtacccatccccccaggtgtccacatccgtggttgagccatacaacagtgtcctgtccacccactctctcctcgagcacactgatgttgctgtcctgctcgacaatgaggccatctatgacatctgccgccgctcccttgacattgagcgcccaacctacaccaacctcaacaggcttgtgtcccaggtcatctcatccctgactgcttccctgaggttcgatggtgctctgaacgttgatgtgaacgagttccagaccaacctggtgccctaccctaggatccacttcatgctttcgtcctacgctccagtcatttctgctgagaaggcctaccacgagcagctgtccgtggccgaaatcaccaacagcgccttcgagccatcctccatgatggccaagtgcgacccccgccatggcaagtacatggcatgctgcctcatgtaccgtggtgatgtggttcccaaggacgtgaacgctgctgtggccacaatcaagaccaagcgcaccatccagttcgtggactggtgcccgactggcttcaagtgcggaatcaactaccagcctcccagcgtcgtccccggcggtgacctggccaaggtgcagcgtgccgtgtgcatgatctccaactccaccagtgttgtggaggtcttctcccgcattgaccacaagttcgacctcatgtacgccaagcgcgccttcgtgcactggtacgtcggtgagggtatggaggagggcgagttctccgaggctcgtgaggatctggctgcgctcgagaaggactacgaggaggtcggtgctgagtttgacgagggtgaggacggcgacgagggtgacgagtactagacgctctactggcgcggcgtcgtcgggcttgtgtgccactgctatcctgtgatctgccctgagtggctcctatcgtgttatgtttctgtcggttcttatctatctgtcgttgtgtggtttacaacttacgttgtaagactttattcccccgctttgctactgggttattaagtttggcgttattgttttcttg

SEQ ID NO: 16972 - DNA, 983 bp, Zea mays
  Clone ID: LIB3068-033-B10_FLI
ggtttctctatccaatttattcattgatatgtgttgcagctgcagctgttattgacagtttacctgattttttccatgacaaatattcatctgatcagtctatttttgaaaagatagcgaagggtctgcgtcctttgatacttggttttattctgtgtgcttcccacagccgaacattttccatgttaaatggatatggtgctcccctgcagatctatcagcatctagaacatcatgatgacactggacccgggtctattctgtgtgttggaagtgagtggcatcgctatccatcatcgttcttcataccctcttatatcagtgaagtccggtggatagatgatggcttccgtgggttacttccatttcccttcaacgagacactgggtgggaccactgcagctccgtcctacttcaataacaagaacaaggcggctgaagggcaatatctgaaagacattggagcatgtaacttactggtggaacttgatctaagacggccttacccctcgcgcgggagtgacttgtcgacatgggaggcattggccgcactgccgttcctggacagagagctttcccctgcattatatcggtccttcttcataccataccgatggcaacaaaacaatgtgttcggcctgtacaagctactgaggaggttgcatcctgaccatgcgtaatcaagggaaatgtggggtttgcttcaatgagcttaatcacgtgatttcttttaacaaacagcttgcagatttttactgccatagattttctgatcccaatgtgtaatggcgtacctatttttgtcccactgatccttccatcatacaaattcatcacgagatgacgaggatgagagtgctcaactgctgatgtagggagggatgttcgaggagaatcatgttgtgaaacggctgcttcgccagttgttacctttttggattgtttgttgaatattagccaatgacagactgatagatctatac

SEQ ID NO: 16973 - DNA, 267 bp, Zea mays
  Clone ID: LIB3068-034-B2_FLI
gcggccatggcgctgacagccgcgtcgccgaccggatcggcttctacaaacgatactgtgacttgcttggggtcagctacggcgacaacttggactgcgccaaccagacgcccttcaacggctaattaataagctagctacctcaccatgcatgcatgcattattattagagaacacaataagacctgatcgatatgatgatgggtatgtattactttactacacgcagatccagcaatcaagaataaagcaaattaatgtttactc

SEQ ID NO: 16974 - DNA, 2208 bp, Zea mays
  Clone ID: LIB3068-034-C10_FLI
ctcggattgaagagaagctggttcaacaagctgaggtaaatcaggagttggattcaataccaaaacgttccagggagcatgctgatcaagaacttgaagtagagagaactgcacaggctgggttggaacaagagtgtgactctgtgccaattgattctgaggaacacggttgcctgacttcatatgctcatactgatgatgagcaagatgaggtgaagcagaaagtcacttctgaaacagcagatgttctacattatgcagcagacacttttaatgttaacacaaactcatggaaagaagatattgaagaggatccaactgaagctgctctaacagccatacatcaaatttgttacgaacctttgacgagcatagtcaagttctctctagatcacagtgtctccgaagaagacagagagcctgatacgccgactcatattgaaggtatatgtgattcacaggaactgctggattctaaagcagttgtttctgacgctaaatctgtagattcaagtgttgctactttgtctactgatgtggaaagcactgaattggtgagtgttgatcaactaaaatctgctttggcttccacacgcaaatcattgaacaccctatattctgaacttgaaaatgagaggaacgctgctgctatagctgccgatgaaaccatggcaatgataaaccgtttgcaagaacagaaagctgcaatgcagatggaggcgattcaataccagcggcttatggaggaacagtcagagtatgaccaagaagcactgcagaggttgaatgaactagttgttaagagagagaaggagaagcaagatctggagagagaactcgagctgtatcgccacaaggttcatctctatgaggtaaagttgaggaaagtgtccaggcacaaggttgatgaccagaatggatcatcgtcaacttcatcgagtgctgaggatagtgatgacctttcacaaagtttctatgaaggtgatgaatcttcccatggtattaatggaagcaatgggagtattcctacagatgttgtgctacaagaaactgccaggcatcttgttacccttgatggctcactagctgattttgaggaagagagactatccatactggaacagcttaaagtgctagaagataaactttttgatcttgatgatgaagagtccgataacatgaagcatttctcagaagaaaaccatttaagtggtgcctcgaatggtttctctgatgatgatagctgctttaagctccatgacaagagaaagaatgtaacttatagaggaaagaaactccttccattgttcgacgatgctaccgtggaagctggaaacgtcccccaaggtaatgaggcacagcattcaacagaggtcacactggaccttgctagagagcaacataagcttgcaattgccaatgaaatcgatcaggtacacgagaggctgcatgctcttgaggcagacagggaatacataaaacagtgcgtgaggactttgaagaagggagggaaagggtttgatcttcttcaggagatattacagcatcttcgggacctaagaaggattgagcaacgtgcaagtgcaaggaactctggggagctttcgccttattacctacatcatcacacggattgaagatcccagatcagctgcctatgtccagcgaatattgcttgaagatggaaatcatacaacaatgataagggaaaaaaagattgccgactaagtagtattgtcattggagaagttttgttggttcccggagaggaaggagctcctcctggaacacccgtcacagtcggttcgaagataccattgggaaggcagatcacggagcaattctgccttccaaggtccaggattttttttgtggaccacttcccacgttctctttttgtgttggtttagttttcccggtgggttccaaacttttgcccaagggcaagagggtggttggtgagccgcccgggcccctgtggggctgtgtgtttgttgtgggggtgtggcggcaatcatggccttgtgcagaagctttagaattcattaacctgaaaacatgccgatgccagctttgctgccagatatgttgggcttcactagtttttgttttcttctttttttctaaatcctttccctgtaaatcttctagctgtatgtaatgtgctttcggcctttggaatgatgaggtgttgggtgtgtgcatagc

SEQ ID NO: 16975 - DNA, 811 bp, Zea mays
  Clone ID: LIB3068-034-G4_FLI
agaaattagttactcgatcactgtagtgatattattactgaactccaaataagcaatgtcgacaatttcgacatccctcggcctgctaatccgtccgccaagatcatcagctggtacgccgtcctttgggtctctcaaaccagtagtggtgactctcccttgcgctcctgctgagaagaagcggcctcgatccatctgttactctgtggatgccaaggctaacgaccatgccttcaacatctctcccgttgcccttgtgcatcccaacatgccgccaacgtcgacgccgcgatgggagatcaaggaagatggcaaggaagtcaggctgacattcttcaacttgtcggagggtgctacaacgggcgacttccaggttgccgtggaggacgatgtgctcatcatcaagagcacgaagcccaagccccctgcagctgaggaacagaggcaaaaggaagcccccgtcgacagcgtctcgttccacgtccggctactggtgcccaagggatacgacaaagagaacgtgcgtgcccaactgcagctccgggcgctggttgtcaccatccccaaggttaatccttcattcaccaaggaggttgacatcgacgacggaaaataggaacgaacacttcagtttctgtattttgtgtttaccatgggtcatatcgttgtatcccagctgtggtagtaattatgtggacgcatttttgcgtcaaaataaccatggcttagcagcgaaatatctattgcgggcaccacagcaaaataaaaacttttcgtgagtcaaaatatataatttctgtaattttttttg

SEQ ID NO: 16976 - DNA, 1352 bp, Zea mays
  Clone ID: LIB3068-034-G6_FLI
ctagcgagagcacgcactgctggcggcgcggctaagaccgagagccgccgcgcacattattgttcgcgcgaggccagccgccggttgcattgcatggcgcagctgccgcccaggatcccgaccgaggtgcaccactggcccgaggggggccagcacggcgcggcggcggcggcgtgggcggacgacttcgccgagttcgcggcggcgcggcggggcgcgcaccgcaggtcgctcagcgactcggtcgccttcgtcgaggtggcgccggccgacggcggggccggcgagttcgacaggctcgacgacgaccagctcctgtccatgttcccacccgacgaggccggcggcagcggcggcggcggcgggtcgtctgcggccgggtccgagaacggcggcagcagcgacagcgacggcgataagcgtggcgcgcgcggcggcccggcgggaggcgctccctccaccggcagtggcggcggcgagcagaacggagtcgtggatgcgcaagcgccggcgactggaggacaagctgccgtcgtcgcctccacggagctgatccgggaccccaagagggtgaagaggatccttgccaaccggcagtcagctcagaggtcgcgggtgaggaagctgcagtacatctccgagctcgagcgcagcgtcacaacactgcagctaacttgctgcggccgtacacgctgagccctgttccagaagactccattcagccgcacatgtagtactgcacgtctactggaacctgaagccagagtgcaagggaggcaaaaaaaaaaatccagaccagtccaagaacatgcatggggatagtttttcgtttatggtctcgtcaacagtgccgcgtgtgaagaattttgtcggagttgcttgcttgcttgcttgctattgctctgcgagatgttgtgttgttgtaactttgtaaaccgaccgtctgtttgccctgcgcctgcctgcagaacgaggtgtcggtgctgtcccctcgcgtggcgtttctggaccagcagcggaccatactgagcgtcggcaacagccacctcaagcagcggatcgcagctcttgcccaggacaagattttcaaggacgctcatcaagaggagctcaagaaggagatcgagaggctgcgccgggtctacgaccagcagaacctcaggatgtcagccggcggcgccgccgcttctgaccatgggccgccaccgccggtggtgcgcgctgagaaggagctcatgagctagcgaaccagtctatgcgtgcccgatgtgcagtccgccttatcattaacatggagggaacattgcatcatgattttttatttccagattatgtggatgttttcttccttc

SEQ ID NO: 16977 - DNA, 1737 bp, Zea mays
  Clone ID: LIB3068-048-G11_FLI
ggccgcccggagctgcctgccagtagcagcaacagcaaaacaagaagcagccgtaagcagcagagagcatggcgagatcagggcgggaagcggatcccggagaggaggaacggaagctggtgctgggcaagtacgagctgggccgcctgctggggcagggcaccttcgccaaggtttactacgcgagggacctgagcgccggcgccggcacgggccacagctgcagcgtagccatcaaggtgatcgacaaggcgcggctgcggcgtacggaggggatggtggagcagctgcgccgggagatctccatcatgcggatggtgcggcaccccaacgtggtgggcatccgggaggtgctcgccagccgctcccgcgtcttcgtcgtcatggagtacgcgcgcggcggggagctcttcgccaaggtggcccggggccgcctcgacgaggaccacgcgcgccgctacttccagcagctggtcgccgccgtcggcttctgccaccgccgcggcgtcgcgcaccgggacctcaagcccgagaacctgctgctggacgaggcggggcggctcaaggtcaccgacttcgggctggccgcgctgcccgagcagctgcgccacgacggcctgctccacacgcagtgcggcacccccgcgtacgtcgcgcccgaggtgctcaggaagcgcggctacgacggcgcccgcgccgacctctggtcctgcggcgtcgtgctctacgtcctcctctgcggcttcctcccgttccagcacgacaactacgtcaagttgtaccagaagatcttcaaggccgactaccaggtgccgccctgggtctccggcgacgcgcgccgcctcatcgcgcgcctgctcgtcgtcgaccccgccaagcgcgcctccatcgccgagatcatgtgcacgccgtggttcaggaagggcttcgtgccgcccgtcctttcgcccccggtgacgcccaagaaacagcagctggacgaaggcgctgccctcttcgacaacgacgacgacgacaacagcaacagcaaccactctggcgccacctcccctcggtcgtgcaacgcgttccagctcatctcgtccatgtcctccgggttcgacctgtcggggctgttcgagagcgagcagaagaccgcgaccgtgttcacggcccgcgcgccggcggccaccgtggtggagaagctggagtccgtggcgcgcgccctaggattcgaggtcaccagggggaaaggctggaaggtgaggatggaggccaaggccgagggcacgaacggacggctcgcggccaccgccgaggtgctcgaggtggccgtggacgtgaccgtggtcgagttcgtgcacgacgccggggacgcgctggactttaacaagttctgcgccgtcgacgtccgcccggggctcacggagatcgtctgggcgtggcagggcgacagccccgccgccgccgtcggcaccgcgtgaacaagcgtccccgtctgtcacgtggaagttgtagcaactttgcgtaggagttaaacacggctgcactggcaccagctttttatagcatgtaaagtttcaagttctcgtcgttgcttcgagactgccatggtggctagttcgttgtgtgccatatgctgtacaggaaggaaagagtcgaatcgagccggggagttttcgatcgacttgccaagttttgtacgatcataacctgtattttctggagatgtgtgcatacaaaattttgcccgtgatc

SEQ ID NO: 16978 - DNA, 1438 bp, Zea mays
  Clone ID: LIB3068-049-C2_FLI
acactgcatgtgttccgtattgtgaggccattttaaggaatgcagaaagatgtgtttgagtgaaaaagatttctgctctgaagaggagcacatttctccaataaatttcaaatcgctaataattcttgatgagcgaggatttcaagcacacattagacgcatagtagaaaatagctgtgatgcaactgatgtcagaagaaatatcgcaatgctatgtcatataatttctgaagacggctgaagttctctctttaccgacttgtcgtcctacgagttcctacaatcagttggtagcaggtgtctatatatataatatgatggaagcagagaagaatggaaacattcttatgcaaaagtatgaggttggaaaattattggggcaaggaacatttgccaaggtataccatgctaggaacatagagacctctcaaagtgttgctatcaaggttattgacaaggacaaaatttttaaggttgggctaatggagcagatcaaacgagagatatcggtgatgaaactggtgaggcacccaaacatcgtgcaactttatgaggtcatggctactaaatcaaagatatactttgtgcttgaatatgtcaagggtggtgaattgtttaacaaaattgctaaaggaaagttaagagaagatgcttccaggaaatacttccagcaattggttagtgcggttgatttttgtcatagtaggggtgtgtatcatcgtgatttgaagccagaaaacctacttgttgatgagaatgggaatctaaaaatttcagattttggattgagtgctcttgctgaatcaagacgccaagatggtcttctacacacaacttgtggtactccagcatatgtggcgccagaggttattagccgaaaaggatatgatggcgcaaaggttgacacatggtcctgtggtgtgatcctatttgttcttatggctggatatcttcctttccaagattcaaatttgatggagatgtacagaaagattggaaaagcagatttcaaatgcccaccatggtttccatctgatgtacgcaagttagtgtcaagaattcttgatccaaatccaaggactagaatgccaattacaaaaatagtggaatgcttttggttcaaaaagggcattgacaacaagctaatccgaaagaatatcgagatgaaagggaaagtttcagctctcactgatgttaatgtagttttctcatccacgggtattggtagcaacaataacaaattggttgatgtggaacaagatgtagcgaagattaccaacctgaatgcttttgacattatttccctttcagaaggctttaatctttcaggcttatttgaagagtccgagaaaagaaaagaggcacggttcacatctagtcaatcagcttcaactattatctcaaaactagaagatgctgccacctgttcaaagatgac

SEQ ID NO: 16979 - DNA, 1426 bp, Zea mays
  Clone ID: LIB3069-006-F1_FLI
gcggccgccatcttcttcacgggcgcgctcctcatgggcctcgccccggactacgggttcctcatggcgggccgcttcgtggcgggcatcggcgtcggcttcgcgctcatgatcgcccccgtctacaccgccgaggtggcgcccacctccgcgcgcggcttcctcacctccttcccggaggtcttcaacaacttcggcatcctcctcggctacgtctccaacttcgccttcgcgcgcctgcccgtccacctcagctggcgcgccatgttcctggtcggcgccgtgccgcccgtcttcctcggcgtcgccgtcctcgccatgccggagtcgccgcgctggctcgtcatgcggggccgcatcgacgacgcgcgccgcgtgctgcagaagacctccgactcccccgccgaggccgaggagcgcctgctcgacatcaagaaggtggtcggcatccccgagggcgtcaccgacgccgacgacgtggccgccatcgtccgcgccagcagcaaggcgtcgtcgtcgtcgtcgtcgcgccacgacggggtgtggaaggagctgctcatcaacccttcccgccccgtgcgccgcatgctcgtggccgggctcggcctcatgttcatccagcaggccacgggcgtggactgcgtggtgatgtacagcccgcgggtgttcgagcgggcgggcatcaagtccaagaccaactcgctgggcgcgtccatggcggtgggcgcgtgcaagaccttcttcatacccatctccactctgctcctggaccgcatcggccgccgcccgctgctgctggccagcggcggcgggatgaccatcttcctcttcacgctggccacgtccctgcacatgatggaccgccgccccgagggggaggccgcggctctgggcgcggtgagcatcgcggccatgctgtcgttcgtggcgtcgttcgcgtccggcctgggccccgtcgcctgggtctactgctccgagatctacccgctgcggctgcgcgcgcaggctgctgccatcggcacggggctcaaccggatcatgagcggcgccaccaccatgtccttcctctcgctctccaacgccatcaccatcgccggcagcttctacctctacgcgtgcatcgccgccgcaggctgggtgttcatgtacttcttcctgccggagaccatgggcaggagcctggaggacaccgtgaagctcttcggcaaggacgcggacgacgaggacgtcggcgacagccgtcgtcacgcgcccagtaagaagccctccacttccactgagcttgagctcagtgctcagcactgagtgatgtgccatgcaacacgtgtcctcccgagtgtgaccgaagcttatgtctaaagcttcgatgatacagtctactcctagtatcttgtgtgctcgaactgtggtgaatcttttgtagatc

SEQ ID NO: 16980 - DNA, 1308 bp, Zea mays
  Clone ID: LIB3069-008-A5_FLI
gccgaagaagaggagaagcgaagcaagcaggcttcgagaacaagactgcagggggagggggaggaccaagcgaaaggggaactagagcaagatgggcggcgcactgctgcttgcgctcctcctcgtctctgctgctgccgcccctcaggtacttggagttggcaatggagacaatcacatgagaatcatccaggaggacatcatcgagacagtcaacaaccatcccagtgctgggtggacagcctcacgtaatccttacttttcaaactataccattgcgcaatttaagcacatacttggagtgaaaccagcaccacagaatgcactaagcaatgttcctgtcaaaacttattcaagatcactggaacttccaaaagagtttgacgctagatctgcatggtcccgttgcagcacaattgggaacatacttgatcaaggtcactgtggctcttgttgggcttttggtgctgtggagtgcctccaggaccgtttttgcattcacctcaacatgagcattttactttcagtcaatgacctactggcatgctgcggttttatgtgcggcgatgggtgtgatggaggctatcctatagaggcatggcgctactttgttcaaaatggtgttgttacggatgagtgtgatccatacttcgacccggtcggttgcaagcatcctggatgcgaacctgcttatcctacaccaaagtgtgaaaagaaatgcaaggagcagaaccaagtttggcaggaaaagaagcatttcagcattgatgcgtacagaataaattcagatccacatgacataatggcagaggtctacaaaaatggtcctgtagaagttgctttcacagtttacgaggatttcgcacactacaaatctggagtgtacaagcacatcaccggtggcattatgggtggccatgccgtcaagttgattggatggggaaccagtgatgctggagaagattactggcttctggcaaatcagtggaatagaggctggggcgatgatggatacttcaagatcataaggggcaaaaatgaatgtggcatcgaggagggcgttgttgctggaatgccatccacaaagaatatggttccaaacttcggcggtgccgttggaagagctatagtttaatggttacgtttgcatggcctcaaatgctgttggaattagctaaagtaattttaaaatgcaattgttaaagggccacgatggtgtatgtattttgtacactagctcatttcaaaggtcgttatgttgctggtgccacatcactttggtcaagtggaataatattaataagaact

SEQ ID NO: 16981 - DNA, 1435 bp, Zea mays
  Clone ID: LIB3069-008-B3_FLI
gcaggtcggaaagtttctgtgccgactgccgagcgagaacgagaagacaagaggaagccaaaaggagaaccgagttcgggagggagcggatggcaatggctctgcttccgctattgctctcggtcctcatcgtctcctgcgtcgcgcagtcgccggcctcgtcgccgtccgcgtcaaatgctcctccggtcagcgcctcggctccgcggggctctgtcgcgccaccgacaacggcggtctcggcgccgcagggctctgtcgcggcaccgacgacagctgcggcctcggcgccgcaggcttctgtagcgccaccgatgacaacggcggcctcggcgccgcaggcctctgtcgcggcaccgacaacggcagcctcggcgccgcaggcctctgcagcgccaccgacgacaacggcggcctcggcgccaacggtctctgtcgctgcgccgcaggcctctgcacagccgccagcaccagttttcgcgtcggcgccccaggcctcggccgcggcaccaacgaaagcagcctccgcgcctcaggtctcagccgcggcgccggcaacagcagccttgccgccaactacatcagcctccgcgccccaggcctcggccgcggcaccaacaaaagcagccttgccgccacaggcctttgctgcggcgccaactacatcagccgcggcgccacaggcctctgccgccgcacctcctaccggcgccgccgcgccaccgaccacagctgcttctccgcagctggccgccacgttgcctccggtttcctccccgccactggcagctacgccacctgtctctgctacccctccagccacgctacctccggcaacgcaacctcccgtcgccgtcgccgcgccagccccggcgactccggctccagtcgcctccccgcccgtagcaatgccaccggcggcgcttgccccggccacgctccctccagcgatggctccgacaccacttctcgctgcccccgtcatggctcccatcgcgccacctgtcacggctcccgcaccggctcccgtttctccggctccaagtccaagcgtcgccccgaccccgtctccgacagaagctcccaccccgtcgcccacagaggccccgaccccgtctcccacgcaggcgcctacactcgcgccgttgagctcggtgtcggtgagcccgtcgctggcgccggggcccgcgctcgctcaggaggacgagtcggcggcgccgagctcgcgcactggcgtcgtcgcggccctggtggccgccgggctcgtcgtcggtttgttttaagaagtagagctgcggcgtttattaccgctatacgtccgtaccgtccctcgcacgggtctcttgttctcctgttggtgttctcatggattgatgcacgcacgaaccattcttgctgtacaacacattgataatttattttccatttattatgt

SEQ ID NO: 16982 - DNA, 800 bp, Zea mays
  Clone ID: LIB3067-043-A5_FLI
ctgcattaacaccactccagagcagtacatatggtgtaggtccgcaacagaaaagttgttctgtgagctgggtgcccactaacgtctcaggcagaagcaaggcggcgttgccttcgcatgatcctgaaatggaggtagatccatggaatcttctcgaagatggcacaagctgcccctcaacagcatctggaagccatggcgcgagtggagtgacgggtgaccatgctaatctgaaagcgtgcagctggcttaagggtgctgtgagggtgaggaggacagaactgacctacattggctctttagacgatgacacctgacgtgtgtatgattattttggtgaattgtggaggaaattagtctcacctgttggcactggagtgaatggtggaaaccaaccatggcccttggctttaggatggttgttgttggtgtagaatacatacacatcgctgcccccgttttgttttgttttgttttagggccttgtgggggcggctgtatataatggaaaaacatttgatccattactgaggcatggcccgagaagacaccttcaaatgggcttctgtgtaagcttgcttatttgagaagtaggaagccatgcagtagattttgtatccaaaagccgtgtacttgtttttgtctgatatgtaatctagcgcatgtcacacatatgtattcccttcctttgattgaagggctaatggtatgatgtctttttttttttgataaaacatgaggggtgagagcccctactggaaattaaataaaaaatatgtacaaggagttacacgtttctt

SEQ ID NO: 16983 - DNA, 907 bp, Zea mays
  Clone ID: LIB3067-043-B12_FLI
cgtgccgtgcccgtgtgcatcggggaaaaaacagcagcaggggccgaatcggagctccgccgccggcagatctgcgccggccggtctgctccgcccagcggacatggaccgcgacggccgcccggggtggctaccgtcgctgggcttcgccttcctcagcttcaactgcgggatggccgtctaccgctcctgggacgacccctacgccgtcgccttcgtcctcgccgcgtacgccgccctcgtcctcctcttccgctgcctccaccttctggagcgccgccgggaccagcgcctcaagctcgccgtctggggcctctccacgctcctcacactcatgttctcgtacaagatcgccgccgtgatgccgccctgggcccagctgctcgtctggggcatggggatcctcaccgtcgttgcgggattctacgccttcttcgtcgcccgcccggaggagccctgacccttcgttcgtctccatgccgccccccccgacatcaacatggatacctgatgagcatcactcaccgcatcggtctcagttatcttgtgtagtacgtatgtctttttgcagcatgccgaagaagttgacgaacgtaccgagaggcgcgtagcaagactcatcactcttttgaatgcaagagttggtagtagaataaagtaggggttccgtgtgtgtgtgcgtgtgggagagagatcgtgaaaaacggtttgcatctagcggtgacctctttacattggtttttccagtgcctgttgcggttagctatgtgttactaattggaatggatgcaagtaagtgaggatagagtcgttctaaacccactctccaaatcacccatgcatcatcatttgaacaaggtgctccataaaaaattgtttggggccttaatacatgttttagtttctt

SEQ ID NO: 16984 - DNA, 837 bp, Zea mays
  Clone ID: LIB3067-043-B2_FLI
ttcgagacaccaagataaagtttctttccagcgttaagcaactaactgaggaggacaagtctgcctggtcagaacttgtggtttctctgaagtcagaatatccgaagtacacacctttgctttctaagattttgcaatgtgtcctccagaaaggaactgatggtgataagattagccatgaaaaagaggttattgctgcagccgatgaggttgtgggcagtattgataaagaggaactggctaagtatttatctctaaattcagatcctgaagatgaagaagcacagaaattcaagaaaaaaatagaagaaacgcgggatcagttggctgatgcactatatcaaaagtgtcttgcattggcagagattgaatcactgaagtctgatgagtcaattgaggtatctgctaaagatatttttgaggagaattacaaagaattgattaaatgggttgatgtcaaatctgcaaaatatggcacttcgactgttttgcgtgaaaaacgctgtggaagacctggtacagcattgaagattctaaatgatttgattcaaaatgaatctgaaccaaagaaaaagctttatgatttgaagatccagttgattgaggagatgggatggaaccatgtctcaacctacgaaaaacagtggatgcaagtccgctttcccccaagtctgccaccattttgattgtgaactcatttttacaatggctctatcatcctgggttcagtagttgtcattttgattgctgggtgcgtcagttcattatttcgatggcatttgcttactctgcagttttctcttaaataataatataaaacagccaactaggcaagct

SEQ ID NO: 16985 - DNA, 825 bp, Zea mays
  Clone ID: LIB3067-043-C2_FLI
gaacatcaagtcttccaacgttctgcttggttcagactttgaggcttgccttacagacaattgcttgtcgttcctcctggaatcatcagaagtcaaagacgatgctgcttacagagcaccagaaaacatgaaatccaacagaatgctaacgcccaaatcagacatatatgcttttggtgtcctccttcttgagctccttagcggaaagccaccgcttgagcactcagtcttggtcgcaagcaatcttcaaacctatgtccagtcagcgagagaggatgaaggagtggacagtgatcgcatcacaatgatcgtggacatagccacgagctgcgttcggtcctcaccagaaagtcgacccgccacctggcaagtacttaagatgattcaagaagtgaaggaagccgacgcaactggtgataatgacagtgatcttaccagcaactcctagttgcctgtgtgggtccatctctggtggatgaatcattcctactgaacggatgtagactgtataatttgaagtgagggtgaaccctagataggaccgtaggagagtactgcaatagcataaggatctctatgttcggtgtggtttgagctagggatgctgtaacatattataggatttcttattgtcagcaactcagcatgttctggtctggttctactagtggcagttttagcaccagtctgttgtgtgaaagtttattagattgatagtagtgaagccacaaaagctgtgtgaagactgaagatctggttttaaattctattaccagcaagtattgtgagattttcatgaaatggttagttggggatggaacggtg

SEQ ID NO: 16986 - DNA, 1255 bp, Zea mays
  Clone ID: LIB3067-043-D1_FLI
caattcatcacggcatcacccccaatttcttctactccaccgaaacataaatccgtagcctggtcttctgcttcgcagaaagatcttgcggaaggtggcagacgcatagatgagggtgagagcatttggcggtagcgcttgacgagcgacgagtaaaccctaatgctttgatcgcggcggcgtcgtttgagacactcccgaatcgatccgcctacatgcctatgaatcctcctcccccgccgcctcctgggtcggcgtcttcgacgccggcgggggccagctacttccctctccctttccacctgcagcagcaccagccgcagccgcagatgccgccgcctatggcggcgagcagctaccagcagtatcagcaacagctgcatcaggcgcatcagctcttccagcgggacgcgcagaccatcacccccgaggcgctgcagagcgtcaaggctgctctcgccaccagcgacgtcctcgaccccgccgccgccgcgaacgccaggccctccgatccctctaccagcaagaagcccatcccccgccgcgctgccggacaatcctgggaggatcctaccctcactgactggcctgaaaacgactaccggctgttctgtggagatctaggcaacgaagttaatgatgatgttctatccaaagcattctcacggtttccatccttcaacatggcaagggttgttagagataagaggactggcaagactaaaggttatggatttgtgagcttttcaaaccctactgacttggctgcagcaataaaagagatgaatggaaagtatgttgggaatcgccctattaaattgcgtaagagtaactggaaggagaggacagatgttgaggctctgcaaagacaaaagaatcatgtccaaaggaagcctaaaattcccaagaagagtgttcttcacaagtagagatatataggccctaccgagggtgaagggcagctcatggatgcgttgctgccttgggatgatgctacttctggaatgtcttcactctctgcactactagggggcggaaatcacgcaagggctgttgtttcatgcaaattgcaacgagctactgctgccatctgatgcaatttgtgctccgttttactgtttcccatagtttgcgttcatccatttgtggtgttggagtactgtcatggctactgactaaccaagccgagctgaacaagaaccaaatggaattttcagtttgggttttagcaagtaatagcatgacgtgttgtact

SEQ ID NO: 16987 - DNA, 566 bp, Zea mays
  Clone ID: LIB3067-043-D7_FLI
ttgcgacagtactcactgacgctgaggtccccctggacggctacggtggtggccgtggaggcggcggctacggcggtggcgggcgccgatcggtttcggagaagagaagcaaatcaagatgtttctcggctcgctcccgcggcgcccgagcaaggaggctgcttacaagcagctgcggtcgcacatcatcatcatggcctcctgcgccgccgtcatccgcgccaccccttacatcctccatttcctcgcccgcgacggcgacatccaggaactcaagctagatctgtaggcccgtccgttgcttccccacctccagaggtgctacaaaggcaaccgttagttcgagcccactgcaaggtactatggagttagtggctatagtgcctgcttaagtttttttgttgttccaagtttagtgacaaactgacaatggtgtagcaactggcttgtgctgcgacaagtatttcgtttttgcctatctgtatggtctagtctttgtttgcactggtggattttccgagatgttatcattcaacaatgttctgtggtcagtcgccattgtcctt

SEQ ID NO: 16988 - DNA, 484 bp, Zea mays
  Clone ID: LIB3067-043-H5_FLI
caacactctccccagctcgagtaaccaccgcgagaaccaatcaccaagcaaaagcccgagaaggaaagaacaaacaggagacagatggcggctgcagcgaaggcgtcgtggatggtggcgatgagcgtcggggccgtggaggcgctcaaggaccaggcgggcctctgccgctggaactacgcgctgcgctccgtccaccgcgccgccaaggccaacgctcccagcttcgcgcaggccaggaaaaagctggcgccgcccgccgcggacaaggccgccgcggaggaggggatgaggaccgtcatgtacctcagctgctggggccccaactagctagggcctctgctagtttcggcttcctgcaaccgtaccgagctcggcttcaaatctgatccatgactggttgccttgccgacccactgtaacataggagtatagcaccacgatgatgatgatgaaaagttctgccacttgatttcagttcctc

SEQ ID NO: 16989 - DNA, 568 bp, Zea mays
  Clone ID: LIB3067-043-H9_FLI
gccctgtatgttgttggagtgttctggacttctggtcaacttggtatgatttaaaactaagttcgggcataatcaggaaagtgaagcagccagctcaaatgaagaatggtgtatcttggcgctgaaacgattgaaagaggcctctccgttagctttgaaggtctcactgcgatcgatacgcgagggtagatatcagacacttgatgagtgccttgtccgtgagtaccgcatgtccatgaatggaatctcaaagcaattttctcatgaattctgcgagggagtcagagcacgactagtcgacaaggacttcactcctaagtgggatcctcctgcccttgagtatgttacgaatgacatggttgacgcatacttcgcacctcttggcgattcggagcctgagttgaagctgcctatagaatcgcgagaggcatttgtatgatcacaaatcattccaagaaccggatcattgcaaggaccggactgggacctgataaacgtgttataatctgtgtagccattatttttggcagcacaaccagcccgattggaccaactattcacatgccgt

SEQ ID NO: 16990 - DNA, 891 bp, Zea mays
  Clone ID: LIB3067-044-A5_FLI
cacgattggcccaaaccgacttggatgattaatcgcgactaatccaggccgtgtgcgtgtggggctttggactctgctatatgtgtccctgaattggactctgcgtgttcggcaggctgcaagccgacactgttgcagctgtttggactgctgcagctgcaatccatagagagaaaaatactgtagaagccgcagccgcagccggattgcagccgcagcaagccgcagcgaacaagctgtaacaggttgttaacaaagttcatcagctgtctcgtctgaatcccttgctgttcttctcgattccctctataggttgttaacaaagttcatcagctaacttgattgaatggatcaatatgacttgatagacagatactcagatggaaacgtcggtttgtccaacattttagatcacttgcatccaatttttgtacatgtttagaccagaaagggttagcaccgttttcattattgtttttgggtttcagttgatgtaaaaggcaagaatattagatcagttactaagatcagcaattgtttcatttggcgcactccttatgtatcctcgcttagtttcttttgccctgtggcaggctcaaaatacagcttcagaggaaccagttcaaagctcaacctgcaggtccaaagatgagaatgagaagcataacaatatcactgaagaggcttcatgatgagcacaccctgttccgaggtggcgaggtgtagtaaaaacgagagagaataaagggaggctagttcatgtaaataactttgaataaaaaatagttgttaaactacttgtttagatcagatcatttgatgtaaataatgatttatcgaaacccgacggcactttctaattattcgtatgccaggcttttctttataatc

SEQ ID NO: 16991 - DNA, 561 bp, Zea mays
  Clone ID: LIB3067-044-A9_FLI
ggttcaccatgtaccattggctggtcagggacattgttgggccattagcacaggaatactgagatatatctagtgtttgtagttttggggtgaactcagagaagttgaaggtaacgacttggcttgcgaatatcagctgatctgcactcgggaaatatcagagagcttgtgcagaaaaggtaacagttatgggcttatggcagatgcagtagcatgagatgtcttcataattgttgtgtacatcaggttcagtggtacccccatcgtcaagctggatacgagtttggaaaaggtaactgtaaatcgagaaaattgtaaattgattagtgagctcactgcagcaatagttgttttcctacgtttcatctggttattgttatgaaccacggaaaggatttccggttttgcggtatgggcacctcagttatagttggtctagttatggtactggcggtgcatgatcgtgtaagtgcttcagagtttaggatatagttatgaagcaagaagtatgttatatactgagtaaagattcaatgattgatgcaaatgaagcagtatggt

SEQ ID NO: 16992 - DNA, 1018 bp, Zea mays
  Clone ID: LIB3067-044-B8_FLI
gctcattttgttagccatgttgctcaacattgcaacatcagtggtggtggtcgtggtcgtacttatgacgatgtgcatggcttggaggatgcatctatgagagtttctgatacagtcttgggaggtgcctatagtagccgtggtggtcatggtggtcgacgtgcacgtggtcatcatccagccccccttcaacaatgccatatcgtgcacctcgcacaattggagatcgtggtgctgctgtctagtctgtggacgacgacactgagggtgatgaattcaatgaccaagatgctttggggcatgctgaatggaggaagttaaaatatggaccaccagaaaaccttgataagcttgagataatgtttgagcatatagctatgaatggatcaacttcctgcacaccaggacaaaatattgatatagaaggacctgatgttgaaggagtagaagctgcaatagaagacagtcccgttagtgttggcagcatgaaaaggggtctatgcactacaagtgttcgcagtacaaagaaaagaacaaggagccctatagtcagaacaatgaaagaatgtgggagtctatgcatgaaaccaatggtgtagcctagaaggcgatgcaggaagagtacataaaagaatccatcaaacaatgcatgtctttggttaaagaatgtggtgcacctacaggaagtgcagagcacttcaatgctagtaaactatttgttaagactgaacattgagaggtttctctcaccatagaagaaagtgcacaaatgctagcttggttaaagaggtggtgccaggataagaaaatctattagttttgtgtgttcagtttgtcacggtctacagacatgaactagtgtcaagatctacatacttgaactagtgtcagttgcttgttcagtgtgtcactatcaagaataatgaacttctgtcatgtgcatctgttatgtggagtggtactcagttgttatgaaatttttgtgcaattgtgttagttgttatatgcactattatgt

SEQ ID NO: 16993 - DNA, 654 bp, Zea mays
  Clone ID: LIB3067-044-C5_FLI
tttgacagtggtagcacctatacttattttactgctcaaccataccaagctgttgtttctgcgctcaaaggtggtctcagcaaatcacttaaacaggtgtcagatcccactctgcctctgtgctggaaagggcagaaagcattcaaatctgtgtttgacgtcaagaatgaattcaagtcaatgtttctgagctttgccagtgccaagaatgccgccatggagatcccacctgaaaactacctcattgtcacaaaaaatggaaatgtgtgcctgggcattcttgatggaacggctgccaagctgagtttcaacgtaattggagacatcacgatgcaggatcagatggtgatctatgacaacgagaaatcgcagctgggatgggcgcgtggggcatgcactaggagcgccaagtctattctgtcttcctttccctgagctcagttctatgtacttctgatagagtttaagaaaatcactatatcaaacctcctcgcaatgcatgaatttcctaactgaagagggagggagagagagagagagaatgttcctgtttatgtagagatggagtccaaaatttgtgtgcctgatgagttcttccccatatgatattaactgaaatagtatatcaattgaatgtattacattttaagtttt

SEQ ID NO: 16994 - DNA, 692 bp, Zea mays
  Clone ID: LIB3067-044-D1_FLI
cgaggaaaatggattacttcatgttccaaaggaagacgcgcagaaggctcaggcagccatgttttctgatccaaacatggccatggacatgatgaagaagaacctatccatgatagttcctcagacacttacatttgcatgggtgaactttttcttttcaggtttcgttgcagcaaaaatcccctttccattgactcagagattcaggggaatgctgcaaaatgggattgacctgagcactgttgatgtcagctatgttagtagccggtcatggtatttcctcaatttattcggcttgaggggtcttttcagtctgatccttggtgaagaaaacgcaactgatgatgcacagaagatgatgcaaatgggtggtggatttggatttaacccaacaatgagtttgggagcagagaaagacagcctggatatcatgcagcatgactgggctctacctaagatggagcggcacgcagaagatgtgttgaaacagttgctgaagaaatgactcgaacggttgggcttctgggaagcaacactcgcgtcgcgtcttccagtttttgttgaagccagtttggaccaggaattttaccatttctaaatgtattatttataactagctactataacacccttagaaggtggagacccggtgttgtgatacttaatataagtagaaaaaacgtaattctgtt

SEQ ID NO: 16995 - DNA, 849 bp, Zea mays
  Clone ID: LIB3067-044-F2_FLI
gaaactttgcttagggcctgctagatgctatcgccagatcaagaacaagccgtaccctaagtccaggtactgccgtggtgtccctgaccccaagatcaggatctacgatgtcgggatgaagaggaagggtgttgatgagttcccctactgtgtgcaccttgtctcttgggagaaggagaatgtctccagtgaggcgctcgaggctgcccgcattgcctgcaacaagtacatgaccaagtctgcaggaaaggatgccttccaccttagggtccgggttcacccgttccatgtcctccgtatcaacaagatgctttcctgtgccggggctgataggctccagactggaatgaggggtgcctttggcaagcctcagggcacctgtgctagggtggacattggtcaggtcctcctttccgtgcgatgcaaggacaacaatgctgcccatgccagcgaagctctgcgtcgcgctaagttcaagttccctggccgccaaaagatcattgagagcagaaagtggggcttcaccaagttcagccgcgctgactacctgaagtacaagagcgagggcagaattgttcctgatggtgtcaacgcaaagctgctcggcaaccacggcagacttgagaagcgtgctcctgggaaggctttcctcgatgccgttgcttaagtgcggatgcgaatcctgacgttttgctttagcgtatcttactttgcttcgtggaacatgaatttcaagtgttttgagggtattacagtgccttatgtgaacttgcctatcttgtgctgaacatcggaatgtatcctccgagtatgtttaatcgcattaattttattggaaattggttgcgg

SEQ ID NO: 16996 - DNA, 1230 bp, Zea mays
  Clone ID: LIB3067-044-H6_FLI
cacgacctctgccggcggccggccaccggcacccatgtcgcccttctacctcgctcgcggtgcttccaagctagtgagaaggattacctcggagacatcagtcgagctcaagattctctctgaaaaatggcggcttctcctcgctggcgtcatttttcagtacattcatggtttggccgctcatggggttcattatttgcaccggccggggcccacccttcaagatcttggcttcatgattcttccggagcttgggaaagaaaggggttacatcagtgagacattgtttacgttcatcttcctcgcctttgtgttgtggacatttcatcctttcatccttcagactaaacgcttctacactgttctgatatggcgcagggtacttgcattcttatgtgtttctcagtttcttcgaataataacattctatgcaacacagcttccaggacctaattatcattgtcgagagggctcacatctggctagattaccaccaccccagaatgcagctgaggtcttcctgattaatttcccaagaggagtgatttatggatgtggtgacttgatattttcatcccacatgattttcaccctagtttttgtcattacataccagaaatatggaagcatgaggttttgtaagatgcttgcttggtgcgtggctattgttcagagtcttcttattgtatcttctcgcaagcattacagcgttgatgttgttgttgcatggtatacggtgaatttggtggtcttttttgtggataagaagcttacagaacttcctgatcgatcggtggggtccacatcaatacttcctctgagtgcaaaggataaagataccaagttgaaagaagaaaatacgagattgctgaatggtaactctatggattcagctgatcggagaccacgaacacaaatgaatggaaagcaaattgataatgaaagccaagttgatagtgaaactgtgaaagcatgatatactctgatggagggggttttgtttgctaaaagctgttcagacagctaaggccccgttcgtttgttacggattgatggatcggaacgattcctaatcggattgctttagtttatataaacctcagctggaacgattccggggattgcttctctagtttatataaatctcaacgggaacgattctggatgtaattctacacaaacgaacaaggcccaaagaagaaatatgggatgccacgcgctttggtgcct

SEQ ID NO: 16997 - DNA, 495 bp, Zea mays
  Clone ID: LIB3067-045-A3_FLI
gtcccgcgccaagtcgtactcgccgcctcatcacagccccgcgccgccgcctcttccgccatggccaaggaggaatccaagaaggagaagaagaaggccaaggccaaggtggccaatggagccgccgccgccgccgccgccccggtccctggcgcgagggccgcggtggtcgcctccgtcgccgccttcctcgagtccgctgggctctcgcgcacgctcgtcgccctccaatccgaggccggcctcgaggccggtgcgtgggggtcgtcacaggtgaacttggaggagctggttgccagattcttagagtcgagcaattcaactcgggcggctgccattctgggaagcgatgagcaagacaaggaaaatgatgatatagcaggagaagttggcaaggaaaaaaagaggagcggcacagaagccggtgagcctgagagcaaggcgatcgagcctttagctgaggaaaagccgactgaaaatatggacggtgaggct

SEQ ID NO: 16998 - DNA, 1535 bp, Zea mays
  Clone ID: LIB3067-045-B5_FLI
ctccccaactccgcctcccaactcccaagtcccacccccactccctcgctcaccagaggaactagcggccaggcaaagccgagccgcaaccgcgaagatcttgcgtggcctccttttcccagctcgtcactgtgccgctcgtgtccttcactcccggtccgcccaaccaataatccatcgatccatccaccaccaccaccccgctgcggcgatgtgcggcggcgccatcctctcgggtttcatcccgccgtccggggtggcggcggcggcggcggcggcggccaagaagaagcagcagcagcggtgccgtgtgactgcggacctgctatggccggggcccggcagtaagggagctccccaggacaaggaggaggacttcgaggccgacttccgcgagttcgagcgcggcctcggcgaggatgacgtggacagcgccggcgaaggcggcgaccccgaggtccaggagcttcctccgccggagccgacgaggtttgccttcgccaccgcggccaaggcagcagttgatggcgtgatgacgacgactccaaaggatgtgcaaggagatagagcagtaaaaaagcgcggccggaagaaccagtacaggggaatcaggcagcgcccttggggcaaatgggcagctgagatcagggaccccaacaagggcgtccgcgtctggctcggaacctacaacaccgccgaggaggcagctagggcatacgacgccgaagctcgcaagatccgcgggaagaaagcgaaggtgaatttccccgatgacgacgcgacaggcactcgtcacaggccaacgaacgccgcgaacgcagcgaggctagtagctccacccccacccccgaaggcctgcgccgatgagatgtttaacaacctgaagaacgacgacggcgacaacaacaacaacgatgatctgtttgcgatgtttgcgttcggtgacaataagaaggaggccgttcctgcagcgaagccagccgccgccgagggtggcagtggcagtggcagtggcagcttcctcgtccctgcgcctgcgatggcggcggcggtgcccggtaataagaggaggtcgtccgcgaccaacattatggtctccgtctccgacgaccagagcagcaactcctacggctccggctcctccgacttggtggggtcgtggtcgtgggacgacgccgccgccgccgccgccatgacctcggactacacctcctcggtcttcgctccggcgtcttactcttacatgcaaggcggagcgccgaagagaatgaggagcagctacggcggcgcgccgcccagcctcgcacatgacgcggccatgcctggctttggccttgataaagtgagctaccaccactaccaggcgttgcctccttattacgtcgggagcagcaacgcgtcggtgggcaacctcggtcttctgcagcaggctgatgatgctccagctccacaggatggggcgagcgccggggatatctggagcctcgacgagctgctcatgctggcagcagctggtgcttattgagaaccgcaag

SEQ ID NO: 16999 - DNA, 621 bp, Zea mays
  Clone ID: LIB3067-045-C12_FLI
attgactgctactcggaggctagcacctctgtctttgggcaaaagttgcgtgagcaagtcgaggagagactggaattctatgacaagggtgttgcgcctcgtaaaaaccttgatgtgatgaaagccgctattgacagcatggtcaatggcacctcaatggatgatgatgatatcgagaagaccgatgcatctcccaagaaaagcaagaaaaagaagaccaaaaccaaggctgatggtgatgcaatggacgtggataaaccctccaacgttgctggtggagaagctgagcctggaactgagaagaagaagaagaaaaagaagcataagctggaggaggaggcacaggaggagaacggtgcagcagatactacccctaagaaaaagaaaaagaagagccgtgaagcttccgaagaagctgaacctaagaccgccaccgatggtaagaagaagaagaaaaagaaggctaaggccgaggatgatgagtagccaagttatttgttgtatggcgtatgaatccgagagtatttgttgaaaaacagagatgaacgcctgcctagctcaactagcttgtagttcatgaggcgtttgatgcaaacccaactcaaagtacgaagttttcct

SEQ ID NO: 17000 - DNA, 904 bp, Zea mays
  Clone ID: LIB3067-045-C3_FLI
gtccacatcaccaaaccttctggcttctgcactgctctcctccacccctcaacgaagcctctggtgcctcggccaccgcagcagcctggccctgccccggcccccgggcgtggtgtcaggtctcaaggtgtggtggcgctttctcctctccggcacggtggccgcgtcatcccagctctcccgcgcggcggcggcagccgtttcctctcctgcgctcctcctgccgcacacagccagaaaattgcagctgaagtttgtttgaggataagcgacagctttgcgagtccttcgtgttgaaggagaaattgtagctgaagtgaaaaaaaaaacagcagggaacaatggcactatcacgaagtatgagagcatgtttgcacagtggaagacttgcacttcttgccatattggtctctggtggaattgtattgcaaatcttggcttgtgctctctataacaactggtggccaatgctaacagttctcatgtaccttatcctaccaatgcccctcatatttttcctgggttctgatacttcctccatgatgtccaatgggggagacggctgggtgaacttcacgaaattcttgacgggcgcatcaatagtagggagcatcgccattccgtcgatcctgaagcatgcgggcgtcattggatggggagccctgacgatggagctgtcatcctttgtggtctttggcgtggcaatcctgtggttcctccagatgaacggtgaagacgagtacagcggagtgttctaatccaaacctgctggttctcttgccagcgtggcactctgtgctgtgcatggtagttgtgaactgggctgtactgctacaacaggggaagcattgccctgggacctgatttactgacaccagtacatgtttggtctgcgatttttgtt

SEQ ID NO: 17001 - DNA, 520 bp, Zea mays
  Clone ID: LIB3067-045-C4_FLI
ccaacgcctccaagaaggatgagggcaggctccgggccggcggcggcggcgccggaaagcgcaagaaggccgccgcgagcggcaagcccaagcgccctccctccgctttcttcgtcttcatgtctgaattcaggcaggagtaccaggcgcagcaccctagcaacaagagcgttgcggccgtgagcaaggcagcaggggaaaagtggcgctctatgtcagagcaagagaagcaaccctatgtggaccaagctgggcagaagaggcaggaccttcaaagggtggtgccaccagagcgagaactgcatcaccgtctgcaagagcgagggcaataccggcgggttctgcaagctcggggcttgcatgtgcaccaaagagtgtgtcgggagtactggcgctgctggtgctaataaagccccacagcagcatttgagttgatgagtagtaatgaagaacgcttttgttatgccagcgcaagctctagaatttgaggccgagatgaccaaaaataaatgattttgtt

SEQ ID NO: 17002 - DNA, 1103 bp, Zea mays
  Clone ID: LIB3067-045-D11_FLI
catgaccacatcggtctctccgatcagagttcaactcggttctttgccgagtcagataagaaccccaacagtttttaattgcgcgccaatctgttttatatatacggagagagcactcctgtttttactagctgcaaaagggcgtgtttgagactagcggaccgaccggcctgcgcggcgatggatgtcaagtgccggcgtctggaggggaaggtggccatcgtgacggcgtccacgatggggatcggcctcgccatcgccgagcgcctcggtctggagggcgccgccgtcgtcatctcctcccgcaagcagaagaacgtgaacgaggcggtggaggggctcagggccaagggtatcaccgcggttggtgccgtctgccacgtctccgacgcacagcagcgcaagagcctcatcgagacggccgtcaagaactttgggcacatagatatccttgtctccaatgctgccgcaaatccttctgtagatagcatacttgaaatgaaagagtctgttctcgataagctgtgggatattaacgtcaaggcttctatccttcttattcaggatgctgctcctcacctacggaaggggtcatctgtgattattatttcttcaattgctggttacaatccagaacaaggattgacaatgtatggtgtcacaaagactgctctctttggtctcacgaaggctcttgctggtgagatgggacccgatactcgtgttaactgtgtagcccctggttttgttcctacacggtttgctagtttcctcacagaaaatgagaccattaggaaagagcttaacgagaggaccaagcttaagagattgggtactgtggaagacatggctgcggctgcggctttcctggcatctgacgacgcatcatacattacggctgaaaccattgttgttgctggaggggtgcagtctaggctgtaaatctggctgaagtttatatttacttggttactaatgtgtactagtgctctagagcatcaggcgtggctaataatgtgtactagtgccgctagagcatcaggctaccttctatatatgacaggcaactctaaaagattttctatatcttattcctcttcaat

SEQ ID NO: 17003 - DNA, 741 bp, Zea mays
  Clone ID: LIB3067-045-D4_FLI
ccattgagcagggaaggcaaaatcatttctggcaatgtgaatgtgaagaaccaaatatcgagggaggatctaaaagaagcattcaaaaaatttggagctgtccggtatgtggacttcagcatcggagataattcaggataccttcgctttgaagattctaaggcagctgaaaaagcccgcatgtctgcagtacttgctgatggtggcttgataattaaggaccacattgttactttggagcctgtgactggtgaagctgagaaggattattgggacacaatccgcagtattcaaggaaagtacaaggatagtagaagctacaagggaagggcttcaaataaccagagaggaggaaagcgtttcaacgcgaagcgagatagaaacccagactcggagaagaattctaacaaggctcggaaggttgaagctatcgcatgaggttaatttaggtaccttagctcgactaaagaagtaacatgttatgccagcatgatcgacttcagtactctccaagtttctagaatcgacttgttttttagctatcgttttcattttggtcgttttgccaccttattcgatgttcgtcccttagctataatccttttgtaaggctttactgtgatgcgagggctcacccgatggcgtgtaatttgagcacaccaagcttaggcttcccttgcgaaagggtggaagcctttctattctttcactagcaaatatgcagttagggcttattcggtt

SEQ ID NO: 17004 - DNA, 2086 bp, Zea mays
  Clone ID: LIB3067-045-E3_FLI
ttcagcggaatgtttacccttgcagttaagatgggtttgcagtttcctgttggacaaactaatattgatgggatacttcaccttcgggagaacgaattgaaacgacatgctggggagaaatctacggcaatagaagcatattgtgcctatgttgctgaagggttcgaaaacctgctggactggaatgatgttatgaagttccaagcgaagaatggatccttgtttaactctccttctgcaactgctgccgctttggtcgccaactatgacgacaaagcgctacagtatctaaatttgcttgtcacacaatttggcagtgcagtaccaacagtgttcccacaaaatattcactatcagctttcaatggtggacacgctcgaaagtgttggaatatcacggcatttttctgtggagaaaaaggctgtcctggacatgatatacagtttgtggttacagaaagaggaggaaataatgttggatgcagaaacatgtgcgatggcatttcgaattttacaaatgaatggctttgatgtttccacagattggttgtctcatattgctgaagcctccaatttccataactcactacaaggatatttatgtgatacaaagactctattggaaatgtacaaagcctctaaagtcatattatcagaaagagacttgaccttagagaacataggatgttggacaggtagcttattgagggaaaagctatgctctgatggagcgcaaagagtaccgatacttgaagaggtagagtatgcccttaagtttccccattatgccgtagtagatcctctcaacaacagaagaagtatggagcatttggatgctaggggttctcagacgctaaagacaaaatatctgccatgtcatgtaagtcaagacatccttgcgttggctgttgaagatttctgtttttctcaatctatttaccaggacgaactacagaacatcattagttgggagaaagagaataggatggaccagctacaatttgtgcggcaaaggctggcatattgctatctcgctgctgctaccaccatatcccctcatgaattgtctgatgctcgcgttgcatgtgccaaaagcatcatgctcacggttgtagttgatgacttcttcgatgttggtggatcaaaagaagaacaagaaaatctcatcgaattagttgagaactgggatgagcaccacaaagttgagttctgttcggagaaagtagaaatagttttctatgctgtctataatacagtgaaccagcttggatctatggcttctgcagtacagaagcgcgatgtgacaaaacacctcgctgaaacatggctaaaagtaatgctgtgcatgctgacggaggcagactggcaaaggaggcaatttgtaccaacagttgaggaatacatggcaaatgcagtttcctccttggcactggcggtcattatacttccagcgcagtattttcttggcgaaacgctctcagattacatggtcaaagatcatgaatacagcaatttgtctgagctcatgttcacttgcagtcgtctcttaaatgacattcgaagcgttgagagggagttcgaagctggtaaactgaacagcgtttcactgcttgctctacacagtggtggttccatgtccatagaagcggctaagaaggaaacacatggatctttagagtcgtataggagaggtttagtagcgttggttcgtagacaggacagtgttgttcctaggtcatgcaaggagctgttctggaagctttgcaagacaattcacctgttctacttccagattgatggatttacgtcgccgaaggagatggttggggcagtcaatcaagtaatcaacgagccactcgaactccaatcaagcaacacacatgtttagtttagctgttcgatctatttgaagattaaggactctggaaggacaggtacttccccggagacgatgcaaacaatcattggtgggtcaccatacaaacagtgaccttagttgtttgggcctcgcattgaccttgttaaaggcattatctaaaataccgagtgtctttttctctttaatgaaaacctttgatttggccttt

SEQ ID NO: 17005 - DNA, 1324 bp, Zea mays
  Clone ID: LIB3067-045-E5_FLI
cgcgaacgaggacggcttctagtccctcgcctaccccgcccccgaacctggcgtctgccctaccaaccgcagcagcgacactagaatggccgcggcgccgtcatccctcgcgtcctcccacctctccccaatcgcggcggtgtccactcccgccgtcccacatcagcttcgcatcggctgctcccgccgccgcgccgggcgcatcgttgccatggctggatccggcaagttcttcgtcggaggcaactggaagtgcaatggaacaaaggactccattagcaaacttgtctctgaattgaatgctgctacccttgaaactgatgtagatgttgtggtggcacctccatttatctatattgatcaggttaagaattcactaactggtcgcattgaggtttctgctcagaatgtgtggattggaaaaggaggagcctacaccggagagatcagtgccgaacaactggtggacatcggctgtcaatgggttattcttggacactctgagcgtagacatattattggtgaaaatgatgagtttattggaaagaaggctgcatatgcattgagccaaaaatgttaaggttattgcctgcataggagagctgctggaagagagggaagcaggcaaaacttttgatgtatgttttaggcagatgaaggcttttgcagatagtatttcaaactgggcagatgttgtaattgcatacgagcctgtttgggctattggaaccggaaaagttgctactcctgaacaagcccaggaagttcatgctgctgtacgcaattggctgaagaccaacatatcacccgatgttgcctctagcactcgaataatctatggaggttctgtgaatgcagccaactgtgcggagctagcaaagaaagaagatattgatggttttcttgttggtggtgcctctttgaagggccctgatttcgccaccattatcaactcggtgaccgctaagaaagttgcagcctgatgagccctgtctgttagaaataagtggtcatctgtgtttcaacctcacctgccacgccgtaaagcctgtaggaggtgatccgtgtgatggtgtgccgtcaccttcctgcctttgctgatttgcagcaccacggaaacagaaaataacgcaagatgtcacaatttttttttttttttgttctcgtagtccgtagaccttgtgtacgttacgggagttcagttgcacgttggcgatgtacgtttagaatattcttttgctctgtccttttgtaaggggaaaataatttgttgacagacgaggagaaatgataagtgctttttttatgcctcggtacttgaact

SEQ ID NO: 17006 - DNA, 824 bp, Zea mays
  Clone ID: LIB3067-045-G9_FLI
gcgcgcgcgctcccgctcctcctcttcctcgcgctcctcgcggggctcgccttcctcctctacccgtccgccccggccgcccgcgtcgccgacctccgtgtcgacagcttccgcgcgcagccgcccgtcctcggcctcggcctcgcgctgcggctccgcgtcagcaaccccggcttcgtcctcccgctccgctaccgcgcggtctccgccgccgtctcctaccgcggacacctgctcggggccgccaaagcgtggcccgggtccggcgagcttgcggccagggatgaggtctatgcggatgctgaggtgtgggtggacgccgggaaggtgctggatgacgtgatcgagctcatcggggacgtggccgcggggtcagtgccgcttgagatcgtatctgaggtagtcggctcgatcaaggtgttccgtttccacattcctgtgaaggggctcatatcgtgctcggtaagtatcagcccagtgactcagggaatcataagccaggattgctactaagcgcgagtgcgggaggctcccgattcccgaggatattttgaacctgcagagcctgctcgatggaactgaagtacttactatctgtatataatctggatatggtgttgtgttatgtgtaggctggaataatgtagtaatgagtaacggatagcatgttgttggaccacaggggtatatgttattttgcagtacgtatcagcactgcctatgtctattttgtagctggtgtgatgccaccttagcatagctccgttttcgaatagttatcgttccctagtcggcaaataaaaaagaacggggagtagtaagtt

SEQ ID NO: 17007 - DNA, 686 bp, Zea mays
  Clone ID: LIB3067-045-H2_FLI
aactacgcctctgctcatgacaatgaaacactatttgatattattagtgtaaaggtatggaacttatcaggatatctaggaaatttactgcaatttatgtattttggtatcaattatcaatctgccaatcaatcattttcttttgctttcttcaataaacatttattggcaagacagattagcatgaatgttttgttacacttttttttactgcttgcagtattttctaccttttgaaattatgctttatagttataaactaaacatgtatttatgtaacaatttagttttccagaaacagttttccaatctatttcagaacatgatctggtactttgtgaagttttttgtttgtttgcttgtgcagactctgatgaacctctcaattgacgagcgatgcaggaaaaataatttgtccacaagcatgattgcattatcccaggtttgaacttagaagatggccctgcacactctgcctcgacgtcatcttcaccagagcagactactgatgttgatggaagtaccaccggtgatgtcaccttctaagtataacttgggtaaccttattacctcttctcttactccaaatgctggttcggtgttatccatgttctcatcattaacctcttaaagttctgaaaagacaaggatgaatgcacactgcacttcctactgcacttcttttg

SEQ ID NO: 17008 - DNA, 927 bp, Zea mays
  Clone ID: LIB3067-045-H4_FLI
caaatacgattttccatctatatatagtacgtaaacatccttttcatacatcaggccgatcggatccataccaaatacacacagtacttctcacactccatcagacagtacacacgtacacagctgtcgtttcgtacacgcttaactgctcaagatcaaccaggccgcgtagctagaccaggcacgcggccgtacgtgctttcgtctatagctaaactcctaaaccaggcaccgtcgtccttagttccttacacacaccacgatcgtgaagcacgccggcgagggagagcagagcagagaaaccaaggccgccaccggctcactcactccactccaggtcctggcagcccgcgagcggggtccctttgcggcactggttgtgcgcgtacggcttgcacccgtgcttgatgacgccgtgtcccttggggagcggcccgcacaggcggttgtagctcaggtccagcttctgcagcgtggacagccgctccagcgacagcggcacggtgccccggatgaggttgtgggacaggtccaggtacgtcatctccggcgggaacaccagctggctcatgtcgctgaccctgttccggctggcggggctgacgggccccatcccggcctgcctggccgcgctgtccaacctgcagttcctgaccgtctcccacaccaacgtgtccggcgccatcccggagtccctggcgcggctgcgcggcctcgactcggtggacctctccagcaaccagctgacgggcggcatcccggcgtcgttcgccgacctgcccagcctccggtcgctggacctcgggcacaaccagctgacgggcagcatcccggcggggctggtgcaggggcagttccggtcgctggtcctgtcgtacaaccagctgacgggcccgatcccgcgcgacgacgcgcgcgacgagatca

SEQ ID NO: 17009 - DNA, 417 bp, Zea mays
  Clone ID: LIB3067-046-A12_FLI
gcctagcaggaaataaaaaatctgtaagagagaaccaaaaaaaaaaaggagtcaatcgccggcgacgggtacgggtgtacgcttgaggcgatcggcagagaagaccgagaccgacggctccagtgccgctgtcactgccagtctgccacagctagccgcctagcttgatccgccttttgtgctgtgcggatatgagggccgcgcaggtcgatccgtcccccgcggcgccgcccaagtcgcggctgaagcgcctcttcgagcgccagctgctgcgggtctcgccggccgagcgcctcccgtcggcgcctcccggtggcggggagaaggatgagctgccggagcctagctcgctgtgcctggacggcatggtgcggagcttcctggaggacggcggcggcggcggagccgagcgggcag

SEQ ID NO: 17010 - DNA, 315 bp, Zea mays
  Clone ID: LIB3067-046-D1_FLI
catcctttgatcacttgtccagtgcccaaaggatgggatcagggtctcctgggaatgtgcgttggtgaaaagcggaagttgaagatcccatcaaagcttggctatgggcctcaaggctcgccacctactattcctggtggagcaaccctcatatttgacacggagcttgtcgctgtcaatggagaaccaaccaaccaatctgacgagctttagattcatcaaacaaatgaatccattcacctttttactcggaactcagcagatgtaatactttccaagaaatgagccttcattccctgccactttcatagtttc

SEQ ID NO: 17011 - DNA, 815 bp, Zea mays
  Clone ID: LIB3067-046-E12_FLI
ctttcctttcctttcctgcagacaagctgtaaatctcgcctagctcgtcgtcggagaccaaggagaagagcaagggggggcgcagaggcagaggcttgccagcctacctagctcgtcggggccctatggagatccagcaccaccgggggctgggcaactccaaggttgtcaaggtgcagagcgaggaggcgtgggatctgttcaccgatcaagcgagcaacgagggccggcccgttgttgcccatttcggggcgtcatggtgcgtgacgtccctgtccatgaactacaagtttgaggagctggcgcagacccaccccgaggtcttgttcctctacgtggacgtcgacgatgtccagagtgtttcatccaggtacggagtgaaggccatgccgacgttcttcctcatcaagagcaaggaggtggtggggaagatcgtcggggcgaacccagacgaggtgaagaagctggtggatgcttccgccgagcccttggagactcagatagtcgtggagtagtagtcgtttcagacttttttttttgaagagtcgttcgtgtcttccgaaactgctccgcgagactgtgcgaccgtgagtgcttcttggtcagggtctggatcgtcccggactgtccagtgtcgcccgtgtgcgtgtgtgatgggtttctgtcgctttgtagcagtagtagcagccttgcctgttgggctggtagtggtacttccagtgccaggtgccggctgactgtagtgtgactctgaatgctgcatctgttctggggttgaaaaaataaataaaatccaacaaaacgagctcccttcg

SEQ ID NO: 17012 - DNA, 1029 bp, Zea mays
  Clone ID: LIB3067-046-E8_FLI
gtggtggttcgtcgatctcctgctaggtgctaagcttagctcgctcgctggcaacaacaatgaaagccgcaactggctcatcatcagtctctcgcgctcttgcgttgctcttggcggcgtgccttctctggaaggaagccgcgtgcttctcggcgtccgggctaaacaaggcgttcgccaccttctatggcggtagcgacgcttcaggaacgatgggtggggcctgtgggtacggcaacctgtactcgacggggtacggcacggacacggcggcgctgagcacggcgctcttcaacgacggcgcctcgtgcgggcagtgctaccggatctcctgcgactaccaggcggacccgcggttctgcatccgcggcacgtcggtgaccatcaccgccaccaacctgtgccctcccaactacgcgctgcccaacgacgacggcggctggtgcaacccgccgcggcagcacttcgacatggccgagccggcctggctcaagatcggcatctaccgcggcggcatcgtgcccgtcaactaccaaagggtgccgtgtgtgaagaaaggcggggtgaggttcagcatcaacgggcgcgactacttcgagctggtgctcatctccaacgtgggcggctgcgggtccatccagtcggcgtccatcaaggggtcgcgcaccgggtggatggccatgtcccggaactggggcgtcaactggcagtccaacgcgtacctcaatggccagagcctgtcgttccaggtcaccagcagcgacggccagaccaaaaccttccccgacgtcgcgcccgccagctgggggttcggtcagacgtttgcgacctcgcagcagttctcttagtatagacacatctttgttttctgcctcgttcgcttatcgtttatatatatccctcactcggctcgactcggctcggctcggccctcgatcaataccttgtaaagtttacccggcctttgttgaaatgccccaccacctgccgcgcgcgatgcaggagatatatgatatatatgctttgact

SEQ ID NO: 17013 - DNA, 475 bp, Zea mays
  Clone ID: LIB3067-046-F1_FLI
gttcctctccgccccgcttgcgccgcgcctccgcccccgtctcctgtgagatcagctccggcggcacgcggatatgactacttcaaggcgtcttgctgacaggaagagtgcaaagttccagaagaacatcacaaagaggggttctgtgcctgagaccacggtgaaaaagagcaatgactaccctgttggacctatagttcttggattcttcatttttgtggtcattggatcatccttgttccagataatcaggacagcgacaagcggtgggctggcctgaattcactgagctaaaaccagaaatttatctgtccgtgagctgggaggcagtatctgtgttgtgtagcaaacttgttcatggatatgtagtgcgaatgtcactactgttctgtttgcagtatcaaaagagtttaaactgatgttgtaaccatgcaaaggctgaaaattttaaagagtatgggagaaaccttaatct

SEQ ID NO: 17014 - DNA, 780 bp, Zea mays
  Clone ID: LIB3067-046-F7_FLI
ctcaaaccctagccgcctcctgcaagtttcagagctcaggaatctgcgccatggcgagtgagacggagaccttcgcatttcaggctgagatcaaccagctgctctcactcatcatcaacaccttctactccaacaaggagatcttcctccgcgagcttatctccaactcttccgatgcgctggacaagatcaggttcgagagtctcactgacaagagcaagctcgatgcgcagcctgagcttttcatccaccttgtcccagacaaggccacgaacacgctctccatcatcgacagcggcatcggcatgaccaagtccgaccttgtcaacaacctcggtaccatcgccaggtccgggacgaaggagttcatggaagcccttgctgccggcgctgatgtgtccatgattggccagttcggcgtcggtttctactctgcctacctcgtcgccgatagagttgtcgtgaccaccaagcacaacgatgacgagcagtacgtgtgggagtcccaagcgggcgggtcgttcactgttactcgtgacacgtcaggggagcagcttggcaggggcactaagatcacactgttccttaaggacgatcagctggagtaccttgaggagcgtcgcctcaaggatctggtcaagaagcactctgagttcatcagctaccccatctccctgtggactgaaaagacaacagagaaggaaatttctgacgacgaagacgaggaagagaagaaagatgctgaggaaggaaaggttgaggatgttgatgagaaggaag

SEQ ID NO: 17015 - DNA, 1030 bp, Zea mays
  Clone ID: LIB3067-047-A9_FLI
tctccatcttggcccaaccgagcccaaacctctccccttttctccgtcctctcctagtccacacggcagacgccgccgccgggggagaggagaggaggggaggggatcggctccaagggaacaggtgagatggcaatcctgtacgcgctggtggcgcgcggcacggtggtgctggcggagcacagcgcggcagccaccaacgcgggcgctatcgcgcgccaggtcctcgagcgcctccccgacggcggcgccgacagccacgtctcctacacgcaggaccgctacgtcttctacgccaagcgcaccgacggcatcaccgcgctctgcatggccgacgacgccgccggaagacggattcccttcgcatttttggaggatattcatggaaggtttgtcaagacatatggccgggctgcgctaaccgctcttgcatatgcaatgaatgatgaattctcaagggtcttgagccagcaaatggactactattcaaatgaccctagtgcagatagaataaaccgcatgagaggtgaaatcaatcaggtccgtagtgttatgattgataacattgataaggttcttgaaagaggtgatcgtttagaactgctggttgacaagactgcaaatatgcaaggaaatacagttcgattcaagagacaagctcggcggttcagaaacactgtttggtggagaaatgtcaaactcacggccgcattgatacttctcctcctggtaataatatatgtcgttctagtcttcgtgtgccatggtttcaccctaccaacttgcataaggtaaggcatgatgtgcacatagtgttttttgctgtgcatgtttgtgcctgtcaccggggtccggggggcagcagccattgcaattgtttcttgtgtagaggaaagctacatattatgaagtgattgtgagaactcaattaaagatgtgaacttaacataaaaagtgcttcttgtgggtttggctatgaccttgtaggtctatgagaattcggtgtttggattggtgtttatttgtggct

SEQ ID NO: 17016 - DNA, 774 bp, Zea mays
  Clone ID: LIB3067-047-C10_FLI
caaattggacaaccctgtcgccctctcggtctccctcgagcttttcttgtgcgcagccgcagccgctgcttttcgttcgtcttcatcctacgcgagggcgaaacccacaaaccctctccctcctgtactccggccgacacatccaggggcgatgacgctgggtagctccggcgccggatcgagcgtcgtcgttcctcgaaacttcaggctattagaggagctcgagcgtggagagaagggcattggtgatgggacagtgagctatggaatggatgatgctgatgacatctacatgcggtcatggactggtaccatcattggccctcacaatttgttttgtgacaaagactatccggagaagccaccatctgtcagattccactcaagaatcaacatgacatgcgttaatcacgagacaggaatggttgatccaaggaagtttggtttgctagcgaactggcagcgggactacacgatggagaacatcctcacccagctcaagaaagagatggctgcctcgcagaatcgaaagttagtgcagcctccagaagggacattcttctaacgaagtgttcacttggcccgtcatgggatccaacagtaattgaaagttttatgggctaaaaaacagcgtctacatctggtgcccctgcctggctttgtgattttttatgacttttatgttcttgtatcgtgaaccgcagtgaacaacggttgttgcaagttccagggatatctttggaagtggtaaacaaatgcgtcttatttctatgt

SEQ ID NO: 17017 - DNA, 1365 bp, Zea mays
  Clone ID: LIB3067-047-C11_FLI
aaaaaagaaaaaaaccacaaagagattcctctcaccaccaccaaccctagacgatcctcctccgccatgatgcgggacggcgtgcctccgtcggtggccggctccggcggcgcggcgggcggcgacgggcccaggcgatgctcgcagtgcgggcaccacgggcacaacgcgcgaacctgcacggcgcggcccgtcaagctcttcggcgtgcgcatcggggacaagcccatccggaagagcgccagcatggggaacatcgcgcacctcgccgcggagggcagcggcggcagggaggaagggtacggctccgacggggagcgcccgcacaagaagcgaggtgaggcatggactgaagaggagcacaagaagtttctgcttgggttgaataagctagggaaaggcgattggcgtggtatatcccgtaaatatgttgtttcaaggacacctactcaagtggctagccatgcgcaaaagtatttcaatcgccaaacaaatgtgcatagaagaaagagaagatcaagcctattcgatatggtgattgatgacccgtctgatcaacttccgctctcgcgttcatcttcacaagaaatggagcagcaacatttagatgatccacagcctgttgcagccctgcctgcacctgtggtctctccagctactgtggtacctcctgtgcctgtggaagtgtctgcttcagttccatcgccagttcaggtcccagttccagtttcagccccagtgatgacatctcagcctatggaacaggactcagataccacaagttcaattgctggagaggcaggaacggtgatgccaggagccatgcccccctatctttatccaatgatgattcctcctccatactaccatactgcttttgtaccaatgccctgctacggttatgttcctttttactgtgagccacaaggtgctgcacaggctccgcatgaggttgtcaagccagtggctgttcattcaacgcctccactgaatgccaaagacctttacaacatgtctgaattgagcctgaagggcgactcgaatgcaaacggtggtgtgcctgcttcccccttgcctccgaagccgatcggtagaccagagaggcaatctgctttccatggcaaaggacctacacctaccggtggctcgtcaggtggactgattcctgcagtcaagtgaattcgattatgctcctaaacatgccttcatgtgtatgtaatactagaaatagccaaatcgtaatagccgcctgtgctgctaaaatggtggtgtgttttctagcaaaatatctatactgctcattttagccttcaccagtttggaagtcatgatccgagggtaaatatattgttagcttgttgtttt

SEQ ID NO: 17018 - DNA, 444 bp, Zea mays
  Clone ID: LIB3067-047-C2_FLI
aacacatggttgatcaactgacagaacttcagaaaaaagaacaaatgttttgtgaagcaaataagtgtcttcgaagaagactggaggagagcaaccaggttatatggcagcatgcgtgggagcaaagcgagcggcattctgaagtgcagccgcagcagctcaatggcaataacttcttccatcccctcgatggtgctggtgaacccacccttcagatagggtatccttcagaggcactgactagctcatgcatgaccaccttcctgcccccgtggttgccatgagatcgaactactgcgcaattccgaattaataagcatggccgcatgcagctgcctgtgctatacgttgtgcttggagtgtactttaaggttcttgcatggcaagtatgtgtgtaacatttgtgatgaacatggaaactatccacttaattctcgaataatc

SEQ ID NO: 17019 - DNA, 779 bp, Zea mays
  Clone ID: LIB3067-047-D10_FLI
gatgcttcaacaagtcaggctttgattagtagccatgtaacaaatcttcctggtctcatgaaccgtagctcaaatgcaatcccttcaccaggaattagtaattttcaaagcggaaatattcattatgttgttaatcagaacgctatgggagttagctctaagccaccaggtgttctaaagaccgagagcactgactcactgagttgtagttatggctatattggtggtagcaccagtgtggactctggcttgttctcttctcagtccaaaaatccacagtatggtctactgcagaatcaaaatgatgttaacggcagctggtcgccttcacaagattttgatagttttggaaattctcttgggcaaggccaccctggtaccacttcatctaacttccagagttccgcccttgggaagttgcctgaccaaggacgagggagaaatcatgggtttgtcgggaaaggcacttgcattccaagccgctttgcagtggatgaggttgaatctccaactaacaacttgagccacagcattggaaacagtggagacatagtgaaccccgacatatttggatttagtggacatatgtgaaactttcttgaatttgtaagtagcgttgatcagtgagcactggaaacaaatctagtggtttgatgaatggttgctagtaatttcgtttcttctttttttttcttctgtaattggtttataaagggaataatctatgtgacagcatgtggaatcttactttatagaagtttgttcagtttaaaggactt

SEQ ID NO: 17020 - DNA, 1515 bp, Zea mays
  Clone ID: LIB3067-047-F4_FLI
cagcgacctgcttgaaggggatgcggcggcggcggcggcggcgcgccggagcttggttcagtggagcggcgcctccacggagttgtcccagagatcgagaagcaagagcaagatcttggaggctgatggcaagggaagtcggcgcggccatgcccggtggctttcggcagatatgacgagcaacggcagcggaatggaggttggtaaattctcccaagacgatgtttcaagatgtcctgagaaaacagtgaacctacaggatctgcagaacagcttgattgcatctaaggagcttgtaaaagtacttgcccacatatggggacctggagaactgaatccgtctagtgtatcactcatttctgctctacgttcagagcttgatgttgcccgttctcatgttagaaagctaatcaaagaaaagaagtctaatccctatgaaattgaggacttaaagaagcaacttgcagaagaaatggaatcgtggaaggtcaaacaaaaggagaaggttgcaaacgctctccaatttatagtttcagagctagacactgagaagaagtcaaggaaaagagcagagaagacaaataagaagttgagtgttgccttagccaacactgaagcctcactgcaggcagtgacgaaagaacttgaaagagagaggaaatctaaaggaagagttgagaagatctgcaacgagctcatcagaggcattgacgaggacaaagctgaggtggaggcactgaagagagaaaccgagaaggcacaagaagagctccagaaagagcgtgaaatgcttcaacttgcagacgagtggcgtgaacaaagggttcagatgaagctgctagaagcacggcttcagtttgaggagaaaaatgcagctgttaatcagctgcgcgatgaactccaagcttatctggatactaagaaagagcaggaaccaatgaacgatccaatgcaactatcccacgcgtctgaaaatggcgccaccgcagctgatgatgtagtccctgacagaaatggtggaaacttcagcgaagacgactcatcggaaggcagtgacatacactcgattgagctgaacgtcgatggcgtcaacaggacctacacctggagctacactccttcctcgaaaggcaggcagaggagcgcttcgaggcatgaatcgttttcggatagagggatggacggcgtgaactcgtggcgtttagagcaaagctttcggggcatggatgaggagctggagggagactgggcggaagggtgtagcaacggaatactgaccatggatcacgacgaggagaggtacctggcaatcaagaatctcagagagcagatgctggccgggtcagggttcatcctatcacaaggtagagaaaatgctgaaagagagtgttgtggcttgtaagataaactgcatatgaagagaattttaaagtaatgtgtcatatgggtcgctgtttgatgctaagatccagctgttcgagaattttaaagttatgttccatgattctgaggtct

SEQ ID NO: 17021 - DNA, 547 bp, Zea mays
  Clone ID: LIB3067-047-H1_FLI
gggccctgcatggagaaggcgccatgctggatgcggctggccaccgacggcaccggcgaccaccacgggtggtactgcaactacgtggaggtcaccaccacgggcccgcacaaggggtgcgggcagcagctgttcaccgtcgagcagtggctcgccaccgacgccccgcccttcaagctcgaggccgttcgcgactactgcagcggcgacgccaagggcgcctcggcggcgtgatgtggccggcggccggtagaggagagcacagcacacacgcctggactggacctgctgggtggcttggtttggttggttggtgacgagtcgtaataagttgtgggcgcatgggcgccgcgctcgtgagtggcgtgcgccacgatgcatgcgtgtatggtgatgaactgaattggagccgtgcagcaagtcgaataatcgggagccacctcgcgtgatgtgtagtggctagtttttgtacatggacgtgttggatcttgatccatgttttgatctgatctttgagaaatggtaatccgcgttatcatgcgtgttt

SEQ ID NO: 17022 - DNA, 511 bp, Zea mays
  Clone ID: LIB3067-048-A2_FLI
cttggatgaggatattgccagtccagctagtggagcaagaaagaaacgagcatgcaacactagtactgcaacaaagccctatgttgaagattatgaggggaatgtggggaactttgcaatctaatagtgctactgcaaaaatggttctacagggaaaattaaggacagagtccatcaagaatgcgatgaatctggttaagaaatgtggtgcaccagaaggaagtgttgagcattacatggctacaaaattgttcatgaaagctgaaaactgagatatgttctttacttttgaatcaaatgaaggaaggttatcttggttaaagagaaattgtcaggactatgggttgtattgagttgggagttatcatgagtgtgtcataaaccttttatgtactactgtcttgaactattttatgtagtattgtcgtagaccttctatgtgtgtatgttgtcagaaaccttttatgtacggcttcatgaaccttttatatactattgtcatgaaccttct

SEQ ID NO: 17023 - DNA, 744 bp, Zea mays
  Clone ID: LIB3067-048-B5_FLI
ctgcctgtccactgttggcttggtgacttcctccgctccgctcccctccgctcccgaacggtcgatctttgcatggcagcagcagctggctccaaggggcgggcgatcgctggaagcttcgtcagccgcgtcctcgccggcaaggccgcctcgccgaggagggccgtgcacgcctcggcgtacgacaagaacctggaggaccaggtgcgcccggcgttcgtgccggacgatgtgatcggcagcgccgggagcccggacaagtactggagcccccaccccaagaccggcgtgttcggcccggcggcggtggaccccaagctggccgctggtggcgcgccggacgccggcgcggatgctgcaggaggcacggtgctggaccagaaggtgtggttccgcccgctcgaggacgtcgagaagccgccccccgccgcgtgagccgcgcggcgctgctaggccagcccacactgctgctcgctcataaaaagggcggcgggagagcctggcagtggcaggcaccctgctcgtgctcggctgggctgggctccctgcttatatcactacaatattatactactagtagtggtgcttgatagcagtgtgtggctgtgctaataccagtataatactggttctactataatacagtcgtatcaggcatggcgtgcatcaggactggttgtgatagtagcaacgtgatgctcgtgcctgtaataagaacaagcaggcgatgtgtgcctgtgatgt

SEQ ID NO: 17024 - DNA, 1715 bp, Zea mays
  Clone ID: LIB3067-048-B8_FLI
gctccccggccgcccgtctctcccgagctaaactgtggcaggcagctagctgttacgagctagctccgcgcgcgctaggcggcgtcacgtacgtgctgtgatcaactgtctagttctctactcgacgcggacaccctgacccgcgcgcgcgccgtggccatggtcgccgccgccgccgccatcctcctggtcctgcccgtcgtcgccgtcctcgcgtcgtcgtccgcggcggcggacgggtcgttcataacgtgggacgacctcagcaccccgtccgccgccgccgtgcagggcggcgtgaaggcggccagcgggggaggcgcccgcgagctggacacgatcgtggtggcgcaggacgggacggggcactcgcgcaccgtgcagggcgcagtcgacatggtgcccgccggaaacagccgccgcgtcaagatcctcgtcaggcccggcgtgtacagggagaaggtgacggtgccgatcacgaagccgttcgtgtcgctcataggcatgggcagccgccgcacggtgatcacgtggaacgccagggcgtcggacatggaccgctccggccaccaggtcggcaccttctactccgcctccgtcgctgtcgaggccgactacttctgcgccagccacatcaccttcgagaactccgcgccggcggcgccgccgggggccgtggggcagcaggcggtggcgctgcggctgtccggcgacaagaccatgctgtacaggtgtaggatcctggggacgcaggacacgctgttcgacaacatcggccgccacttcctctacaactgcgacatccagggctccatcgacttcattttcgggaacgcgaggtccctgtaccaggggtgcacgctgcacgcggtggcgacgagctacggcgcgatcgcggcgtcgcagcggagctcggcggaggaggactccgggttctcgttcgtggggtgcaggctcaccggctccggcatgctgtacctgggcagggcgtggggccgctacgcccgggtggtctactcctactgcgacctcggcggcatcgtcgtgccccagggctggagcgactggggcgaccagtcaagaacaaagacggtgctgttcggggagtacagctgcaagggcccaggggcgagcacgaggaaccgggtgccttggtcccgctcgctcacctacgacgaggcgcggccgttcctcggcccgagcttcatcaacggcgagcagtggctcaggctgtagatccgatccgtcctcccggctgccgagctgagcttcgtcgacggcgagctatggtccctccgtccgagctgtgtgtaggtcatgcgacttctctggtcttcttcggtgcatatagcgtgacaagcaagcagctagtcagactgtagacatgtacgctgtaccatatactactagtaccatgtacaaacctgatacccatatgtgtagtgagatactgagatggccatgtccatcattcatggcaagatacatagtagtttgcatgcatgtatgtgaaggaaaacaggggaggccaaagtccgatacgtgacacgtacgcctcatgcagatgggtcatggggcctccacctcaggcccgcccaacataccagaaaatcaaaatgatgagatcactgcatggctttcctgatttctagcacgggcaagttcagatccagtatgccaaatgccacaaatagatggcgcatggctttgggagt

SEQ ID NO: 17025 - DNA, 1660 bp, Zea mays
  Clone ID: LIB3067-048-D1_FLI
ctctcttcttctcttgcgaagtcgccaaggccagtccccaatccccatccagccagaccgccggcgatgacggaccaccgcgacgtgatgttgcccttgtccctccaatacatagccacccgtgccctcctcctgctcgtcatcgcgtccgccgtttcctgctcttccttgccgccggaggacggcatccgggtcgtctctgcagagaaaagaatcgacctcacgggtcccatcgtcaaagtcttcctaacattgaaggttgagaatgctcccacggcctctgaagcatcacgagttctcctcgccttcacgcccacagagtttcaacatctctctattgtcaaggccacaagagcggaggggaagcgcaagaagaaggcattcgtacccctctcggtccaagcctctgagctcgccaccaccgctcccgacgcccctcgcctctactctgttctgctcagcactcctctgaaaccgggcgatgcaaccactctagaagtgctatacatgctcactcactctttagagcccttccccgctgagattagccagtcagagtcccagttggtttactaccgtgacagtgcggtgcttctctcgccctaccatgtcctggagcaggttacctacatcaaaatgccaagcaataggatcgaatccttcacaagggtcgatcctaccacacgagctggttctgaagtgaaatatggcacatacagtaaccagatgccaaactcctatttgccagttcttgtgcattatgagaataaccgcccatttgctgttgttgaggagcttgtacgcaaggtggagatttctcactggggaaacatccaaatcaccgagcagtataaactgaaacacggtggtgctcgtcacaaaggagtcttttccaggcttgagtatcaatctaggccatctatcagtggagcttcgtcctttaagaatcttcttgcaaggctgccacctcgggttcattcagtttactatcgtgatgagattggtaacatctcctcatcccatctgcgcactgattcacacaagtccgatctagaaattgagcccagatatccgttatttggtgggtggcactgcacgttcaccattggctatggtcttccattgcaagattttgtctttgagtcagttgatggccggcgctacatcaaccttacttttggttgccctctattggatactgtggttgacgatcttacagttaaagttgtgcttcctgaaggatcaaaaaatccagagcatgtagttccttttgtgacagagaaacatcttgagactagttattcataccttgacgttgttggaaggacgacggttgtactgaagaagaaaaatgttgtaggggagcacaacgttcctttccaggtgtactatgaattcaatccgatcttcatgctggcggaaccattgatgctgatatctgcagtgttgctgtttttcgttgccttcattgcgtatcttcacatggatctttccatcagaaaatcatcataggcctgttggcaattctgtccaccacagtattttttgaggcacatgttctgctaactgtgattgatgaagtaacaatccttgttctagcgcactagttgaactgtttatcagtgcaccatcctcaatggagaaggacgatgtttttttt

SEQ ID NO: 17026 - DNA, 542 bp, Zea mays
  Clone ID: LIB3067-048-E1_FLI
catcacatcaatagttctaccgtgattcgcagctgtttcttgctcatgtgcggtgggtttcttttccggacgttcatattcaggccgcttgtttcgtgccgacgccgggtccagctccggcaccgcccggctcctccgcgacgaacacgaacgactcctccgctgctcctcggccagccaagcccagcgcattcccacccccaatgtacggtggtgtcacccccggcagtctccagccacacgagtgcggcggccggtgcgcggggcggtgctcggcgacggcgtaccagaagccgtgcctcttcttctgccgcaagtgctgcgcggcgtgcctgtgcgtgccgccgggcacctacggcaacaagaacacctgcccctgctacaacaactggaagaccaagcggggaggccccaagtgcccctagtagccctccctctcggtctacttgatgagatcttctgttcaaaaaatcaaaaggaataagaatctgtttaaccatctttagatttcacaaataaaacaggtttcaatttatctttgt

SEQ ID NO: 17027 - DNA, 904 bp, Zea mays
  Clone ID: LIB3067-048-G6_FLI
atggggatgctcagactgttctgattgttaaagatacagaaggatcaatttatggtggatatgcttcacagccttgggaaaggcacagtgatttttatggtgacatgaagacattccttttcaaatgctatcctcaagcatccattttccgccctactggagcaaacaagaatttgcaatggtgtgctgtaaacttcagctctgagaacataccaaatggtattggatttggagggcagccacatcatttcggactctttttatcagcaaattttgaccaagggcactcatttacgtgtagcacatttaccagccctcccctttccaagacaaataggttcaggccagaagttattgaatgttggggtatacaaatgagaggagcacaagatgaaaaactggagttagtcaaggggacagtcctcgagagattcaaggaggaccggaacatgctgaagatggttggtttggcaaatgcaagtgattaagtgatagaggatcacaatgatgtacatgatggagagtctgtacatcacatgttcataaaaataatcaaatctgagaccatgtttctatattctactgttcatattttgcactcaaaatattcatctggtccacactttgtaacaattgaccagtcgtgaaggacagccgagccaatgttgcgtttgatctcaagaatgacgtcatccaagataagatggtctcatatgagttcatcccattaactttaatgggatgactttatcctttctgttgtactaatgtgcttgtaagatgagaaagtatctagatctttagtggttttggtgattaatgccaacacaagattattgtaactaacatgtgtgtttacaaagataaattaatgttaggtcacaatgatgaaaatgatttgggc

SEQ ID NO: 17028 - DNA, 752 bp, Zea mays
  Clone ID: LIB3067-048-H2_FLI
ctctgcaagggcttcggatcccacaccgaggaaaggagaagagagggtcggaataatggcggccgaggagggtgccgtgatcgcgtgccacaccaaggacgagttcgacgcccgcatggccaaggccaaggagcagggcaagctggtggtcatcgacttcatggccccctggtgcagtgggtgccagatgatggccccggtgtacgcggactgcgccagcaagtacccttccgcggtcttcctcgaggtcgacgtcgacgaactgctggaagtcgcgaagatctacggcgtccatgtgatgccgaccttctgcttcatcaggaacggcgagacgctcgagagctttgctaccgtcgacgaggacgagctccgggacgccgtcaggaagtacgccgccgctggcactacgacggctcctgcctcggcgtccgcctaattcaggagatgtgatgtgtagcaaatagcgcgcgcgcaccagtcgtcaataaataaataaataaataaataaataaataaataaaggccaacgtacgacgacaaattagtggcgcgcgcggtagtagctagcagagtatgcgccgccactgtgtcgatctgcagtttggtcgtttaaaagtgattgtagtgtgtactatgttcagctcgatgatctcggagtcgctatatacgctcgctcccgtgctggacgggttatcgatctgatgaacaagaatacaataatatgtatggatacttgtgacggggttccgcgg

SEQ ID NO: 17029 - DNA, 600 bp, Zea mays
  Clone ID: LIB3067-049-A10_FLI
tatggcgatggctcgtcgcggctctgggaggggccattgttggtcctcatgtactcggtcgtgatgctggttgattcaatgatgagtgcggttttctacttcacttgccggtcatcaaacttggacttcttggacgagcagggtggctcggttgaggagcttgagatgatgagggctggcagtttagatgcatttaggtgatgaagaagattggtttatttctcacgtgtgtatctgttcatagcatcataggagaataagtgagatggccatttgtcaagagccgcacagattgacaagtccttattggtggttacaagccatggtggcttatgtgtatgcatgggttgattagctgaagttggtgttgaaaggaacattttttgcagccatttggtatatccatgcttagtcaatagcggatttggatgggaaggctagagggagatctgtcatgtggtttgttctggatcagatccatgttttggcagcgattgaagagctggtgatatgtgtagcattctttcaaaatggtgtaactagtatatcaatttaatcgttgtggaattttgttgcctaatggcattttggttatactgg

SEQ ID NO: 17030 - DNA, 1245 bp, Zea mays
  Clone ID: LIB3067-049-B8_FLI
ggggcatttcccacgagcgccccccctgccctgcccatttcgctctcctccctaggcaactaaacgccgcgctcccgcagacggtaccagccgccgcgatggggtcctcgtcctcgccaccgccaccaccgccgctgccactgcccatgattgggcgggccgggaacctcaccatcttcatcacgccgccatcccccgctagcacgccccggggcgctgggcgcacgccgccgctcgagtccccgcgctcggatatctccacacccatcccgcagagggcagccccgtcgccctccctttctccctctccgcggaaccacgagagccgggccgtggcgcctgcggtggtgttcaccccgcccccgccgcctgcttctgtgaatgtcgcgctgccgccggtgcaggtgccgccgccgcagtacgagaaggcgtccgcggggggcaagcatgacgtatcggcgttcggcttcttctgggacgccgtcgcgcgcgtccaggaagcgcacgcgagcctcgacgagtacgtgtctacctggttcgggttggatcagtccaagtaccagtgggcgcttaacgactactacgagaccataggcaaggtcagcaaggaagtggattgtataaaaggtggtatgcccaaggagcctactactaaagtgcagaaactctaaaaaaacaacttcgttttgtgttgtaagatgagtagctagcagcgtatgtatggagaagtatgttacatttttgtggagccttgaattgaaaggtggtcatctctgctttgtcggcggcccaagtgtaagccctgcaccgagcgccattcatctgggacttctggaggccgggccgcgaacggtcgctgttttgttccgccgttcaggatctactgtaatcctctaagagcatctccaagagactcttcatttttttctctctatttgactatctatttacgttttcataaagattacactctatatatagtatctcagtccaacagactatctatttagtttggctagtcaggtggctagccaaatttagctagtgagagagccaatttacagagtcacatagcttgcgagtcagatagctagtctgttggagatttaatttactattgagtagcaaaaatttggcttagcaagtcatttagctagtctcttgaagatgctctaaggttatgtcaaagcacagaatcagtctaatctgcatgttgggcgttgtttactatcacgcccttgtgtt

SEQ ID NO: 17031 - DNA, 1261 bp, Zea mays
  Clone ID: LIB3067-049-D12_FLI
gtctcgtccacccgtcgtcctcctagctcctctactcgccagtcgccatgggcaagattaagatcggaatcaacggcttcggaaggatcggcaggctcgtggccagggtcgccctccagagcgaggatgtcgagctcgtcgccgtcaacgaccccttcatcaccacggactacatgacctacatgttcaagtacgacaccgtccacggccactggaagcacagcgacatcacactcaaggactccaagacccttctcttcggtgacaagccggtcaccgtctttggcatcaggaaccctgaggaaatcccgtggggtgaggctggcgctgagtatgtcgtggagtccaccggcgtcttcactgacaaggacaaggctgctgcacatctcaagggtggtgccaagaaggttgttatctctgccccaagcaaagatgcacccatgtttgttgttggtgtcaatgaggacaagtacacctcggatgttaacattgtttccaatgctagctgcaccacaaactgccttgctccccttgctaaggtcattcatgacaacttcggcattgttgagggtttgatgacaactgttcatgccatcactgccacacagaaaactgttgacggaccctcagccaaggactggagaggtggcagggctgccagctttaacatcattcctagcagcaccggtgctgccaaggctgttggtaaagttcttcctgatctgaatggcaagctcactggtatgtccttccgtgttcctactgtggatgtctcggttgttgacctcaccgtcagaatcgagaagggggcctcctatgaggatatcaagaaagctattaaggctgcttccgagggtccactcaagggtatcatgggttatgtggaagaggatctggtttctaccgacttccttggtgacagcaggtcgagcatcttcgacgccaaggccgggatcgctctgaacgaccacttcgtcaagctcgtctcgtggtacgacaacgagtggggctacagcaaccgcgtcgtcgacctgatccgccacatgttcaagacccagtaggggtttttcccccctgcttctcatggatggttgctgcttgtgtatgccgagaataaatgtggatggcgcgtgcctctgggtcgccaggttcatgctgagtctggacatgttttgcacttttgtttcccttcctgctaccatctgtgacagatccgctcgctaatatgggacctgagattagctttttgctgcttgtggtg

SEQ ID NO: 17032 - DNA, 997 bp, Zea mays
  Clone ID: LIB3067-049-D7_FLI
tcgggaacgcagaggcgggggcaacaagaaggccgggcgagaagacaagaggaagccaaaaggagaacgagttcggaagggagcggatggcaatggctctgctccagctattgctgtcgctcctcatcgtctcctgcgccgcgcagtcgccgtacgcgtcgaaggctcctccgctcagcgcctcggcgccggggggctctgtcgcgccaccgacaacggcggtctcggcgccgcaggcgtctgcacagccgccgacaacagtcgccgcgtctgggcctcaggcctcggccgtagcaccaacaaaagcagccttggcgccacaggcctctgctgcgccgccaactacagctgcctcgccgcagctggctgccacgttggccccggtttcctcaccgccactagctgctgctgcgccacctgcctccgctacccctccaaccacgccaccatcggcaacgcagcctccagtctcctccccgccgacggcaatgccaccagcggcgctccctccagcgatggctccgacgccacttctcgccgccccaccggccacggcgcccgtgtctccggctccaactccaagtgtcgccccgaccccgtcgccgacagaagcccccgccccgtcgcccacaacagaggccccggtcccgaccccgtctcccgcgctggcgccgctcagctcggtgtcggtgagcccgtctctgtcgccgggacccgctctcgcccaggatgagtcggcggcgccgggctcgcgcaccgccgtcgccgctctggtgtccttggtggcggccgggctcgtcgtcttgttttaagtagagctgcgttaaccgttacacgcccataccgttcctcgcacgcacggtcttgttctcctggttgtgtgtttatggatgcacggatcattcttgttgtacaacacgttggtaatttgtttccattcatgtatggctgacggcctgcctgcggctttcttttgcaacttgcaagcattactgtg

SEQ ID NO: 17033 - DNA, 983 bp, Zea mays
  Clone ID: LIB3067-049-D8_FLI
catcgatccaccgaggtttcttgtgcgtgccgccatggccatggcagtagctcaccttcttcctcagctctccgccgaaggcaatggagctagcaggaacagaatggccattctcttgattcttcagctttttctcttgacggcgctaggcgtggatggagcggcgtcgttcatcttcaccaacgcctgcaagcacgcggtgtgggtgggcgcgctccacggcgccagctcgccgccgctcgcgcggtcgggcttctacctggcgccgtccgccacgtccagcatggacgcgccgtcgtcggggacatggtccggcacgttgtgggcgcgcacgggctgcgtggccgaccccgccaccgggcgcttctcctgcgccacggccgactgcggcacgggcgacgtcgcgtgccagggccgcgggccggcgcctccggtctcgctcgtcgaggtcacgctcgccgcgccgggcagcggcaggccggacttctacgacgtcagcctcgtcgacggcttcaacgtgccggtgcgcgtggcgccctcgggcggcggcggcgactgccgccccgcggcttgcgcgggcgacgtaaacgccgtgtgccccggggacctccgcgtcgtcgcatcgtccggcggcggcgtcgtagcgtgcaagagcgcgtgcatcgcctacggcagcgcgcgctactgctgcaccgggcagtacggcacgccggcgatgtgcggcccgaccaactactcgcaggtgttcaagagcgcatgcccgtcggcctacagctacgcctacgacgacgccaccagcaccttcacctgctccggaccttccagctatagcgtcaccttctgccctgcgaactaatgaacgccctgatatcatatagtagctagggaattacgatattacatctagactaggtatttcttcaaaaaaaattatagagagatcaagtagaagcaatatgttgatgttgtcatccacgacacaa

SEQ ID NO: 17034 - DNA, 1158 bp, Zea mays
  Clone ID: LIB3067-049-D9_FLI
gccgcacatggggccccactctctgaaagtgacctatcctcgctggctatacgtctcccctccgcgcacaaaaaccctagcacgcaggcgcagccaggcctgcacccaaagcttccggagaattcctcccttgccccgccgtcgcatcctcttcgaagttcgaatcgaatcgcgccgcgatcacccacctcatggcggacaaggagcctgtcgtggagcggccagaggcgggtgaggaggaggaggacgcctcagccgccgccgccgcgggggaggaggaggacacgggcgcccaggtggctcccatcgtgcggcttgaggaggtagccgtcaccaccggcgaggaggacgaggacgtcctgctcgacatgaaggcgaagctgtaccgattcgacaaagacggtaaccaatggaaggaacggggcacgggcgctgtcaagcttctcaagcacaagcagaccggcaaggtccgcctagtcatgcgccaggctaaaacgcttaagatctgcgcgaaccacctcgtggcctccaccacgaagatgcaggagcatgcgggcagcgacaagtcgtgtgtttggcacgctgctgactttgccgatggcgaacttaaggaggagatgtttgccatcaggtttggttcggtagaaaactgcaagaagttcaaggagttggttgaggagatagctgagtcgcttacaaagaacgagggcaaggaaggtgaagatggtggttccacggctggattgctggcgaagctcactgtgagcgagggcaaatctgagggaagtggcaagtctgagtccactgattctggcaaagtgactgaaaccaaagccgactcagccccagctgagtagttggtgtggttgcacttgcacgcagattcgcctggtgctgaactagtttgtctgtccgcgtccagtggaagtttggtgccctttagccatggaatacgattgctatcatttgggcccgggccgagttggaggagtctcaggtgttcggtctggtttggtccgggcttgattttgctaaaaacttgggagtccatgggggttgggaacgtttgatatgtgagtcgctagtatttaactgcatggatcgttgtggattgcggtaaattcataaagtggaccctatatattttttatttcgttc

SEQ ID NO: 17035 - DNA, 451 bp, Zea mays
  Clone ID: LIB3067-049-G3_FLI
tcacgccgccactgatctgctctgttgctggtgactaggagcagtagcgagagggattctggatggccaagtcgaagaaccacacggcgcataaccagtcgttcaaggcgcacaagaacggcatcaagaagcccaagcgccaccgccagacctccaccaaggggatggacccgaagtttctgaggaacttgaggtactcaaggaagggcaacaagaagagtggcgaggctgagtccgaggagtaagatgatggtgattgagtttgtggcgacaaatgcatctcttgtatcgctaagagtcttagctgtgaacttagttctcacttctgtgtgactgtgatcaaaggacttgtgtatgatcaaaggagatccatcagttggtaccgaagtgtattttatgtcttgttggttacctggaatttaattaaaaccatcacttgtatccttttgag

SEQ ID NO: 17036 - DNA, 2008 bp, Zea mays
  Clone ID: LIB3067-049-H12_FLI
tcccatgcacgcatcggcatatatcaatggcgagctcctcctcctccgagcaccgagctcaaacacacatcaagaaagcaagaaagaaaagactgtagctagctagccaccgcgcgcgcgcacgagtagtctagctagaatacactcgcgttcaaaacaaacacacagcgtcgtgctgcgtgatctctgaccgcgtcgacaactaccgcagcaccaagcagctgatggcggccaccgtatcttcctgcctgagcctcgtccccaccgtgcaccaccgggccggcgggttccccagtgtggcactgacgaacacgcttcagcgccgtcgtcgttctcgccgctatcttgtcgtcgcctcggcgacgagagccgaacaggaggccgcccctgtgacgatcgaggacgtggacctcagctctcatcaggccgcggccgacgacggggagctcgccgcgcggtggcgggaggtccacggcagcaacaactgggagggtctgctggaccccatcgacggcgtgctcctccaggagctcatccgctacggcgagttcgcccaggccacctacgacagcttcgactacgaccgcttctccccctactgcggcagctgcaagtacccggcgaagaccttcttccacgacgtcggcctcggcggcatcggctacgaggtcacccgctacctctacgccacctgcaacgacctcaagttccccaacttcggcatcaagacggccgccaacgccaagatgtggagcgagtccggcacgttcatcgggtacgtggccgtgtccaccgacgaggagacggcgcggctcggccgccgggacatcgccgtggcgtggcgcggcaccatcacccgcctcgagtgggtggccgatctgacggccaaccagatccccctgcgcgagacgggcgtcccctgcccggaccccgacgtgaaggtggagcgagggttcgtggcgctgtacacggacaagggcaccggctgccgcttctgccggtactcggcgcgggagcaggtgctggccgaggtgcgcaagctggtggatctgtaccacgggcggggcgagcaggtgagcgtgacggtcacgggccacagcctgggcagcgcgctggcgatgctgtgcgccttcgacgtcgcggagacgcgcgcgaacgtgtcgccgggcgacagggtggcgccggtgtgcgtgttctccttcgccggcccgcgcgtcgggaacgtcgccttccggaggcggttcgagcgggagctgggcgtgcgggcgctgcgcgtcgtgaacgtgcacgacagcgtgcccaaggtgcccggcgtgttcttcaacgagtcggcgttcccggagctcgtcctgcgggcggcggacaggctgggcctcggcggcgtgtacacgcacctgggcgtgctgctgcagctggaccacaaggtgtcgccgttcctcaaggagaccctggacctctcgtgctaccacaacctggaggcgcacctgcacctgctggacggcttccgcggctccggcgcggggttcgagccccgcgggagggaccccgcgctggtgaacaagtccaccgacttcctccgggaggaccacatggtgccgcccgtgtggtaccaggcggagaacaagggcatggtgaggacggaggacggccggtgggtgctgccgccgcggcagagggtgctcgacgaccacccggaggacactgaccatcacctccagcggctcggtctcaccgcgtgaagctcagcaatactctgatagtagcgttaattagtgcgtgtggcgttcgcgtacgtgcgcggggcagtcggttactctgttgccgcgcgcggcagctcagtggcgcgttcatggcgtgcatgatgcgggtgacgtgcgggatgggcacgtcgctgcctgagaagctcgcgccgttggcgttcgtgtggctgcagaaaggtcatcttggattgtaattctctctacttatttttgtaaattgacccagaaaagctgctgcttgcagcgcc

SEQ ID NO: 17037 - DNA, 706 bp, Zea mays
  Clone ID: LIB3067-050-A3_FLI
catgaatctggaacgagaacagttgatcagaatgtttggggggagatccgcaacttcaagaagtgtctgctgaagatgtttgcacagcaggacaaggatgtgttgtttatggagactgtcataagcctggccagacaacggagacactgcatgattgagtgcattcctgtcccttgtgaagtgtcaagcaatgccccaatgtacttcaaaaaggctattgatgaagctgaagaagaatggacccaacatgagatgaagaaggttatcccgacaagtgcaagccgcaacttgaggcaagtcatcccggagaactttgcctacttccatgtggagttcgggctggaccgtggctttgttcatgtaatagatgacgagagcaagttcagtgctggatttggattgaatgtcattagagggatgctccagttgccagaggaggacatgcaccgtcgacgaaggcacgagtccatggataaccagaggcaggctgttgctagcttcatgaaagactgggagcccttcgattggacgaagcaacttgattgaatgtgaatacagttttgagaacgctcgaagaaaaacttgcacgacttgtactaaaagattttgtaggaaaacttgtattgatgttatgctatcactttattttgtttcccaacatatatgtttatttccccagaaactaacaggcgcatgttcttgctgt

SEQ ID NO: 17038 - DNA, 637 bp, Zea mays
  Clone ID: LIB3067-050-B7_FLI
gtatgattccctgaagccagtgcttcttgttggtaccctgcaggataacttcttggccagcttcttgctcgggtggggtataaccattggtgctggccttgcctcctaccccattgacactgttcgccgtcgcatgatgatgacatctggtgaggccgtcaagtacaacagctccttggacgctttcaagcagattgtcgcaaaggagggtaccaagtccctcttcaagggtgctggcgcaaacatcctccgcgctgtagctggtgctggtgtccttgctgggtacgacaagctccaggtggttgtcttcggcaagaagtacgggtctggtggtggctaaggatgtataatgatgatgacgacgaacaacaaacatgatgttttaggtgcctcctttaagtaaacatacgtacggaccctcgacaccattttaagttcgctctcgcagaggctggtgagtttgtagcgtggctgtgaccgcacctctttttatgtcagagattggaaataagtgacgttagaaattgctgtcttgctgcatcagttttttatactccgttttttgttttgcgcgtgcaaagggttgctcgaatgtatctatgtaggtttcggaatcacagcttactatgtttgatga

SEQ ID NO: 17039 - DNA, 663 bp, Zea mays
  Clone ID: LIB3067-050-C2_FLI
gccagaggcgcagaaggcagtcgcggacaggaggaagaggaagaagaagcggcagcgagcgaggatgccgtgcctgaacgtgtcgaccaacgtgaacctggagggggtggacacctccgccatcctcgccgaagcctccaagtccgtcgccaacatcatcggcaagcccgaggcctacgtgatggttgttctcaagggttcggtgcctatggcatttggaggtacccaggagccagcagcttacggtgagctggtttccatcggaggcctgaaccctgatgtgaacaagaagcttagtgctggcatcgcttctatcctggagtcaaagctgtctgttcccaagtcacgcttctacctcaagttctatgactcgaagcgctcggacttcggttggaacggctccaccttctagacttgaggtctgcagctgaaataaaagaaattcgtggaatcatggtacctaatgcccatggctattgcctattaaggacaatgtcataagatgtgtcttaatcggtgctgaactgagaaacagtaactgttgtcgtggaactggaagtggggtgctggcgtgtcagagtgcttgcttcctacctagcatagcatgcctgtgctatcttgttattggtattggcttgatatcagtctatattatcatttatt

SEQ ID NO: 17040 - DNA, 566 bp, Zea mays
  Clone ID: LIB3067-050-G4_FLI
ccccaagccaattccgggggactggaatggcgctggtgcacacaccaactacagcaccaagtcgatgaggagtgacggcgggtacgaggtgatcaagaaggcgatcggcaagctgggcctccggcaccgggagcacatcgccgcgtacggggacggcaacgagcgccgcctcaccggccgccacgagaccgccgacatcaacaccttcgtctggggcgtcgcgaaccgcggggcgtcggtgcgggtgggccgcgacaccgagaaggaaggcaaaggctacttcgaggaccggaggccggcgtccaacatggacccgtacgtggtgacctcgctgatcgcggagacaaccatgctgtgggagcccagccactccaacggcgacggcaagggcgccgcggctccttgatttgattctgcggagactgagctctgtgtgtgagccggcctgcgtagatggcaaatgggactgaccctgtcagaaacttgagatgaccataataatagctgcagtgtgctcgttctggggttggataagacccaagaactttttttagctttcttcgaac

SEQ ID NO: 17041 - DNA, 1983 bp, Zea mays
  Clone ID: LIB3067-050-G5_FLI
gaggaaggaaatgagcttcttagtgctttcaaggtcgcaaacttttccagtggcgaggatgatgcaacattctggagtaggctaatacagccagatcctgcagatattattcaggaaactttggcgcctcgtgctgcacgtaataaaaagagttatgttgaagatccccagtttgacaaaaataataacaggaaaagacgtgcagttgaagcacaagaaaagccaaggaggcgttctggcagaacagtggaaacagttaattcagtaccattggttgatggagcagtagctcaagtacgagagtggtcttttggtaatattccaaagaaggatgcttctcgttttgtacgagcggttaaaaaattttgggaatgcaacccagattgacttaattgtggatgatgttggtggtgtactagagaaggcaccacatgaagcacaaatagagctatttgatttgttgattgatggttgtcagaaagctgttaaagagaatacagatatcaagggcacagttttggattttttcggtgtagctgtgaaggcctatgaattgctagctcgtgttgaagagcttcagttgttgtcaaagcgcattgcacgatacaaagatccaatcaagcaataccgcatccaactaccttataaaaagcctcagtggtcagcaagctgtggatggactgaaactgatgatgctagattgatggttggaattcattggtatggctacgggaattgggagaaaatacgtttggatccaaagcttggcctgacaacaaaaattgcaccagcaacacttggtgagagagagacatttttaccacgtgctccaaacttggataaccgtgctagcgctctcctgcaaaaggaatatgctaagtttagcggtaatagctcaaaagtcaaaggaaatgcccgccagacagtcaataacgacagtaatagtggagctcgatcaatgagaggccgacaaaaggatgcaccagataaagaggataataagccgaacaaagatgacattcagaagcgcaaggtaatgatggaagctgaagcaagagaagaaggtgaaatttctgaatcagaggcagagacaaagtatcgtctggacaaagaggagaagtggctcgaatggtgctctgaagttttaaatgaggaacaggaaactttgaagcgcctggacaggctgcagaatacaagtgtaaacctcccaaaggaaaaggttctttcaagaatccgcaagtatctcctgataattggggacaaaattggtgaagttgtccggcaacacagtgaatcttataggcaatcccgtaagtgtagccgcacctcccgcatgaccatgaggttatggaattatgttgccaccttttcaaacatgtctggggagcaattgcatgatctctatttgaaacttagtcaagaccaactggaaggtggagttggcccatctcatggtgccaatttcacatccattccttccagcaagggaggtaactcaaatcaacttcatcctacaagaaaccataggccaaccaggtctctccagtacaattctgagtctttgcacaataatgagagctctggaagttctgaagcctggaagcgtcgacggagagcagaccctgataatcagtttgacacccagcctttgtatcaacctccaattatgacaaatggaaataggttgcaggaatctagtagttctgcaggaattcttggttggggtccagttgaaatgagacggtatggtaatgaaaggccaaagcgtggtgttcatcctagtcattttcctactgggcatggacctttgttgtagctgaaggaattagatgactcgaacaaccttgtccactttggcataactgttcccagtgaatttcagcttccatatagttacaaatggtggaactctgtcggaattgaaattcttttttccataacaagaaggaataaaaagcaagacctgacctggagcgcagtttg

SEQ ID NO: 17042 - DNA, 813 bp, Zea mays
  Clone ID: LIB3067-050-G9_FLI
caaagagcgtttttcaaaaaagtaccgacacccattgttggactcgaagttgactctaaagcgcttaaatgctgaagctcggtgcatgacaaaagcaagaaggcttggtgttcctaccccagtactttatgctgtggatccagttctgcatactttgacctttgagcatgtggatggcttgtctgtcaaggatatacttcttaggtttggttcagatggggtcaatgaggaacgcctgaatgatattgccacacaaataggaaatgccattggcaaacaacatgatggaggccttgttcatggtgatttgaccacgtcaaacatgataattaagaacagtaacaatcaattggttcttattgattttgggctgagtttcacttcgacaattcccgaggacaaagcggtggacctatatgtgctagagagagctttgatttccatgcattcgtcctgtggggatgtgatggagaaaatcctggctgcgtacagaaaggcttcgaagcaatggtgctccacccagaacaagctggctcaagtgaggcaacggggcaggaagcgcaccatggtcggatgaatggagaagaagaaaaatatgtggcatggaatggatgtatgttattagaaagaccgtcgtctaaaacgagagtgatgtaccaccattgctgtatttttttagcggtgagtggctttggctgctgtaacgtttgtgaaatctggaaatatgttgcctggctgcaccatttggtcagaactcagaagcagagtgtcgtttcatccggaagtgggagaagttttattcgtttctcatgc

SEQ ID NO: 17043 - DNA, 1170 bp, Zea mays
  Clone ID: LIB3067-051-B8_FLI
cagaaacaatgggctggaaatatcctggtattggtgagtttcagtgttatgacaggtacatgcaaaagaatctacggcaatcagcattgtcccggggtcatttgttttgggcacgtggacctgataacgctggctattataattcaagaccacatgaaactggctttttttgtgatggaggcgactatgacagctactatggacgttttttccttaactggtactctggagtcctcatggatcatgtggatcaggtgctgtcgcttgctactcttgcatttgacggagcagaaatagttgtgaaggttccatctatctactggtggtacaggactgcgagccacgccgcagagctcacagcggggttctacaacactacgaacagagacggatactctccagttttcagaatgctcaagaagcactctgtgatccttaagctcgtctgctacggacccgagtacacagttcacgagaaggacgacgacgaagcgtttgcggatccggaaggtctaacctggcaggtcatcaacgcggcgtgggatcagggactaccgctctgtatcgagagcgctcttccgtgccataatggtgaggcgtattcccgcatcctcgacacggcgaagcctagggacgatcctgatcgtcaccatgccgcgttctttgcgtaccgtcagcagcagcagcccccgctccgagaagcttgcctttcggagctctgcacttttgtaaagtgcatgcacggggaggctccccagaatggggaaggttgaatctcgttagcaactgatgcgctggctcgacaatatggaagaaaccaagtaggtgggtttcggatttgagccgcttttgaaggcgtccggcggcgagcgaacattctgatactgctaggtcctattcagttggttccttctcgtcgtcagccgtctgccctgttactcgtcggctggactgagcaggtgcgtttgcagttgcagccttaccatatagcttataactttgtggtaagttagcataccgcatgctgtaacagacaatggaggatggccgtggaaagcaacagtaatggcttgcgcttgccagcccaggggggagggcatcttaaacttaactactaaatttgtataatataataatggtattgaaatttgaatcctttgacttcctacg

SEQ ID NO: 17044 - DNA, 1165 bp, Zea mays
  Clone ID: LIB3067-051-D6_FLI
gccgagcggagtctagactcgagagcaacctcgacctcccggatctctctcccacccacgcctcgtcggcgccgtcgtctgctgcagcgatggcctcccccgacctgctcttcaatctgcggaacctcttctacctgggcgcctaccaggcagccatcaacaacagcgacgtcccgggcctcgacgccgacgccgccgctgagcgcgacgccatcgtcttccgctcctacatcgccctcggctcctaccagctggtgatcagcgagatcgactcgtcggccgctacctcgctgcaggccgtgaagctgctcgcgctgtacctcactggagacaaggaaggtgctatctccagtctcaaggaatggttgagtgattcagcaattggaagcaatcctgttctgcgattgattgctggaattatatttatgcatgagcaggactacaatgaggctctcaagcacacacactctggaggaactctggatttgcatgcattgaatgtccagatcttcatcaagatgcatcgttcagactatgctgagaagcaattgaagatcatgcaacaaattgatgaagaccatacacttacacaacttgcaaacgcatggctgggcattgctgttggcggctctaaaatccgtgaagcttatctcatattccaagactttgctgaaaagtacccaatgacagggatggttttaaacgggaaggcagtctgctgtatgcacatgggaagctttgaggaggctgagactctgttgcttgaagcgttgaacaaggacgcaaaagatcctgaaactcttgcaaatctaattgtatgtaatctccacttaggcaaaccatcatcacgatacctcagccagctgaagctatcgcatcctgaccatgtgctagttaagaatgcggcagcatcagaagcgaccttcgagagggccctccaagccgttgcttgagctcgacacaccccacccagccagattgcaggaatcagcacattctggtctcttctccaattacgagtgtattaacccggagtatggtggttttggttgcctgtatcgtcgctgttaatgcgactccgccagtcttgtactacaaactgctgtataaacggatatgtcgaatattgaatccttacttcttttgccaacaccagtattttgtt

SEQ ID NO: 17045 - DNA, 475 bp, Zea mays
  Clone ID: LIB3067-051-D8_FLI
ctcaccacggaggattgagttggtgactggttggcacctatgcaatggcccagtataaattagtggtgcagtgggctggcgatcatgctgctagcaaccgaaattgcaagacttgtatcatacataaacgctattgcttttaccgcctgacacggaagggtggtgatcatgcatcaatgctattgcttttacaacctgacacagaagggtgtcatttttttttgtaggagttgccatctgaactgtagagctccataggggataggttctgatcggaatgtgaatggcactagaaaattacttttactgtatctgcttgtgttgtcaagaaccgaatgaggtgcctggcagccttgtctgtaccctgtacactaaaatttggagaatgttccctcggcagtaatcggctggacttgtaaggtgccagtgtgtgttgagcctgcatattacggctaaattcggtgaagattatagc

SEQ ID NO: 17046 - DNA, 421 bp, Zea mays
  Clone ID: LIB3067-051-E1_FLI
gaaaccgaggcccacgtcacctggcccgaaggacacaccaatcgagctggcgcaggagaagacctacgatgaaaaggctgggatcggtatgcccgatctatagctgcggagagttcactgtaatgtgaccaggacctgacgccctgtgctgtgctgtgctgtgcttcccgcgtaataacggtgtactagttaccttctttgcagaaaatgctttctaggaatgagagcggaaatatttctaccatttatttaaggtcctgtttggaaacaacccaacagtttttaagacaccagtttttatcttttagctttgagagaccaacttcttgtttttatgaaagtgggaatcaaatttctataaactgagccataaactggtggtatctttagaaccacctcaatttttataaaccggtttgtt

SEQ ID NO: 17047 - DNA, 1303 bp, Zea mays
  Clone ID: LIB3067-051-G7_FLI
gaaggccacagcggcacagcgccagcggcaacagtcaccagaccaccactaccagtctaccacccacctgacctgagcgaccccttcgcttccactccactgaagcgggccaaaagaaggaaagaaggcgggcaagcgacaggaaggaggagaagccatggcgagcgacggcgacgggaagggccgggtcgcgacggcgccgggggcaggagggtacggctacggctacggctacgccggcttcgagggggaggaggaccggaagtggtggccgtggctggtgcccaccgtgatcgtcgcatgcatcgccgtcttcgtcgtcgagatgtacgagaacaactgccccaagaaccggagccagctcggcggcgactgcgtcgccggcttcctccgccggttctccttccagccgctccgcgagaacccgctgctcgggccgtcctcctccactttggagaaaatgggagctcttgactggaataaaattgttcatcaaaaccaagggtggcgccttattagctgcatctggctccatgctggcctaatccatttggttgtgaacatgctaagtttgttgtttattggaatccgtcttgagcagcaatttggatttgttcgcattggtgccatatacctactgtctggttttggtggcagtgttctgtctgcactcttcctacggaacaactacatctctgttggtgcttctggagctttatttggcctgcttggatccatgctttctgagctactcatgaactggactatatactccaacaaggcagcagctataataacactcctgtttataattgcactcaacttggctattgggatactacctcatgctgacaactttgctcacattggtggattcgcaacgggtttcctcttgggttttgttctgttggcaaggcctcaatttggctggatggaacaccacgagctgccgcagactaaccaacctcccaagtacaaagcgtaccagtatattttgtgggttgtggcactcgtcttgctgttagttgggtttgtgatttcacttgtgatgcttttcaaagggaagaacgggaacgacggctgccactggtgccattacctgtactgcgtgccaacatcaaagtggaagtgcaacacctagacacctcaggtttctgttacgctctggcgaaacatgtagtattcagagtcagaagaccattttttatgcgtgtttgtctgtagatataaacaagttctttgttctttactgggttgaagtttcctggtatatgtaaactgctatgttgagctttgtatgttt

SEQ ID NO: 17048 - DNA, 297 bp, Zea mays
  Clone ID: LIB3067-051-H2_FLI
gggatccggaagagatggccaagtcgaagaaccacacggcgcacaaccagtcgtacaaggcgcacaagaacggcatcaagaagcccaagcgccaccggcagacctccaccaaggggatggaccccaagttcctgaggaacctgaggtattcaaggaagggcaacaagaagagtggtgaggctgaggagtaggaaggaaagcatggttgtgttttctatgttttagctcagttgtaaggtggaactaaatggtgttatctgatggcaaggaccttttgctccgaaatgtttttatgat

SEQ ID NO: 17049 - DNA, 964 bp, Zea mays
  Clone ID: LIB3067-052-A10_FLI
cctcctctccttcgggctcagcgtgctcatcctcctctccgtgtacgagacccggttcaggacgatgaggagcgtcagtgcgtggtccagtgacggtggggattatccattgccaatgctccggaaccttgtcatggtggctgggcattcgatctatacgagctcaagatgcggggagaccgagagtgagaattcctggttcttggagccgtaccagaagcacgctggacaggcggccaccttcctggctcacatcaaggagggggtggggatcgcggcgagggatgagggggcactcctgttgttcagcggcggggagacgaggagagatgctggcccgaggagtgaggcacagagctactgggctattgccgagtcgaaaggatggttcggaaatgatgagggtgtaaggagccgagcactcaccgaggagcatgcacgagatagttttgaaaacctcctatttagtgtgtgccgtttcagagagctaactggaagatacccacagaacataactgttgttagctacgatttcaaggaggaacgttttgcacaactgcacagaaccgcactcggattcccggaaggaaggttcttcttctcaggtacaccagctacgccttccgcaagggaggctgctctgaaaggcgaagcagctgtccattctcagttccttgaagacccgtatggatgtctaggatctcttcatgtaaagaggctgaagcgggacccgttccaccgaaccattccataccctgccggttgcccagagctgaagggtctgttctcctattgtggccctgtgccttactctgggcacctcccttggactgagtagtagtgtaatgtacatcagccttggatggagctccccactgccacttcacgatgtccagcagccttgcactgaccttgttctgaattgagggagagtatatgttacactatcaacatatggattttt

SEQ ID NO: 17050 - DNA, 903 bp, Zea mays
  Clone ID: LIB3067-052-A4_FLI
aaactgaacttacgaactttatatagagctgattatactctttttccttctaacaaaatgatttataaacgaggtagtcattgcatagctgtggtaactttaatctctactaactattaagacaatagtgtagaccattttctatgcccccgcctcccgctctgcgcaagccccatatccccgcgaaagctgcaactgcctcccccgctgcgacgtgggcagggagggtcagaactttgggtggcaggtctgtgctcatgggcagacgacatcgcagcgaccgaaggttacgagtagcgagacgagaagtcgaagtccaggcatccagggcctcccttgcttccgccggcgtcgcagagcggagacacttacgcgcgctcgaggtcgtcgggatcgggatccccgcggcggctcctgcggcagccgcgacggcgagcagggccagcgccgccacgccgatccccggggcacaccgcccacgccacatcccctacgcagcccacgcgtaaccaggtctcctcgacccagatctatgccccggcccgtccttctcgcggcccacacgagccgcaaaaccaattcggtcgcaaatgaggcacggaagcagagagggacagaaggggacgtgctcacgcgtgaggaagtaggagacggcgaagatgcagagcgcccaccagacggtgcgcagttttgcctcctcgatcagatcgtcgacgctctccatcctcttccgcatctcggcctgcgcgcgcgccacggcgcggcccggcccgtgggaggcggcgagggatccggtgggaccgattaacggatgtggaatccccgtaacgagctccgccttcgccggagaagaaggccgtgccgggcagtgccggcggcgactcgcctccacggcgatttttc

SEQ ID NO: 17051 - DNA, 732 bp, Zea mays
  Clone ID: LIB3067-052-C11_FLI
ggctcgcagggtctctccccctccgctccgcatccacagccccgtcggcggccagggcccagcctctcccctccgccgccgcgccacgccgcatcccagcgcgactttcggttgccgcgggcgggggcgagcagcagctcgtcaccgcgcaggaaccggcgcacgaacctgattatggagttgtcagcattcaccatgtcgggatcctgtgcgagaatcttgagaggtcactggcgttctacaaggacctactgggtctgagggtgaatccagctcggccaaacgacaagctcccgtacaggggcgcttggctctgggtgggttctgagatgatccacctgatggagctgccgaatcctgatccgttgaccggacgccccgagcacggcggacgtgatcggcatacctgtatagcgattagagatgttctgaagctgaaagaagtttttgatgaagctggaatcagctacacactaagcaaatccgggagggcagcgatctttgcaagagacccagacgggaacgcgttggagttcacccaagtgtagcaactggaggactccttccatgctggagcatctcatggatacctagaggtcatagactttgctgcttgtatttcttgtagctgctacaaataaagacctggcagataaataccgcttgtacatatatgacatgtcgatcaaggatttgagcaagtaaaataaaggcagataaattgaacttgag

SEQ ID NO: 17052 - DNA, 364 bp, Zea mays
  Clone ID: LIB3067-052-D2_FLI
tgagatgattggaagcattgttggggtctacaacggcaagaccttcaaccaggttgagatcaagcctgagatgatcggccactaccttgctgagttctccatctcctacaagccggtcaagcacggcaggcccggtatcggtgccacccactcctcgcggtttattcctctgaaatgagctgttactcggctctttagtatcccaagagtccgttggcaatgttcattcagatttttctacttctttagtatcccaagacatttgtgttgttccattccagctcaagaattcaaagctaagcattgcacaattatgctgttttgttggaagtatttgagttaatcatatctaagctgagttgct

SEQ ID NO: 17053 - DNA, 1044 bp, Zea mays
  Clone ID: LIB3067-052-D9_FLI
gcctcaaggaaatggccttgcttttacggtatcttcccttacaataacattggtggttcacagctaatttggattgcaccgagtggtggtagagatcgcccaaatccttcaacaggagagtggtacccgggcaggcgccttttgattcatccacagtggacaatatgaggaggcttctggagcatgctggtgttcctgggcacatatatccactattattactgtgctacgaggttatgcctccaccacaacaggtcgagaaagagattggtgaacagagggtgatatccttccatggagtaggcttgtcagcaactgaagaaacaaagtatggggatattacttgtcataccaagaatgctgatgagggaagggagctattcacaaatactttgtacaactcagttgttaatcagtacaatgtcctcaaatctgctatctttagagatcgtggagcagctgtatcaaacaatgccatctcactgtcacaaccatggcgatgaatgttagctttcccagtccagattcgatactgaagttaccttttcagaagaacaggtgaactgcaattgtgcaaattttctgggaaaaactcttgaagtttaatctttctgatatcactggactttaccaatcatggtggagcttattactctaatgcagatcctcgttaagatgtctggctggtcaagggtgattcgtgattctgcagatagggatcctcgtaacattgcatgccgtcgtccgcaaattactgctccctcaggttgttcagtaatgtgctggttgggcactgaggaatccatcaggttgcatccttttgtctagacgtcgatttgtgttgttgaagtggtaaacattttcatcctgggctgtatcgtcatcatgtatagataggctcgagtctctctctttttttttggctccacaattttttggagatataaaagcggcaggagttatgacatgcccacagtcggccctccttgtagaaatcctttggatgtaacctgtctctttcttatacatactgaaagtcaaggc

SEQ ID NO: 17054 - DNA, 2201 bp, Zea mays
  Clone ID: LIB3067-052-F2_FLI
ctgtcttggttgcgcaagcaccaagcaggtggaagatgatggaggtggcgggggctcaggcccgcgcggttcccctcctgctccgcaacaccgcctccctgcggacctccgtctccgtctcctgcacgggctcccgccggagctgggtggcggcggccacggcggagggggacgagacccgcggcttcgacaaggtgcccatggacacccccggcgcgtaccgcctggtagaccgggacaccggccgcagcgtcatcgtgtggggcggcaccgacgacagcgacgaggcctccatgccgtccccggcggtgctctcccggaccaccgaccgccgccacagccaaggtgttgggggaggtacaggtatcgggaatttcggcaggttcaaggcacagaaaataaaatccttggtcacgaggtcagctcaccgcaagagggagagttctaatcgctcaagcactgcctggtctgatgaatcttctttcaatggctctgatgatgaagaggaaagctattttgagagaagaaagcatgtctcagactctgaacgccacccgaagatgagcagtggctccagagatggaagaactcgaagtgcacattctctgagttctgttttgagccaatacagaggcgatgatgatacagacttccctggttcagaggctacttctggttccaaacgatggggtaatgttgccgatgttacttatggacggcagaatcagaagcaaagggagcctctgaatttccctcaaagaaaagggcctcttgacggcggatttttcagtcgcagatctttcaaggagattggctgcaacgatgaaatgctaggtgcgttgagaaattttgatttccctcgtccgtctcatatccaggctatagcatatgggcctatcttagaggggaggagttgtgttgttgctgatcaaagtgggtctggcaagacactggcatatctttgccctataatacaaaacttaaggaacgaagaagttcaagggctccataaatcatcccctaggaaccccagggtgatagtattgacccctactgctgaacttgcttctcaggtccttaacaactgccggttgatatcaaaatctggggttccatttaggtctatggttgcaaccggaggatttcgacaaaagactcagttagagagccttgaccaagagctcgatgtaattatagcaacacctggccgtttcttgtatctgcttcaagaaggctttgtgcaactagctaacctcagatgtgttgtgttggatgaagtggacattttatttggtgaagaaggtttcgagcaagtgcttcatcagttgatcaccgaggcaccagtgacaacgcagtatcttttcgtgactgccactcttcctcttgacatctataacaaggtcgttgaaacctttcctgactgtgaggtgatcatgggacccggtgtccaccgaacaagctctcgccttgaagagatccttgtggactgcagcggagatgacaacgaagaaaagaatccagaaaccgccttttcgaacaagaaaacagcgcttttgaagattatcgaggagtctcctgtccgcaaaacaattgttttctgcaacaaggtaagtcccttccctaacaccccctgtgcacactgatgacaggcagacagagaaatcacactgccccctgatgattttatttccttgctagattgagacatgtagaaaagttgagaatgcgctgaggcgggtggacaggaaggcctcgcagatcaaagttctccccttccatgctgcgctggatcaggcccagcgcatcgcaaacatcaaggagttcctgaacaagcaaacggctgactccatgttccttgtgtgcacagataggtcagcagcattggctagaccgcatccccgccaatccatataagctttattttgttttttttttcttcagcgctgatgctaccatttgagtttgacgacggtcggtgcagggcgtcgcggggcatcgactttgcgaacgtgaaccacgtggtgctcttcgactacccccgcgacccgagcgacccgtgcgtctagagaccctggagggggaggtgtctgatgcgtgcaattgctgcctaaactctaagcatgttttttgtttcggaacgttgtgggtcatctatcctatccctcgcttgactcttctcggaaaaggttctcgttcccatg

SEQ ID NO: 17055 - DNA, 426 bp, Zea mays
  Clone ID: LIB3067-052-G7_FLI
gaagatcacgagaaggatgtcctattagttggtgatgacccatgggaggacttcgtgaactgcgtgcggtgcatcaggattctttcgccgcaggaagagaggcaaatgaggctggccagcgactacggagacagctttgttggcaaccaagcgtgcagcagctcggacggaggtcgcccgtggagggtcaccggcgactagaaatagcaggcgatgtctgagcacaaatgtttggtataatccgtccaacgatagcaagaaaatgatacgcgatttctgagcacaaacttttgcactcagatgatcgtgcaaacaattagcattttaagaaaaatgttgcagttcaatgtaactgcaggaatgtctctgatgtagcctcttcgatgtggcagccttaacaatcgatgtgctacagttactctgcct

SEQ ID NO: 17056 - DNA, 552 bp, Zea mays
  Clone ID: LIB3067-053-A11_FLI
ccgccttgcatcgacattgctagagttgcgattcctgaggccatggagcagcagacaatatctattgccaaagctgccattacaataatactcattttagggacttcatttcttgcagctgccaatccaattgcaagatgctatgacgctcttaagatcagttctcatattctataagcatttatctcgagtcagcaattaggaactgtgatggtttttaggtcaccgggaaggttgttgagaagatcttggactgggagagaagtgcacagaagcaagttaaaatcctgttgaagcccgctcatgtcatcctgcaacgtctattcaattttttcttattccattttgtgacgttatgactaagcatgccaactggcatccttagcccacttcttatcgagcttgggtgcataccacatgtatttaggttgccttgatttcatgttattttttttcatattttgcagttcattttccaatgctatcgagcagaattgtatcgtttcaaacatctgtcatcttgatgctaatgtaatcacgaagcatttggct

SEQ ID NO: 17057 - DNA, 736 bp, Zea mays
  Clone ID: LIB3067-053-B11_FLI
ccagtcaccaccactgccgcgaccgagagagtcagagagagcaggcggcggcaatggctggcgctggggacgagtactactacggcgggccgggccagcgcggcgcgccccacggcctgctgctggcggtggtggtgggcctcgtggtggcgggcccgctgttcctgggcggcggcggcgaggcgctgacggaagccgtggcggagctgctgagcccggtggggctcctcctcctccccgtgtgcctgctgttcctcatccgcctcctctcgtccgaccgcggcgccgcggcgctcgccgacgccttcgccttcggcgggtcccccgacgccgtccaccgcgtgggagggtccccggtcggcgtcgcgttcttgctcctcctcatcctcgcgctgctctactaccgatcctcgctcttcggcggcgacggcggcgacgacgagtaggataggagagctggcggttgcgatctctggctgtctgttgggttggtttctgtaatgcgaggtctgcgaggggcgtctgtgcaaaagtgcgtgtgtaaaatcgagcggaggcggttaatctgttgtttacttggtcggtttgtgacgctgaagcttctgtgcgtgtgttgcgtcgggccatgtgcgtgcgctgtgctcttccccagaaccacgtgtacacgctgtactatcaccccactgacccagaacgccaatgcgtgccagtgaattccacgtttaacttttacaat

SEQ ID NO: 17058 - DNA, 809 bp, Zea mays
  Clone ID: LIB3067-053-C7_FLI
gaaaaaaaatgcaggtgagggagttaaccaatttcgtaacaaacgggaaagtagagcgctataccgcagaagccctccttgcgctgcaagaggcagcagaattccacttgatagaactgtttgaaatggcgaatctgtgtgccatccatgccaagcgtgtcacaatcatgcaaaaggacatacaacttgcaaggcgtatcggaggaaggcgttgggcatgatatataatatccattctgattgcatcattcttgtgaatttgtttgtaggagctagacattagtgttgttgaatgctgcatggttcctaatccttttcgcagtctaacatctgtggagttagtatgttacatggcaacagctgaacatctgtggactataactatatggcaacagccgaagattgtgtctgtgggataactggttgttttggttgctcttcagtagtttgtttgcttcagtctgcagtatatggactatggagtaaactgcatgctgaaacccgaaccactgctgaaacggcagttgccaggatagcaggagggccctttatgcacagtggaattgagtagagaactgagtaaaccatggttctttctccttttgaactggaacacaaacacagttggatcttgtttctcttcttaggccattgtcatcgtgtttcttaggggtgtaaatggtatctgtccgtattcgaatttgatctatctaagaaggctgaaatccgatccatattcgagtccacgtattcagtacccgacctgtatctgaattatattcatacccatatactcaaagttggatatt

SEQ ID NO: 17059 - DNA, 747 bp, Zea mays
  Clone ID: LIB3067-053-H7_FLI
caaccgcatcgcttccctcccggcacaagaagaagattcggttgggttgtttgtctcttgcaaactgcaatggctgctgctgccactgctattgctactccgtccgtggcgccggaggccggcgaccggaaggcggtggcaccgccagtcgacgcggtggatctggagctggagctggagctggaggagaagcacgtgctggcggtggacgacagctccgtggaccgcgcggtgatcgccaagatcctgcgcagctccaagtacagagtgacgaccgtggattcggcgacgcgcgcgctggagctgctggcgctggggctggtccccgacgtgaacatgatcatcacggactactggatgcccgggatgaccgggtacgagctgctgaagcacgtctcccgcctctgcagccggatccggtgaccgcccgcgcaaggatggaggatctggttgcgcgctctgacttaattagaggagttgttaggatccaattttttgtgtgttcgttcgttcgttcgttcttttctttctttcttcttggacatagatctgctgccgccgctgctgccgtcgactgaaacaagaagctaacttagttttagggtccaggttgttgttgttgttgttaggaaggcgagtcgttgggggcattcacggatgttcttcctcgtttcccctccctccgtgcctgaggctgcaaaaatatgccccccagacatgaaaaaaaacaagacctgttaacacttc

SEQ ID NO: 17060 - DNA, 523 bp, Zea mays
  Clone ID: LIB3067-054-C7_FLI
aaaatgttgtggaagcagtcaaagatgtgtctcgaaatgccagtaaagcaaaagacataatcgatcaatgcgataattccgaggggcagccggctgcagaggaggggcggccggcggcgtgctgcagaggaggggcggccggctgtagaggaggggcggccagcggcgtgctacagaggaggggcggccggctgtagaggaggggcggccagctctgtgctgcagaggaggggcggcttcaggtaagttagggtttaggttttgtaatgggcctttggactggttggaccgaactggggacaagtcggccgacttgctagccctagtcgacttagatatttcagtcgtgggcaagtcgagcgacttgctagaaaagtcgagtcggtcccccaagtcggcctctcaagaccgactggacgactagtcgacgacttgaaaacagggatattagtatcagtgtgcctcatgcaaaaatatatcatatgagtatagaatgagattgaaacttctttttttgcggttg

SEQ ID NO: 17061 - DNA, 488 bp, Zea mays
  Clone ID: LIB3067-054-D11_FLI
caaggaatgagaggagggcaatgacgagggccaggagaggcggccattgaagaaccagttggttctcttggctcaatgtcgcgtctgtcgcatctattcatgtataatccagaaatggaggatggcaatgacgaggactcaggagaggaggcggccattgaagaaccagttggttctcttggcgcaatggcgcctctattcatgtatgatcaagaaatggaggacaacgaggaggatcaggcacactagatgcagattgcaccagctgcagcgaagcctttgttttgtgttgctggggcggctctatttatgtaatgtggaatggagggattgcgcaagcttaaaagtatggctggatcggccttgttttttaactggttctctagttactgccatctaatagccaacatttttcccgcttttgtaaatccgtgcagttgtttgtttcaaaggaaaatgcaataaggatatgcagaactatattcctt

SEQ ID NO: 17062 - DNA, 1078 bp, Zea mays
  Clone ID: LIB3067-054-E3_FLI
agctagatcattggacacatatcgaaacagctctagctagcgcgctcgtcgtctaacctggcttccggcatggcttccaagcagatcggagtcttgacctgcttcattgccatcaccgctctcgccttccgtccctgcgcatccgccgtgcccatggacggtggctggtcgaacggcggcgccacctggtacggcccagccaagggcgctggatccgacggtggtgcgtgtgggtaccagggtgccgtcgaccagcctccgttctcgtcaatgatcaccgccggcagccaatccatcttccaggacggcaagggctgcggcacctgctaccaggtgaagtgcaccggacacgcgtcgtgctccggcagcccggtgacagtggtcatcaccgacctgtgccccggcgctgcgtgccaggtggagcccgtgcactttgacctgagcgggacggcgttcggtgccatggcgaagcccggccaggccgaccagctccggaacgccggccgcctgcaagtccagtacattcgggtggcgtgcaactggaacggcttggacatcgccttcagggtggacgccggctcaaacgccaactacctggccatggccatcgagtacgagtccggggacggggacctgcgcgccgtggaactgaagcagagcggcgcggcggcgtgggcgcccatgcaacgctcctggggcgctgtgtggcagtacaagtccggctccaccaatctgcaggcccccctgtctgtccgcctcacctcgggctccggcagggtcctcgtcgccagcaacgtcatccccgccggatggcagcccggcagaacctaccgctccgtcgtcaacttcggaggaaaccatgcataacgagtgatattaaggatgtcgtgtgcagatgtctccatccaacaataagatgcatgcatatatgatctgtgtggccagctagctgctagaccaccatctcactccctgagtctgctgatgctcagccaataaagaatcattccatctcgatcggaaattcaacatatataataatgcaagcaccggaaataaaattctactgtgttctgtg

SEQ ID NO: 17063 - DNA, 640 bp, Zea mays
  Clone ID: LIB3067-054-E9_FLI
gggggacttcgggaagctgacggactgcatggactacgcgacggggcacgcggcgtcgccctcgtccacctgctgcggcgacgccggcgacacggagaaggcgcgccccgagtgcctctgctacatcatccagcagacgcacacggggcgcaaccaggtgcagtcgctcgggctgcgcttcgaccgactcatggcgctccccgccgcctgcaacctccccaactccaacgtctcgctctgcatcaccctgctgaacctgaagccaggctctgcggactacgccctcttcgccaacgcctccaagatcacgccgtcagccggcggcaaccctgcgagcgacagcgccgcgggcagcggcgtcaagttccgggctggggtcagcggcggcgtcgcgctcgccgtggtctccgcgatcgcctcgtcactcttctgatggaccgacctcctctcaaaggagcagcggcggttttttttaccctcctgtggattcgttctcgtgctgcgttccgctagcccatgtctactctgtactatctcataaaaaaaaatagatccagctgagacgttgttccctccctccttccctgtaccgtgtttcatgatgacttgtgacaatggatggtttctccttgtgcgtcgc

SEQ ID NO: 17064 - DNA, 1841 bp, Zea mays
  Clone ID: LIB3067-054-F10_FLI
gcgcggcgtgctctccgttcgaaccgatgcccatctgctgaatcggatcggatcgtgcgatcggccgccacgccacggcccgcgggtgaggcgtggtctccgggaggcagccaacctatcccacccggtctagcctctagcgatcccggcgccggcagcgcgcacgagaggaatggacgcgtcgcacccggagggcgaggccacggcggggtggctgacggtcgaggagtggagcggctcgtcagcctccgcgctctcccgcaccgccgtcctcaccgcctccgcctcctctctcaccgcacacaggttcggcagccggtgggagcggatcgggagccgcatgctcggcgccttcgtgcctgagggctttcctgggagcgtgactccggattatgtcccgttccagatgtgggatacgttgcagggtctctccacatacatccgtgcaatgttgtctacacaagctcttctaggggcaatcggagtgggggaacagtccgcaactgtcataggtgctacttttcagtggtttctgagggacttgacaggaatgcttggagggatattgttcaccttttaccagggatctaatcttgatagcaatgctaaaatgtggcgtctagttgcagactttatgaatgaccttggaatgttgatggatcttttgagccctctgtttccttcatcgttgatagttataatgtgcttaggcagcctgtctaggtcattcactggtgttgctagtggagcaactagagcagcactaacgcagcattttgcacttgcaaataatgcagctgatatttctgcaaaggagggcagtcaggaaacacttgctacaatgttagggatggggttggggatgctgttagctcaaattaccagagggcatgctttgagtgtatgggcatcttttctttctcttacgatgttccatatgtatgcaaattacaaggcagtgcagtcactttcactcactacgctaaactatgagagagcttccatcttgctacaatacttcaaggaatgtggtgaagttcttgtgccacggaaggtttcccagcaggaacatattcttccttcttggtcaaactggaggaaactgaacagaattaaactgccacatgagcgtgtgcacttgggtgctaaagcctcgatgcttacacacagtgacatgttggtgattgcaaaaacaagataccactatgaaaacgcgaactactttttgctggataaacaaggcatcgtttacgttttcatccacaaggaggcaacaccagccgatgttttaaggtccttcgtacacgggctcgtgctagctagctcgacacagaacagcaaacctcagcacttagaggcccgtcgatggatggacgagatgtataccagttttatctcgaagctgcagactgaaggttactcgacggaacgccttctgtcgcattcgattctttggagggcacactggcttcacggccagctggatgagaagctcaagtaggaggaacactgcaagaccgcgtctgcttatccaaggacaggtcacaggtatatcgcccaggacgcgattattagctagggtgagaacgtgttaattgttcgcttgtgcatggcatgactgcatgatgaaagatagatgcatgagctgcaccgagcaccaccaaatatagttaaccgcttcgaggttctagcatatggacggacttcacgataaaagtgctggcctgtacgctcgagttcagcatgttaatggttcacactacgtccatccgcgccgccttagggcatgtacagtgatgtttaatgtggagtctcttaaggtgtttaagggagttatttgc

SEQ ID NO: 17065 - DNA, 639 bp, Zea mays
  Clone ID: LIB3067-054-F9_FLI
tctgcccttgccgccgccaccgcaaccgcccgatccaggtccgcagactgctcactcctcctctccgctccgaatggcccgcacgaagcagacggcgcgcaagtcgaccggcggcaaggcgccgcggaagcagctggccaccaaggcggcgcgcaagtcggccccggccacgggcggcgtgaagaagccgcaccgcttccgccccggcaccgtcgcgctccgcgagatccgcaagtaccagaagagcacggagctgctcatccgcaagctccccttccagcgcctcgtccgcgagatcgcacaggacttcaagacggacctgcggttccagtcctcggccgtggcggcgctgcaggaggccgcggaggcgtacctggtggggctcttcgaggacaccaacctctgcgccatccacgccaagagggtcaccatcatgcccaaggacatccagctcgcccgccgcatcaggggcgagagggcttgagctgtcgcgctgctgctgttcgtcgttgtaacgtctgaagtagatgatggtgggtgctttctatgccgtgcctatttggctatttcggacgtgttgtcctcactgaatggaaaatggaatgcgattgctcgtctgaaattaacgaatgacttttt

SEQ ID NO: 17066 - DNA, 2876 bp, Zea mays
  Clone ID: LIB3067-054-G8_FLI
cattgagcgtctcatcgtcttcgccttcgcttaatcggatttattagggatcatcagggatgagagccgggggctgcacggtgcagcaggcgctgtcgccggaggccgcggtggtggtgaagcaggccgtgagcctggcgcggcgccgcgggaacgcgcaggtgacgccgctgcacgtggccagcgccatgctgcagcagcaggcgccgacggggctgctgcgcgccgcgtgcctgcagtcgcactcgcacccgctgcagtgcaaggccctggagctctgcttcaacgtcgcgctcaaccgcctgccggcctcggcctcgccgctcctcggcggccacggccacgtctactacccgccgtcgctctccaacgcgctcgtcgccgcattcaagcgcgcgcaggcgcaccagcgccggggctccgtcgacacgcagcagcagcagcagccgcccgtgctcgccgtcaagatcgagctggagcagctcgtcatctccatcctcgatgaccccagcgtcagccgcgtcatgcgcgaggccggcttctccagcacccatgtcaaggccaacgtcgagcaggcagtctcttccatcgaggcaaacaacaactcggcctccgccgccgcaaccaaaaaccctaaccctagcgcatctccacccgaagagacgaccaagcctggcaagctgctggtgctacccctcgatcaagcgcgcgacgaggacgtcgccgtcgtcctggactgcctggcgtcccgaagcaagaagcgcgtcatggtcgtcgccgagtgcgcggcctcggccgaggcgccggtgcgggcggcggtcgagaggatcaagcgcggcgaggccctgcgcggcgcgcaggtggtcagcgtcagcgtgtccaggttccgcgacctgccgagggacgaggcggagagggtgctcgtggagctccggtgcgcggtgaaggcgggcggcagggcgggcggcgtggtgctggtcgtggaggacctcgggtgggcggccgagttctgggccgggcgcggagagtccgggagggccaggtggccgtctgcctgctgctactactgcgccgtcgagcacgccgtcgccgaggtgcgcgccctggcgtgccgcggcggcgacggcgtctggctcgttggatacgggacgtaccagagctacatgaggtgcagggccgggcagccctcgctggagactctctggggcctccagacgctcgccgtccccgctggcagcctcgccttcagcctcaacttcgtcggcgacagtgcaactgcaatgacaatcaatcaccagtcgatcagctgcaagatggcaaagtgcgacgacgacagaagtgggaacgggtcggcggcgccacgttgcctgtcgcttttggacgccggcggttccggccgcttgacgggcgccgtttcgagcttctgcgccgccgactgctccgcaaccaagtgcgacgcgacggtgaagtcgagtatccccccttggcttcagcattgccgggatcatcaggagccttcccgttgtaagaaaagctcgacatgcggtggctcgccgtctcatcatcaccggacggccctaaacttctccacggtggtgtcgccgtcctcctccacggtctcgtcgtacgagcagcactaccacctgcggcaccagtcgtaccagccatggcttctcgtggctgacggcgcccgcgaggccgagcacccgtgtaacaaggccaggtgctctgccgccgtccagctacacgtcgtggacgacgaggacgggaagcctctaagcgcgataaaggtcaagtcccacgactcgagcgcgtccaatggctccgtggagtgccgctcgcggttcaaggagctgagcgccgagaacctgaaggtcctctgctccgcgctcgagaaagaggtgccgtggcaggcggagatcgtgcctgagatcgcgagcacggtcctgcagtgccgttccggcatggcgaggaggcgcgaagccgctgtttcgagctcgagaccgtcgtcaacacaggcgtgtgccaaggaggacacgtggatgctcttccacggtggcgacgccgagggcaaggcgagggtggccagggagctggcccgcctcgtcttcggctcgcgcaagagcttcgtatccatcggcggcagccgcaccaccgcgtcgtctccggcttgttggtccgacggctcttccgagcagcagcgcaagcggcctcggttgacggaggcgagcaaccacggctgtcgtcacgagagcctctacgaggccgtacgcgacaacccgcaccgcgtcatcctggtacaggacgtcgagcagggtggctgctggcggtgccagagggacattttggaggccatccaaagcggcttggtccggagccgtgccggcgacgacgacgcagcactcggcgacgccatcgtcgttctgagctgccagagccttgacgcgtggtcgacaaccacctcgccactaacgaccaagaaggcgaaggcggagagcaaggaggagccggaagaggaagagagcgcaggtgaccaccgccgcaaagaagccataactgctgccgctgcgtcgccgtcatcttcactttgctttgatctgaacatggacgttgagaaccacgacacggagagttgcttcacagatgctagtctgctcaaggcagtggatcgaacgttcttcttcagacgacctgatgagagtagcgattagcttagtgacaaatgacctatctctcttttgttcttctctgtaacgttggtcagtttcttgtagtttgtttctaagatgtttgtgttggaggaatggagcgtgcatgtggtactcttctggattgaacctgcgtggaaattaattaaaggcaagtttggatgagct

SEQ ID NO: 17067 - DNA, 1398 bp, Zea mays
  Clone ID: LIB3067-054-H6_FLI
gctccctcgccgacaaacagggccgcaagagggcctgcgtcacctattgcatcagctacatcctcagctgcatcaccaagcactcccccgagtacagggtcctcatgatcggccgcatcctcgggggcatcgccacctcgctgctcttctccgccttcgagtcctggctcgtcgccgagcacaacaagagaggctttgacccgcagtggctgtccataacattctccaaagccatcttccttgggaacggcttaattgccattgtatctgggctatttgcgaaccttcttgctgagaacttgggttttggtcctgtggctccatttgatgcggctgcgtgctttctggcgattggcatggctatcataatgtcctcatggagtgaaaactacggagatccatctgaaagcaaggacctgatggcccagttcaaggttgcggctaaggcaattgcgtcagatgaaaagattgcattactgggagccatacagtcattgtttgagggctccatgtacacatttgtcttcctatggactccagcattgagtccaaatgaagaagacattcctcatggttttatttttgctacattcatgctgtcatccatgctgggtagctccatcgcgtcacgtctattagcccgaaagctcaaggttgaaggctatatgcagatcgtgttctcgatatcggctgtcacccttgtcctccctgtcgccaccaacatcttagtgccaacgtcttctgtgaaaggaggcagcttatcaattggaggttctcttcagcttcttggtttctgcacctttgaggcatgtgttggcatattctggccgtcaatcatgaagatgagatctcagtacattcctgaggaagcgagaagcacaatcatgaacttcttccgcataccactcaacttatttgtttgtgtggtgctttacaacgtgaatgcattccctatcactgtcatgtttgggatgtgttctatcttcctcttcatggcagcaatcttgcagagacggctgatggttgtctctgatctagtacacaaatcatcaactaaagcacaagaaatgatcggggaagatgagccactaaatccttagatgtcgacagaaccatacatgcgcaatcagatattgaagacgacgtccatactgcatttcgtttcgtcacctgtgcaataagatggacgtcaaaaccatgtaatagagtctagtggctttcgtttctgtagtgtagatttgaccaggctgctaagtttgcacctgtgccgagaagattagatgagcaagtcaatcgatattggttattcgcattgttgtttctttttttaaaaaaaaaatgttcgctttaaagtttaaacgatacggtatatatccttgtaagtgttgcattgctgcc

SEQ ID NO: 17068 - DNA, 1006 bp, Zea mays
  Clone ID: LIB3067-055-C3_FLI
gtcaagagccagctgcgccaagagttccaagttgctgctcagaactgctgggtgaagaagggaggtgcattcactggtgaaattagtgctgaaatgctcgtcaaccttggcgttccctgggtcattcttggacactctgaaaggagagctctgctgggagaatcaaatgagtttgttggagacaaggttgcttttgctctgtctcagggactaaaggtcattgcatgtgttggtgagacccttgaggagagggaggctggttcaaccatggatgttgttgctgcacaaacaaaagcaattgctgagaagatcaaggactggagcaacgttgttcttgcctatgaaccagtctgggctattggaactggcaaagtcgccaccccagctcaggctcaggaagtgcacgcctccctgagggattgggtaaagatcaatgtcagccctgaggtctctgaatctacaaggatcatctatggaggttcagtaactgctgcgaactgcaaagagctggcagcacagcctgatgtcgatggtttccttgtgggcggtgcttctttgaagcccgagttcatcgacatcatcaacgccgccgccgtgtgaagtccgctgaagatgttccaacccttcaccctgttgcggtgatgtgctgaagacagatcagactatttttttgtttaaccgtgcagtgctatgtaagctactaactttgcgctggtgcggatgctgatttccctccccctagctttttgtgaggctactctacagcttgattcagcttgctaataatgtttgcctctggacatagcgatagtggtgtttgtgtagccttttttttgtgtgtgtgaattacgatggatccgtcttcgcccgacgcccttttgtgacactagtctacagcgtctacacaaatttgtgagactagtttgggcattttggttttttaggatatggtagcctttgttgtgcccacagccccacattggtcgaatgctgccaagattgtact

SEQ ID NO: 17069 - DNA, 365 bp, Zea mays
  Clone ID: LIB3067-055-H12_FLI
tatcaacgtgcccattgtgccgcgctctaatcaccatgcgtgtgaggctctactcctaagtcggttggtgtctggagggatgggaccaaacagaaaggagcaagaactttggggcgcaaggactgcgctacgatcttgagatatggtccatatggatgtcatgataacgatgcatgtacagaaaccttgtccgtgcctattcagtaatgtcgttgatgagtatcttccatcaatcacatgtaaaatttctaatgttatcttgtattagtagcaggggattgcttgttgagtggaataccaccagttgttcagcaacagatagtaaactccatgtgcatttggaagtcacttttgtgatttgtgtc

SEQ ID NO: 17070 - DNA, 888 bp, Zea mays
  Clone ID: LIB3067-056-A9_FLI
gtggggaagacggtggggctctacttctcggctaaccattgcgcgccgtgtatcaagttcacgacgaagctggcggccatctacagcagcctcaggggcaaggcggaggacttcgagatcgtgtacgtccccatggacagggaggaggacgggtacctgcgctcctgcggcgacatgccgtggctggcgctcccctacgacggcgcgccgtcgcgcgcgctggcgaggtacttcgacgtgcgggagatcccgacgctggtggtggtggggcccgacggcaggacggtgacgcgggacggccggaacctggtgaacctctacttcgacatggccttcccgttcacggacgcgcagatcaggctgctgcaggaggcggaggacgaggcggccaaggagtacccgcggtcgctgcgccaccggggccaccgccacgagctcagcatcgtgtcggagaagtccgggggagggccctacatctgctgcgagtgcgaggagcagggactcggctgggcgtaccagtgcatcgcctgcggctacgagatacacctcaggtgcggccagaatgcggagggcggcagcgcaggaactgcttagctagctaggcgacggcagcataacagcatcactggagtactggtgtctacctactagactgctgcatgcgtattggacttgtgcatggtctgtgtttgatcccaacaaacgtcagcttgctaagtctgatgctaaagtagtcaaatagatagatgagaaatgcatggccttccttgtaaggcttagtaggtggttagatgagtgaacaacaaaatgaagctgcagcaatcaatctactgtggcaggtgttatgcaaatcttgctgcactgcccaaccaaactactgcattttcc

SEQ ID NO: 17071 - DNA, 1591 bp, Zea mays
  Clone ID: LIB3067-056-C8_FLI
cttccccagcgcagcccctcccccctgtagcctgtatccgccccccacactctgcgtctgcagtcttctttctcgcgtcggcagtcagcttggcagggccgaaccaatggcggtcgacccgcggcaggtggtggcgggcttcctcaccctctccatgttcgtcatgctcggcaacatgatcaagcacgaccacttctctcccgtcgccgaggagctgggcttggaggcaacaggtgtggtgtcgaacacaaggaagcttgacaacaatgctgaaatgagcagcgtcgatacggctggagtggaggacctgatggacgctgtcgaggaagttaaaccttgctggaccaaaccaagttcaaaaaaaatcagccgtctaatggttttgttacattctccttgactatgggccctgagtatcacatctctcagatcacagatgctgtggttattgcaaggtatctaggtgcaacacttgtactcccagacatcagaggaaatgaattaggaaataagcgaaaattccaagacatgtacaatgtggataagttcgtgaggagcctggatggtgttgtcgaagtaatagaggatatacctgatgaagtgagtgctaagaagccagcagtcatcagagtaccgaaccgtgtgactgaaagcttcatcacaggcaccatccagcccatcttccaaaaaaacaagtacttaagactagcggtcattttctcttccgtaagtttaaggccaaaggagacgaacaacaaggacatggacacaactgcttgccttgcgatgttcggtggcctcgagctgaagcacgaatattctgaggtggccagaaaaatgctggataggcttcaagaattaagcaagaagtcagatgggaaggtcttggcgatcgatttgcggaccgacttgctggaacagaagagttgcaagacaacccgcggcgctcgaagaaaaggctgctatagccctgatgaggtcctggctttcctgaggagtgttggcttctctgctaacacaaccatctacttgacagagacttcgtggcacaaaggcctggatgttctgaaggaagaattcccaaacacttggtataagggtgacattatgccagccgagaacaaagctgaattcctgaaatccagcaatgcagacctagcaagggctctggaccttgagatctgttcgcagagcgacgtgttcgtccctgccgtcgctggcctgttctacgggcatgtcacgggtaagaggatcgcgtccggacgcacccagatccttgtgccttcccagtccagcacctcgacacatgcttcagacttcatctccacctacatctccaacaagaaccaccttgcctacgcgtgctactgctaagcatccttttgtacggccgttaataagatcagctgaagggaaagtgctctgggtgcatatacaagtacctctcgtggacatgaatgatgttgtacactagctaatgttttgttatgaggaatattagcatacgactgtgtgttggttacttgtttggatattaaactctgaaacagcagcaaggagcatatactgcacgttcctgttggcgcgcacc

SEQ ID NO: 17072 - DNA, 938 bp, Zea mays
  Clone ID: LIB3067-056-D2_FLI
gcggacgaccacgaccaccaccaccttctcctcccgccgtccggcaagggcgcgccacgggcgcggccggtgccgctcgagaccatccagtcgttcaggggcccgcatgcgtccaccgacgacgaagaggaggaagacgacgacgacgaagacgcgtacgaggtggagcgggagctgcgcttcggccagttcagctttgccggcggcgcctactcgcaggagcacccgctgttcctggccaggggcctcggcatcgaccgcctcggctcgggcctcctcagcaccgacggcggcggcggcggcggcgccgggttcggcggcagcgacggcagcgggagcggcggcggcgggaatttggtgacgtcggggaacggaggggaccgctccggcatcgagacgcactacaagaagatgatcgaggaggacccctgcaacggcctcttcctcaggaactacgcacagttcctgtaccaggtgaaaggggactacaggagggcagacgagtactactcccgcgcgatcctcgccgaccccgacgacggcgagctcctgtcggagtacgccaagctggtctgggaggtgcaccgcgacgaggagcgcgcctccagctacttcgagcgggcggccaaggcgtccccgcagaacagccacgtgctcgccgcgcacgccgcgttcctgtgggacacggacgacgaggagggcggcgccgacgcgctcagctacgcggccttcgctcagccggcgcactcgtctctggcttcggcgacggcaacaacctgaactctctcgccatctcacgagtctcgagagcggttcctccgcagtcgaaatggagcgtgacagtggcctctgctcgtctctgtctgtagtagcataccaataatactactcgcgaactctctttctgagcaaacagattccatagcgccgtgtagccc

SEQ ID NO: 17073 - DNA, 719 bp, Zea mays
  Clone ID: LIB3067-056-E8_FLI
ctctagaaccttccgagaatccgagttccttctgcgtcccttcacccttctcgttgcgctcaccacaggcaattcgaccgttcacagagaattgaatcatggaaggagggggtagcaacacgcccttctaccgcggcaacagcaccgcactcgccaccaacccttctgctgctgctgctgctgctgctgcgaatggggcacagaaaggggacagggaggctgccatcgatgccgagatagtgagggttaacgacctaccagctcatagttcctacgccatacaccgcatgaaggtgctaaacaaacttcgtcatctgctgtccatcaagaggactacatctcaagatgaggagctcgaacttctcttcgcaagcctttcaatctaaagtgtatccttgataagccagtattttaaccctgctaggggagcccactcttctgcctatctctactgttatgtcgttacctctcatagcatgcttccttatagtttcgaagtgcaaggagatcccgttacttgtctgtatcataactcataaattgttcgaaactttgattgaggatgtggcgtgctctgctcctctaaacctggacgatgtggaatggtgggaaaaccccccctactattgtgttgtttgtgaatgtaccgttgtaaccacaagtgaacttgctgtctcggacaagaattattagctaaataaccatggtactgtttgttg

SEQ ID NO: 17074 - DNA, 651 bp, Zea mays
  Clone ID: LIB3067-056-F12_FLI
caatctctagcagcagatcctcgtgcgaagcaaagcgctagcccccttcgtactgtcccgatggcccgcacgaagcagacggcgaggaagtccactggcggcaaggcgccaaggaagcagctggccaccaaggcggcgcgcaagtctgccccggcgaccggcggagtgaagaagccccaccgtttccgccccggcaccgtcgcgctccgggagatccgcaagtaccagaagagcacggagctgctgatccgcaagctgccgttccagcgcctggtgcgtgagatcgcccaggacttcaagaccgacctccgcttccagagctccgccgtcgccgcgctgcaggaggcgtccgaggcctacctcgtcgggctcttcgaggacaccaacctctgcgccattcacgccaagcgcgtcaccatcatgcccaaggacatccagctcgcccgccgtatccgtggggagagggcctaggcgtcgtcccggtggaggtggaagtagtagtggccgtttctgtcatcactgtctggctagaaggtgtagagatgtgccgggttctgtagtttgggttatcggtcaaatcatgatgtagttgggtctaccctgctgtaatttaactatgactatgcaatggcaatgaagttctcggttatc

SEQ ID NO: 17075 - DNA, 553 bp, Zea mays
  Clone ID: LIB3067-056-G3_FLI
gacgcggcccggttcacacggcggcagcgggacgcgatcgctaagctgtggaactcgatcaaggagcagcagatccggcggaagcaaggcaagtcggtgagcgggaagctggacgtgaacgccttcgagtacctccaggagaagtactcccgcgagaagatgagcatccggcacagcgtgggcggcggcggcgatcgtcgcgcgacgcagtggctgggctaggccgtgcgtgtgtgtgatggtttgtgcctttggcttcatcagcgacacggcgtgggagttgtttgtgcttggtttttcgtagaggagaggagagagttgacatgatcttccccgtagcatgtgatgggtggctcttggtgtaacgttacgtactagctgcactgaactcgttgcatgtctttatcagtgctggaactggaagcagcagctgaaactgctgacaacgacatggcagtgcagcacagtgcggctgttgggggcaaaatgctttgtttatgccggcacccggcagcacatactactagagtagcagcagtctatcaccaccctt

SEQ ID NO: 17076 - DNA, 1019 bp, Zea mays
  Clone ID: LIB3067-056-G8_FLI
aagaaaaaagatgatgaacttatgaagaggataaagcaggatccttatactgagtatgctgtaatagaatgctacgatacattattagatatcctttacagcattattgttgtacaaagtgataagaaagttgttgatagaatacgtgaaagcatcaaagatagcatccaccggaaatcactcgtgaaagaattccgattggatgaacttcctcaactaagtgctaagtttgataagttgctaaatctactgaaggaatatgatgagaacgatcctgtaaatagaaacacacatattgccaatctgttgcaggatataatggaaatcatcacacaggatattatgaaaaatggaaaaggtatcttgaaggacgagggccaaaaacaacaactgtttgcaaaattaaatctggattcattgaagcatgttgcttggagggagaagtgcattaggcttcaattgttgttgacaacaaaggaatctgccatatatgtaccaacgaacttggaagctcggcgtaggatcaccttttttgcaaactcactttttatgagaatgccaagggcaccacctgtccgtagcatgatgtccttcagtgttttaactccatacttcaaagaggaggtgctcttttcaccagaagatcttcataggaaaaatgaggatggtatatcaatactgttctacctacggaaaatatatccagatgaatttaggaacttccttcagcggatagattttgaagtgaaggatgaagaagaacttaaagataagatggatgagatctgtaattgggcgtcttataggggtcaaactctcaccagaacagtaagaggaatgatgtactacagaaaggcacttgaaatccaatgccttcaagatatgacagatcctgctaaagttgaccgagacagatcaataggatcctaccaagagttgcaatatgatattgaaatggcacaagctattgctgatatcaaattcacttatgttgtctcatgtcaagtttatggcatgcc

SEQ ID NO: 17077 - DNA, 1306 bp, Zea mays
  Clone ID: LIB3067-057-G2_FLI
caaacgccggcggagtcgtcagtcgtgcgtgcccgtcccgttctgcccccacctcccctcccccgactccctcactcttcctcttccgttccatttcaagatccctgcagccgtccgtccatccatccatccatccatccgttaagaggagaggggaagccggccggccggccggccggtggagcggagatgagggggcagacagagacaggccggtggcgaggaggcgacggcgctgcggcgtggtgggtggccgtggtggccctgcagctgggccattcactgagccgcgcgcgggcggggctgctggagtccaacccgggcctggcctacaacttctaccagagcagctgccccagcgcggagtccatcgtccgcagcgtcacctgggcgcaggtcgccgccgaccccgcgctcccggcccgcctcctccgcctccacttccatgactgcttcgtcaagggctgcgacgcgtcgatcctgctggacaacgcgcagagcgagaagacggcggcgccgaacctgtcggtgggcgggtacgaggcgatcgactccatcaaggcgcaggtggagaaggcgtgcccgggggtggtgtcgtgcgcggacatcgtggcgctggcggcgcgcgacgcggtgtcgtaccagttcggggcgtcgttgtggcaggtggagacggggcggcgggacggcgccgccccgtcgctggcgtccgacgcggcggggccgggggcgctgccgtcgcccttcgcggggctcggcggcctgctggcgggcttcgccaggcgcgggctcaacctgacggacctggtggcgctgtcgggggcgcacaccatcggcgtggccagctgctccagcgtcaccccgcgcctgtaccaggggaacgccaccagcgtcgacccgctgctggactccgcctacgcccgcgcgctcatgtcctcgtgccccaacccgtcgcctgcgtccgccaccgtgggcctggacggcggctcgccggccaggttcgacagcgggttctacgcccgggtgcggcggggccagggcacgctggcctccgacgccgcgctggcgcagaacgccgccgccgcgcaggtgatggacgacctcgccacccccgccagcttctacgccgccttctccatgtccatgaagaagatgggccgcgtcgacgtgctcaccggcaccaacggccagatcaggaagcagtgccgccaggtcaacacatcctgattgccttgcctgatgcctccctcccattcatcatcatgcgtcgattcggcgcgcatcaatatatttcttcgtcccgcgc

SEQ ID NO: 17078 - DNA, 573 bp, Zea mays
  Clone ID: LIB3067-058-B10_FLI
gctgattccttggaagctaaggagctcaagaagcattgtgaggatttagctattcgcaacctcgattacattttcacagtgggagcttcttcaattatgaatgcttcttctgaaattcttgtgaacttagagaaattgctagatgagaaatcctcagagccttggagtcagcaccgtcttcccacaatgacagctacctatcctgctgtcattgacagtgatgtagaggaagatgaagcaagagaattccccaagacccgtaaatgtgggaaatctgcatcaaggccatctgcgatgtctagtgatgacagcttccttcagaaagactgcaccgctgaacaagccgtctctaagcagatcagagcacttcgcaagaagctgcaacagattgagattctcgaggctaaacaacttgcaggtcatcagcttgacagtcagcaggtagcgaagctcgagtctagggctgcccttgaaggtgaacttgctgaacttggcattccctcagagatatactcaacttcctctgcttgtccagcagaaggtaggacaaacagaaaacctgaggtttctaag

SEQ ID NO: 17079 - DNA, 492 bp, Zea mays
  Clone ID: LIB3067-058-C5_FLI
catccaccacgcaccccaccaacccatacccataccagaggctctctgattttacttctcagcggtagatcggctgagcgagcgagcgagcgaggcacacggagctagctaaacagagcacacggatagaaaagcaagatgtcggacggcacggcgacctgcatcgacatcatcctcgccattatcctgccgccgctcggggtcttcttcaagttcggctgcggggttgagttctggatctgccttatcctcaccttcttcggctacctccccggcatcatctacgccgtctgggccatcaccaagtagccggccggtgcgttagcatgcaatgcgcgcgcagggtgatctcgtggcgggggacgcggtgtgcgcgtgtcttgagatgtgattccttccttccttgtttagttgctgctgctcctgctggtgtagtactggtgtatccagtccttttaatttcttgattagtttgctcggctgaagaaatca

SEQ ID NO: 17080 - DNA, 902 bp, Zea mays
  Clone ID: LIB3067-058-C7_FLI
atgaagggaagccattgcctctaattcagaaagcttttattggtctgactgctggagcaattggtgcttgttttggtagtcctgctgatctggcactcattagaatgcaagccgactcgaccctgccagctgcacaacgacgcaactataagaatgctttccatgcactctaccgtatcagtgctgatgagggagtccttgcgctttggaagggtgcaggtccaactgtggtgagagctatggcactcaatatgggtatgcttgcttcctatgaccagagtgtcgagctatttagggacaaatttggcgcaggagaaatttctactgttgttggagccagcgctgtttctggattcttcgcctcagcatgcagtttgccctttgactatgtgaagacacagattcagaagatgcaacctgatgctaatggcaagtacccatacacagggtctttggactgtgctgtgaagaccttcaagagcggtggcccattcaagttctacactggtttcccggtgtactgcgtcaggattgcaccccatgtcatgatgacctggatattcttgaatcagatccagaagtttgagaagaagatcggcatataggattcccatcggacggatacagggttgaccgttctatgctattactgctggactctgtaataacattccagctgctttcgcaccatggtagttggttttggtagagacaagtctgttacaatttttttaccttagctttccaattattgtgtcgcaataatcgaattaattgttgctgggggattttttttggggggtgggtgggtggacatgcatttgttggctgggatgtagccatgaggagagggggatactacctagttatgccattgaatggaattggaccatattttatac

SEQ ID NO: 17081 - DNA, 688 bp, Zea mays
  Clone ID: LIB3067-058-D4_FLI
ccatgcgtccgaacaaggaaccaccatttttgatgcaaaggtaagcatctgcattttactcgagttacatgtcactgctaccccttaatcccggggtgcctttgatttgcgacatccaggagcagatgcgacaggatcacaagtaggaggagctgcgacgatgctgtagcgagagacatgggtgccgaggtcgttgtgctgcggtggtggcaggacaggaaggaaacgaaaaagcaggagccagggttgttcaacaacgtgaccgagtcgctgaggcgaggaagagtaaggtgaaggcactcgtcgacgcctttgagactgacagagcgtcatctcgctgcaggaaaccagcaagcctgctgctgctccagctatgaaagtaggtgtcgtgccatgagtgcttcttgacctgcagtgtgcatgatcacctttcttggaattttaaactttttttggttgttagtgaccgtaaaagtggcgcttgttgaggtttgctcgttcccatgtaaactgacttttctcatgggagttttcatacttttgtagtgctagaaaaaggaaagtctgtacaggttttgtgtctatgcaaggcttgagaagttggcattgtactgataagtgataagtaaacaagttattgtaatgatttaaactagattgttttgaaaggaaatggaatgcataaagc

SEQ ID NO: 17082 - DNA, 466 bp, Zea mays
  Clone ID: LIB3067-058-D8_FLI
catgcctcagggtgttgtgctgccgcctcgcccgcacagccaacgggcttgccgtcgcgcgatggagctttgttggtcgcagtcgttccacgccaagattgcgatccgtttctgagcttcgagggatcaaagatcaagcgttggcgaccaagtgatccagttcttcgagttccacgagattaaagaccctaagcatctctttggtgaaggttgcctttggtgcaatctatgctcaggtaaagaaggaggcgtcgaggtggttctccaggagttccaggacttcgacgagttcgaggattaggctagcgacctcccccagtcagctgcttgtggtgggtttatttacgttggctacgtttctattctgtgtactttgattatattatgtaaatgactctagtctttcatattattacttactctttattgttattcgaagcattgtgctatgatgtgtcttttatgt

SEQ ID NO: 17083 - DNA, 789 bp, Zea mays
  Clone ID: LIB3067-058-E10_FLI
tgacttcattcccagcggccggcggcgacctccacgtggtgccattcgccggcaacgagcacccgcccaccaggatccaggtttgtgctgcgagagcgcctatccattcaccatgattaatttcgtgctcctgatcagccgccagggcaaggtgaggctcaccaagtggtattctccttacacccagaaagagaggaccaaggtcattcgcgaactcagtggactcattcttacacgagggcccaaactctgcaattttgttgagtggagaggttacaaggtcgtataccggaggtatgctagcctgtatttctgcatgtgcattgatgccgaggacaatgagcttgaagtccttgagatcatccatcatttcgtcgagatactggaccgctattttggcagtgtatgtgagttggatttgatattcaattttcataaggcctactacatactggatgagattctcatcgctggtgaacttcaagaatctagcaagaagaatgttgcaagacttattgctgcacaggattcattggtcgaagctgctaaagaggaagccagctccataagtaacattattgctcaggctacaaaatgaagttcttcatgcctgccccccttccctctatcttgttattgttgtacaagcaactgtaatgcactggactgcgagttcatttgctctgctcatgtttatggatttcaagactccaggttatttagaatgagcgtgatgtgtaactacattgcatgtgttcccgttgcaagtaaaatcatgatttccaggat

SEQ ID NO: 17084 - DNA, 665 bp, Zea mays
  Clone ID: LIB3067-058-E12_FLI
ggaaaactctggatattcaagtatttacattcagcgatctggagacaaacgagatggctgtggtatattctataaacctaaaagtgcagaactggtgcagaaagaagtaatactgtacaatgatttagtagaaaaatatgttcctagtgataatgtaaatagtgctctggaaaataattcttcagcagaagaagacaagaatgcaaagccagataatagcaagcgtggagatccaaatgatccacgcgttagattgaagcgggactgtgttggtttactcgcggctttcaagcttagtgatccttgtgatcaaattttgattgtggcaaacacacatatttattgggacccacaatggatcgatgtaaagttggctcaggcaaaatatcttctttcgagagtatctcagtttgagcaactcatctcaaataaatataattgtaaaccttcagtgatcattgctggtgacttcaattcgacacctggtgacaaggtatgccttgcatttatttcattgcttcctgaagcttattgacttgtaagaacatcatttcgtgctttagctattatttctatctattgtaatacaaagtatagttagaaccatcgtagagatgattctgtgaggtcatttttaatataaaaatcccattattgggtgtatt

SEQ ID NO: 17085 - DNA, 760 bp, Zea mays
  Clone ID: LIB3067-058-F3_FLI
gtcgacgcgtgcgcaaccgcatcgcttccctcccggcacaagaagaagattcggttgggttgtttgtctcttgcaaactgcaatggctgctgctgccactgctattgctactccgtccgtggcgccggaggccggcgaccggaaggcggtggcaccgccagtcgacgcggtggatctggagctggagctggagctggaggagaagcacgtgctggcggtggacgacagctccgtggaccgcgcggtgatcgccaagatcctgcgcagctccaagtacagagtgacgaccgtggattcggcgacgcgcgcgctggagctgctggcgctggggctggtccccgacgtgaacatgatcatcacggactactggatgcccgggatgaccgggtacgagctgctgaagcacgtctcccgcctctgcagccggatccggtgaccgcccgcgcaaggatggaggatctggttgcgcgctctgacttaattagaggagttgttaggatccaattttttgtgtgttcgttcgttcgttcgttcttttctttctttcttcttggacatagatctgctgccgccgctgctgccgtcgactgaaacaagaagctaacttagttttagggtccaggttgttgttgttgttgttaggaaggcgagtcgttgggggcattcacggatgttcttcctcgtttcccctccctccgtgcctgaggctgcaaaaatatgccccccagacatgaaaaaaaacaagacctgttaacacttc

SEQ ID NO: 17086 - DNA, 837 bp, Zea mays
  Clone ID: LIB3067-058-H9_FLI
tgggaaaatgtggccagatgcttctgatactgatgcttcctctcactataagcttccgttctcaagaactgtctacattgagaaaactgattttcgccttaaggactcaaaagactactatgggctggcccctggtaaatctgtcatgctaaggtatgcgttccccataaaatgcacagacgttatctatggtgatactcctgatgatattgttgaaattcgagcagaatatgatcctttgaagacttctaaacttaagggtgttctgcactgggttgctgagccagcacctggtgtcgaaccattgaaggtggaagtaagactattcgagaaattgttcatgtcagagaatcctgctgaattggaggattggcttggtgatcttaacccgcactcgaaagaggtgataaaggacgcttatgctgtaccatcgcttgccactgcagttctgggcgacaagttccagtttgagcggcttggttacttcgccgtggacacggactccactcctgagaagctcgtgttcaacagaactgtcaccctccgtgattcattcggtaaagctggaccaaagtgacttccagtgtaatgtaggtagggcgtgggtgctcggttgcataggcgcacctgagctatacttttttttgaagaagaaaatgatcttgtaatacagaacagcctaaaggcctcagtctttgtaaaatttacatgtgactgcagtgcagcttgtttgcttcgaaggaatcagattttgtatggtagtgttagtgcgccggttcccagtctggtttgatgatgtcaagagctactcatgctatcataatcgaagttctgttt

SEQ ID NO: 17087 - DNA, 780 bp, Zea mays
  Clone ID: LIB3067-059-A11_FLI
atagagcacacagtcgagtgtaaaccatccaaccaatcatggcttcgagttccaggagctcccgaaacctgaggtgccgcacccagtgccggagctgaccaagcccgaggtgccaccgcacccgacagccgtccctaagctcccgaaacctgaggtgccgcatccagtgccggagctgcgcaagcccgagctgacaccgcacccggcggccgtgcccgagctgccgaagcctgaggtgccgcacccaatgccagagctgcccaagcccgaggtgccaccgcacccgacagccgtcccggagctcccgaaacctgaggtgccgcacccagtgccggagctgcccaagcccgaactgcctcctcacccggccgtcccagagcttccaaagcctgaggtgcctcaccaagtcgcgccagagctgccaaagcctgaactccctcctcacccaaccgtgccaaagctgccgcacccagaggttccggaggtgccaaaccacgagctgccgcctctaccgaaagctgagctgccaccgaagccggagggccactacccggagccggaggcgaaaccatgagcggacgtacagtccgagactcggttatctgcacattttcccgcatgcatacgtacgtgtctgttgtatagtagctatatatgatttgtgatgttgtgttcttccgtacgagtcagagagcttacatatgatataagctagtagtacctatcagtttggatccatatgtatatctgaatgaataaagaattctagttgttatattt

SEQ ID NO: 17088 - DNA, 373 bp, Zea mays
  Clone ID: LIB3067-060-A11_FLI
gtgatttttgggcattgtactacaaatttgaacttcagcatggaaatgtggacacacagaaggatgttctgaaaagatgtgttgcagcagaaccaaagcatggtgaaaaatggcaagcaatatccaagtctgttgaaaactcacacctgcctgttgaggctcttctaaagaaagctgttgtggtgcttgatgtagaagaaaatgccaatctggcaggagcctagactcactctttttacaaggtgtttggtgaatgtgttttgtactaccatccttaatttctgttcacttcaatatgaggtactttaccttttaatatttcatctttattgttgagttaatatttgatcatcagtacttgaacttgcatagc

SEQ ID NO: 17089 - DNA, 650 bp, Zea mays
  Clone ID: LIB3067-060-C4_FLI
gtagaatgacgatgaggggtctctctgttgcggtcgctctggtcgtggtggtggccgcggcctgccttgccgcgccgcggggcgcggacggcgcgggcgagtgcggtgcgacgccgccggacacggtggcgctgaggctggcgccgtgcgcgtcggcggcggaggaccccggctccgcgccgtccggctcctgctgcagcgcggtgcacgccatcgggaagcagagccccaggtgcctctgcgccgtcatgctgtccaacaccgccaggagcgccgggatcaaggccgaggtcgccatcaccatccccaaacgctgcaacctcgccgaccgccccgttggctacaagtgcggagattacaccctgccatgagcggcggtgagttctccaggccggatttgctgcatggcatgcccgagtatcaccgaagcgcgagctcttgtgtcgtgtgtccgtgtctgtcagtcagtctctatgtgttgcccataataaacaaagacatgcgagtaccagacatgtgcaactctagtagtatggtgcgtgttatcactaggcacgcgtactcgtatagttgtgttcagttctgggtctatagagatatgtagccctgcattgtcgaaataaatactgtgtccactcgttcgtgaaatg

SEQ ID NO: 17090 - DNA, 642 bp, Zea mays
  Clone ID: LIB3067-060-D11_FLI
tcttgaccagttcttacctaacgtgactagggcccatggctctttttgcttggtaatgtcactagggtatagtttctttagctcggcgctgcacatcatgtgagtagtaccttccaccatgcgcatttactctgctgtctatctgctgctggtttccttgtgcagttaaaccggtaaagggtgatgccctgctgttcttcagcctccatcctgatgcaacgacagactctgacagcttgcacggtagctgccccgtaatcgaaggccagaagtggtccgcaactaaatggatccatgtgaggtcatttgacctccctgtgaagcagccgggttcctctgacggatgcgaggacgacaatatcctctgcccccagtgggcagctgtgggtgagtgtgccaagaaccctaactacatggtggggaccaaggaagctcctggcttctgccggaagagctgcaaagtatgcgcagagtaaggtagtagcctgctgtctgatatgtgtcatggcgtgttgcgtagtagtctgctgtttggataccgactggagtatagcatgtatgaagtagaacccggaagaaggaatcgtacgagagccgagttatctgataacttgtctcttgtgggaaatgaaagcgttcctt

SEQ ID NO: 17091 - DNA, 762 bp, Zea mays
  Clone ID: LIB3067-060-F3_FLI
gctgcgatacagcgatgagcgccgtgttcagccagtaccaggagatcgacatctacaacatctacgcgcccagatgcaacctccctccgtcgtcagctgcacttgcacttgctgttgacaaggcagtcgtagccaacagacaggaacatttcaggcgaaggatcaggatgttctccggatatgacccgtgctactcttcgaacgcggaaaagtacttcaacgatgcaggtgtgcagacggcattccatgcgaatgccagtggagctcggaaatgggaagtttgcagtgattcaattttgaggtcatacaatttctcggtgctttctgtcttaccaatctactctaagctcatcaaagcaggactgagagtgtggctctacagtggggatgcagatggtagggtcccggtgatcggatcgcggtattgcgtggaagccctgggcctgcctgtcaagacgcagtggcaaccatggtacctgaacaaacaggttgcgggcagatttgtggagtaccatggcatgacgatggtgacgatcagaggagcagggcatttggtgcctctcaacaaacctgcagaagggctcgcactcatcgacacattccttcagggcaaacagcttcccacacacagatgacaagagtacttagggttgtgattgtgatgagggttattgttttcaaaaaaaaaatcaaggattggacaaactatgtgccccacacacacgggctaatcagtaaggatttcatttccagtttctgcat

SEQ ID NO: 17092 - DNA, 633 bp, Zea mays
  Clone ID: LIB3067-060-H11_FLI
ctttcaaggtgctaccatgtgctggactggcactacttgttcatccttcaacatctcataacattgtgaaccggatctcctgggcgttctgtgtttatttggaagctgtttcagtgctgccacaattacgcttgatgcaaaatactaagatagttgaaccgtttacagctcactatgtatttgcattgggggttgcaaggtttcttagctgcgcccactgggttctacaggttttggatacgcgtggccgtctgctgacagctcttggctatggtctgtggccgtctatggtgctgttttcagaaatcgtgcagacattcatccttgcagatttctgctactactatgtgaagagcctggttggtgggcagctggtgctacggcttccctcaggggtggtgtaagagaagtgcaagctgcagcagaacacaaaactttagtgcttcaccggttcatatgtactttgagtagtgcccaacctgggagccttttttagttgatgttacgagttatgactatatgtatggcaaaattgctgcaagggtcctcttaaaagatactaggttgacactgagactgtttatagctgcgcttttctggatacccaatctttgggtacttggcttctgccgt

SEQ ID NO: 17093 - DNA, 779 bp, Zea mays
  Clone ID: LIB3068-001-A10_FLI
cttcgagttctccacctcctcatgcatctacaagacgctggagcgataccgcagctgcagctttgcatccgaagcatcagctccactagaggctgaattaaataattatcaggagtacttgaagttaaagacaagagttgagttcttacaaacaactcagagaaatctacttggtgaggacttgggtccacttagcgtgaaggagttagagcaacttgagaaccaaattgagatatctctcaagcaaatccgatcatcaaagaaccagcagatgctcgaccagctctttgatctcaagcgcaaggaacaacaactgcaagatgctaacaaagatttaagaatgaagatagaagaaactagtgaagaaaatgtgctgcgactgtctagccaggatattgggtgtagtggatctagtgggcatggtgatgaagccaaccaagaacaccttcaacttgctcttgatccttcgctgcatatagggtatcaagcttacatggaccacctgaacaatgattaagttgcttctttgtgcgctgtgtgctctagtggccatggatcttctatatatgttggacgtaatgcttttgataaatcctctatatataaccatatcggtcctagctttatgcatgctactgtatgtactaaactaagaagccctacgacttctgttgaggaagaatgttctgacgatcatgactttttcttgctaaataataactactgtatctcattttgaattgatcgtctaatgaagagccatgcttttgtgagtactt

SEQ ID NO: 17094 - DNA, 989 bp, Zea mays
  Clone ID: LIB3068-001-D6_FLI
cagatggtctccgggagcacttgctggacgtggacggcggcggagcggcggcggtgcccaagatacgggtgcgcgggctgcggcgccgcgcggacgcgaccggcgaggagatcctccgcggcgtccacctcgacgtgccgcgcggggccgtcatgggcgtcatcggccccagcggcagcggcaagtccacgctgctccgcgcgctcaaccgcctctgggagcccgcgcccggcgccgtgctcctcgacggcgccgacatctgcgccctcgacgtcctcgccctgcgccgcaaggtcggcatgctcttccagctccccgccatgttcgacggaaccgtggctgacaacgtacgatacgggccgcagttgcgcggcaagaagctaaccgaggccgaagtgaagagcctgctgcacctggccgacctggaccctgctctgtgctccaagccggcgtccgagctgtcggtcgggcaggcacagcgcgtcgccctggcccggaccctcgccaacgaccccgaggtgctcctgctggacgagccgaccagcgcgctggaccccatctcgacgcagaacatcgaggaggccatcgtgcggctgaagaagacgagggggctcaccacggtgatcgtctcccacagcgtgaagcagatccagcgcatcgccgacctggtgtgcctcgtcgtcgccggcgaggtcgtggaggtgctcgcgccgtccgacctgtccgacgccaagcacccgatggccaggcgtttcttggagctcagcggctaaaagcccgcctgctcgctgcttcgttggatttcgaaactcttccacctactcggatgctttcgagctgttctggatgcatggaaaggatcggacgtggttatctttccaatcgcctatcatgttctctacttttgttctcgtgtatacatacaatctgttaaagtagcttctcacagctagaaagtgtttgcaatacaaacacgttcttggcggatt

SEQ ID NO: 17095 - DNA, 889 bp, Zea mays
  Clone ID: LIB3068-001-F4_FLI
acttctacgagaacggcctcacgggcacggatgacgaggcgttcgagcagtctttcaccgatatctacacggcgaagagcctgcagaagccgtggtacctggtgctgggaaaccatgactacaggggtgacgcgctcgcgcagctgagcccggtcctgcggaagatcgacagccggttcatctgcatgaaatccttcgtcgtcaacgcagaaatcgtggagttcttcttcgttgacaccaccacgtttcaactcaagtactggactcaccctaaggatgatcactacgactggagaggggtggcgcctcgggaaaaatacataaacaatctgctcaaggatttggacggggccatcaagagatcgactgcggcgtggaaggttgccgtgggccaccataccatgaggagtgtcagtgatcatggtgacaccaaggagctactgcagctactgcttccagtcctccaggccaacggcgtcgatttctacatcaacgggcatgaccactgcctggaacacatcagcagcaaagacagcccaatccagtacttcacaagcggaggcggttccaaggcatggagaggagtgcagaaccccaccgaagatgacctcaagttcttctacgacgggcaaggattcatgtccctccagctagaccgtagccaagccaagttcaccttttacgacgtcgacgggaaggcgctgtacagttacacacggtcgagcctgatggaaacaggccaccacctccaagcctccggctacgtcaacgaggaatgaagcaggggcgagtcagcatgcagcgctggagaactgagatcgatatatgcagttcaagcgtaaaaatagtgcaaatattcattatcaagcatctctcgatattttgatat

SEQ ID NO: 17096 - DNA, 488 bp, Zea mays
  Clone ID: LIB3068-002-B9_FLI
ccatggattgcttcttgtgccccatgtcctgctgcgacgacctcctcgtcctccacggcgccggcggacaggccggcaccggcagctgctgcggctccacggccagcgacgagtacgggtccagcgaggaggacggcgccacgtggggcagcctgtggaacctcgacggcgccggggaggtgtgcacgctgtggtagagatcgattcgctaacctgccgctgccggccgtactgcagcggcaagccgcgcgcatgccgttctgcttgaggggagggaacagccgaacaggtgatcgtcgtcgtcgtcgtcgtgtggtgctggtggataaggacggaacggaacaactgctaccgcgtacgttcactttgcagccgcatcactgcatcagcagctataccgcgcgccgcctgagccgaggacacgtgtgtcgttaagctccggtgaaccgaacttttttgtgcatggaaaacaaacaagtttttccgct

SEQ ID NO: 17097 - DNA, 810 bp, Zea mays
  Clone ID: LIB3068-002-F12_FLI
gttcatcaaacattatgatgagcatgctctgcggactccttcaaacccattcctgctctgtgtgaggtgctccattgaactgcttgatcacccaaaagattacacgacacctccagaagaacttgtacttctaccagcaagtgctaccctaggtgacctgaaagtacaggcttcaaaggctttccaagaaacgtacctgatgttccaaagcttccagactgaacagctccctgactttccaaacttcagtgatacaacccccgtgaagcatgtgcttggatcaggccagttgcttcgagtaaggggacgttgcactggggattacaggagaattgtacagttcaggatggagaggggtttggagaactggacggtggactgctcatgtggggccaaggatgatgatggggaacggatgctagcttgtgacatatgtggagtctggcagcataccaggtgctcgggaataagtgattttgaggaagtccctgaaaatttcatctgcagaaagtgtgctagtccacgcaagggagacggacgtgggggtggaggtagcaacggtggtggaacaatggaggttactgcgtctgggaggtgcaaggatgaaattggagcatcagttggtggagcaggcaagtatgggcgcatggcaacagttggatgactgtacataatgtagtgaaacgtaaatagtgagatggagagtagtaaggtgcacctaaaggcttttgtggaccttgagtggtgttaaatggatcttgtcgctgaccactgatgtgatgttaatctgttctccttgcagttgcaccc

SEQ ID NO: 17098 - DNA, 1061 bp, Zea mays
  Clone ID: LIB3068-003-G6_FLI
agtaaatacccatcgggtatcgggtcgcgggtacccattgccatctctatttgtaaacattcactgaatgttcaaggaaaaaatcactgatggacgtattaatgcattttactcatctaaatgttacaggaatatatgccttatcttgtactagttcgtatctcatgcataaacttgaacagaaaattgtgaaattgccttctttaaaagttaggactgtatgtgtgtatgtttctgaaaaaaaggatctattatgcaggctgtctacaatctgcttacagcttatacacatttagaatagaaagcatagcccatgggaaacctgcttcagtggatgaactgcaatttcatggtgtccataatccagattttctaagaaaggttataaccagagaagcctccaggagcatcagagaagtccaaagttggaaaaatagattgtactccgaggaaggtccttctcatgttcaaagtagtggattacactcacctagtgcaaaggtcagagcttccccaatctgtgctgcctttgattctaagggtaaaatttctgacaatatattgctccataagattgaagaacttaatcgatcagtgaagaatcttgagtctctactcgtaagatcacatagaagagaatgatctgatattatatcatctttgaaaattagctcaaattaaacatggaaagaacaggaggaacaagtggagtatatgaactctgtttttctatttagtccttcagatcatataccatgggaaattgcaaagctgctcatgccgtgaaggagcttctagtttgattcaagtttcacaagttatctgttgtacataggtcttgctgattcttccaagtttcacaatttgatgtacaaagaatcacagaatcagtggacagtggtctagggtcacaaagtagatcaacgtacatgtaagcttgtttactgtataaattctaaaatggtaatctgtgccaatacgtgtactgtaatgggcttaggctcagcccatatatgtttatagctatcaatacaacattctaatcctagttagggttttct

SEQ ID NO: 17099 - DNA, 904 bp, Zea mays
  Clone ID: LIB3068-003-H12_FLI
gcgcttccaacggtagctaactccaaggcaagcatccttggtccattgttggcctcgctcatcaatcagctgtgtctcagcaggaggcgttgcggccatggcggcttcgaagcccatcttgtatagcgcgtggatcagctcctgctccttccgagtccggatcgccctcaacctcaaaggtgtggattatgagtacagggctgtgacaaggaacgatctagattacgaaaagatcaatccaatcaagtatgttccagcattggttgatggggattttgttgtttctgactccctggcaatcatattgtatcttgaagataaatatcctcaacaccctcttttgcctcaagatctcaaaaagaaagctataaatctgcagattgcaaatatagtttgttcaagcattcaacctcttcaatgttatgctgtaattggtctgcttgatggcaccttaggctctaaccagagccttcagattgttcggaattacaccgacaagggatttaaagcaatcgaaaaacttctggaaggttgtgacagtaaatatgctactggagacgaagtccaactggcagatgtgtttcttgcgccccagatgtatgcaggcgtgacgcgcttcggaattgatatgtcaaagtaccctcttctggagaggttctacaaagcctatatggagatcccagcatttcaagtcgcggttcctgaaaaacagccggatgcgcctgcgtccccatactgaaacggaggcagcaaccatattgatattcaaattgatttggttatcttggaatcatgttgtatgtagcatgacatagaaggccacgatgtatgcctatttgtttcgtacacattctggtttgtccgaagaatttcacagtaaataaggcccgatgatttgtgtagt

SEQ ID NO: 17100 - DNA, 998 bp, Zea mays
  Clone ID: LIB3068-005-B9_FLI
accgaattccctgcgattcctctcccctcgcctcctcgtctccccctaggggatcgtcggagaggaatcgcaaagagggccgtctcatccgagttaaggaagccatggagcacaaggaggctgggtgccaggcccccgagggacccatcctctgcatcaataactgtggcttcttcggcagcgcggcgaccatgaacatgtgctctaagtgccacaaggagatgataacgaagcaggatcaggccaagctggctgcctcctctatcgacagcatcgtgaacggcagcgacgccgtcatggagccggttgttgctggcagcaacacggtagtagctgttgcccaagtcgagttgcaaacaatgaacgtgcagcagcccgctgatgttgccggacccagcgagggggtggcggcgatctccaaaggggggaaggtagggccgaaccggtgcagcgcctgcaggaagagggttgggctcacgggattcaactgccggtgtgggaacttgtactgcgcgctccaccgctactccgacaagcacgactgcaagttcgactaccggactgctgccagggacgccattgccaaggctaatccggtggtgaaggcagacaagctcgacaagatctagggggggttccctacggttggtgtcaggaagattgtaaaccgcggtaactcgtcatgcggaactgctgccttgccccccgcgcctttctcttccatgtttgctgctacaatcttgttgttgggcattgcagtgcacggtgcacacttgtgtagcccgcctccgagaattctcctgcctctgcatctggtcagttcaaaaatgatttgcatgttggctatgttgtgtaagctctatttatggtggtctcgctgagacgggtatttggcttcgcagttatctagctatgtgatgtactgttgtcttgtccctgggtattatatggtacactgcagccagtaatagtaatctgcaactgtgcgttaaatggtc

SEQ ID NO: 17101 - DNA, 1431 bp, Zea mays
  Clone ID: LIB3068-005-C4_FLI
caaaggcagcggaggtggcgctgcagtccaccagttcttgggctcttggcaacgtcgccatcgtcatcggccatggttcttggcaacgtcgccatcgtcatcggctccggaattgtcggatcagtacttacaggcggtgagtttggccttcccgacttcagggatgcaatctctggtgctttcaagttcttgaccaagagtgcaaagccaggcaaggatgggccgtctaccagcagtccacatactgctgagttgttcagccaggtcaatcatctcagagaggagctgcaaatgttgtctaaatcaaatcatgtttccattgtcactgttgatggtagacctggccctggtgcatacggtataacagctgttgttattggaggagctattggctatttattcataagatggaaggggtggaaactttctgatatgatgtttgtgacgaagcgtgggttatcagatgcttgcaatgtagtggggaaacaagtggatcaggtttcagaaagtgttaatgttgcaaagaaacatcttgctggaaggattgatcgtgtagattgtagtttagatgaatgccaagaaattacagaagccacaaaggaagaggttacaatcatccatggagatctaagtgccttccagaaggaaatggaaacagttcatctcgtagttcgtagtctggagacaaagcttggacgcctagcttatactcaagatcggacaacacgaggaatatatgatttgtgtgaattcactaaaagattggatcagagcccgaaagctgatactcgtcaggttacatcatcaacttctcgtcctgctattgaatcctcagagagaattgttagggttgcttctttacccctggctttggaaccggagtctcctagaattgaggcacctaaggttgtgcgctcatctacagtcatgtcagcatcgggtcttagtttgctagctggaactacaataccacctaaaagagatcaaccgggtgtgtacagcagagcaagttcaatgaaggaaggatcctctgagttgccgagtggcgtgcgaaactcagcagaaccaagccccaggagatctggtgcttcaaccctgtttggagggcttgggtttctaaggaactacaccagctgagatgtatgtgctcagataggtgttttttttcccaaggagaccagcagtttgagctgtatatgtaggtagtaggtaatagggcagttgccaaaaggacggctcccttttcctattgggaattgcgaatttttgtaggaactaataccttgcagagcaatgcctcgatgccaagatacaaactttaaatttaatgttgggttagatgctggaagagaaacatcctattgtatattgcagtggaatgtactgctggaatacatgtttgggaaggagcaattacaactaagtttgtgc

SEQ ID NO: 17102 - DNA, 676 bp, Zea mays
  Clone ID: LIB3068-006-C5_FLI
aacaaggaaccaccattttgatgcaaaggtaagcatctgcattttactcgagttacatgtcactgctaccccttaatcccggggtgcctttgatttgcgacatccaggagcagatgcgacaggatcacaagtaggaggagctgcgacgatgctgtagcgagagacatgggtgccgaggtcgttgtgctgcggtggtggcaggacaggaaggaaacgaaaaagcaggagccagggttgttcaacaacgtgaccgagtcgctgaggcgaggaagagtaaggtgaaggcactcgtcgacgcctttgagactgacagagcgtcatctcgctgcaggaaaccagcaagcctgctgctgctccagctatgaaagtaggtgtcgtgccatgagtgcttcttgacctgcagtgtgcatgatcacctttcttggaattttaaactttttttggttgttagtgaccgtaaaagtggcgcttgttgaggtttgctcgttcccatgtaaactgacttttctcatgggagttttcatacttttgtagtgctagaaaaaggaaagtctgtacaggttttgtgtctatgcaaggcttgagaagttggcattgtactgataagtgataagtaaacaagttattgtaatgatttaaactagattgttttgaaaggaaatggaatgcataaagc

SEQ ID NO: 17103 - DNA, 1445 bp, Zea mays
  Clone ID: LIB3068-007-A9_FLI
cttcgccacgaacaaaagcgcatcgatctcgctgtcgtcactcctcgtcacccagccacgaacagaggcaccacccagcatggccctgcaggcggcgctcctcccatccaccctctcatccgtccccaagaagtgcagcctcgccgtcgcggcgaaggacacggcattccttagcgtatcccagaagaaggtgcaggcggcgtcgctgtcggtgagaacgcgggtggcgacgacggcgcctgtggccacgccggggtccagcacggcggccaaggatgggaagaagaccgtgcggcagggcgtggtggtgatcacgggcgcgtcgtcggggttgggcctggcggcggccaaggcgctggcggagaccggcaagtggcacgtggtgatggcctgccgcgacttcctcaaggcggccaaggcggccaagggcgccggcatggcggacggcagctacaccatcatgcacctggacctggcctccctcgacagcgtgcggcagttcgtggacagcttccggcgcgccggcatgccgctcgactcgctcgtctgcaacgccgccatctaccggcccacggcaaggacgccgacgttcacggcggacggatacgagatgagcgtcggcgtcaaccacctgggccacttcctcctggcgcgcctgctcctggacgacatgcagaagtccgactacccgtcccgccgcctcatcatcctcggctccatcaccggcaacaccaacacgctggccgggaacatcccgcccaaggccgggctgggcgacctccgcggcctcgcggcggggctgcgcggccagaacggctctgccatgatcgacggctccgagagcttcgacggcgccaaggcgtacaaggacagcaagatctgcaacatgctaacaatgcaggagctgcaccggcggtaccacgaggagacgggcatcacgttcgcgtcgctctacccggggtgcatcgccaccacggggctgttccgcgagcacatcccgctgttccggctgctcttcccgccgttccagaagttcgtcaccaagggcttcgtgtcggaggcggagtccggcaagaggctggcgcaggtggtcagcgaccccagcctcaccaagtcgggggtgtactggagctggaacaaggactcggcgtcgttcgagaaccagctgtcgcaggaggccagcgatccggagaaggccaagaagctctgggagatcagcgagaagctcgtggggcttgcctgagctcgccggcacggcgacagcgacatgatgaatctgtcgagcaaaggagctttcgcttcgttgtattatgtgtaccattagcatccattttgtttgtttctagaagttggtaatgaccgtcggagaagagcctgtaattgttcgatcatgtattgcttacaatttttttttaaaccgatgaaataaaacaatcaggcttaac

SEQ ID NO: 17104 - DNA, 879 bp, Zea mays
  Clone ID: LIB3068-007-C10_FLI
ggtttaggaaaggaagcaccggatcggagcaggcgatacggcgccgacgacaatggcagcaacaagggtttccccggttcttctcttgctgctcaccgtccagctcagcttgctcttccgcctccccgactccccctccaccctcgccctcgccctcgccgcggaaccagagcaacagaacgccaagcagcatcgccagcccgcgctgctggtgcagtcgacgtgcaactccaccagcttctacgacctctgcatcgccgcgctcgccgccgaccccgccagctccaccgccgacgtcccgggcctcggcgccatcgccgtgtccgccgccgcaaacaacgcctccggcacggccgccttcctcggcaacgccagcgacgccgcggccaccccgcaggcggaccgcgccctcctccgcacctgcgccggcaagtacgccgccgcccgcgacgcgctcgtgcaggcgcgcgcgtccctcgccgagcaggcctacgactacgccttcgtgcacgtgagcgccgccggcgagtaccccgcggtgtgccgcacgctgttccggcgccggcagcagcagcgtggggcgagtaggactgcgtacccggcggagctggccaagagggaggaggcgctgcggcgcctgtgcaccatcgccctcgacatcatctccctgctgcaaaaccaggagacctactagctccatgcatctcaattctcaactctcacagtaatgccgttgtcagtcgattagtcgatcttgtcgatgcacaggagtagtaagggcttgttcggttagctctcaatccatgtggattgagtgggattggatgtgtttgaatcccaaacaagtcaaacgtcttctcaattttttccaatttcatc

SEQ ID NO: 17105 - DNA, 403 bp, Zea mays
  Clone ID: LIB3068-007-F5_FLI
cgtagccaaggtcaccggcggggctcccaacaagctctccaagatctaggttgtgcgcacctccatcgcgcgcgtgctgaccgtcatctcgcagaagcagaagtcggcgctgcgtgaggcgtacaagaagaagaagctgctcccgctcgacctccgccccaagaagacccgcgccatccgcaggcgcctcaccaagcaccagctctccttgaagaccgagagggaaaagaagcgtgagaagtatttccccatgaggaagtacgttatcaaggcctagatcagtgaaagaacatttatcctgtcaagttttgctcagaagttacttgaatttgagacaaatctatctccatccaagtactatgtagctgatcaactgcatgatgaaaaacgagtactttttgct

SEQ ID NO: 17106 - DNA, 905 bp, Zea mays
  Clone ID: LIB3068-008-A1_FLI
ctcgcccgcatctgcgacggcatcctcgccctgctcgactcccacctcgtcccatccgccggcggcgccgagtccaaggtcttctacctcaagatgaagggtgactaccacaggtaccttgctgagttcaagtctggtgcagagaggaaggatgctgcggagagcaccatgaatgcctacaaagctgctcaggacattgctcttgcagatctggctccaacccaccccatcaggcttggccttgctctcaacttctcagtgttctactacgagatcctgaactcccctgatcgcgcctgcaaccttgcaaaacaggccttcgatgaggcgatctctgagctagacagcctgggagaggagtcctacaaggacagcactctgatcatgcagctcctgcgcgacaacttgaccctatggacttccgacaccaacgaggatggcggcgacgagatcaaggatgctgctgccccgaaagaatctgcggagggtcagtaagatggattcagtctcacgacctgctgctgctgatgttgaggagtgaccagaaccagaaccgtcgtcctcgattctgatagattatcttctagtataccttgtgttgtcgttgtcgtcggcgcgacgatcgtcgtcgtcgtcgcgccggtgtatgcgatgaagctgccattgctgctgttttaattaagcattctagatgttataccgcatgctttgtttcggtttctatgtcgataaatggtggccggatgctggttttcgtgctccgagccggccaccaggaagaagacctgcctgcccttgtgggtgcagcgttgttagaatgacctacggtgtatttgactttgacaggcctgctgcctagtggactgatattctgttatgcgcaaagctatttgccttgatgtctc

SEQ ID NO: 17107 - DNA, 1007 bp, Zea mays
  Clone ID: LIB3068-008-A11_FLI
agacattctcgtcctggggtatcgattatctgaaatacgacaactgcaacgacgccggcaggagcgtcatggagaggtatacgaagatgagcaacgctatgaagacgtatgggaagggcatcttcttctcgctgtgcgaatgggggaggcaaaaccctgctacctgggcaggcggcatggggaacagctggagaacgaccgatgatatcgccgacaactggggcagcatgacgtctcgtgcagaccagaacgacaggtgggcttcctacgccggacctggcgggtggaacgatcctgacatgcttgaggtgggcaacggcggcatgtccgaggcggagtaccgctctcacttcagcatctgggcactcgccaaggctccgcttctgatcgggtgcgacgtgcgggcgatgagccagcagacgatgggcatactcagcaactcggaagtcatcgccgtgaaccaagatagccaaggtgcgcagggaaagaaagtgcagtccagcaatggcttggaggtttgggctgggccgctcagcaacaacaggaaggccgtggttctctggaaccggcagggataccaggcaaccatcaccgcacagtggtcgagcatcgggctcgcttcttccactgctgtcactgctcgcgatctatgggcgcactcgtcgttctcggctcaaggccagctatcagcttcggtgccacctcacgactgcaagatgtatgtcttgacgccgaactagctcagaagacaagagcggattgttccatggcgcgtgggatgcaaccattcggtcaggattcagggaagaagagtatgcagtgcaggcaaggatttcaagagaaggaaattcgatatcatttggttatacaggatatgagtgcgaatggaggaataatttatactaatactatggaagtgtatctaaggcgccgtcaaaatgccggtgcctgtgttactggatgtttgtaacgagagttgcagcaataaaattggcttgcccaccacc

SEQ ID NO: 17108 - DNA, 1236 bp, Zea mays
  Clone ID: LIB3068-008-A6_FLI
ggaagctgtaaatgtatcaaagtcagtgctccattggtgacaaattatgctcgcagtcgtctctttgatgtaatactgcattcttctgttggagacgtgtcaccagaacttgtggagcaatttaggaccagacaaaggaactttgacaccgaatctcgcgcaggtgcagcagctaaagtgaagcaaaatcaacatatgactgccatacctggtctgaggatttcacgcagagttaaagtttacaaaccattactattagaagctatgtatgcaaatggattcataggcgcaaagatgattcgagcaaagttatttcataaatttctgtgggcttatgtcaattctttgccaaattggtgcaatgcatttggttgtaccaaagcagggcagtatgataagagccttaatcaatcatgcctgttattttctatggaagcagctatgaaagaaatgccccttgaactctttctacaaattgttgggtcagcaaagaagattgataacatgataacgttgtgtaggcttggaaaaacactttcagaaatacctacagaggaatacaatcagatcttggatactcatgccaatggccgactctcacgtttagtaaatattttggacaagctcaagctggttcagcttgcaaaagaattcttagaagatgctggtgtatcgtcaaatgccatgtatacacattcgatggagctcaggccttacatcgaagaacccatgccaagaattcttccatcttcccaactgaacaatcatcggaaaattcggcatgattttgtactttcaaagaaagagtttgttgattcttattgggaaacactagagtgttgttatttaacagctggtttggctgacccgttaagtgccttccctggcagttctgtcccggaggtttgtctcatctgctgtacatcattgatgcataggattatcgcatacgttgaataaatgtacttagcgcctgtttgtttgctccccaacttacataaggtagcttctgggcatgggcagtacggtgagaaacaccacccttgatgccgaaataagtttcccatatttgtgtttaccatactgcccttgggccataagctatcttatataagtatggatgaaaacaaacagacccttcgaatttgaattatcaaattcctcaactttgaatgctaatatagctgtgttaactatttatattgacaactgtgaaaatagtgacttggatttgac

SEQ ID NO: 17109 - DNA, 1082 bp, Zea mays
  Clone ID: LIB3068-008-A8_FLI
gggcttccatagcgctgaagcgaggcgtgccgcattgggttgttcgagagctcctagtgttgccctactacatgatggagggcgatctccccacgcccgcgaacgctagggttgttgccgtggtcaccggcggcaacaaggggatcgggctggaggtgtgccggcagctggcctgcagcggcgtcaccgtcgtcttgacagccagggacgacgcgaggggcgcggcggccgtggagaacctcagaggcctggggctctccgatgtcctcttccaccgactggacgttaccgacgctccgagcatcgctcgactcgctggtttcctcgagacccgtttcgggaagctagacatcctggtaaataatgccgcgattggcggggttgagtatgttcatgaccaagattgtggctcagtaacgagcgaggaaaaggcaaagttgagcggcatggacatggatcagaggcttggatggctgtgggagaattgccgggagacctacgacgatgcaaagacaggcctacgaacaaactactacggcacaaagcaagtaatcgagactttactgcctctactgcaagcctcctccgatgggaggatcgttaacgtctcctcccacttcggccagctaaggcttttccgaaacgaggagctgaagcgggagctgaacgacattgacaacctcaccccggagaggctggatggcctgctggacatgttcttaaatgacttggaggccggcgaggtggagtcgtcgaacggctggccgatgtatttctcggcgtacaaggtggccaaggcggccatgaacgcgtactcgaggatcctggcgaggcggcaccccgagctgcgcgtcaactgcgtgcaccccggctatgtcaggaccgacatgaccatacactcggggctgttgacaccggaggaaggtggcagcagggtggccatggtggcgctgctgccgggaggcgggccaaccggcgcgttctttgaagattttcaacagtcgtcgttcgtgtgatgttgaacatgcagctgcatctcatatgtattctatagatattatttatgtgaaagatgctacagt

SEQ ID NO: 17110 - DNA, 872 bp, Zea mays
  Clone ID: LIB3068-008-D1_FLI
acgcaggggggcatttccgggaacctcgccgcgggcggggctggaaagccgcggagcttttgatttaaccggccggttggtcagccagccagccagccagccactcagtactgcacactgccatcgctctcctacggtactgctgcctaccgcgcgtctcgtcccttcgctgccgctctatctatctcggccggagccatgggcggcggtggcgcggcgctgctgctgctggtgatgtgggcgggcgtggcgtcggcggccgtgtacgaggtgggcggcacgattgggtggaccgtcatgggcaaccccgactacgccgcctgggccagctccaagcagatcgtcatcggcgacactgttgtgttcacgtataacaagcagttccacaacgtgctggcggtgagcaaggcggactacaagaactgcatcgccaccaagccgacggccacctggtccacggggaacgattccgtcgtcctcaacaccacgggccaccactacttcctctgcggctacccgggccactgcgctgccggccagaaggtggacatccgcgtcgcctcctctgctgccccttccgccgcaccgtcgccgaccccctccggctccaagccctccggcggcgccacggccgcgccgtcgccgcaccctaacgccgcgccgaaggccctctccgccagctccgtagccgcggctgtcgccacgtccctgctctccctggccgcggccgtgctggcatgatcacttgatcaggatcgtgtagtgctggccaggggacggcgcctttgtgaattgtgagagctcgtactgtgtctgtgtgactgtctctgtggccgtatgagcatttagccctggatctgtgtttgttactc

SEQ ID NO: 17111 - DNA, 488 bp, Zea mays
  Clone ID: LIB3068-008-D5_FLI
aatctatgctcttgtggatctgtacgggttcagaagacctaccatcgccatggagtggatggggaagcacgccctgatgatatacgtgctggtggcgtgcaacatccttcccatgttcatccgtggcttctattggagggaccccaacaacagccttctgaaagtcattggtatcggggcgtgaagccatgaccttctacatgttcaggcccaaacttggacatgcacagcgctctcgcatgtttaagagcaataatctaggtgctcaggccaagttttgctatgcggttagaggaccatagcgcgctcaggtcatgcgccatggggctgcctatattctcagcactgccgagatgcctgttgccacttgcagatgcatggaatccattctcccagccaactttgtatatggtggagttgagcacatgtacatgatatcacacgagtaatatgttgtgattcagatgaaatatgtactagtacatatc

SEQ ID NO: 17112 - DNA, 1104 bp, Zea mays
  Clone ID: LIB3068-008-F2_FLI
cggatttttaaccagttcagagtacggttctgagctgcagaggtcgccctcaccgtctcctgagccgttacagaggtcgtggacaagggagcagagccctagggccgctggcttcgacttcttcctgagcaataggagcaatgactcgccacctgtctacaggaaggaacccgaggacgcggcatcgcagtcggagtctgacgcgaagtctgcagacggtgaggatgatggcatcgcctacacgctgcaccagagagttcttgagctagaggacgagctcaatgcgacaaaccagaaactacaagatgcaaacgagaagcttgaggttctggaggaaaagagcttgaggtgccattgcgattataaagagaatggaaacggtgctcagcgaactacagaagtttcaggcaaagagggggagctggaagccgaaatcgtcaatctccaggagcaagcggactcggcaagaaggcgattcgaagaggcattgtctgaacgagatggagaaatcagcaagctaaagcaagagcttgctggtgcttctgagaagctgcagcgagagaagtacgccaatggcgtgcaggtatctgagctgcagcgatcggttgaacacatcaggtccgaactagagagagtttctgaagagaaactactgtccgagaacaagattaaggagctggaggcagcaaacgctgaagccgataagtacggccacgagctcacgcgagctgccgagaagatttccgaggagaagttcgcgctcgaagctgagatcctcacgatgcggcagaacattgaagatctgaaatccaggatcgagagcctcgctcgagagaagtccctgctcaaatcatggtttgaggacttggagcaagtcgtggggcgaggaaggggcatcttcgccgattaaccgagtttttctatccagaacatcatcggtagctagaatttagcaagctagtaacattttgttttgttttctggtacccataccatcttgcgaaattgagatacgtcagtgtacttcctttttgtttgctgaatcttaaacttagacgtgatggatggtggtgatgtactggtaatatatgaaatattatactg

SEQ ID NO: 17113 - DNA, 685 bp, Zea mays
  Clone ID: LIB3068-008-G8_FLI
ctggtgtcctgtacatctcaagatgaaaaaaagcaccaccgtcctcgccatctccatcttggtcctctcccttgcctcccagttctcatggtgtgcagaagcagctgagggaagcgccggaatttccacagagcctgatctccaggtgcaagaacaagtgcacggcgatatgaaaaaccgcctggaaatgcagggtcgcaaccggaagcttggccatgaggtgaccacagtggagttgaagcatcacaggaggattaccagtgggcacaagggtggcagcgcgggtggaggcgccggcgccggtgccgcgggcgcaggcacgggtgggcataacgtgggcggcgggggcgccgtgacgaggccgcacagctccaagaacggcgcggcggcgctcccagtgccggtgtcgtccgtcctgacgctggccttggcctgcggagttgttctgtcagtcatgagctactgatgagatgaaactctcgtcttcccggagccgatcggtatctccgagccgattttacgggtattggtgcgatagtttctcgatttgttcgttgtaacttgtatatcatatcatcatgcagtggtgaaaaccggacggatgctgacggatgtagctgtcattatatatctatcgtaatgtatttctcgcgaatacggaatcaatacagttatttaaaattgg

SEQ ID NO: 17114 - DNA, 596 bp, Zea mays
  Clone ID: LIB3068-009-B1_FLI
ctttgaggtgcattgtaggtggtctgtgaaaaccatcagttctagcctgtgcagtcttaacataagtgctggtgcacatttcaagaaatggtgcataatgcagtctaagataaagagcggtgctgtggatgagttgaagaaagaagtcaaggaaatgttagactttgcacaggggtatatgctcaaagttaggtctccggaccaagagaacagtaatctcgcccaacaagacaacgtggcaccggatgcagtgtctggcgatcaatgattatttcaggttgtgcctcctgatttagggtggggtgacagctgccatgacaacgaattatgatgttatacacagaagggcaggtggacctgtaactagtccacatgaaccacatctaacatgttaagctgacttccaaaagatgggtggaccgtgtattgtgtgtgtaaacttcttttcctttcattccgctatccattctggcagtttggctgatgtatatagttgtaaaaacaagtatagtgctgactgcggacagttcagcggtgcgttgtttcaagataaacaaagaaagaaacaaaagagaaatattcgcaccagaaccatc

SEQ ID NO: 17115 - DNA, 1243 bp, Zea mays
  Clone ID: LIB3068-009-C10_FLI
atgccggtcgtttctctgctgcttggcaactgtacaaggctcaagaggagctcattaatgtcgctaagctgtatggggttaagctaaccatgttccacggacgaggcggaactgtgggaagaggtgggggccctacccatcttgctatactgtcacagcctccagaaaccatccatggatcacttagggtaaccgttcaaggcgaagtgattgagcaatctttcggagaggagcatttgtgctttaggacactgcagcgtttcacggctgcgacccttgaacatggtatgcaccctccaatttcgccgaaaccagaatggcgtgctttgatggatgagatggctatcgtcgccacaaaggaataccggtcaatcgtatttgaggaaccgcgctttgttgaatatttccgccttgcaacgccagagatggagtatggcaggatgaacatcggaagcaggccatcgaaaagaaagccgagtgcgggcatcgagtcgctgcgcgcaatcccttggatcttcgcttggacgcagactcggttccacctgccggtgtggctgggtttcggcgcggcgttcaagcatgtcttggacaaggacatacggaatctccagacccttcaggagatgtacaaccagtggccgtttttcagggtgacgatagacctggtcgagatggtgttcgccaagggtgatcctggcatcgcggcgctgtacgacaagcttctggtttcagaggacctgtggccattaggggcgcgtctcagagccaactacgaagaaacaaagcagcttctcctgcaggtcgctgggcacaaggaccttctggagggcgacccgtacctgaagcagaggctgcgcatccgtgactcgtacaccacggcgctgaacgtttgccaggcctacacgctgaagcgcatcagggaccctggcttccaggtgaagccgcggccccacctgtcgaaggacatcatggacatgggcaagccggcgtcggagctcgtgaagctgaacaccaccagcgagtacgccccggggctggaggacaccctcatcctgaccatgaagggcatcgctgccgggatgcagaacacgggctgaagccagtgtgcctgtcttctttctgtaggggatctcatatcatatggcgtgaaccgctgaacgcctggatatgtggggattagttacaccctgttgcactcgaatttatgccccgcttggccgcgcccttgtcgcatggttttcat

SEQ ID NO: 17116 - DNA, 226 bp, Zea mays
  Clone ID: LIB3068-009-D7_FLI
gcgacgagggtgacgagtactagagaagtttgctgatgacgcagcatcaggccagtgtgctgcccttatcccgtgatctgccgagagttgctcctgctatcgtgttatgtgtgtctgttctgaagtattgtgtggtttacaacacctgatgttgtaagagttgttaattcccctgcattgctaccgggttattgagaataattatggctgtttacgttgttgcttc

SEQ ID NO: 17117 - DNA, 347 bp, Zea mays
  Clone ID: LIB3068-010-F3_FLI
caaccatttgagaacaccagattttgtcgaattttcctttccttttgatgaatatttgagcacgtccatgtcaataccaaacatctggccttttctctctctcttttttacatatgtttatgtggtcttagcaagtagttgtgctcgactttgcgttatgaggtatgccgtatgtgattggatcacggtgacctaacaggccattcccacacttgtgtttttacatgacttttgagtgggtgatgcacggataatattgacatgttgcgtgcacgctcaggtggtgctctttcacttgatggcgtcgtcggttcggtcaagataagtttttaaggttttcctgttcc

SEQ ID NO: 17118 - DNA, 1598 bp, Zea mays
  Clone ID: LIB3068-010-G12_FLI
ctcatcaccaccttgtatgcagtttccctagcaacagtgatagtcctcctcctttggtttcacaagcccgcagtcgtggggaaagccactgccgttcccggcgacgagaagccacggcgacgactgccgcctgggccatggacccttccggtcatcggcagcatccaccacgtggtgcgcggcctaggacaccgcaccatgatggagctgtcccgtcggcacggccccctcatgttcctccgccttggcgaggtcccgacgctggtggtgtccagcgccgaggcagcggagctggtgatgaagacccacgacctcgccttctgctcccgcccgaccaccagcgtcaccatcgacatcgtcggctgcaagggcaaggggctcggcttcgccccctacggcgaccggtggcgtcagatgaagaagatcaccgtcgtggagcttctcagcgccacgcaggtcaagcgcatcgagtccatcagagcccacgaggtgggacgcctcctccagtccgtcgccgccgccgccgcccgtggagccgtcaacgtcagcgccgaggtgaaggcgctcgcgccggacctcgtggcgagggccatgttcggtggcaactgcgccgagaaggccgacttcatctgccggtacaacgaggtcagccagctggtgtcgggcttcttcctggtggacctgttcccgtcgtcgaggctggtacggtggctgagcatcggcgagcgccgtctcctgaggagctacggcggtatccagcgcatcatcgcgtccatcatcgagagccgcaaagctgccagcaccagcgacgatggggacaactgcagcttgcacgaccatcctgcagaggatcttctcggcgtgctgctcaggctgcagaaggagggctcgctagctttccctctcacctccgagattataggcgccgtcatgtttgacatattcggaggtgccaccacaaccctagggtccacgatggagtgggctatgtcagagctaataaagaaatcagagacgatgagaaagacacaagaggacattcgtcgcgtgctaggtgggtcacgacgaggtgtcatcacgaacactgacctcgttggcctcacctacctaccaatggttatcaaggaggttcttcggctgcatcctccaaaccctctgttggtcccgcgtgagtcgagagaggattgccaagtcatgggctaccacattcccaaaggcaccaaggtgctcgtgaacgcatttgcgatctccagggattcaaggtactggaacaaccctgaagattttagcccagagaggtttcagaataacaatgtcgactacaaagggaccgattttgagttcacccccttcggtgctggtcgtcgacgctgccctgcaatcatgtttgccacttctactctagagattgcattggcaaaccttctctaccacttcgactgggctcttccggatggagtgagcccaaagatggtggaaatgtctgagcaatacgggatgggtgtcaccaaaaagttagacctgcatttgagagccatcccatatgtatactctactatggcataggtatggggggtggttaaagctacctgcacctt

SEQ ID NO: 17119 - DNA, 1355 bp, Zea mays
  Clone ID: LIB3068-010-H4_FLI
cgctggtgctccagctgaccgtgtgctcgcacctttttctcttccccaaccgtgcccgagccctcgcgctcccgccccctccggggaccgctgcggtggttgaggcgacgcaggaggaggaggaggaccaggagtgggaggctgcgctgcagaagtggaagaccaagacctacgcgctctcggtgcccctccgggtcgtcgcgctccgcggctccttccctccatcttggattaaggatttcgtcgaagctcaggggaagagactcaaattcagtcctgaactccgtgctaatcttgatgggatcttctctgagatgtcacaatgtatggacaagggtcaagttcagccgaagtctgcaatggcagctgatgttgtttcccttggggactcttggctcggctatgccatccgtaagggattgctagagcctatcaagaatgctgaagaacaggattggtttcatagcctgagtgacagatggaaggtccatttgtgcaggaaccagaacggagaagcagatcctaatggtacaatatggggagttccatacagatggggcaccatggtcattgcttacaagaaagacaagttcaaaagacataatttgaagccaatacaggattgggaggatctgtggaggcccgagcttgccgggaggatttcaatggtcgattctcctagagaggtgattggtgctgttctgaagcatctggggtcatcatataacacagttgatatggaaatggacgtcaatggtggtagagcggcagtcctaaacagttttacgcaactacagaagcaggtccaactattcgacagcatgaactatctgaagtcgtttagtgttggagacgtatgggtcgcagtgggttggagcagcgacgtgatccctgctgcaaagcgaatgtctaatgtcgcggtggttgttcccaagtcaggcagcagcctatgggctgatctatgggcaataccatgcgcgacgagatttcagactgaccaaatcgggagccgagccagaggcccgtctccactggttcaccagtggttcgacttctgcctgcagagcgcaaggagcctacccttccgccaagacgtcatccccggagcatctccgctccacctcgagagccctgtgccagaggtccctcaagacaagaacaagaggaagccgaagctggacacgaaccttgtcagcggagttcctccgcccgagatcctggagaggtgcgagtttctggaacccctgtcaggtaaggcgctggaggactaccagtggctgatgtctcgggtgcagagacctcgtcttggtttgtttgggaacatgttgcagaagatgtcagctgtacttgacttc

SEQ ID NO: 17120 - DNA, 485 bp, Zea mays
  Clone ID: LIB3068-011-D12_FLI
cagcgctgtcccctcgcgtggccttcctcgaccaccagcgatcgctgctcaccgtcggcaacagccacctcaagcaacgaatcgcggcgctcgcccaagacaagatcttcaaggatgctcatcaagaggcgctgaagaaggagatcgagcggctacgccatgtgtaccagcagcagcagatgaaggtggccaccaccggcggcgccgacatcgccgcggcggcttccatgcaggccaggcaagagctgctcgcgtgcgagggcgctgccattcgatagcggatcgagggcggaggcgttcaactggcagtgccacaacaacaacaccagcaccgaactttgtgccgggttcctccttttctcagtcagacaagttgttcgtcgtgcgtgggaaatacacgtcgcctgttagtagcctattgattttatttctgtgcagtcttaattaattcgtatatgtgatgtattcgtcctcctcaccctagc

SEQ ID NO: 17121 - DNA, 1276 bp, Zea mays
  Clone ID: LIB3068-011-G12_FLI
ataaactccgtggtccgcagccaccgagccgagcccggcacagacgctactggcacgcacgcacgcaccagcaccagcaccacaccacatgcatggtggagcctagcacgggcagctagctcccggccggcgacgtgacgaccaccaccaccacatgttgcatgagcagcaggcaccgccaccggcagtagcagcgccaccgccatccatcaaccccgacgacgacggcgcccgcgatgtcgaggtcaccacgttccgcgacatccaccctctgacgcccgacgcgccgccgcccgcctccgcgtcctgggacaccgccagccaccgctccttgtcgtcgtccgacgaccagcagtacatgacgatgagccgcgagttcacggccatggtcgccgccggggcgaccatgcagaccggcggctacgacggcgccgccgaccagctcaccagcatcggcgaggacgagctggaggagaccaacccgctggccatcgtccccgacagccaccccatcgccacgccagccaggtccaggccgtccgggctggaggtcgtgcccgcgggcccggcgccgcagccgcagccgcagccgcccgcgcacctggaggccagccaggtcaagaaggaggaggtggagaccaaggtcacggcctggcagacggccgaggtcgccaagatcaacaaccgcttcaagagggaggatgtggtcatcaacggctgggagaccgagcaggtggagaaggcctccgcgtggctcaagaagatcgagaggaagctggacgagcagcgcgccaaggcgctggagaagacgcagaacgacatcgccaaggcgcggcgcaaggcggaggagaagcgggcgtcggcggaggccaagcggggcctcaagctggccaaggtgctggagctagccaacttcatgaaggccgtcggcagggtgcccaccaagcgctccttcttctagccagccgactacccctgccacctccgtctctccctgcctgcgtgtgatcgatgtacgctcgctgctgcatccgagaacctaactgtaaagaaaaaaaactgtaagctgtatacgtactgcgcctgctggttcccctgtgatgtctgtcagtgtcatccatcacagggtgccagttgttctcttctctttcttttcttttctcttctcttggcttgtatatcggatccatatatgctggtggtgcttgaacgaactgttgttgtttgcttaaccgtgcaaacatatacagtggtctatacactacattcagaaccc

SEQ ID NO: 17122 - DNA, 927 bp, Zea mays
  Clone ID: LIB3068-012-E5_FLI
cgccgccgtcatcctcctcctcatcttcgtcgtcgtcctcccctgaccatcaggagatcgacgtgagtctcatcatcactgactactgcatgcccggcatgacaggatacgatctgctcaagcgagtgaaggggtcctcatcgctcaaggacattccggtggtgatcatgtcgtctgagaacgtgcctgcccggatcagcaggtgcttgcaggatggcgcggaggagttcttcctgaagcccgtgaagccggccgacatgaagaagctcaagtcacacctgctgaagcggaagcagcccaagcagaagaacaagcctcaggcgcaggcggtggagtctcctgagcagcagctggacccgcatccgcagccggtgcacgagccggaggaagccgcagcagatcgcaacggcgtcaacaagaggaaggcagcggccatggaggaggggctgaccgtggtggtgacggcgccggagagcaccaagccgaggaggctgtctacgagcagcctgactgtggagacctgatcaaccgtggagacctacgggctacggctacgcacattaatctagcagtggatgcaagccccagtcccagtcccagccccgccgccaagaaacacaaagtcgtgcctgctgcttttggttctgggagctaagctaacggagggaagtgacaaacaattaaattatatgtagcggctgctgcttcggcctgcaaattttgttgcgctaacgggcatggacatgcatggacaccatcccttgtgttcgttaatcgttcggaaggggaaaagaagaagaagctgtagataaaaaaaaaagggcaggcggctaattgttaatttccgcatggtgtgacggacagacggatggatcaactgatgatgttgttttggctcggttcttcttccttgtacactgagtattc

SEQ ID NO: 17123 - DNA, 507 bp, Zea mays
  Clone ID: LIB3068-013-D12_FLI
cgcagcagtgcccgccgcaggggaccggcgccgccgacccgcccctgcccatggaccccgtcacgcccaccgccttcgacaccaactactacgccaacctggtcgccaggcgcggcctgctcgcctccgaccaggcgctgctcgccgacccggccaccgccgcgcaggtgctcgcctacaccaacagccccgccaccttccagaccgacttcgtcgccgccatcatcaagatgggtgccatacaggtgctcacaggcacagccggcaccgtccggaccaactgcagggtggctagctagctcatccatgatttacgtctacctgtagactcatgtgcttatataaaatcatacgacgaaactgtacgtacggcgtagagtggtgtggcgaggtccaatgattcagattgtacgtacgtgtccatcgatccaactgtagttgtgtacgcagtacagtacgtgctagctacggatcagttgcttatatatagcttgtgcgtttttttac

SEQ ID NO: 17124 - DNA, 727 bp, Zea mays
  Clone ID: LIB3068-013-F9_FLI
gcaaagacaggttgcgtgagtatgagctcaatcttccaagttcaaacaagggacttgatgttggaagggtgtattttgtgatcctcgagatgtcccctgttacatatattgattcgagtgctgttcaagctcttaaagacttgcaccaagaatacaaagcacgccatattcagattgccatagctaacccgaaccggcaagtgtaccttctgttgtcaagatcgggcatcattgacttggtaggagctgggtggtgctttgtgcgagtgcatgacgccgtgcaagtgtgcctacagcacgtgcagaattcatcttcaaatgcgttgaagctacccgtgcaggcatcaggcgtgttgaccgattctgtttcgactcctaaaccagagcagcagcatcaaaagcagcacggcctcttcaaggacctatggaaggcacaggacagtaacgcggatgctggtggtgaggtgcagccactgctccggcaaaaccttgtgtaatactcctacaaaatacggagtacttcctgggatggactcacgccctcgctggcctatacatatacgtgtttatttatttgtctatgttgttgttaacatggtatcgtggtgaacaaaagaaactgaacatgccattgttactgtggtgtggcgttttttgtacacttttgatacctaaatggaactcctatgatttgggtctggaaagggtgtgtgaagatgttttgttc

SEQ ID NO: 17125 - DNA, 1216 bp, Zea mays
  Clone ID: LIB3068-013-G3_FLI
gtctctacagcctcagcacggacccggcctgcctcctcttctctctcacggcgacgactgggcgaccgaccaaccgtcgctgcgctacgccaggtgccaaggtcttcttcgggtccttcgccggcgaccagcagcaccaggcaattgcacttgtgtaagaaatggatgctactgccggttaattgcgatacagatttatatggacatagatattggggccatgtgtaagggcggaagctgttcctaccgcgtcaataaggggagtcctgctggttctaccaggaagatccgttccacagcctctcaaggtcggatggcatctgacacagcgagggtaacgaaaacagaggcatcaaagctgaagaacctgatctcggcatcattcaaacccttgtctctgaccattcccatcggcgacggattccacgaatcgctccctttcagccattgtcatttatagtagagaaaggcctacaagaacgtcgaggtgctttctgcaggatctcataatacttgcacgagctaggatgcagctcaagcctcctgcaagacccaagctctattcagggctcatgccccaagaagatttggatccgtaccgtgatctaataccaggcttgcctgaagacttggcgaagatatgtcttgcccttgtccctcgtgctcattttcctgccatgggcgcagtttccaagaggtggatgtcgttcctcgaaagcaaggagctggtagctgtgaggaaggaggttgggaaacttgaggagtgggtgtatgtcctggttccagatgctggggcgaaggggtcgcactgggagattttagagtgttcggggcaaaagcagagccctcttccacgcatgcctggactaaccaaagcggggtttggtgtggttgttattggtggtaagctctttgttattgcgggctatgccgctgaccatgggaaagactgtgcttcagatgaggtttatcagtatgattcttgcctcaacaggtggactgtgcttgctaagatgaatgtagctcggtgcgacttcgcctgtgcagaggtcaatggggtgatatatgttgctggtggatttggtccaaacggcgagagtttatctagcgtcgaagtgtatgacccagaacagaataagtggacactgatcgagggcctgcgcagaccaaggtggggctgcttcgggtgcagcttcgaagggaagctgtatgtcat

SEQ ID NO: 17126 - DNA, 726 bp, Zea mays
  Clone ID: LIB3068-014-E5_FLI
gatttctaaagtaggtcagtggtactggattcttttttttaaaaaaaagtatatgctattttctattttctttagaactaggtttgtcggtttgtttggcaaacacgatctatgtactgacctgaactttgtgtattccctttttccaagcaggatctcacgttgacttactctgtttcgttgcgctctttcttttcaaaactagattaactaccaggattatctcaagttgaggacaagggtcgaattcctccaaactacacaaagaaatattcttggcgaggatctgggtccgcttagcatgaaggagctagagcagctggaggaccaaatagagatatctctgaagcatatcagctcaagaaagaatcaaatgctacttgaccagctatttgatctcaaaagcaaggaacaagaattgctggatctcaataaagacctaaggaagcagctgcaagaaacaaggccagagaacgcgctccgtgtctcctgggaggaaggtgggcacagtggcgcaagtgggaatgttcttgatccttatcaggggctccttcagcacctggacaacgatccttccctgcagttcgggtaccatcatcaagcctacatggatcagctgaacaacgaggacctggtggacccgaatgagcatggtcgatctggatggatatgaaatgctctgatgaccccaaataaagttgatgcacagcagggattcaccctgca

SEQ ID NO: 17127 - DNA, 571 bp, Zea mays
  Clone ID: LIB3068-015-D8_FLI
acaagaacttttattttttatttttccctcttcgactgaagttcgacatgttcaccaccctcacccacttctttgcctgggtccccacccagtttcgtcgcttggtctttgccctccagtgtgataatggttgcgagttcgacaacgccactcactccttcctcacccatggcatccagttgcgtcgctcgtgcccctacacttctcccagaacggccgagccgaacgcatcattcgcagcaccaccaaacagaatgtgcttgaaaatgcattcatcatcccagctacctagaagtggccatcaacaggcttcatatatacagtttcaaaacatttagggcctgtttggttcgatgcataacttgcaacactttgcctaacttttctttctaaggttagttattcaattcaaacaactaaacttaggcaaagtttggcgcagttagccgcgaaccaaatagacccttagtcctgcaaaattgttgtgtgctgaggcatattttgtggatgccacgtgtttgctgttttacacgactgtatattttgcagacctcaaacatgcttatttcaa

SEQ ID NO: 17128 - DNA, 994 bp, Zea mays
  Clone ID: LIB3068-016-A10_FLI
cggctggccccaccgagctgcagaggatgggcctcggcctggtcgtgggtgccctggccatgaccacggccgggacggtcgagcacttccggaaggccagggccaccgcagcgatgagcagcgacctgcatatcatgtggcaggtgccgcagtatgcgctgatcggcgtgtcggaggtgatgatgtacgtcgggcagctcgagttcttcaacggccagatgcccgacgggctcaaaagcttcgggagcgcgctgtgcatgatgtccatgtcgctcggcaactacttcagtgacatcatcgtgagcgcggtgaccaggctcaccacgacgcgagggcggtccgggtggatcccggctgacctcaacgaggggcacctcgacaagttctacttcctgctcgccgtgctggccgtcgcggacttcgcggtgtacctcgtatgcgcgagccgctacgggagcggcaaagtggacgggaggagcagcgacgacgaggaggagggagcggccggtcaggtgacatccccggcttacgcatgaccatcaccggccgcccggccggcgggcatcgtacgtatgttgttcttgtcttcttgaggtggaggctggcaggctgcaaatctcgagggccattggttatttggttgacggagttcttccattgacgacgatagcacaagcatggggcgagcatggacatagtgatatgactaattaaagaataagcacttaagcaggactagctaaacactacatgctgcagcatcatgctcgcggtttttggccagtgtaacaacagacgacgattgttactgaccacgactgttctttgcgtggtctacagagttcgcttctgcaaaattcaataatgggcgagtgctgtatcatataaagtcgcaggttgcgccacgtagctacgatgtgactaacaaacaaatatgtattcaagttatgtattaaacggttaaccgtgtctttttaccgtttcaaaaaaaaac

SEQ ID NO: 17129 - DNA, 815 bp, Zea mays
  Clone ID: LIB3068-016-A9_FLI
ccttgaagcttgtgtgcagcgagggtgacgacggcattgcgtcaggaagattcagccaggagttgcccatgcaaactacagcggtttatgacgcgactggcatggaagctgagagagtgctaatatccgagatatttggctccacaccactctttactcgcggtgccgattcagattcttttcgcaagcagtcaagttcaggtccgctgatgacaggcaagaacaggaagttctggcagaggttgcgaagcctgtcaagagggagcatgagtgagcatggcatctcaccagactatgaaacccgctcgcaatatagtggtaggtgaggaaacctttgcttggctttgattagaaaacggattgatactcagactgggaataaaagagttcaagctgagctagtgtaaactacgcatctggaggtgaaagctatagcttcaggatctcattcagagtagcagagtggagcctgagctttggattgctggaatggaaataacctctgctgtggactgctgggatctacctgcaagcctacgtggccatactccagaaccctgatacccccacttccttttagagcttgttaatttgagatttttgagttactcttttgtctagatcgtagtttatttttgcttaatcttttgtttggtcagttgtttgttagggctgttgatttgtatagattcagactacatctcttcgggcttgtggatttcgatagacttgttgtacattgacatatgctggtctcaaatgaggatgataggttcttggtcctaacttgtgactagttgattgtgcttcttgtg

SEQ ID NO: 17130 - DNA, 192 bp, Zea mays
  Clone ID: LIB3068-016-C12_FLI
ctcttggtgatttgtgagggtggggagggtttggtggtggtgacatggctgttgggatgacaaatcccaagagaatgcttcaggctgtggtgtcctactcctttgtacagatgagatatatcatctttccagcctacttgctagtaggtctatgtaaatataggtgctgcatatatagaataagacttttgt

SEQ ID NO: 17131 - DNA, 931 bp, Zea mays
  Clone ID: LIB3068-017-F7_FLI
gatctctctcggccccgtgcccagcgctccgaaaccctagcgccgccgcgggtgccaggccgcgagcgtcgccatgggcatcgtgtttacgcggctcttctcgtcggtcttcggcaaccgcgaggctcgcatcctcgtcctcggcctggacaatgctggcaagaccaccatactctatagactgcaaatgggagaggtcgtctccacgatcccgacaattggattcaacgtcgagacggtgcagtacaacaacatcaagttccaagtatgggatcttggtggtcaaacaagcatcaggccatactggcggtgctactttccaaacactcaggctatcatatatgttgttgattcaagcgatacagataggcttgtaacagcaaaagaagaattccatgccatccttgaggaggatgaacttaaaggtgcagttgtccttgtgtatgcaaataagcaggatcttccaggtgcactcgatgatgctgccattacagagtcattagaactacacaaaattaagagccgtcaatgggcgattttcaaaacatctgcaataaagggagaggggctctttgaaggtttggactggctcagtaacacgctcaaatctggaagcagctaaggagcctccgcctcgtcatgaatcatttgctggaggctaaagaatagccgatgcttgcaagtcagcgcgcaaatcccattctctttgttttaactccagaagttctacaccgccatcaattatctgtaaagtgcgtgttaaattttttggatactacattagatgtaccctcaggttgagatcaagaataggtctgtggaaaatgacgagcaaactgtgccactgtctttacccgtaaatctcatggatcatgacaagtttttttttgtaccccaatatgattaaacttactgcacatttctatgtttt

SEQ ID NO: 17132 - DNA, 1032 bp, Zea mays
  Clone ID: LIB3068-017-G10_FLI
ggagcgcattctcaggtttgcgcgtattaaacttatcagggaactcaattgtgcgagtaacagcaggagctcttccaaaaggccttcacatgttaagcctgtcaaagaataacatatcaacaattgaaggccttagagagttgacacgattgcgcttgttggatatcagctataatagaatatctagaattggccatggattggcctcctgttcctcgttgaaggagttatatctggccggtaacaagatcagtgaggtagatggtcttcaccggcttctgaagctcaagattctggacttgcgccacaacaagatttctacatcaaagggcctcgggcagctagctgcgaattacaactctctagaagccattaaccttgccggcaaccctgcacagaagaatgtaggcgatgagcacctgaagaagtacctgcttggtctcctgccaaacctcgctgtgtacaacaagcagcctattagggcgactggatcaaaagacgtctcggaccgccatacccgcaagatctcttcttcgcaccattctgaccgtggtggcagacccgaccgcagatcttccaggttggtgggtgccccgtctgctcacaagccacagagctcgcggcatggacgctctggatatgtgtcaagctcagcgctcaagtacacgagagcccgcaacacgcacaagacctcgctggggtcaaggccccttgaacatgcgagtgccatagatctggcgaagcaaacccagacagagggaaggacacagtaagatcagtcaagcacgaccatcgatatactaccatggtattgttgtgaagtaaagcgaggcaccagttttgctggtggattttttttctctctcacgtgaataaagctcaaaacagtaaacagagcagtgctttcatatcagcccatatttttttttctaatattgttgagtggtattgatggcaattgggaattgtatgatttacttgccttatgaataaagcttgaaagaaacaaaataaagattagtattttttttc

SEQ ID NO: 17133 - DNA, 544 bp, Zea mays
  Clone ID: LIB3068-017-G3_FLI
cagggcaggttttgcgaagcaaagcccacgagcacaggatgaggatgcgtgcgcgggcggcatcggcatctgcgccggcggctgtggtggtgctgctcctgctcctgctactggtgggcgtctgcgcgggcgccgtgtacaaggtaggcgacctggacgcctggggcgtgccgccgccgtccaagcccgacgtctacaagcgctgggccaaatccatccacttcgcgctcggcgactccatctggttcctgtacccgccgagccaggactcggtgctgcagctagcgccggcggccttcgcgtcctgcgacctgtcgcgccccgtggccaggctcgccgacggcaactccttattcaacctcaccgcgcccggccgcgcctactacgccagcggcgcgccgggccactgccgcaggggccagaagctctgggtcgacgtgcccttgcccaacggcacctacctccagccctccgccaccgacctcgccgcgctcgcgcccacccccgccgccgacccgcccgccgggttcgcgtccgcggccgc

SEQ ID NO: 17134 - DNA, 563 bp, Zea mays
  Clone ID: LIB3068-017-G4_FLI
cgtcggttcacttctccaggtaaggaaagggttcgtactcatggcgccgccgcagccaaagtcgggcctcttcgttggcatcaacaagggtcatgtcgtcaccaagcgcgagctgcctccccgcccgtgccaccgcaaggggaaatcaacgaagagggtgtctatggtcaggggcctgatcagagaggttgctgggtttgctccttatgagaagcgtatcactgagcttctgaaggttggcaaggacaagcgtgccctgaagcttgctaagagaaagcttggaactcacaagagggcaaagaagaagagagaggagatggcgggcgtcctcaggaagatgaggtcggctggtacgcacactgacaagaagaaatagagagcatttcaagttcatggagcctgccagagattatgttccagtgtctgattttccatacatgtagaacctaatagacatgtcaaagtattatgtatcgaaccagctcatgggattttgctccttccaatgcatccagggtttatgtatcgaaccagtttatgggatcttgctcctattccaatgc

SEQ ID NO: 17135 - DNA, 327 bp, Zea mays
  Clone ID: LIB3068-019-A6_FLI
ccaggagctgctgtcgacgcccggcgcgcccacggcgccgatcgtcggacggttcgccgccagccagaaggagttcttcaggagcttcgccaggtccatggtcaacatggggaacatccaggtgctgacggggagtcagggtgagatcaggaagaactgtaggatggtcaacggaagctagacccgtcgacggcacaagttactggtgaactgaaagcagttctgctgtatgtacgatgcctcaaacatgttgatgggataatggtgcgccgatcgatttatttgtcaaggagatccaataaattggttttttgcatttttttcaac

SEQ ID NO: 17136 - DNA, 453 bp, Zea mays
  Clone ID: LIB3068-019-C1_FLI
gcgacccgggacggccgaagggattcgaggaacgaggagcgctgactcccctatttttttgggccttttgccgtgagcccttggcgcatgcatgcatacagcttgatctcgactcatcgtttcctgatggtaggagtgccatttggtcgagtcagtagatagcatcatttccccttttgttttctcctttgaatctccagtgtcctgtacatagtatttttttccccttcctttttgccctttttagacctcccggttaatctttttgcccggtgaagaatgggccagggtgtaggttcagctatctgttggtacaatctagcgttttgtctgaatagcggctatgttgtctcatggttgagtcaccccatagactggcttcgtttgggcctttgggagagatgaatgaaaggcacacagtatagtacaggatgttagtgccttctgaagctg

SEQ ID NO: 17137 - DNA, 2730 bp, Zea mays
  Clone ID: LIB3068-019-G10_FLI
gtgatgtcaggaggcaatcaaatgatttccagggcgtaatgaaccatttgtatgatgtgatgtatgaatttagtttctcccttccccctgattatgcgttggtgataagagctcttggttctctagaagggactgcaaaagcactggatcctgagtttaaagttattgagagtgcatatccttttgtaattgggagactccttgcagaccccagccctgatatgaggaaaatattgcgggagcttcttatatgtgacgatggatccatcagatggaatcgactggaaaggctgattgcagctatatctgaacagtcatcagaatcttcaagcgcatcaggagctgactccagtgagaacgccaatggaagtcctgagtggagatcatttgatatgcattctgtgattgcagctacagaaaacccgaacccgcccggacgcgtgggctctctctctctctcctcccctaaaccctacgctgcccttctttccctccccgtctctccctcccgtgcgggcggcggagctgatgagatcccggccatggcgggccccacctcgcggctcctcatcctcgcccgccgcgccgaccgacgcagatgcctcccttttctcgttccccgcgccttgcaggccgcccccccgaccttttctccggcgttgccgctacctccctgcctccccgcctcaacgccggtgatgagctattcaagtgcatttacaagtgtacatggagagaggccttcatcagaatatgcaaagatcaggaaggagtcactggaaacccagtttggaagaatattgggttcaagttcacgcaggcattttgctgaccgtggctttggtccattccttgctctatacagggctgctactatctcctttcatgttgtaaaactcactatttggcatttgttgctcaatgatatgcataaaagagcagaaaagtttcgagagaccttgatacgcttgggtcctttttatatcaagcttggccaagcattgagcacacgccctgatatacttcctagtgcgtactgtcaggagcttgcaaagctacaggatcaaataccaccgtttccaactcgcattgcactcaggaccatagagtctcagttgggttctcgaatttctgatttgtttgctgatatcagcccagagccgattgcagcagcatcactggggcaggtttacaaagctcatctacgatctggagagcttgttgcagtcaaagttcaaaggcctggaatggcgcccttgctgactctagatgcacttttgttccacatgattggaggacaaatgaaacgatttgctaaggctcgcaaagacctattggtggccgttaatgagattgtcagacacatgtttgacgagattgattatattttagaaggaaaaaatgctgaaaggtttgctactctttattcacatggttcaagtggggtcaattctgaagctagtacaagtatcaaggtcccaaaagtttactggaactatacatgtaaaaccatattgacactggaatggattgatggaattaagctaactgatgctgagcgcatcagcaaagccaatttgaacaggaaaagaatgatagatgagggtctctattgctcattgcgacaactgcttgaagaagggtttttccatgcagacccccatcctggtaatctagttgcaactgaaggtggatctctagcatattttgactttggtatgatgggagatattccgaggcactatcgtgtggggcttatacaaatgcttgtacattatgttaatcgggactccttaggcttggcgaatgacttccattcactaggatttgttcctgagggaacagatttacttgcagttgcagatgcgttgcggttttcctttggtgatgtcaggaggcaatcaaatgatttccagggcgtaatgaaccatttgtatgatgtgatgtatgaatttagtttctcccttccccctgattatgcgttggtgataagagctcttggttctctagaagggactgcaaaagcactggatcctgagtttaaagttattgagagtgcatatccttttgtaattgggagactccttgcagaccccagccctgatatgaggaaaatattgcgggagcttcttatatgtgacgatggatccatcagatggaatcgactggaaaggctgattgcagctatatctgaacagtcatcagaatcttcaagcgcatcaggagctgactccagtgagaacgccaatggaagtcctgagtggagatcatttgatatgcattctgtgattgcagctacagaagacctatttgatttcattttatcgaggaaaggatggcgggttcgggttttccttgtccaggacatcgttaatgcttcagacgtgttccttcaagaagcgacattcccatatgtatatgcgaaagtgggaaagctaggggacctaaatccagagagaagtaagatgatcaggaggctggtgaatactgtgcaatcgttccgccaagctatcaatttggctccagatgcttggagcgccatgctaatccgcactttgttgaaacctgaatcacaaaaatttgttcttgatgtgtttttggccctggctaaccattccagttacaagattccagaaacattctggctatttatgtcaagatttctaaattacttggacaaacaagatatactttaggaacggttaatatatcaattcctctttttttgtt

SEQ ID NO: 17138 - DNA, 480 bp, Zea mays
  Clone ID: LIB3068-020-E1_FLI
tcgccaagaggaacaatagcaccagctccctcgtgcaggacgacggcgccacgccgccgccggctgcagtagacgcctccgaggactcggcggcgaccggcgagtactacgaccacgtcgcgtacgagtacgatggcctgcacgaccccttcgtctgcgccactccggacctgtgggatacgtggccgctgctggagtggaacgcggtggcctgaaacctcgatcgtgtactcgtcgtcatgtctctgtatctagtgcacgtgtggtggattcatggtgattccttatatagctagctagccccaactagctaccgagccagttgatccggggagggatcgacgggtaacagacgatagagagctgggtaattaggaatcaggagcgaccggcggctctgaagtctgaaccacctctctcacgaacatggatcctaaggtgcacggtggccggacattgtcgatcgatccctcttttccc

SEQ ID NO: 17139 - DNA, 475 bp, Zea mays
  Clone ID: LIB3068-020-E9_FLI
aaatttgttgctacttgtatatttgattgatcaagtattgtgttttcagctaaatactgtcttgtccaggtcgtggcagctggtgctaatcctgttcagattactcgtggtattgagaaaacagctaaagcactagttgaagaactaaggaagttgtctaaggaggttgaagatagtgagcttgcagatgttgctgcagttagtgctggcaacaactatgaaattggtaacatgatagcagaggccatgagcaaggtcggtcggaagggcgttgtcacccttgaagaggggaagagttctgagaactttctctatgttgtggagggaatgcaatttgaccgtggttacatctctccgtactttgtaacagacagtgagaaaatgactgcagagtacgagaactgcaaggtaactgtaaaatatgagatatcaattcttttttttttgctgtttattgctttcctgtttcaaaaac

SEQ ID NO: 17140 - DNA, 357 bp, Zea mays
  Clone ID: LIB3068-020-G11_FLI
aaaagattgattctgagaatctgctacgtagggcatttagtgtgttccttttcaactcaaaatatgagctgctacttcagcaaaggtccgcgacaaaggttacctttcctttagtttggaccaatacctgctgcactgcatgtttatcaaaagttatcgctcctgctcgcggaaagtgagcttgactgttgccggggtggaagtatcgttttggactgatgcatgagtgctgcggaggggtttgttgtttgtttgtttgttcggtgaccgaatcgcgagctggacgcctgtttaatccgtgcttatacatcgtctgagtaaacagcaataagagggacatccgtaagctctttccgt

SEQ ID NO: 17141 - DNA, 748 bp, Zea mays
  Clone ID: LIB3068-021-C4_FLI
cggcagcagcgctcgtttgatccccgcggcggtccggcgtccgggtaggggagcgaggatgacggagtccctggtgcggaacaagccggggatggccagcatcaaggagatgccggtgctgcaggacgggccgccgccgggcggtttcgcgcccgtgcgctacgcgcgccggattcccacctcgggccccagcgccactgccatcttcctcacggccttcggcgccttcgcgtatggcatgtaccaggtcggtcaggggaacaaggtgcgccgggcactcaaagaagagaaaattgctgctcgtagtgctatactgccgatgctccaagctgaagaggatgaaagatttgtcaaagagtggaagaagtatcttgaggaggaggcgaggattatgaaagatgttccagggtggaaggttggcgagagtgtgtacaattccgggaaatggatgcccccggccaccggtgagctccgccctgaggtgtggtaagggcctgttgtaggcattgagaatgcaatcatgtcatgagggcatgaataaggctatcagacatgggcatccttctttgttcactaaggatcagctgttcaaatacctgtatctattttactcttatgaaatctggctggttaataatatgaagccgacgctttgcctcatctatgctcgtgcattgatgtaacgtgtccttgtttgatattaagaaactactatggaatataagaaagaaaacagcctgcttcttgc

SEQ ID NO: 17142 - DNA, 1251 bp, Zea mays
  Clone ID: LIB3068-021-E12_FLI
gatcaaggcaaggtagtggtggtgaaatgctccctgctaggctcagtcttgtccaacctgttgcttgtccttggaacctcccttttctttggtggcctggctaaccttggaactgagcagctatacgacaaaatgcaagtagatgtcagcacaggacttctgattcttggtgtgctatgccactctctgccactgatgctgagatatgctgtgagctccggggagcacgcagaatcctcttgggattcaggactggagctgtcccgagcatgcagcattgtcatgctccttgcctatgtagcctaccttttcttccaactgaaaacccaccgccaactatttgaaccccaaccccaagaggttgaagatggtgatgattcggtctctcaagacgaggcagtactgggattttccagtgcaatgatttggctgggagtcatgaccctgatgacagcactcctatcagagtttgttgtgagcacaattgaggcagcatcggaatcttgggagctatctgtcagtttcattagcgtcatcttgattccaatagttggtaatgcagcagagcatgctggtgcagtgatatttgcgtttaaaaacaatctggacatcaccctcggagtatctttggggtccgctacgcagatttccatgtttgtggtgccattgagtgtccttgtagcatggatcatgggagtcccgatggatcttgatttcaacttgcttgagactggttgtttgtttcttgcaatattagtaacggccttcacgctccaggatggatcatcacattatctgaagggactgctgcttgtgttttgctacattgtcatctccttatgctttttcgttttgagacagcatggaaatggaagcaacgatgatcagctgggtgtagcaagcaagccatggaggatttagggcgcctgagctggcagtagtttctcaacaagtagcgtggactttggtttgcacgattttgcatggaacactggaggggagacccgtgaagtttgactaaagtatgtagactgcgggaagatgctgttcagctgatgtgtgaatgtaagtacatacaaagactatagatgaaaactgatgttgcgtgagagactatttgtgtgtgtttttcttgttctttccaccaagcaatggctagaattcggttgagctgttgaaattgtctcctgtataaatcagtgacatgtcatactattttccaactggatttaacagagcctttatccttct

SEQ ID NO: 17143 - DNA, 517 bp, Zea mays
  Clone ID: LIB3068-021-E4_FLI
ggaaatcctaaacggaagtgagacgcccaatcggtgatccaccgcttccccgtcggtaccatgtccgctggaagcgagaggccgtacgccttctcgcccccgtcggcggtcccgggccccttctcccgcggctccggctccgctcccaccacggccgcgacagatagcactgggaggagctcgtcctccgtggcgccgacgaagagccgaaagccaccgttccggcccgccgtggacgacacaaagcccgtcctccgcgatccgatatcacgctcggacctggcggtcaccgagcaggtcgtgctgcggctgccgccgttcccctaagttcgcgccacccaatgttctttgctcaaccatattaatctaaagatggtgccctttctgcgcatgttcgtcaactcgacagtttgtcaattggaaactttgcccgtctaattatggttctggaccattagtggtttttgtattcaattagtaaactgagttatatagaagtaatgataattggttatct

SEQ ID NO: 17144 - DNA, 1289 bp, Zea mays
  Clone ID: LIB3068-021-G2_FLI
agagacagagagagagactgccaacgaggcgaagcagccggccaatctagcatccgcgcgcggggtctgagagcagagcggcagggcgccatggcggcgtcggtggcgctgagcagcgggcaccggatgccggcggtggggctgggcgtgtggcggatggagaaggcggacatccgcggcctcatccacacagcgctccgcgtcggctaccgccacctggactgcgccgctgactaccagaacgaagctgaagttggtgacgcgctcgcagaggcattccagaccggactcgtcaagcgggaggacctgttcatcacaaccaagctgtggaactcagaccatggccatgtgcttgaagcctgcaaggacagcctgaagaagctgcagctagactatctcgacctctacctcatccatttcccagtagccactcggcacaccggagtcggcacgacttctagcgctctgggtgacgatggcgtgctggacatcgacaccactatctccctggaaacgacatggcacgcgatggaagagcttgtttccatggggctggtgcgcagcattggaatcagcaactacgacatcttcctcaccagagactgcctggcctacgccaagataaagccggcggtgaaccagatcgagacgcacccctacttccagcgcgactctcttgtcaagttctgccagaagcacgggatctgcgtgaccgcgcacaccccgctgggtggctccaccgccaacgccgagtggttcgggacggtctcgtgcctggacgaccctgtcatcaagagcttggctgagaagtacggcaagacgccggcgcagctcgtcctccgctggggtctgcagcgggacacggtggtgatccccaagacctccaaggcggagaggctgcaggagaactttgacgtcttcggttttgacatctccggcgaggacatggagaggatgaaggccgtcgaccggaagtaccggactaaccagcctgccaagttctggggcatcgacctctatgcttagcttttagttcggttgcgttgcgtcgcgtcgcgtgctgcgtctctcggcacccccagacaagacagcatcaataatgaggattccctcagacggcatcagtcaaagccacgaggatctcagacagcatcttccatcacatgtgacggtgtgaggttgatggtagggtttggtatctccacgtgtccctctctctttcagctcagcttcatcaccatgtagactacgcagtgtttgcctccgattatttactgtttttcttcctt

SEQ ID NO: 17145 - DNA, 2447 bp, Zea mays
  Clone ID: LIB3068-021-G7_FLI
tgtgtatgtatttttttagtacaatagtattcaaaatgtatgaggactctttctttttgattgttttgaacaatgggcgtatgaaccggtggaagaacaattcatttgatagttgtttgtgtccaaaatggaactaaatctaaaatttgtggagcaaaccactcaatccagatctctatttaatcaaacattttttttgttatgatgcagttccacacgtgaaatagccatatggatatgtaacaacataaatttgttcagtgggaaataagtttctataatacatttatgcacccaggtgacaagaaaaaaatattttgtcatttctataaaacatgatgcattttttctcaattcatagtgtgatgttattcctcttttgcctttagagaagcccataatacaaatggataagaagtcaccaaacatttctaaatcactggtcttcatccagtgacaacctttagtgtcgagctggtgtttgtgcttgagctttagtatgtctgcaacaagcctttaggaatgtcgatatgctcatatgcttagttgtgcatgagtatttttgttgcaaggtttagatgcagtgttctggtctttagtgcatgtattttatagaatataacacttctatattgtagaatgcaatctgatagtttacatagaaactgataaacttgattgatccttggcattatagtacaaaaagtgcaataccttgtgaattaattttgtacctcattgtcatttacgggttaactgtccatacattgtattacatgttttctacaacctgttcttatttctcaacgaacagtagcaatcattggtcaggacatgtagcttcatttgttaggacatgtagcttaatgctatcttgttgttttctactgttcataaacgcaggacctgagatctagaaggacacaacaggcaaggtggatgtattcgtagttgattatatgttaaaagcaaatttcggatgacattggtggagattgcttatctctaagacacatctactcattctttgaatggaaatcacatccacgttctagaaagtctatttttacttcaaaagtactccttctgttccaaataaattagtgttagcatctctgcactctattgcccacttcccccctcatcggtgttttttattgttgcatatcaattttgtggctcaaatgcccctttgaaacatatagcaccaaaattatcctaattaattaattggtttctaactggctactctatttgcaacaatggggatatataaccttaccatgtctgtttatcacagtgcatcttagattgcatcgtattgtaattgttttagttccttgacatactgtttgtgcaacaggaactgcttgatgtacttacggttgggtatctgtgtagatgtagctgccaagttgtctaaagaaaagttcctgacctttcacatgctgccacattgccacaataccttaagagcttttctatacttctatgatttgtgttttcgagatctgagttatttaaatgttgtctgctattttgaatttttatatgaagatcaaagttctcaattgataaagtaattaatataacaagcggacaacacatagacaaactaattaatgtagcatatagacgaataaggaatcctgaaacattgaccgtgaagaaaattattgtgcacatatgcactctttctccaaaatttggcatttaatcttattgcaacatacttgtacagaggggcgagggttgttcagtgctttgacatgtgtgcaactattcaagcacaatggttagatgatatccccattcattttagattattacattgtggtgttcgacttcttcagtcaagcagcaatcatgcaacatgccttactgtagtgtaagttatttacaccaacttcaattcttcataccatgcatctattgtttccttttagtttcaatctatttttcttgatgttatctatgtttataagaaaatctcaagttttgtatatattttagtttttatcactgcacatgttgctggataaatttatagactggaggattatagaggactaacaagtgctactgggagattctcgagcaccattgaactaagagattccaaatagttctttggagtctattgttgatgttggcggggataatctagcagagatttgtcagattttttgtgcaacacggaggctacatgaggcagcaacgatcccattcttctcgcatgccactttacacaagctaaggatagcttctggtctcactcatggttgtggcagggaaagccgagtcagtagggtttgtcatgtagctggagttatctcagaccgcatattagatgcagtgatgatgtttacatttaccgtgcaagcaagatgacttatattatgccttaggacaataagtattgttttcactctaatgaaatacttggt

SEQ ID NO: 17146 - DNA, 1494 bp, Zea mays
  Clone ID: LIB3068-022-C1_FLI
ccaaggagggcttcctgtacatgacagagagcacgggctgcttcaacgcggaggcactcgagttccagaccaagatcaccaagcgctccggactcggcgatcggacgtacctcccgccgggcatccaggcacggccgccgcggctgtctatggaggaggcgcgcgcggaggccgaggccgtcatgttcggctgcctcgactcgctattctcggccacgggcatcgacccacgccgcgatgtgcgcgtgctcatcgtcaactgcagcctcttcaacccgacgccgtcgctggcgtccatggtagtgcaccgctacaagatgcgggaggacgtcaagtcgttcaaccttggaggcatggggtgcagcgcagggctcatcgccgtggacctcgccagggacatgctgcaggcgaaccccgggtgctacgccgtcgtggtgagcaccgagaacatcacgctgaactggtacttcggcaacgaccgctccatgctgctgtccaactgcatcttccgcatgggcggcgctgccgcgctgctgtccaaccgccgcgccgacgccgggcgcgccaagtaccggctgctacacacggtacgcacccacaagggtgccgcggacgagtgctacggctgcgtgtaccagcgcgaggacggcaccggccgcgtcggcgtgtcgctggcgcgcgagctcatggccgtcgccggggacgcgctcaagacgaacatcaccaccctgggcccgctggtgctcccgatatcggagcagctcaagttcctcaagtccctcgtgctccgccgcgccctccgctcccgcggtgtccgtccgtacatcccggacttccggcgcgcgtttgaacacttctgcgtgcacgccggcgggcgcgccgtgctggaggaggtgcagcgcagcctggggctcagggacgcggacatggagcccagcaggtgcaccctgcaccgcttcggcaacaccagcagcagctcgctctggtacgagctcgcctacgccgaggccaagggccgcgtccgccgcggccaccgcgtgtggcagatcggattcggatccggattcaagtgcaacagtgctgtctggcgcgcgctccgcgacgtgccgcccgtgcacgccgacggcgccggcggtggcagcaactgcaacccgtgggtggacagcattcagagctacccgccaaaagagtacatctgatcgccatcttctttgtggtgaattaatcacgtcctgttggatcagttgtactagccgcgacgcagtagtgcacgagaactgtatgtatggtgattttttttttgtttcttcatcaggtaggagctgaatcttctttcttctacctttacatacagtagtgcatgcgagaacaaggcgttgccacgcattggattaccgagtgctgtggcttcttaatgattgcggaccggtagacgtatttaaattgagattatggtaagtatggtagatgaacaacaaaaaggagcagttgtag

SEQ ID NO: 17147 - DNA, 814 bp, Zea mays
  Clone ID: LIB3068-022-G3_FLI
ccacaagcgagcgagggacccggggcggaagaagagagagaagacgtctctctcctctcggcgtccccgttccccaacctctcgtctgctgcctgcctgcctgcctgcctgcaaaaaggagtttgtcatggcgtctaagcgcatcctcaaggagctgaaggacctgcagaaagacccccccacatcatgcagtgcaggtcctgctggtgaggacatgtttcattggcaagcaacaattatgggaccacctgacagtccctatgctggtggtgttttcttagtgaacattcatttcccgccagattaccccttcaaacctccaaaggtttctttcaagacaaaggtcttccatcctaatatcaacagcaatggaagtatatgccttgacattctcaaagagcagtggagccctgctttgacaatttctaaggtcctgctctccatctgctccctgctgaccgaccccaacccggacgaccctcttgtcccggagattgcccacatgtacaagacggaccggccgaagtacgagtcgacggcccgcagctggacgcagaagtacgcgatgggctgacgaacgctttcctgctcgtctgggcgccattgttcccttggatttgttgttggtcgtatgtatccctgatccatctaggatcatcgtattgtattgtagtgtatgtatgtcgtcggcctaccatcgttgccatccaccatagtgaggtggttggacatgcttcgcctatatgcacctgtgcttgccttccttcgggtcggtgctgtttggttaatgttcatcgaagacgttgatttcgtt

SEQ ID NO: 17148 - DNA, 1171 bp, Zea mays
  Clone ID: LIB3068-023-C12_FLI
agttagtccgtgtgatgagatcatgtcctgctggcgccgacgccgtggtcgtcggcggcggatacataggaatggaatgcgcagccgctctggttgccaacaggatgaaagtcactgtcgtcttccccggaaaacacttgatggcaaatctgttcacaccgaagatcgctgagttttacgagaactactacgaatcgaaaggagtcacttttataaaaggaactgcggtttcatctctgcagatctcgtctgggaaggtgacggcagcaatcctgcgagacggcaggcgcctacctgcggacatggtcgtggtcggcatcggcgcgcgcgccaacacggagctcttcgaaggccagctggccatggagaagggcggcatcaaggttgacggacagatgcggacgagcgacgcatccgtgtacgccgtgggcgacgtggccgcgttccccgtcaagctgctgggcggcgaggtccgccggctggagcacgtggactgcgcgcgcatgaccgcgaggcacgccgtcgcgggggctctggagcccttgggcccgatcaccggggaaatcaactacgtgcccttcttctactccagggtcttcgcgctgtcctggaggttctacggcgacaacgccggggaggccgtgcactttggggacctggacttctccgcttcgccttctcctccgtccgcgcccaagttcggcgcgctctgggtccgcgcgggccgcgtcaccggcgcgttcctggaaggtgggagccctgaggagtacgaggcgctcgcgcgcgccgtgcggcgcaggacgaccgtcccggacgtggccgtgctcctcgcgcggtggggcctcgcgttcattgtccaggaccaggagggccggagcggagccacgcggtcgggtaggctttgtggcagcggcaacacgtccaactacgcatgggcatggcacgccacggtcggcgtggccgcggccgtgtccattgcggcgttcgcgtactggtatggatggaaggcgccgtacctggcgaaacgccacttctgaacaaaggcagcatgctgctctccgtctccgtcgaccaagaacacaacttgtcacacaacaactggacatcactcagcagagtaaatttactatctttgtatttggtaataaagtgaaaaaataaattaaaagat

SEQ ID NO: 17149 - DNA, 537 bp, Zea mays
  Clone ID: LIB3068-024-B10_FLI
gaattgctgagaggtccactctattatgtcctggtgctgctgttcagcgttttagtcttctggcgtgagtcccccatcgggatcgtctccttgtcgatgatgagcggtggcgatggtactcccgtccccagtatctaatagcacgatgtcgttttgtagaacgccgttgcatttgattgtttgtgccatataacttgcaggttttgctgacattgtcgggaggaggtatggctcagcgaagctgccattcaatcggaagaagagctgggccgggagcatctcgatgttcatttctggtttcctgctgtccgcgatgatgatgctctacttctcaagcctgggttacattgatgttatctgggaagaggcacttggtaagctggcgcttgttgcactagcagcaacagtagtggagtgcgtccctgtgaccgaagttgtagatgacaacatatctgttcctttggccaccatgctggtagcttttctcttgtttagctccaaccgcacaatagttaattaaaatactactagtgcatt

SEQ ID NO: 17150 - DNA, 708 bp, Zea mays
  Clone ID: LIB3068-024-B6_FLI
ccaagaagcaagaaaactagaaaaggctcctcccgaccgcaacgcccctcatctccctcgaccccgacatccccgacccgatggcgcccaaggcggagaagaagccagcggagaagaagccggcggccgaggagaaggcggagaagacgaccgcagggaagaagcccaaggccgagaagcggctgcccgcgtccaagtcctccggcaaggagggcggcgagaagaaggggaagaagaaggccaagaagagcgtggagacctacaagatctacatcttcaaggtgctgaagcaggtgcaccccgacatcggcatatcctccaaggccatgtccatcatgaactccttcatcaacgacatctttgagaagctggccggcgaggccgccaagctggcgcggtacaacaagaagcccaccatcacgtcccgcgagatccagacctccgtgcgcctagtcctccccggagagctcgccaagcacgccgtctccgagggaaccaaggccgtcaccaagttcaccagcaactgagcgcgctgcgggatccgcggatctgttagaagggttctttgctgtgtcctttccccagtcccccaccctacccgcctagtagctagcttgcctgctctataaatccggcgcgccggattgtaatggtcctcttagatttgatgtccctgttgtggaatatagttgtatctctccgcttgct

SEQ ID NO: 17151 - DNA, 881 bp, Zea mays
  Clone ID: LIB3068-024-B8_FLI
gcaacaattatggtcactaaggtggatgaaccatcaaaatacggtgttgtggttatggaggaggcaactggcagggtggaaaggtttgttgagaagccaaaaatatttgtgggtaacaagatcaatgctgggatttacttactgaacccatctgtccttgaccgcattgagctgaggccaacatcaattgagaaagaggtcttccctcaaattgcagctgatcaacagctctatgcaatggtccttccaggtttttggatggatgttggtcagcctagggactacattactggcttgcgtctttatctagactcgattaggaagaaatcagctgccaagctagctactggagcacatgttgttggcaatgtgctggtgcatgagagcgccaagattggagaaggttgtctgattggtcctgatgtcgccattggacctgggtgtgttgtggaggacggcgtgaggctttcccgctgcactgtcatgcgcggcgtgcgtatcaagaagcatgcttgcatctcaaacagcattatcggctggcactcaactgttggtcaatgggcacggatagagaatatgactatcctgggggaggatgttcatgtgtgtgatgaggtgtacagcaatggcggtgttgttctcccacataaagagatcaagtcaagcattctgaagcctgagatcgtcatgtgagctctccagttttagctacagtacattcttaacttctttgacgaagggaggattgcagatccccttttataaacgatattgcttggtatcttcgatctaatgcaaacagcttcatacttggtctcttgttaaactattgacaatgtatcttgttttttgttgaaaagtttagtacttgagtgtcaatc

SEQ ID NO: 17152 - DNA, 551 bp, Zea mays
  Clone ID: LIB3068-024-E10_FLI
ggcggcggcgtacgaggtgctcgtagcaggcggggaggggctgttcctcaagaccaagcccccggccgccagatccgccgtcgaggcgctcccgtccgccgtcgtcgcggccggccaggaagtccagggggatgagtgcgctgtgtgcaaggacggggtcgcggtcggccagcgcgtcaagcggctgccgtgctcgcaccgctaccacgacggctgcatcgtgccctggctccaggtgcgcaactcgtgcccgctctgccgcttcgagctgcccaccgacgacccggagtacgagtcctggaaagccggccggaccgacgccgcgtgaaccggccaaccaggcagtggccgcatgctcttatggtatggttttattgatagtgttgtatgtatgggttgggtttgaatcgggtgctttggttataaggttgctactcagccgtatcaaaggcaaagtatagaggcagtagatgcagagatggtttttgatcggtttcctttttctccttaaagagggactcatgaagtttttccaagtgaccgaggttggc

SEQ ID NO: 17153 - DNA, 555 bp, Zea mays
  Clone ID: LIB3068-025-C2_FLI
tatcacagtaggaagctaggaggaaatcaaagcaacaaagttgccggccgagagaagcaaccatgagacctcaggcgtcgttactcgtcacactggctgttatcgtcgtcgtccctgcagctctgccactcagcaaagggacggaggaggaaggaggaggggaggcagtcgccgccgtggacgccgccggaacgagctcgtggccgtgctgcaacaagtgcggtttctgctacctgtctgacccgccgcagtgccaatgcctggacttctcgacggtcgggtgccacccagagtgcaagcggtgcatcaggtacaccgccgacggtggcgtcgacatcccgcccgtgcacgcctaccgctgcgccgacatcctcttcaacttctgcgagcgccgctgcagtactcccgggcccgccgcagttgctagcaccaagtagacgggtgcatatgcatgccatcgttgccgtgtgtgccgcttcagagaagaactaaataaatgttgccgcgcgctcttgatgcgtgcatgccactccttgaataaaccaatatttctat

SEQ ID NO: 17154 - DNA, 681 bp, Zea mays
  Clone ID: LIB3068-025-D8_FLI
tcacgcgtcagttcgttccctcctctgtgtaccggccagtaaaatccgaacccacagcgagaaatggcggcggcagcgctccgtccggcgatcctccgccgcatccgcctctccccctccccttcgctcgccctcgccgccgctgggacaggtgcatcccacccgcacgcgctggggcggtggctcgcgcggcccatgtcctcccacgacgcgcacctcacccgcgacgaagtcatcgaccggatcctcgacgtcatcaagagccaccccaagatcgacccctccaaggtgaccccggaggcgcacttcgagaaggatctcgggctcgacagcctggacaccgtcgaggtggtcatggccatcgaggaggagttcaagctcgagatcccagacatggaggctgacaagatcgactcactccctctggccatcgagtacgtcgccaaccaccccatggctggctgagcctctgctcgcccgagaggaggcgagttgaggtgaggcttcgcttggttttgtttccgagggcaaataatctgctggagtggcacagaaaaacttgttcttggtgctctgcattgcttcacggtgacggatgatgatgtcgaaatggaacattaacattttcagcgttagattgttgtttttgtgtgcgtgttatatctatatatactggttgac

SEQ ID NO: 17155 - DNA, 626 bp, Zea mays
  Clone ID: LIB3068-025-E11_FLI
ctcaagaagctcgtcgccggcggcaagctgaccaaggtgaagaactcgtacaagctgtcgtccgccaccaagccgaatcccaagcccaaggccgccccgaagaagcccaagaccggcgctaagaagcccaaggccgctgccaagcccaaagctaagacccccgccaaggcgaagcccgccacaaagcccaagcccgccgcgaagccgaaagccgtagtgaaaccgaagacacccgccaagcccaaggccaagccagctgccaaggcgaagcccaagaccgccggcgctaagccgaagccacttgctaagaaggccggccgccccgccaaggcggcgaagacgtcggccaaggacacgccagggaagaaggcccctgccaagaaggccgctccctcgaagaaggcggcgaccccggtgcggaaagcgccgtcccgtaaggccaagaagtaaagcggccaagaaggggggcgcgatgctgtaaatttgatatcggagaggctcgggtacactggtcattcagtatccgagaccgatagctgaggctagtggcgatggaggactgtgttattactactataaactggtggttgtgtttctgtaactggtgaatgatcaagttggaagct

SEQ ID NO: 17156 - DNA, 624 bp, Zea mays
  Clone ID: LIB3068-025-G2_FLI
aacaaaaggtccactggtcgtttcatatgctcgtttgttgtgcacagtacaatccccgctgcattgcaacaacagttgcttcttcatgcggaagcacacagaaatacagaatggttgtacatagcgattttacagtgttgccgataagctgacagcaatacagcattgcagtgtccgtgaaagtactggaacgaataaactagtgcgaatttgatttgtcattgccattgccatctctagatccgatcggaacaaagccaacagtcccaaacgtggatttgctactcgacgacccatgaagcagatgttatcttgcggtctttcccaattgggctccgcatgacccacctaatgggcagcattgagccagcgcctgtctttgggccatgtatcgccggaacccgggcaggcgacctagcgagcaccttgtctccaagctgcgacggcatgaagccctgcagaggcggtgcggccccggcaccgcagcctactccagcgcactggagcagctcaagtccggcaagaacaccggcgtgtcccccgcggatccggagtgcaggtacctggtgtccatctcgtatcgcgggcttgggaaccggatcctcgccgcggcgtccgcgtttc

SEQ ID NO: 17157 - DNA, 842 bp, Zea mays
  Clone ID: LIB3068-026-B2_FLI
agagaaccgaagggcctctgtcatctgggatcaagaggctggtcggtacgtgtcagttcctgcacagacaagaatgggaagtggagtcgatctgccagcaagaaacccacggttcttgacgaacccaagtggcgagccaagcagccatgtgaggagcgtggtgcctggcaatgcctcgtcctcagcaatgccatcagggcagccttcagagaggttgacatattctgggcagtcaatattcttcggtggccccatgctgagcacccctggcgtgggcgccaataggaatgaggcagacgcaagagcacgccccgagggaagcagagatcctaatgccctgtgtgagaaagcgaggactggctctggctcctcgccaatatttgctcctggggcgttccagaggaacccaccctttgacaaatgacttgctcctgctcatgaagtttatctgaagtgccgttacgctggaataacctcagcctgaagagttgacagatagtttaggttgctcttttgggcttgccagaaggacggacaaaggcagccgtaggaatgaggcagctgccggctgtggcgataacgaaaaaaccacaaatatcgctcggagccagtgctgactttttccagtgttgggagagcgatggagtgactggtgtacactgtcatcttgttaggaattcatcagatacttgatgcgcgacagatagaaagagctctaatttctggcgatgtcaaacgctgatctgcagctgactttgtaggcgtcgattgccgtcactgtatgtgcgccatgggatactattcgacatgtgtaaaatgttcgttggggtgcactttcggac

SEQ ID NO: 17158 - DNA, 368 bp, Zea mays
  Clone ID: LIB3068-026-C9_FLI
ggcatcagctgagctgagctgagctggtccatggagagggattactcgtccacggacggcgggggcagcgagatgcccgggaagaaggcgaggaagccctacaccatcaccaagccccgcgagcggtggagcaccgaggagcacgcccgcttcgtcgacgcgctgctcatgttcggacgcgactggaagaagatcgaggagcatgtcggcaccaagacgacggtccagatacggagccacgcccagaaatacttcctcaaggtccagaagcttgggctggccgcagggctgccgccgatgtacccgaggcgccacttcgccatgcagcagcagcagagctcggtggccgatggtagcagcgcggccgc

SEQ ID NO: 17159 - DNA, 310 bp, Zea mays
  Clone ID: LIB3068-026-G1_FLI
gagttttcttgaaaaatcaatggatgtttatctaggtcgcggcgcgagaagagagcaaggggaagatgattgtcaccgtgtttccgagcgggggcgagaggtacatgacctccgacctgttcgccgccgccagagaggagtgtattgccatgacgttttgatctttttttaccccctccccccagaaaaaaggggaaaacaaatacgcgtgtatctttatcttcacatggtattggtttaccatgcatgtacatttaaaaatatttttccccgaaacggaatagaacagctgcgtgcttgtttacacatc

SEQ ID NO: 17160 - DNA, 1060 bp, Zea mays
  Clone ID: LIB3068-027-E1_FLI
ctccgagggatccaaatccagtcgtggaagaagctgagcgagctcagcctcgcggacaatggcttcaccgggtccataccgccggagctcggtgacctgccggtgctcaactaccttgacctctccggcaacgagctcagcggcgaggtgccgatgcagctggagaacctgaagctggaccagttcaatgtgtccaacaaccagctgcgtggcccggagacgtaccgcagcagcttcttgggcaaccctgggctttgcctggatgatgcgctccatcttcatgtttgcagctgccatcctggtcgccggagtggcgtggttctatcggcggtaccggagcttcagcaaatcgaagctgcgcgcggaccgctcgaaatggacattgacgtctttccacaagctctcattcagcgagtacgagatccttgattgcctggacgaggacaacgtgattggcagcggcgcgtccgggaaggtgtacaaggccgtgctgagcaacggcgaggtggtggcggtgaagaagctgtggagcacggcggtgaagaaggaggagggctctgcatctgcatctgctgccgacaacagctttgaggcggaggtgaggacgctgggcaagattcggcacaagaacattgtgaagctgtggtgctgctgcagctgccgggactgcaagctgttggtgtatgagtacatggcgaacggcagcctgggggacgtgctgcacagcagcaaggcggggttgctggactgggcgacgcggtacaaggttgcgctggatgcgacggaggggctgtcctacctccaccacgactgcgtgccggcgatcgtccaccggggagaattttgcaatcagacaacgacagagggacggcgcccaggaagggagtaacggcgcgagggtactgggagaatgtgacatgagctaatgaccattaagagagtccgatgctatatgttcaaagcggataggattataatgccacaaatgcaattgccgcgatggcggtgccatgtttctgaagcccgccgttggcggtgccatgattgcaaaattctcgcg

SEQ ID NO: 17161 - DNA, 1379 bp, Zea mays
  Clone ID: LIB3068-027-E3_FLI
cactgccacacggagctagctagctgcaccgatcctctcgctcgcccgttaggtagctgacagtatctagccagccagcgaggagccgccgttgcttcctagctgcacctccgcgcgcggtctgcaggccagtcggtctcgatccacggccggccgaagaagaagacgccgacgatgaaggtgtcggtgctggcgctgtggtcggcggcggcggcgctgctgctggtgctggtggcgcaggcgccgtcggcggcggagggctcccaccacggcggcgcgggcctcaagctggggtactacaagaagacctgcccgggcgtcgagaacgtggtcaagtaccacgtcgccaaggccatcaaggccaaccgcggcgccggcgccgcgctcgtccgcctcatcttccacgactgcttcgtcagggggtgcgacgcgtcggtgctgctggacccgacgccggcgaacccggagacggagaagacggcgccgatcaacatcgggctggcggcgttcgaggtgatcgacgagatcaaggctgcgctggaggagcggtgcccggggactgtgtcgtgcgcggacatcgtggtgtacgcggcccgggacgcgtcgagcctgctgagcaacgggcacgtccacttcgcggcgcccgcggggcggctggacggcgtggtgtcccgcgccgccgacgcgcagcgcgacctgccggactccaccttcaccgtgtccgagctgatccgcaacttccggcgcaagaacttcacggtggaggagctggtgatcctgtcgggcgcgcacgccgtcggcgtcggccactgctcctcgttccgcgcgcgcctgtcggcgccgccggcgcagatcgtgccggcgtaccggaacctgctgtcgggcaagtgcgcggcggcggcgggcggcgccgacgaccccgtggtggccaacaacgtgcgcgacgaggacccgcgcgccgtcgcggcggccttcccgtccttcctcgggaagctgcgcaaggccagggactttctggacaacagctactaccacaacaacctggcaaggatcgtcaccttcaactccgactggcaactgctcacggagaaggaggcgctggggcacgtcaaggagtacgccgagaacggcaccctctgggacgaggacttctccgacgcgctcctcaagctcagccggctgcccatgccgccgcacagcaagggcgagatcaggaagacgtgccgctgggtcaaccaccactgatcctgctcaagctctgcacccggccggacggaaatataccagatgggtcttcacgccgatttgtttcgatcttctttcattttgttgctgtatgtttgtttgattattatctgatgatatgcatgtgttttttt

SEQ ID NO: 17162 - DNA, 1689 bp, Zea mays
  Clone ID: LIB3068-027-E6_FLI
cttgagctctcccctcagctcatctccctccctatatataggaggctctgccggctccaaggttcccaagcgcccaaggcagcggagagctagctccctcctcctcctcaggtagcgagcgagcgagcgagctcctctgcccctctgcacctggcctcccttctccgctgcagcaccgccgttttctccgttgacgactgctcgaccagtgcgcgcgctcgcgctgcctataccttacctagccagagcgcggcgcgcgagagggagaacgaccaggaggggaggagatcgatcgatcgatcgatcgagatggccttcctcaacatggagcagcagacctgggccttcaccttcggtatcctaggtaacataatctcgctgatggtgttcctttcgccgctgccgacgttctaccgcgtgtaccgcaagaagtcgacggaggggttccagtcgaccccgtacgtggtgacgctgttcagctgcatgctgtggatcttctacgcgctgctcaagtccggcgccgagctgctggtgaccatcaacggcgtcgggtgcgtgatcgaggcggcgtacctggccgcgtacctggtgtacgcgcccaaggccgccagggcgctcacggccaagatgctgctggggctcaacgtcggcgtctttggactcgccgcgctcgccaccatggtggtctccagcgccggcctccgcgtgcgcgtgctcggatggatctgcgtcagcgtcgcgctcagcgtattcgccgcgccgctcagcatcatgcggcaggtggtccggaccaagagcgtggagttcatgcccatctcgctctccttcttcctggtgctgagcgccgtgatctggttcgcgtacggcgcgctgaagagggacgtgttcgtggcgttccccaacgtgctgggcttcgtcttcggcgtcgcgcagatggcgctgtacatggcgtacaggaacaaggagcccgcggcggtcacggtggaggtgacggtggaggaggcgaagctgccggagcacgccaaggaggtggtggtggtggccgaggccagggcgagctgcggtgccgaggtgcaccccatcgacatcgacatcgaagctacgccgacgccggtggaggaggtgcacgagccgcaggtggtcgtggtcgtcgacgtggacgtggagcctgtcacctgcgccggcgccgccgaggcagctgcgggagcaggggcagatgcgtccggcgtggccgacggcggcgtccatggacccatggcgccgccggagcagctggcgatcaagcccgacatggccatttccgtggaggcgtaggttggttaaagtgtaatagcagagtgagtcgacgatatcgatcagtagtaggtttgtcgagtcaaggaagtggcctgctgctgctactacgcgacagcagcggccagatgcactgcctgcatgcatgcagtccctcccgttgactcgacccgtagagatgggatggaacggaagtagcggcgccttggcacccacgggccagccgtactggcctgtgtgatgaaccggcgagagagatatgagataatgtgcgagcgagagagggttgggttgtggtagttgaagaagacggctagctaggtgctgctgggctctctatctgtctctagatctgtgtgtgtctgtgtaatcgattccctcagcttgcttgccgcc

SEQ ID NO: 17163 - DNA, 1948 bp, Zea mays; identical to SEQ ID NO: 13509
  Clone ID: LIB3068-027-G4_FLI

SEQ ID NO: 17164 - DNA, 1158 bp, Zea mays
  Clone ID: LIB3068-028-B9_FLI
aaaggaattgacggaaggcgagcacgaggagcagcagggagagggcggtggtggctgtgatggcagcagcagcagcagccccaagcaggcagtcaaccctggggaagaggaggtggtggaatctggtcctgtgacagcgacgcccaacgctgcttgtggattccaagaaagcagctatggcgtggtggaggtggagctcgtcttgcctgacagccccttcgcgccccccaccaaggaggaggcctcatacgctgatgctgtcactgctgcagccgctcggaacggtagcaccagcagcagcagccctcgccatgtggcccttttcgcacccgcgtcttccaccaccctcgagctgcccccctacagctcctcctgcttctttcaggtgcccaggttttctcctgggcatgaagccattgggctgtgatgtgaggtgcacagaacaaaaaatggggagggggccccctccattcctctaatctgggaggactaatggctatgattggccccatcaaccaggcgtagagaagctttgacaaagaaaaaagaaatacctttggagaggtgtaatcttcttcagagagtgggaggagggaagggacagtgaagacagacagaaggacaggcaggcagcgagtgcaaccgcgagagcgatcagcgatgggctccttcttctcgaccttagtgacgccccctccggccgccgacgacccgaactgcgccgtggtggccgcgcactccaaggccacctacgacgagcagtgggcggcccacaagagcagcagcaagctgatggtgatcgacttctcggcgtcctggtgcgggccctgccgcttcatcgagccggccttcaaggagctggcctcccgcttcaccgatgccatcttcatcaaggtcgacgtcgacgagctcgcggaggtcgcaaggacatggaaggtagaggcgatgccaacgttcgtgctggtcaaggatgggaaggaggtaggccgtgtgattggggctaagaaggacgagcttgagaggaagatcaggatgttcgtcacgtcatcttcctcgtcctaacttagcagtgcatacactcccaccttctctggtttctcgactccagtggttcgcctgggacggggttgctgaaatggttcccttctctgaatactg

SEQ ID NO: 17165 - DNA, 1072 bp, Zea mays
  Clone ID: LIB3068-029-A3_FLI
atgggttaatgccacacaaatacattacgctcatgcctcatgatattttacacaattctgcttcacgtgataaacatttcttaacaactactaatgaggtcacaatattggaggaggctggtgatcaatcctagtggcaagcttagtttaaacgaattgtcgcgtcaaagcagaattctttccctggctcaaatgctgcttcaagttcttcgtagctctgctgaacactctgctaacttgatgcagttaggccctccttcaaggcaacagtggggaaaggaaatccggcatattccataatagttatctgatggccacagttggtgagcttgtcattcatgctgatctcatcaacattgtattcttgatcatggcgcttcaatagattcaaaagttgaacctccctacaagatgcaaattcaaacaaaacatcacagaagtacctcatgcagtccaaaatccaaatatttgaacaagaaaaagtaggaaaaggatactctcgatgcattgctacatctgcatgttgctgagcttagcgagcttgtcaaggagtatgtccttgctgaactcgatgttcatagccgcccgagtagcacgaagaatagtgatcgtcgcgcagatcttcggggccttggaggaagagggaccaacgaagcctagacaaaagagtcacaatatgatatcctcgcttacgtgctgcccgatggccatcttgacacgctacgtagttgttgtctcgagttttgctgcccccaaatggatatctaatcaaaataatttaaggttagtaaaatcattgatagaaggtataaacatacttactgtgtattttattccatcgtgaggatcatttagtcaggcaagtgcagaatctcccaaaaaaagggtgtgccttatttatgctgattctatgatgtgcctgattggcagaactcccagagcaacttccagactgaattcaataggcacaggtgtggtaattctatcctctaagaaaaataggaaaataatttaataggtacctatagcatcttgtcctctctgaaaaactcctccaatatatggcattttc

SEQ ID NO: 17166 - DNA, 478 bp, Zea mays
  Clone ID: LIB3068-029-H3_FLI
ctaagatctctcattttccttaaccccactcaagttcaattaattcgtggtaatcctagatacactcaaatgacccccgaggaagttatcgggaattttgtgagctttgaatgtatgatcaagggctccaagaagatcaacgagcttgatgaaccctccacgtccgaagcacaaccggtggcgtttaaggcgacggaggagaagaaggaggagtctacaccgagtagacaacaaattgacgcctccaagctcgacaatgaggagatggctttaatcatcaaaagctttcgccaaatcctcaagcaacggaaggggaaggattacaaaccccgttccaagaaggtttgctacaagtgtggtaagcccggtcactttatagctaaatgtccattatcaagtgatagtgacaggggcgacaacaagaagggaaagaggagagaaaagaagaggtaccacaagaggagggcggccgctcgcg

SEQ ID NO: 17167 - DNA, 612 bp, Zea mays
  Clone ID: LIB3068-030-D10_FLI
atcgagaggacgccagggccgattctctgcgtgacttggggcgtcgtcgccgagttttctccggccgagggcggcgcgaccggacaaccagcgtgagcgcgaccggcgacatgactcgcggcaaccagcgtgaccgcgaccgtgagcgcgcggcggcgcggaagcccaacgccaagaactcccaggacgggctcaccccggagcagcgccgcgagagggacaagaaagctctggaggagaaggcggccaagaaggcgcagcaggcagcggccggcggcaccggtacctccacggacaacaacaagaacaaggcaggtggcaagaagtaggaggcagtggcgcgccgccacctctgtacgattaatcgatgccttgagcttgtaacttgttcgcatccttgtaggtgcgatgcttgttgggtcataaactctgatgatatcgagatttggtgatgagaataatgcgtggttttctggctttctgttctgtcccattccttgaatggctgaatcatctagagttaggatgtggaggaacttttgcttgctgtcaacacatgtatgctgtcagttaacttttttttagattaaatagtgaatcatgccaattgcc

SEQ ID NO: 17168 - DNA, 1067 bp, Zea mays
  Clone ID: LIB3068-031-A9_FLI
gggctcaaggagggaggcgtcctccctggcatcaaggtcgacaagggcaccattgaggttgttggcaccgacaaggagaccaccacccagggccacgatgacctcggcaagcgctgcgctaagtactacgaggccggtgcccgctttgccaagtggcgtgctgttctcaagattggccccaacgagccgtcacagcttgccattgacctgaatgctcagggtctggctcgctacgccatcatctgccaggagaacggtctggtgccaattgttgagcctgagatccttgttgatggccctcatgacattgatcgctgcgcttacgtcactgagacagtccttgctgcctgctacaaggctctcaacgagcaccatgtcctcctggagggtaccctcctgaagcccaacatggtgactcctggctccgactctaagaaggtgacacctgaggtgatcgcccagtacaccgtccgtaccctccagaggaccgtccctgctgctgtgcctgctgttgtcttcctctctggtggacagagcgaggaggaggccaccctgaatctcaatgccatgaacaagctcagcaccaagaagccatgggccctgtccttctccttcggccgtgccctccaggcgagtaccctcaaagcctgggctggcaaggtggagaacgtggagaaggctagagcggccttcctcgccaggtgcaaggccaactccgaggctaccctcggcacctacaagggtgatgctgccgccgacaccgagagccttcacgtcaaggactacaagtattgagttgcttctctttgcgatcccgttgttttgaaactcctgcctgcgagtaggttgctgagtgttgtttgcttgttagagcttttatattcgaacataaaaaaaacatgcttcctatgtggatgatggttatctttatattcgtatattaactactagtctctgttgttagtttccgtgtaatttgctcctcccagatgggagaatcgaacaccgcttttttgttctatctgatatgctgtaatactggcctttgtattggccttggtatcggc

SEQ ID NO: 17169 - DNA, 1037 bp, Zea mays
  Clone ID: LIB3068-031-B5_FLI
ccgtgacttcatcaagaacatgatcactggtacctcccaggctgactgtgctgtccttatcattgactccaccactggtggttttgaggctggtatctccaaggatggccagacccgtgaacatgctctccttgcgttcacccttggagtgaagcagatgatttgctgctgcaacaagatggatgcaaccactccgaaatactccaaggcacgttatgatgagattgtgaaggaagtctcatcctacctcaagaaagttgggtacaaccctgataagattgccttcgttcccatttctggttttgagggcgacaacatgattgagaggtccaccaaccttgactggtacaaaggcccaaccctgcttgaggctcttgaccagatcaccgagcccaagaggccttcggacaagcccctgcgtctgcccctccaggatgtgtacaagattggtggtattggaactgtaccggttggtcgtgtggagactggtgtcatcaagcctggtatggtagtcacctttggtccaactggcctgactactgaggtgaagtctgttgagatgcaccatgaggcgcttcaggaggctcttccgggcgacaatgttggcttcaacgtgaagaacgttgctgtcaaggatctcaagcgtgggttcgtggcctccaactccaaggatgaccctgccaaggaggctgccagcttcacctcccaggtcatcatcatgaaccaccctgggcagattggcaacggctatgccccagtgctggactgccacacctcccacatcgccgtcaagtttgctgagctcattaccaagatcgacaggcgatctggcaaggagctcgagaaggagcccaagttcctgaagaacggtgatgctggtatggtgaagatgattcccaccaagcctatggtggtggagacattctccgcgtatcctcccctgggtaggtttgccgtccgcgacatgaggcagacggttgctgttggagtcatcaagagtgtggagaagaaggacccaaccggcgccaaggtgacca

SEQ ID NO: 17170 - DNA, 395 bp, Zea mays
  Clone ID: LIB3068-032-H5_FLI
caacgctgtgctcttcgaccaggccacctacgataagctgctctccgaggtgcccaagtacaagcagatcaccccatccatcctatctgagcgcctcagggttaatggatccttggcacggagggccatcaaggatctgatggcaaaggggctcataaggatggtctttgttcattctagccagcagatatacaccagggcaaccaacacatgaggggtgttttgcgtcttgtggacgttatctagtctagacgacttgatgttgctattatatcaagtttaatttaatcgtggctcgatcaatcttactgttgtgttgaatgttgaatatttttgagattattgtactattttaagatcatgtttttataacatttaagaccatgttgccatcc

SEQ ID NO: 17171 - DNA, 1222 bp, Zea mays
  Clone ID: LIB3068-033-A2_FLI
agcgtttggaaatggtttatctacaacttgtgttgtcaacattggggctcaagttacacaagtagtttgtgttgaggatggagtagctttgccccacacagctctggcgcttccatatggtggagatgacatctccagatgcttgctttgggttcaacgtcgccatggcacgtggccaaacttccaaactgatccaatgagcaatcctatagatatgctaatgctcaacaaaatcaaagagtcatatagccaaataaagactgggagcattgatgcagctgtccttgttcattcatatgataatgaaaggtctggtggacatcagaagacaagactatcagctattaatgttcctcctatgggtcttctttacccaagggttcttgttccagaagagtaccctccacctcctcgatcttggttccaagactacgatgacatgctggaggatacctggcaaacaagtgatggtctttaccctagtgggaatggtgggtttggcatgtgggacagttatccgatgtttcccactagattaaagaaatttgataacattggcctcgtagaggccattattagtagtgtactttcaacaggacgtgttgaccttcaaaagaagctgtttggtagcattcagttggttggtggtgcagcttctacagctggccttgcacaagtgctggagcaaagggttcgcactaaaatttcagcaaaccaatctattgagaaagttgaggtgttgcaatctaggacttatccattatttgttccatggaaaggtggagtgattttgggcgtccttgatattggtaaggatgcgtggattcatagagaagattggattaaaaatggtgtccacatcgggagtggcagaaaatataaggattcctattttcttcaggcgcaagtaatgtgctactacaacgtataacagtatcttatttccgagctacacacgaagacttgcacttatacaggttgttcgaccgtccaaaccatcctagaatatgattggtggactgcgattaaattgcgtacatgatgcatcagttctatgcatgctcgctgctgtctgttcggaggtcatcaactcgggacctggactaagggccttgtcgttcgctcaacccctatgaaaaagtttggctttctaaagatgtagtagaagtactcatttattccctgccaattgaacatttcaaatcttcgtatggtgttaatg

SEQ ID NO: 17172 - DNA, 1860 bp, Zea mays
  Clone ID: LIB3068-035-C8_FLI
ggtacactctgatccgaacaatggacgcgacgcaactgaaccgatcgatggacgccacgccgacgcggctcttccttggcgcgctcctcctcctcgtccccgccgcgctcctcctcctgctccgcgcgcggggcaggcgccgcctccccccgggcccgccgtccctgccgctgctcggcagcgtggtgtggctcaccaactcgcccgccgagatcgagcccctgctgcggcgcctcttcgagcgttacggccccgtcgtggcgctccgcgtcggggcgcgcttgtccgtcttcgtcgcggaccgccgcatcgcgcacgaggcgctcgttgaccgcggcgcgacgctggcggaccgcccggcgctcgcgtcggtcaagttcctcgacgagagcgacaacaccatcacccgcgccagctacgggcccgtgtggcgcctgctgcgccgcaacctcgtcgccgagacgctgcacccgtcgcgggtgaagctcttcgcgccggcccgtgcatgggtgcgccgcgtgctcgtcgagaagctcggggaggccgggcccgacgccgccccgccccgcgtagtggagacgttccagtacgcgatgttctgcctcctcgtgctcatgtgcttcggcgagcgccttgacgagcccgccgtgcgcgcgatcgcttctgcgcagcgggaggcactcatctaccgctccaagaacatgcaggtcttcgccttcctccctgtcgtcaccaagcacctattccgcgctcggctcgataaagcgcgggcgctgcggcggcgcgtcaaggagctcttcgttccgcttatcaacgcgcgccgggagtacaagaagcggggaggggaaccgagaagggaaaccacgttcgagcactcgtacgtggacacgctgctcgacatcaagcttcacgaggacggcgatcgcccgctcaccaacgatgagattatcctcctatgctccgagttcctcgacgccggtacggacaccacgtccacagggctgcagtggatcatggccgagcttgtgaaaaacccagccatccaggagaagctctacagcgagatcaaggccgccacagacgacaacaaggaaggggtctcagaggaggacgtccacagtatgccatacctcaaggcggtgatcctcgagggtctccggaagcacccgccggcccacttcgtgctgccgcacaaggcggcggaggaaatggagatcggcgggtacctgatccccaagggcacagttgtgaacttcatggtggccgagatgggccgggacgagcaggagtggaagaacccgatgcagttctcgccagagcggttcctccccggcggcgatggcgagggcgtggacgtgacgggcaccaaggcgatcaggatgatgccattcggcgtgggccggaggatctgcgcggggcttggtatcgccatgctgcacctggagtacttcgttgccaacatggtgcgggagtacgagtggaaggaggtgcccggcgacgaggtggacttcgccgagaagaacgagttcactgtcgtcatgaagaagccgctgcgcccgcgccttgtgcctaggaggtctcacttgaactagaaatactttacgtaccattttctatcctacgttttcctcgttttgtgatgtatataaacatctcatagctataaaaaaaattacggttctacaataattaatcggcagaaactgtaacgttcattcggtagtttcatcttcctgtcgatcgtggatggcttgtgaatatggaaaaatgattagcaaaacgatgctaattataaataacagtgctgctcttctgaaaacttaaactgttgatgcatctgtcttcagatgctcttggttc

SEQ ID NO: 17173 - DNA, 250 bp, Zea mays
  Clone ID: LIB3068-035-D6_FLI
gtcacggggactcctgccgctacgcgcacaccgaggaggagctccgcccacggcccgacggcacctgggaccccacctccgaccgcgccaaggagctgcgcaaggtcgccgcggaggcccaggaggaggccgaggaggaggtcacggtggatgagcagtcactcgacaagtgcctcgtcgggctccccaggggctggacggctgataggctcaagtccttgctccaggatcagggaatctcgtatgcaac

SEQ ID NO: 17174 - DNA, 1651 bp, Zea mays
  Clone ID: LIB3068-035-E3_FLI
gctgtacaacagcttgggaggattattaactcaacaagttctactgaagctgatttgaaatatccaaactatgaccaaaatttcctcatatctgtttcaacagtaacatcccttttggtaactcatacatgggacagcgtagcagcattggctctccatgactcttctatgctattaaggaatcatgcaatggcattgcttactgaatatgtgccttttgttgataggaagcacctgcagtccttcctttcatccagtaacggtatcctgactggtttgggacaactttctggtgtaattgaagagggctattttacacgaatgtctttgctgttgttttctaaggcatgtctttattctaatcctgaagatatcgctttgatacctgaatgtgtttggcagaagttggaaaacatgcaaacatcaactggaggttttggatatatggagaaagatctctgcctagctctgtgccaactaaaaagtgaatcagatgctacaactgttgcaaaagttctttctggatgtaatagtcaaccagtcagccctgatttcaagagcatccgtgaatcaatcctccaggtgatgtcctctttgagttctattgaagcatactttgagttcttcgcagccagatctgcacaagaacatgaggaacttgaagaagccgagattgaattggagcttattgaaaaagagaagtcagttcctaactttgttgagcataccaatgatacgatggtgcttgccatgccatcatatgaccgtgatggtagtgaggttaataaacggctccagcaaatccgggaaaatattcggtccctggaaaggtctaggctgaaagaggaaattacagcgcgcagacaaaagaagctgcttctaagacatgcccgtgaaaagtacctagaagagacatgctccagggaaacggagcttatgcaagagctcgacagggaaagagctctcgagatggaacgtgaagtagaaaggcagcgtcaactggatattgagcgtgcaaagtctagggaactgcaattcaacattgatttggaaaaagagaaacaaactcagagagagcttcaacgcgaactggagcaagtcgagttggggcggtcatcaaggcgtgagttctctgccaatcccaacagccgctccagggagaggtaccgcgaaagggatggtggcggcagagcacagcaggaggcggggagcctgaggtcttcgagcagccgaggccaggaggggggctctgcccaggcgcccgcaccggccgggccgggccctaccgtcatgctcgccgggtcaaggacgttctcgggggccaaccttccaacgattctgcagcctcgcgagcgcgctgccgacgaggacagcgcttgggccgaggacgctagcagcaacggagatcctgaactggacggcgtgaggccgcatgggccgcgaggcagcaggtcatcctcctctaggcaggttgcggagaggagggagcgggatggcactgctgctggcacgggcaggagagaagggaaatgggagaggaagcagcacccgtgactattccctgcttgtgttgtgcctaagcctaacggaggcttcctcaatcgttgtaattgtactcgtatgggcattggatcacgtggctgcttagtcc

SEQ ID NO: 17175 - DNA, 434 bp, Zea mays
  Clone ID: LIB3068-035-G6_FLI
cgtggccgaggtgttctgcctcgtcgcgctcctggagttcctgtaccaggaggcgcccgacgcgatgcgcagcgtcgggtccgcgtacgccgccgtcgccggcgggctcggctgctttgtggcgtcggcgatcaacaccgcggtggacgccgcgacgcgggacgatgaggaggggcggccgtcgtggctggcgcagaacatcaacgtgggcaggttcgactacctgtactggctgctcgccgtgctcagcacagtcaacctgctcgttttcgtcttctttgccaagcggtacaagtacagggtcagggtcgacgtgccgaccacagttgctgttgataagcagtagctagccgctagcgccattacaaggatttgagtttggatgtgctgtaactattgattactgggaataccataaaacatagatcttgtac

SEQ ID NO: 17176 - DNA, 1367 bp, Zea mays
  Clone ID: LIB3068-036-C5_FLI
ggtccaggtctcgctcaccctggccgcgtcgctcgcctacgtctgcctccgcgcgctcctccaccgcgcggggggcctccgccgcctgctccacctcgacagcctccgccgcgactccgaggacgtgcaggcgggctacgccgcgcagctcgcgcgctccttccgcgtcctcgcctgcttcgtgctcccctgcgccctcgccgaggccgcgtacaaggcctactggtaccgcgccgccgcggcctgcgccgtcgaggtcgcctcctgggtgtaccgcgtcgcgctcttcttcatggtctgcgtcctcttccgggtcatctgctacctgcagatcctgcggatggtcgggttcgcgcgcgagttcggcaggttcgccgacgtcgccaccgtgctgcagcaccaccgccggatcagggagcagctcaggaagatcagtcaccggtaccgcaagttcatagtctgcagcctcgtgctcgtctccgccagccagttcgccgcgctactcgccaccaccaggccgcacgccatcgtcaatctcgccaccgcaggcgagctcgcgttgtgctcggtcagccttgtggcgggtctgctgatgtgcctgtacagcgcggcgaagatcacgcacaagacgcaggcgatgacgagcgtggcggcggcgtggcacgcggacgccacggtgcacgccttcgacaacgaccaggagaacccggacccggacctgccgcccaccgcgggctacctggcgcccgccaacgcctaccgcgtggccgccggcgacgagtccggcagcggcggcgacgacgacgacgacagccggagcgagtgctcctcgctcgacgacccaaagtacgtgccgttccaggccaacaacatcagcttccagaagaggcaggcgctggtgacgtacctggagaacaaccgggcggggatcacggtgtacggcttcgtggtggaccgggcgtggctgcacgcgctcttcatgatcgagttctcgctcgtcatgtggctgctcgggaagaccgtcggcatctcctgagctcacgcacacccttctttttgccggctctggctcctgtcaggtgcagagttctcagcggaggattgtacaaagtgagtgcagatacaagatactctgatcatctgatggagatcagaacagctgctttgatttgtaggttcatttgacagctcgtatgttagatatcgcaacttctagttcgtgtgttttgatttgtgcttgttttttttttcactgcgttgcttcctccggtatgtcggggtttttttttttttttttttgtaactgacgcttcatagacacaagtgatgcacgtgctgtggtgtgctgtgaaatggaatttgcaagg

SEQ ID NO: 17177 - DNA, 387 bp, Zea mays
  Clone ID: LIB3068-036-D7_FLI
cagaacttcactcaagatcttccccctgctcgtgttcgcacggtcaagaacagaaggatttcgtactccgaggccattcctctgagaggttcaacatccaacgacactgagcacctcaagagctttggcagtacgaagcctgtttcgtcagtggtcgtctctgtgctggctgatcccagagaggctggcgatggggatggtgagggaaggatctcttcaaaatcattgtcccgcatcttagttgtcgttcttatagatagtgttaagtatgttacgtactcttgtgtcctgccgttcaaaagccatagccctcacctttaggtctgggttttggacgtgagttgataaagctgacctatacattttatagcagaagaggtgtaagac

SEQ ID NO: 17178 - DNA, 1593 bp, Zea mays
  Clone ID: LIB3068-036-E2_FLI
accaaacacacgcccctcttcgcacctcccaccaaccccgacgagcggcgatgaccggcacggtgtccaagctggcggcgccccgtccggcggcaccgccgctccggccggcgtccctccgcaccgccgccctcgccttcgccccttccccgcgccgagtccgcgtttccgtcgccgggcgagccaggagccccatcattgcgatggcttcggccaaggaaggaagcggtgcaccgaccaagaggactgcgcttcatgatctctacgagctccagggcctgtccccgtggtacgacaacctatgccgccctgtcacagacttgctgcccattatcgccagcggcgtccgtggagtcaccagcaacccaacgattttccaaaaggccatttcatcgtccagcgcatatgatgatcagttcaagcagctcatttcggcaggaaaggatgcggagagcgcttactgggaactcgttataaaggatatccaagatgcgtgcaaactttttgagcccatctacgacgagactgatggggctgatgggtatgtctccgtagaggtgtctcctaggttggcaaatgacactcaaggaactgttgaagcggcaaagtggttacacaaagtggtcaaccgccccaatgtctacataaagatcccagctactgcagaatgtgttccttccatccaggaagttatcgctaatggcattagcgtcaacgtcacgcttattttctcaattgcgagatatgaggctgtgattgatgcttacctcgatgggctagaggcttctggcttgagtgacttatcccgagttactagcgttgcatccttctttgtcagccgagtggacacccttattgacaaaatgcttgacaagattggaacacctgaggcccttgccttgagaggaaaggctgcagtagcgcaggccaaactagcaaatcggctctaccagaagaaattctctggcccaaggtgggaggcgttggccaagaaaggtgccaagaaacaaaggttgttgtgggcatccaccggtgtcaagaacccagcttatcctgacactctttatgtggacagtctcatcggacctgacacggtcaacacgatgcccgaccaagctttgcaagcattcatagaccacggcaccgtttcaaggacagttgatgcgaatgtgtctgaggcggaaggtgtatacagcgccttggagaagcttggcatcgactgggaagaggttggaaagcagcttgagctggaaggcgtggactccttcaagaagagctttgacagcctactcgtgagcctgcaggagaagggcaacagcctcaagatggcgagtgtgtaaagctgagaagattgggtacctgcgagtgaacgattttactaaataaaatgctagcttgctggctctcctcttagtttttacgctgtacctttgctctcaattttctgaatcggctttgtatcccaggcttgccagaacgtcattgtgtagccactgttcatggcttgtaattgctacggggtatccgataacgtcattgtggatgatgcctgtttgccctgactcttgaactcaatgtcgccatgtggtttct

SEQ ID NO: 17179 - DNA, 719 bp, Zea mays
  Clone ID: LIB3068-036-F8_FLI
agaatagaactctattggacatggcaaggaccatgcttgatgagtacaagacttcggatcggttttgggccgaggcggtcaacactgcttgccacgccataaaccggttatatctacaccgaatccttaagaagacatcgtatgaactcctaaccggtaaaaagcccaatgtttcatattttagtgtctttggtagcaaatgctttattcttgttaaaagaggtagaaaatctaaatttgctcctaaggttgtagaaggctttttacttggttatgattcaaacacaagggcatatagagtctttaacaagtccactggtgtcggtgtttcgagaccggggggtccctaagccgacgagtgaatgtcgccgcgtgccctagcccagatgggtcgacgcgaggccgagcgcgaaggggggaagtgaggtggtcggagacaggcgtgagagaggtggaaatcccgcggccttcgtgttcgtcccgcgcccaggtcgggtgcgcttgcagtagggggttacaagcgtccacgcgggagagggagcgagcggcttcaagcgagcgcctgtctcgtccccgtccccgcgcggccaaccctctctaagagggccctgatccttccttttataggcgtaaggagaggatccaggtgtacaatggggggtgtagcagagtgctacgtgtctagcggaggagagctagcgccctaagtacatgccatc

SEQ ID NO: 17180 - DNA, 994 bp, Zea mays
  Clone ID: LIB3068-036-G9_FLI
gttcgcaattacagagatctagagagagagatagagggcagatctacgctagagcgacagagccacaaccaaccgagagggacagtccagtatggtggtggcgctcgggcccggccggttctacggcagcggcctgccgaggccgcgcttcttcccgggcgaccgcgtggacccgccggcgtccgtcaccgacccgctgctcgagtgggcgcgcgaagcgcactggtccatgggcggcatcagcgtgaagcgcctccgcctgcagggccgcatcgagggttccgtcgacaagctccgccgccgcgcgcaccgcgacgccagggtcaaggccaaggccaaggcccgcgccgctggccacatgccggcttcgctcgccgcgcttgggtccgacgacgacgcctccagcggcgactccgaggacgagcacgaggtggcggcgcgggagcgggccctgaagcatgagcttgtcgacgacgaggaggactccgacgggtccggcgagtcggaggaggacgagcccctcgcggccatcgtcaccgccgccaagaagaggcgcgcgaggaagctcagcgacgagttcgaccgcatcgccgcggagcagcagcagcagctggtggtggagagcaagcagaagccgggtgctgcgacgccggcgacgacgtcaacaaagaggaaggctaccgtgccgagggcttcgccaaagaggaaggcttctgtacccgctgctggggcgccggcgagggcgtcgccaaagaggaaggctgctgcaacagccgcggcgcccttgtcggcggctgggtcaaggaggacctcgccgaggaacaagcactgagtggtggtcgccgtatgtgctgctctagttcctgatctgtttcttggcgatcgtggagtcctgaaaatgtattgtgtggttgggtgtctactgctggattgaaacgatgatgaaatggaatcgaattgatggctatatctgaaatgggagtcgaattgatgg

SEQ ID NO: 17181 - DNA, 576 bp, Zea mays
  Clone ID: LIB3068-037-B3_FLI
gccgggtttgaggttgtttgggataaggatcttgctgaagattctcccttgccttggtacttgcccttggatccaagccgattctccctgagtagcttccgtttgacctctgtgggacgcatgattacccgcacaatggtcaaggccctggagtacgttggtcttgctccgcagggcagtgagagggtctctaatttcctggagaaggctgcagaagggctggtagagggcggaaagaaggagatcttcacgccaatgtacttctttcttgttcggaagcctcttctggaatgagctcttggatcaccttttcagagagagaaggcaagtggtcatttcgaagaagccgaggagagggaacctggaatcaagaaaaccttcagctctcctgtgtaggaggaaagttaacgaacagtgtagtaactgttcagctttgtgtttattcagttgttttgctgcttgaggttattcgtttctaggtgggggttggaatccttttcgccataaacctctcagtggcataaataagatggtttgcataagagtacttcatggataccgtaagggctactactg

SEQ ID NO: 17182 - DNA, 487 bp, Zea mays
  Clone ID: LIB3068-037-C1_FLI
catctcctgagtcctgcctgcgctcgcctcagctcctttcttccccgccccttggcttttgcttggttgcatcgggccggtcgagccggagaggaaaagctagctagcagctaccagctctcggccggcggtggtagtctgcctgcagctggggttagctgcaagggttgggagctagccatggggaggggtcgggtggagctgaagcggatcgagaacaagatcaaccgccaggtcaccttcgccaagcgccgcaacggcctgctcaagaaggcgtacgagctctccgtgctctgcgacgccgaagtcgcgctcatcatcttctccaaccgcggcaagctctacgagttctgcagcggacagagcattaccaaaacacttgagaggtatgaaaaaaacagttatggaggaccagatactgctgtacagaacaaggagaactgtgctgctgtaattgctgtttgattattattaattattaggggtt

SEQ ID NO: 17183 - DNA, 827 bp, Zea mays
  Clone ID: LIB3068-037-D1_FLI
ctccgatcccgccaccgccaccaccaccactacccaccctttcctttcacgtcccgatggcacctgtagatctaacccccaagcagcccaggaaggcctacggcggcgacggcggcgcctactacgagtggagccccgccgacctgcccatgctcggcgtcgcctccatcggcgcagccaagctctcgctcgccgccggcgggctcgcgctccccagctactccgactcagccaaggtcgcctacgtcctccaaggcacgggcacctgcggcatcgtcctcccagaggcgacgaaggagaaggtggtggccgtgaaggagggcgacgcgctggcgctgcccttcggcgtggtgacgtggtggcacaacggccccgccgcgccgaccccgctcacggtgctcttcctcggcgacacctccaagggccacaggccggggcagttcaccaacttccagctgacgggcgcgaccggcatcttcacgggcttctccaccgagttcgtgtcgcgcgcgtgggacctgccggaggcggacgcggcggcgctggtgtcgagccagccggcctcgggcatcgtccgggcgtcctcgtccccgctgccggcgccgtcgccgcgggaccgcgagggggtggcgctcaactgcctggaggcgccgctggacgtggacatcccgggcgggggccgcgtcgtggtgctcaacacggccaacctgccgctggtcagggaggtcgggctgggcgccgacctggtccgcatcgacgcccactccatgtgctccccgggtttctcgtgcgactcggcgtaccaggtcacctacatcgtccgcggc

SEQ ID NO: 17184 - DNA, 487 bp, Zea mays
  Clone ID: LIB3068-038-B11_FLI
ctcagtgttctactatgagattctgaactcacctgatcgcgcctgcagtcttgcaaagcaggcttttgacgaggccatctcggaactggacaccctgagcgaggagtcctacaaggacagcactttgatcatgcagctccttcgtgataacttgaccctatggacttctgacatctcggaggaccctgctgaagagattagggaggcacccaagcgcgactcgagtgaggggcagtaaagccggctttatgtgcctagaaactagtagctagtgtttgctgctgtcgaatgacactatgcaatgtgatctggaacctggtttcttgggtgcgacgcttgttatgactgtcgtcagtaaaatttgggggctccccgtatgagatgctgccgggcaaggcctcggtgtcccacctcgtttgtggcggggggcgctggagcccggtctggttgggttgggaagccctttaaactgttgtcacttgcattt

SEQ ID NO: 17185 - DNA, 636 bp, Zea mays
  Clone ID: LIB3068-038-C10_FLI
gggatcgcgagttgcggcgacggtagaggaaaaatcagccgtggactctcttccgtaagccctagcccctagcccctagccgccagtgtcatgcattcgtgctgaggctcaactgctgatccgtcttccaagctctggtatcatccctgagcactgatttaagatgtatctccagtactacatcaacgagaagggggacaaggtctacaccaccaagaaggagtcacctcttggggtgccaacgcagtctgctcacccagctcggttctcacctgatgacaagtactctcgccaacgatacctgttgaagaagagatttggacttctgccaacgcagaatccaggaccgaagtactgaagcttcaagtcaactgtccaacctgcgatgttctttttgtgtcaatgcttgttggttggaatgtactatcttcgttctcgaatatttgtggtccgctagttcaattttgaactaaaccgcgacaaataaaaaagagcggagggagtagaatataggtatttctgagaactgaaatcaaacactggtaggcactactatgtcatcctgcatcacattctgtcactacatgtaatgctatgtgtttttggactgttgacatgctttattagttactgctt

SEQ ID NO: 17186 - DNA, 1053 bp, Zea mays
  Clone ID: LIB3068-038-D3_FLI
gtttggaattaggaaagtgagcatacaacagggacaagagccagaaaatctgctcaacaatgagctatgggggtaccaagttggcttattcggggaaaggaataacatctacacacaagattcaaaaattactgaatggacaagtatcgacaatttgacatatagcccacttacttgactacattttccacaccagtgggaagtgacgcagtgacactgaaccttagtggtatgggtaagggtgaagtatgggtcaatggagagagtatcggacgatattgggtctctttcaaggctcctagtggcaatccttcgcaatcactgtatcacataccacgagaatttctaaaccctcaagacaataccctagccctttttgaggaaatgggaggtaacccacagctaataacagtgaacacaatgtcggtatcaagagtgtgtggcaatgtgaatgagctctcagctccatcacttgaatataaggataaggaaccagcagtagatctctggtgtacagaaggcaaacagatatcaacaattgagtttgcaagctatggaagtcctacgggtgactgcaaaaaatttggtttcggaagatgccatgcaggagcatcagaatctgttgtaaaacaggcttgcttgggtaaaagtggatgctcagttcccgtaacacctatcaaatttggaggcgatccatgtcctggaatccaaaaatctcttctagttgtggcgaactgcaggtgacactagacagtcacacaagtatacatcatagaaaagaagttggacgagtataaaaaataaaaagatgagttacaaaatcaacgagcaatagagtggagggaaagtataagtcaaaacatatagtaattgttattaggtaggcaattgatcacttgaggcttagttggtagaccccatgtaccgattgttttgacctggcatagatatatatgtgttatctgtatatcggtttcacatgaatggcaactcattgttttgtggtttatggtgatttagaaatatgtgatatcattcatttgtagtgcctcc

SEQ ID NO: 17187 - DNA, 1144 bp, Zea mays
  Clone ID: LIB3068-038-E9_FLI
accgaataaccacccgtctgccgctgtgccgcacggcccgcaccccgcacgagacccgtccttgaggggcacgtcctagatcggtggcgcctgcctctcgccgccgatacggtgcctctcgcggtctcgctccccctcgcagacatgcagagccagatagtgtgccacgggtgcaggacccttctgttctacccaagaggtgctccgagcgtgtgttgtgcggtatgccatgtggtcaccaatgtgccgcctccagcaatggagatggctcgacttatatgtggtggctgccagacattattgatgtatgctcgcagtgcaacaactgtaagatgctcatgttgtgacacagtcaatcttgtcagaccagtgagtagcatagctcatgtgaactgtggccagtgccaaacagtgttgatgtatccatacggagcaccgtctgtcaaatgtgctgtttgcaacttcattacaaatgttggcggggtgactcccatgatacctttgccaccaccagcactacctgcatcaagtggaacttcatatatcatcccgtcaatttccgtgccgacgaatcaaccgcggaatgtaactgttgtcgttgaaaacccaatgacagtagatgacaagggaaaattggtgagcaatgttgtagtaggggttacgagcggcgggaaaaagtgacggcatatcacaaccgtgtgtagctttgtccaaactatctaaaaagggtttaagaatacataccttgtatcatactgctgtttggcgatcggctgctcgacggaggaatccccctccctggagagcgtagtggcaaagcagcgaggctttcgccactgcgaacgagccaaaaaaaaaaacgaagtgcgggtgtgcatactcagagtatatctgtagcttgttaccccttgattcttttgtatgtaatatgggctctgcctgactttcactgtgtgatcaaatttccaagcccgtgggcgctgttgctgcgtgccttgttattagtgaataacaaacattgcaaatggctcttgaaatacagtgtgtgtgtgttttaatctctctgcatttatgttaatcagcaggtgccaccatttgctgttccagactgataatgcagagtttgtatccacgttctttggag

SEQ ID NO: 17188 - DNA, 1301 bp, Zea mays
  Clone ID: LIB3068-038-F11_FLI
tctagatcttctcatcataccgataccggcctcaacgccctctctttcccagcctcacaaccaattcctgtttcagtcgatcgcagttagcatggccgcgacacagagctgtcaggctgctgcttgcttcccggccgccgtggcggtcgacgaggagcacggccaccacagccaccagctgaagggaggagcgcaggaggaggctgagaacgacaataagccggagctccggcgtggcccctggaccgtagacgaggacctcaccctcgtcaactacatcgccgacaacggcgagggtcgctggaacaacctcgcccgcgccgccgggctgaagcggacgggcaagagctgccggctgcggtggctcaactacctccggcccgacgtgaagcgtggcaacttcagcgccgacgagcagctgctcatcctcgacctccacacccgctggggcaaccgatggtcgaagatagcgcagcacctgccggggaggacggacaacgagatcaagaactactggaggacccgggtgcagaagcacgccaagcagctcaactgcgacgccaacagcaagcgcttcaaggacgccatgcgctacctctggatgccgcacctcgccgacgacgtcgataccatcgctgcggccaacgacgacgacgaagaccaccaccaccacctacgcctcctcgtcctgcatcaccaccaggcccagcacctgcagcaagctgctgccgcggccggcggcgctgccaacgaccttgctgcgggcgcctacgacgtccgccagctgcacgcgctgccgtcgtcgggcatggcggcgacgtcgtcgtccgactcgctcgcgtcggagtcgtacgatgacgggggcctgcttttcgcgaacttgcgcgccggcgagatgctgatggacggcggagattgggcggcgcagcaggaggccgaccaagggctgtggccgccgccgccgccgacgtctgatcttgatcagtcggtggtgcaggctgctggtgccggcgctggccagtttcaggacatggagctcagtggttgggtgcaaggcttctccgagagcattacagataacttttgggccttggaggaaatttggaagatgcaatgagcgagcaattttacatcttacacatccatccaaattaaagacaacatagatacacatatacataccatatattctaacaacaggtgccatatacgatatacatacacaagttgttgtatagttgtattccgcttatatatatatatttttgcctctcaatgaagttcattcttatagaggttgg

SEQ ID NO: 17189 - DNA, 775 bp, Zea mays
  Clone ID: LIB3068-038-G11_FLI
agcaagatctgtgcttggaaaccagtcagcagatctctcgatggcaaaagatcaaaatgcccgtgcaaagtctgtagagaataggcatgaaaggtcagagggtgctatgaagcctgacgttcagcaaaagaagagcactgtggcttcaaatggatctgatattctaatacaatcttcctccgtacaagggaaatcttcagtggttgcacgtgcaatggatgagcctccaaaacctgtgtctgatgagggggttaaagtttctacaaaatctacttcagaatttgagacaagggcaacacaaaagcgtgctggcaatgctgggaaggtaatgaagcatgatgttgcaaaggaagatgcaaaagctgggaaacctacaagctggaatgtaaatcaacaagtctccactgttgatagagaagtgtctcatgcagctgatgctgcccaagaaaccagtaccactattagcaatggtaacttgcatccagcgccgcataaggtttcatcatcttctcaaagaaatgcagttacacataatggagcagccaatccctctgttgagtctactgatatgattgactctcctgtgagacagcaaaaaagaccgccggttgaggagcaagatagatcaggtaaacggaggaagggagaaaatgaacccgatttgagtgaacaccatgtagacaaggaaaagagtttggactcacgtggtggagataagtttcgttcagtggatcatgagaagagtgctaatgaggaacaaaatttaagagcgggc

SEQ ID NO: 17190 - DNA, 1403 bp, Zea mays
  Clone ID: LIB3068-038-G2_FLI
cacacgagaaaaagaaaatcacaatgagctcatgggttaccaagtcgctgccttttctcgtggctccggcagtggcctcgcccactgccgccctccagctcacctccatggacagagctctggtttccctgcccgtgtcagcgatgttcgtctacgagaaccccatcgatcgtccggccgagaccattagaagagctctgtcccgtgcgcttgttccctactacccaatggccggccgcctcgccgtcactggggaccagctgaagctcgcgtgcaccggcgagggcgtagcgttcgtcggtgcgtcggcgagctgcaccctgcaggacgccaggctctgcgaccggcgtcccgtggtcagtgtcgaggacctcagtatcagctatgccggccagtacagcgaggaccctccacttctgctggtgcaggtgaccgagttttcctgtggcggcttcgttgtcggggtgacgtggaaccacgtcctcacggacggcgccggcatggcgcagttcttgaaggccgtcggcgagtttgcccgaggttccccttccccttccgtcttgccgatgagggtggacgacaccctctctgaactccccccgccaataaccaccatgactaaggcactcgtcagcagcaagcccagagacatgccgtcctcctacatcacagttcccctgagcttcgtcgaccgcatcaagggcgagttccgtcgtcgcagctacggcagcggcagcggccaggtgtcgacgtgcactgcgttcgacgtgttcaccgccgccatatggaagtgccgtgcccgcgcgacgatcggcagcgccgccagcccggacgcccccacggcgctcgccttcacggtgaacgtgaggaagccggccaaggccaaggacggctactacggcaacgtcttcgccttcggcctcgctgcctcgacgctgcgcgaggtcgcggacggcgacatcctggaccttgtgacgctggtcagggacgccaaggcacgggtcccgttcacgttcgctgacggagccgcgcacatcgccgacgagatgggcggtcggctcaagggcctcgacggctacgacaccctgtacgtcacgagctggtggaacctcggcttggacgacgttgacttcggcagcggcggcgctgagcgcgtcatcgggtgcatggagcgcaaggtggtgccgggctgcttcctgtgcgggaaaaaggacaaggccgagggcgtcgccgccatggcgctctgcgtcaagcaggagcacgctgaggctttccatgcggagctacgaagcctcaagtgacgcggagaccttacatgtttgtccgtgtttcaattttaataagagcactttaaactcgtgcgttacaataaaaatatataatactacgataatttatatgtc

SEQ ID NO: 17191 - DNA, 518 bp, Zea mays
  Clone ID: LIB3068-039-C12_FLI
caagtatgcaatgctctaatagcagcttaattcttggtaatgtgactgcacaacccaccactggtggctgcagtgtctcatcttgcaactatgatggctatgtcaatggaaccattgcaacatcgctatcctcaggtcttcaacccatgtgtccaggaccgcatcaatttcccccactcacggcggtgccaactgcggcaaaccatgggtcttattctccatcacctgcaccaggacctggagatgctggtggtgccaccccaggaggttccagcctttctccatcaaatgagcctgctgggaacagctcacaagcggctgcgataaatcaaccatgccgtttcctcctcattttcattctttctgtgacattgtccttgcgggtgtggattcctgtgtagagtattgttttttttaaaaaaataactatgtagagtatttgttggctgtatttgtattgagcgtggaaggccttattggggccaggtggaacctgaatgaagaatgcagtagcctgt

SEQ ID NO: 17192 - DNA, 1717 bp, Zea mays
  Clone ID: LIB3068-039-D1_FLI
gctaagaaatccaaattaaagcgtgctcacttgactgagcataatgatatttcaccttgtaagaatgaacttgatgatttccatgatcttccagatatatctcttccatctgataaacaaataaaaagaaatcggcatcgttcgctgctattatctgagtccgatgatgatccagctgatgtaggtactgaaaaacataacatatttactgttactgaagttggtttcttcccacaaccttcagaggtgcctcctatgcatgggcaagggatttctgatcagttccattttcccgttgaatcacgagagacatgtgaaattgctgattctttccaaaatccacctgaaagcaacatgtatgggtccatttcacaagtttgtgatacatttatgtcacaggacgtgtcatgtgtacccgagtcatccttaattttggacggcacatctgcatccataagtggtgatgaatttttgtcaagggcagtgtccaatggtttttctgccttttgtgagggtacatacactacctccagaatggtattagaagacactggctgtgtgaagaatctaatggctgaacgacaaaaagatgttgaagatgtagttggtgagacaagtgagacttatatggaatcatttcggagaaatgaacaggcaagctgttcagctgctgggtttcaattaatggatgaatgtagtcgtgctgaaagcatctggctgctctctggcaaaaaacctaatgactcttgcaaggtggaactagtacaggacacttggaacaggctacggagttgtcgtcttgaatttaccagtgaggctaatcacaacagagcaacttctggagctttgaagcttgtctcagaagtgtctgatttaatatcagaatcagatcttatgcttttccgttgctaccctcttactaaggatacgttggatccgtctttaactccttgtgatgagccagttgattcttcttggtacagcaatcaggttgagatgggatctgtatatgcccagcatgctcttcatattttatcgaggaattcccaaaaaatagatggtggttctgtcgatttgtcacaagagttgtttgccagtacagatgctggattcaggaatgattatggatctacggacatttctcatatgaaaaatccaactacctgtatttttaaaagaagggagcggcatgttcatctttgtgaaaccctgtctccagtggttcctccaaagttgttgcagtcattgagaggccctgcttttgttgattatttgtcttcaatcagccagattccaaattagaaaacttgcgactctctgaaaataaagtcataaacaagcgaagaaggtcccgtcaggcaagacattacttgagttctggcgcacttcaactttcacatgaggatgttgtattattagcagaaagcggctgtttcagtagcagacgcgagagggttgaggttgtagagcaagcaccagtcagtacataagttaatgaactggtgctgatcatgagcggcagcattttgattttttttattagaaggcaatgtgactgggttggccgagccatttttatagttgcgtccgtgatcacggagcccggcggtggaggaaccggaacgtgtgcagttgattgctgtatctgttagataactagtcattttaaagtttatttaaattttaaaattatttatagcaatcatgaatatggatt

SEQ ID NO: 17193 - DNA, 936 bp, Zea mays
  Clone ID: LIB3068-039-D12_FLI
ctctttacaggagcgctttttcactgaaagtggaacgtgttgcaagttcttttagtacactatttactatcactttgttgatttgctaggtgataacaaagttctgctctgaaagaattgccaagtatgcttttgagtatgcataccttaacaatcgaaagaaagtgacagcagtgcataaagccaacatcatgaagcttgctgatggtttgttcttggagtcttgccgtgaggttgcaaagaagtaccctggaattcaatataatgaaatcattgtggacaactgttgcatgcagcttgttgcaaagcctgaacaatttgatgttatggtcaccccaaatctttatggcaatctggtggctaatgtagctgcaggtattgctggaggcactggtgtcatgcctggaggtaatgtggggcaggaccatgctatcttcgagcaaggtgcttctgcaggaaatgttggaaatgagaaaattgtggagaagaagagagctaaccctgttgcactgctgctgtcttctgccatgatgttgaggcacttgcaattcccatcttttgctgaccggctggagacggcagttaagcgtgtcattgcagaaggcaagtacagaaccaaagatttgggcggcaccagcaccacccaggaagtcacagatgcggtcattgccaaattgggttagaaaccaaccgtgtctttaatacaacttttttttatctcttggactaggtaactagtcctgtcaaaacatttgctcctctcgtaggtttagttcaccattttgttcggcaaatccttgtacaatcttcaggtatctcgtttctgaccaggtttgggtttggggtaactgagcaaactcagtattaaattttacgcaaatttttgcgaccttaattcttaactggaaataagagaaatatggaacagttctcttt

SEQ ID NO: 17194 - DNA, 607 bp, Zea mays
  Clone ID: LIB3068-039-E7_FLI
ccaagacttctggacccaatactcatgagcaaatcaaccttggaatcctcgccaaattgacccagctgcttgaatgtgtgcctcatgctgtggacgtgagaaaggtgtggagcaagttgaggccatggttggagctaagaacggtaggatatgggcatctctaacttcggtgtcacttggtgggcagccttccaggcgagttgctgttggactgatgggctcgaccatctaacagcaacaagagaacgtgctgattcattgaattgctcctgttaaggctgtaactcacattgctcatgttaaggctgtaactcacatgagcatatttagacagaaaaggtctctggctttctgcttagaaacatacatcctgtttgtagcatgtaaatcttagcgatacttgtagcctttgtaagtcatgttgtaacattagtcgttagtgccccgatcaggcaggctgcctttggcaagagaaaatgcagcacaagcttggtcttcccctccccagaatacatggtcaaatgcgctgttttatcatgtaatctgcaatgatcaatggacatccttcagagatcagtgtcattttctgatggctttgaatttcacc

SEQ ID NO: 17195 - DNA, 425 bp, Zea mays
  Clone ID: LIB3068-041-A12_FLI
gcatgctcggcgacctggacggcctccccgaggaggacaagatgcggatggccgccatgatcgaccagctccagatccgcgacagcctgagaatgtacaattcgctggtggagaggtgcttcacggactgcgtggacacgttccggcgcaagaacctggacaagcaagaggagtcttgcgtccgccggtgcgcggagaagttcctgaagcactccatgagggtcggcatgaggttcgccgagcttaaccagggcgtggccacgccggactaagaaacatgctgctgctggctgtggccgccaggtttctggctttgctggcacagatttgtagccgacaaaaggatttcagcacttccgctgcctgagatatatgcgtcttagagccgaacgctgggtgtcagattgaataaaaactgccttgag

SEQ ID NO: 17196 - DNA, 973 bp, Zea mays
  Clone ID: LIB3068-041-A8_FLI
tatttagcaatttatagactaaaaaggaataaaataaagggactaaacattagtctctagaaaccaaacactccctaaaaatactaaatctttagatttagttaaaagttcaccatatttgcacccttacaacaaatgtttatacatcacgaagtcaagtgcacacctctcaaatttgctctataccactgcacgacgctcatctcgggacaggcaacaacgcatcatctcccagcagcacaaacagtgtcaacagaacggaacagcccaactgctgttcgccctcccggcccctgcccctgcccagtgatctgctgcccccgagccagccagtactgatccggaatccgaatcctccagtgccccccagccgatagtaattgtggttgggtggcggtttgttagggtaggcacgctgctgtgctgtgtcgcctgctctgcagtctgcacggcgttattgagctgcaggagagtggcgcatctgactgacccccttccattcacacaggtgcacccggagacgtacgcgctggtggtgagcacggagaacatcacgctcaacgcctacctgggcaaccaccgcccgatgctggtgaccaacacgctgttccggatgggcggcgccgcggtgctcctctccaaccgccgcgccgaccgggcccgcgccaggtaccggctggtgcacacggtgcggacgcaccggggcggcgccagcgacgagagctacgcgtgcgtcacgcaggaggaggacgccgagggcaacgtcggcgtctcgctctccaggggcctcatgtccgtggccggcgacgcgctgcgctccaacatcacggcgctgggcccgctcgtcctcccgctgtcggagcagctgcgcttcctggccgccgcgctgctccgccgcgtcgcggcggtcaagccctacgtgccggacttcaagctcgcgctggagcacttctgcatccacgccggcggccgc

SEQ ID NO: 17197 - DNA, 1254 bp, Zea mays
  Clone ID: LIB3068-041-D2_FLI
ggcgaatcctgtactgtaatagccccgcgctgaactttgtgcatagtgtccgtcttcctgtgtgtatttattttttgatggattggtaagataattcatttggctccggcggctgctgctttctgctgtacacaggtccagagtcttatattgcgctgccttcagatgtacatggaccagaaagaagtggtcgatgccctctcccaccactcgaagatagagccctgcattactgaacttgtttggcgacaacttgagcatcaaaatcctctgtttttcaaggcgtattatatgaggctaatgcttaagactcaaataatggtcttcaacaagcttcttcaggatcagtttgaggttatcaataaagaattttcttcagggatcccttctatgtcgcttcctaatggctctaactccaacctattgaagcaaaattcatgctttttgccagagactgctcctggatctgcaatgccagatggtataatgcacaatggaagttcacgtggtataataaatggcacaccatctggtgatcaattgctcaatgctagtaaagacttgcatggccttcataatggaatagatgcttcgactagtctgcagtcagaccagaacgcagctgctgtgctgtatggtgtagacaatgagacaagtgcaacgataaagaccgagtcttgctattcgagcaatgctgattttgctttctgtgggaatactttcctggaatcgtgccagtcaataggcgatgcatctggtggtggatccttcagtagctcagagctgaacgggcaaccactaaacgattcaattctggatatggaatcatcgtcatttagcttcttgaaccaaatgccccaaagcttcatctttccggacttggcagacgatttcaaccaaagtgcagagataacaccatttctcaccccagaaacaaatttctccgattcgacagggggagaccatacaggttgagcggggtcatgcacagcgcaccaaccatttgtacatacgctcatgggcagtcaaacctgcactgatgaagagcttgaggaccttttgatctagctgtttcttttttctactcttctcgtcttatattgcggtagtttatgggttggtcttctggtatgccctgcgatggcgtcgttatcgtgccttgtacattgccgtgcttgtgtaagaaacattaggagcggcgttgttcgcttcagcattgatttggctaattcctccgcttggcctggcttgtac

SEQ ID NO: 17198 - DNA, 1708 bp, Zea mays
  Clone ID: LIB3068-041-F4_FLI
gtgtttctgttggagaggtgatgaagagccctgtgttcagtgaggatgagtcatcggagaactccttctgggttgatttgggacagagtccacttggttcagaccattcagagcaatcaagcaagggaaaattgggctctccattgccagcatcctggttttctggcaggaagagtgctaagaaggcgtcaccaaaggtgccatccaaactgtcaaggagtcctattcatgataaccatgttatgtcatttgatgcagccgtgaggtcggtatcacaagagccagggccggagaaaggggatctggatgaagataattcacatattaacatcaagaatactcctatcagcgagattgaagaagataataaagatgctaaagtaaataagaggtttgtaaaattttcttgtgccaacgacactgctgaaggtgaaggctgtgcaacctctgtttttgggagctgtaccacccgtgagaatggctccacatccgagattttctcagaaagtcaagcagaaaccaaagatagtgcaatcagaagagaaaatgaaggtgacttccgtctactgggaaggagggaagcatacaatggcagattcaatggtggaagattctttggagtagaagaatcggaacgagtgccaagtatggggcacaatgtatcattcactttggatgatagcaagctttgtcgtaatgcagatgctggggaaacatctgggtatggaatggcagatgacgatgacgacgacgacgatgcatacagtgactatgatgaggctctggatggcaggaaagaacctgaaattatctgcaaacatcttgatcatgtgaatatgcttggacttagcaagaccacacttagattacgatacctaatcaattggttggtgacctcattactgcagctccggttgcctgattcaggggatggcgagggggtaccccttgtttatatatatggtccaaagatcaaatatgaccgtggagcagcagttgcattcaatataaaggactgcaacactggaacctccctgataaatcctgaaactgtacagaaactggcagaaaaagaaggcctctccttgggcgtcgggttcctaagtcatatacgcctcatagacaaccagaaacatggtgcggttgatgtggggttaagttcttcctggccagcggcaaatggccgtcgtgaaaagaaaaatagcaagaatgctattattgggaccgaagtggtcactgcatctcttgggttccttacaaattttgaggatgtctacaggttgtgggcatttgctgcaaaatttcttgattcatcatttcttgagcaagagaggctatcatctattcctgaggatgcagaaagatagtattagatggttccagtttatggctattgcagctacttcataatagaggagggtggcaccagtgtaattgaaacgaggatagtagaagagatgtcatgttgcttctgcgtattgttttttaacgtctcagcatggagtcaaggggcaatacttggtagtgcggcttttatatttcttcattcttatttccatccttttctaggcatgcaacgtttttgtttgtagattttttttttggagatctatatgtaccagctaattattttgagcatcctttccatgtacttgcttgtaagttgtaaattggctccattggacatgaaatagatttgctcgcttgt

SEQ ID NO: 17199 - DNA, 2874 bp, Zea mays
  Clone ID: LIB3068-041-F8_FLI
ctcacacagcaaataccccacaaggccactccaaagacctagtagtggaaccgaagatgttcgggaacatcggaaagatccccatcatcggcgacctgacgggcagcaacaagaatgcgcacctcaagggcaacgtggtgctcgtgcgcaagaccgtgctcggcttggacgtcaccagcatcgccggctccctcctcgacggcatcggcgagttcctcggccgcggcgtcacctgccagcttatcagctccaccgtcgtcgaccctaacaacggcaaccgcgggaagttgggcgcggaggcgagcctggagcagtggctgctgaacccgccgccgcttctgtccagcgagaaccagttccgcgtcaccttcgactgggaggtggagaagcagggcatcccgggcgccatcatcgtcaagaacaaccacgcctccgagttcttcctcaagaccatcaccctcaacgacgtccccggccacggcaccatcgtcttcgtcgccaactcatggatctacccgcagtccaagtaccgctacaaccgcgtcttcttctccaacgacacgtacctccccagccagatgccggcggcgctgaagccctaccgcgacgacgagctccggaacctgaggggcgacgaccagcagggcccgtaccaggagcacgaccgcgtctaccgctacgacgtctacaacgacctgggcctgcctgacagcgggaacccgcgccccgtcctcggcggcaccaaggagctcccctacccgcgccgctgccgcaccgggcggaagcccaccaagagcgaccccaacagcgagagcaggctcacgctggtcgacggcgacgtctacgtgccgcgcgacgagcgcttcggccacatcaagaagtcggacttctacggctacgccatcaaggcgctggtgaacgccgtcatcccggcaatccgcacctacgtcgacctgtcgcccggcgagttcgactccttcaaggacatcatgaagctgtacgagggcgggatccagctgcccaaaataccagccctcgaggacctgcggaagcagttcccactcgagctcgtcaaggatgtcctcccggtcggcggcgactacctcctcaagctccccatgccgcagatcatcaaagaggacaagacaggttggatgacagatgaggagtttggacgggagattctcgccggcgtgaaccccatgctcgtcaagcgtctcacggagttccctccgaggagcagtcttgacccgagcaagtacggcgaccacaccagcaccatcagggaggcggacctcgagaacaagctcgagggcctgacggtgcagcaggcgctgcacggcaaccggctctacatcctggaccaccacgacaacttcatgccgttcctggtcagggtgaacagcctggagggcaacttcatctacgccaccaggaccgtgctgttcctgcgcggcgacggcacgctggtgccggtggccatcgagctgagcctgcccgagctccgggacggcctgaccaccgccaagagcaccgtgtacacgcccaagtcgaccaccggcgcggaggcgtgggtgtggcacctggccaaggcctacgccaacgtgaacgactactgctggcaccagctcatcagccactggctcaacacccacgccgtgatggagccgttcgtgatcgccaccaaccggcagctcagcgtgacgcaccccgtgcacaagctcctcctgccgcactaccgtgacaccatgaacatcaactccaacgcgcgccagatgctcgtcaacgccggcggcatcttcgagaccaccgtcttcccgcgccagtacgcgttcgagatgtcctccgtcatctacaaggactggaacttcacagagcaggctctccctgacgacctaatcaagagaggcatggcggtcgcagacccgtcgagcccgtacaaggtacggctgctggtggaggactacccgtacgcgtcggacgggctggccatctggcacgccatcgagcagtgggtgacggagtacctcgccgtctactaccccaacgacggcgtgctgcgggcggacgtggagctgcaggcgtggtggaaggaggcgcgcgaggtcgggcacgccgacctcaaggacgcgccctggtggcccaagatgcagacggtggccgagctggtcaaggcctgcaccaccatcatctggatcgcgtcggcgctccacgcggccgtcaacttcgggcagtacccgtacgccgggtacctcccgaaccgcccgtccgtcagccggaagccgatgccggcgccgggcagcgacgagtacgcggagctggagcgcaagccggagaaggtgttcgtgcgcaccatcaccagccagttccaggccctcgtcggcatctcgctgctggagatcctgtccagccactcctccgacgaggtgtacctcggccagcgcgacaccaaggagtggacgtcggacgccaaggcgcaggaggcgttcaagcggttcggcgcgcggctgaccgagatcgagaaacgcgtcgtcaccatgaacgcggaccctcgcctcaagaaccgcaacggcccggccgagttcccctacacgctgctctaccccaacacctccgacacgaagggcgacgccgccggcatcaccgccaagggcattccaaacagcatctccatttgagttctgtctgagctgaggacgtacggtcgtcgcactagttgtttgcgtttccccgttccgttccgtgaagtgtggttctcacttgcgcggtattgtgcaaatagccaagtactccttacggaagtcgctacgtgaggactgttgtaataaggctctattcagttcctcaataatgaagttactttgtgtttcatct

SEQ ID NO: 17200 - DNA, 2003 bp, Zea mays
  Clone ID: LIB3068-042-C9_FLI
gcgactactagaaacgtcagacagtccaccatacgcccgccgcgcaccagatccagcggacgaccaaacaccaacataagctaacctacgcttatcgaggcacgccgtacgacgatccacgcccccagcgcgataacacagacgctccccgcgtacgctcccgctcgacgtgcccacgaccgtcgtcctcaggcaccgctttgccgtccgccatatggcacctgctcccggcacacctgccgaagcggcttcaacacactccacaaacccagctcagccagcgcgcatgacgcaacgcacacaacaccgtctcccagtatgacgtccttcagcgacaacgtcacgtgcgatcctcactctcgaaaaatcgcgatcaacgcgtagacaccccccacgcacacacagccaccgagatgagtaacccctgcggtgaccaccaattcttgatgaacatccgtacaaaccacacccggtcgacacataatcgctaccattctaacttagctaccacctgccgcacacgtaacaatctctcgggatctgctgaccgacataactccctcaactccctcctcacagcccccatctataattggacacaactaaaatcaccacgcgtgggtccacacatcgctcgccacgcccacacctacccaccactcgatcctaccggctcccacgttccggtctcgccccaatcggccgggccgctacgctccatggcgctcgacctcctccggccaggcgtccccggcatgcagccggtcggcgacctccgcactgccaagtccgcgatcctgttcggggtggtcaacggcctcttcttgccgccgttgctggagccctgcctctgcaccgccggcgccctgtgcgacggcggcggcgaccacgcggagcagaggtactaccagctcgcgaactgcgtgctcaccatgctcggcgtcgccctcctgttcgtggacatggcgctgtcgcgggcggtccatcaggcctcgccgctgtggccgcccacgctcagagcgacggtgtggctcaccaagaccttgacctgcggcacgctccaattcggcgtcaacctcgtgtacttctgcctcaagatgctgtgcgctaggctcttgctcgttttcgcctgacttcgttcgccattgttttcactaggaagggacctagatccaccttatacgattctttttttttcttttcgcctaaattgaacctgtgctgtgtgtactcgttatggagttctgaaatcgggtgctcaaataaatctatctatgataacgaagcgcactgtgtgagccttctcgttcctaacgatagtatagtgtgagtactcgagaatcacgagcactgataaaatacagtttttttttctcttcttgtgcagtaaagaaatggcaaaagcgagaggaatcaactgtggcattgagcaccgcaggtaacggaattgacatggttaacgagatagtgccagccaggtatgtccaaatgcactcccatagtcccatgacaattcacaacaagtgatcagactcgctagaaaattgagcgtgcgccgattttgggggcaatcaccgggaaataaaccgtctgacagtgctatctacgaaggtcatcttcacctcacacgacgacggtggctccctgaggctgcgccgcagctacggccacctgaggcatgcatggtggcgacgtgcatccaaggcgtgtgcgggggttctctcacggagcgcgacgacaatggatttgagaggtgcgcacacgacggtggatcctagaaacgtgcgcgcgaggttggctctttgaaggcgcgcgccctgaagtggcacacgttggcatctcacctcccgcgacgacgccgacttttcctatgcgcgggctacgacgacagccttctctaggcgcaagcgatggcggatcaacaaccctgtttttatgatattttgtatacatattgatgtcaacttcaatagatttttatgatataatgtcagttcatagtc

SEQ ID NO: 17201 - DNA, 1410 bp, Zea mays
  Clone ID: LIB3068-042-F6_FLI
caggagaccttggcactgcaagatttgtcctgctttcgatgctctgcttggtgtactgatccgtctactattcctgcttcacgtgacttgtggattgttgagtatgttcaggttgttgagggcaatgttggagaaactatggctctagctacccaatcactattagtttttccgttgccttccgaccgaacgattctaattcacagtctggtcttcctatggattctgtgaatgacggtgatcaaagtaatggccactatggacatgccaatcagggattgtctcaggggcttggtgcatttgggggtgggagatcttgcccattcctgagggatgggcgtaattcatccttgggacgcgcagctagagaccgttcagggacttgccagccaccagttaccaaccaggggacagcttgccagatatcgtgcatcgttgacacttctgaattacgtaaaattgctgacccacttctggattgtcttcttgctgattgggagactcgtcattcgtccatgtttcatcaatcgtccaggattttcattgatccctgttgtttggatatgaggatggacctaggaggttttgggccacaatcttcgaattggttagggatttctacagccagtcgggattggaatgggctgcaattatggccacctataaattatttgaagcaatttctgactccatgtagggaccttgggtatctaagagtaaatctaagtgggttttctttgccatctgggatggtctatggtggtgcaacaacagtcaaaatcttctatcaacggcgtcgaaaaaccactgctggaaataaaattgctacaattaatgatgatgataatgtggaggctcatgctttgagattgggcttggatgttgatgtgacagcggttactccgtctgaccccccctcggacgtcgaaggagctgctgatactccgtctgagaccatctctagatttcacgggccattattattagagtacaatggaacaacgaggagggctgatgcagactcaactgttccactcaggcctgaggtggtagcctctgatgacagttccatgcagaattttggggattcatgtgagtcctcattggatccgtcatcttctatggaatctagaagaagatcattcatggctaagataacaatggcaccttcgcagctccttgctgctcctgtcctccccaagcggtcaagaggtgccacaaaatatggtactgcgctacgacggagccgacgggttgcaggggcaggggtggaatttaacatgcaggatctggagaacagagccacaaaacaagtaatgcggactctgaaagtcatcacagagaatgcatgcatcaaccagcaagctgtttttttctcgaacacgcaggagagctgcgtatcattatatt

SEQ ID NO: 17202 - DNA, 1352 bp, Zea mays
  Clone ID: LIB3068-043-C2_FLI
gtattgaatatgcttgcttgctggattgaagatccaaactcggaggccttcaaacttcatatcccacgagtctatgattacttgtggcttgctgaagatggcatgaagatgcagggttataatggcagccaactttgggatacagctttcacagttcaagccattgtggctaccaaccttattgaagagtttggtcctacccttaaactagcacacaactatatcaagaattcacaggttcttgatgactgccctggtgatctgaatgactggtaccgccacacatctaaaggtgcatggccattctcaactgctgatcatggttggcctatatctgattgcactgctgaaggactaaaggcctcattattgttatcaaggatctctcccaaaattgttggtgaaccgatggaagctaatagattttatgatgctgtcagttgtctgatgtcttatatgaatgataatggcggcttcgcgacatatgaactcacaagatcttatccctggttggagctgatcaatcctgctgagacctttggggatattgtgattgattacccgtatgttgaatgtacatcagcagcaattcaggccctgacatcattcaaaaaactataccctgggcaccgcaggaaagaggtggataactgtatcagcaaagcttccaatttcatcgagagtattcagaaaagcgatggttcatggtatggctcttgggccgtttgtttcacatacggcacttggtttggtgtgaagggactaattgctgctggtagaacatttgagaacagtcctgcaattagaaaggcatgcgactttctgttgtcaaaagaacttccttccggtggttggggagaaagctatttgtcatctcaagaccaggtttacaccaatctcaaaggcaaccggcctcatgcagtgaacactagttgggccatgctggcgctgattgatgcaggccaggccgagagagatccaacgcctctacaccgagcagcaaaggttttgatcaacttgcaatcacatgatggagaatttcctcagcaagagatcataggagtgttcaacaagaactgcatgataagctactcccagtacaggaacatcttcccgatttgggctctgggtgagtaccggtgccgagtcttgggggctggcaagtcttggcggtgaacgggaggtgtgcgtgtgtgtgtgtcatggatcggcttttgtgagtagccatgtggaagttggaataatatagctacgttacgttcagggggttgcgctactagtggtcctagtaataatagtgatggtgatagcaatgtactcctcattattacaatctcaaagtggttcatgcc

SEQ ID NO: 17203 - DNA, 955 bp, Zea mays
  Clone ID: LIB3068-043-D11_FLI
gcaccacacaaccaatgccggctgtccccggcacgcgcaccagcaccaccacgacccatggccgacaccgccaacccgccgaccaagcccaccaaagcctccgcccccttcgtcgtaattgacgccgccagcgccaacaaggcccgcgacggtggcgccgatgccccgacaccgtcggcggggcacggccgccgctggctgcggcgggcgtgctgcggcgtagccatcgccggcgcgctggccgcggcggcggtgctgtcgctgtcgctcaccgtgctcagggtgcgggacccgacgctgtccatggagtccgtggccgtcaggcgcttcagcgtgcgcctggacgccgcgtccccggcgcgcccgctgcggatcaacgtcacgctgtccggcgccatcgtggcccgcaaccccaactacgagtccatgcggttcggcgccagcgccacggagatcttcgtggacggcgcggcggacccgggccccgtcggcgtgggccgcgcgccgcccggggaggtccccgcgcgcggcgccagccgggtggccgccgacgtcgacgtgctcgtcgacagggtcgcgcccgccgtggtcgcccaggtgctgttcggcggcggcgaggtgcgcctcgccacgcgcaccgccgtcgacggcaggctcagcctgctcggcgggctctacggccgccgcaccgtgcgcgtcgccatgcggtgccgcgtcgcgctccgcgtctcagccgcggccgtcgccgtcgccggcaaccccgcgtgcgtcgcggacctcgggcgctgacgtggtctattattcgtcagctgtagtctgtgggtgagcgggccggtgtagtttttgccctttctctttaccgccggcgatgaccggtggagatagttacggtggcagctataactgaactcctgtcggctagcctcgtttatagagcacaacttaatttgggcac

SEQ ID NO: 17204 - DNA, 2046 bp, Zea mays
  Clone ID: LIB3068-043-D5_FLI
gtgctacggcggcggcggcggcacagcaggggaagaacgtacacccgcagtcgaaagaggacggcgagacagctctcttcctatccacattctatataatctatggctaatcaggtagagattagagtgattgagagagcggggaaggaagttttgtacagagaagagaaagaggtagttgatgggaagggtttgatgtgattgccctttcttttctctttgcttcctggacacaacagccgccgccacttcctgccatcctttcgtcgttgattcggtgttcttggatcggatgccttcatctgcctagatcggagctagagcaaggtgcgtggtgtaaatcccgagaggaggaagaggggagggggtccaggccgcttgttcttgccgcgtacggttcttccaagaacccgcggcggggatggatctctacgatgagggagaggagatggccttacaagacggggactcctgcctcgcgccacgggcttcgcggggcggatgcgaggtggacttgcagtgggcggatggcctcctcgaaggcgccgaccggaagcggcgtgcgcgggaaggcttcaaggatgaggtccatttcgtccaggaaatggacgaggtggatggcagcggcaagcgcagcaagccgccgtcgccgcaaccgcacacaccagatattcgtgaagctcatgcccctggccgccgtcgcaccgtggtggccggcggtggggagctcagctgtggcggtggtgatctcataggacaaattggccgggacctgtccatcaactgcctcctccggctgtgccggtcagaatatggctcagtggcatcgctgaatcatgatttccggtctcttgtgcgaggaggggagatctacaggctgcgacggcagaataacatcgcggagcattgggtgtacttctcctgtaatgttttggagtgggatgcttatgacccttaccgcaagcgttggatctcggtgcccaagatgcctcctgacgagtgcttcatgtgctcagacaaggagtctttggctgtgggcaccgagctacttgtgtttggaatggcacacattgtcttcagatacagtatactgacaaactcttggacacgaggtgaggtgatgaattctcctcggtgtctatttgggtcagcaagcgttggggagaaggcatatgttgctggtggcactgattcttttggcaggattctcagctcagcagagctgtacaactcggagacacatacttggacaccactccctagcatgaataaggcacgtaaaaattgctctggggtgttcatagatggcaagttttgtgtcattggtggtgtgacaaacaacaacatgatcttgacctgcggtgaagtgtacgatgtgcagagcaagacttggagggtgattgagaacatgtctgggggtcttaatggagtgagcggtgcacccccacttgttgcagtggttaagaatgagctgtatgctgctgattacagcgggaaggatgtgaagaagtatgacaagcagaataatgggtggatcacacttggtaaattgcctgagcggtctgtgtccatgaatggatggggccttgcattcagggcatgtggtgagaggcttattgtcattggtggcccaagaacaccagttgggggcatgattgagctgacctcatggactcctgatgacaagccacctgtgtggaatttgatggacagacggccatctggaaattttgtgtataattgcgctgtgatgggctgctgagctcgcttcatcaagggtctgcatagtgatgtttacaaagagaggtatgcacaggcaggcttgtttagcttcagcactccttgatgggtttctgcctttgaccttgtagctgatgtagttggcatccacaggaacaggatctttgtaacctttttcatacatcagtttctgccccagctaatccatttctttcatttacatttggatcagtcttatgatctagaagatgataccatgcaaaagatgtcataccaataatctagaaacatcaaatttcagaggct

SEQ ID NO: 17205 - DNA, 526 bp, Zea mays
  Clone ID: LIB3068-043-D9_FLI
ccttggccggcgacgacgagcgccaccacggcaggatgacgacgctgaggaacctcaagatcaagacgtcgacgtgcaagaggatcgtgaaggagctgcgctcgtacgagaaggaggtggagaaggaggcggccaagaccgccgacatgaaggagaagggcgctgatccctacgacctcaaacagcaggagaatgttttggctgagtcaaggatgatggtcccagactgccacaaacgacttgaaactgcactggctgacttgaaagcaacactggctgaactgaaggagtcaaatgagcaaggtgccgagattggagaagctgagagtacaatcgcagaagttgaagcagttgtcaagccagcagaagattaaactaaaaaaactcttggtttgctgaactgttagcgcacatcctattttcgcatattgagcccttgtgagcctattacgagatgtttgaggcgtgaaatcctgtaccattatcatcacttctatcttgaaatttgagtttctgttcccaagtt

SEQ ID NO: 17206 - DNA, 1800 bp, Zea mays
  Clone ID: LIB3068-043-E3_FLI
ccccgggggcccatcgtagccgtcctcgatctccctcgctccgcagcacaccactcgtagccgccggcaaggcgactgacctctttcctgctgccgagcgccatcgtctcctcggaccatctcacctcagagctgctgcgaccgccggccaacccgtctaggtcttgtccctgccgctttctgagcctagaacatctttgcattttggagagtctccactcggagctattgtacagtctccatccctttcaacgagatggcacgtcagtctgctctctcgcttgtgagggatcgagcaaagacgggagcgctgaagcgtctgactctgagttcatcgaagacggctgggaggaactcgtctgggcgcatcacctctttccaccgtggtggaggggccaagaggttgcagaggaaggtcgatgtgaaacgcgacgcctgttccacgggtattgtggagcggatcgagtacgacccgaatcgctcctcgagccttgctcttgtgcgatgggtgcaaggggtgcatttccgccgccccaagagtccacaagaactcagtgccatgtctcaaatccaacaatctgctacagctgatgtctccggccggttttcccttgctgcattatctagtagagtgcataaagataaggaagcttctgcactgtactctgctctgggaaatggagatatttctgcatctcttaaatctggtgcgtcatcgagcttaccgaggatagctgtagctggtgccaagcccacattctttgctcaagccaaagcggatgaagaaggaaaacatacattttcctttactgagattcagaaatgggcaacagatgatgtgctttgggcacagagaatgaagcgtcaagctgcactctcctggcagaatgaactgaagaagaaacatttgcttaagacacaagctaacagcttcagtagcttggcagcaaagactagtggtacgagtaaagggccaaagggaaaggctgattgcataccagtgtcttatatattggccagtcaccagtgcatgccaggtagtacagtgatgaactataattcctcgaagccttctaagagttcagcctcttcaccatattccttggaaaatcagttcgatataattgatctcaactcaaaggttggaaattgtataccattagccaatgcacgaattggaacctgggtgcataatattgaatgtcgtcctggtcagggtgggaagatggttcgagcagctggtacatatgctaaggtagtccaggagccaggcgccaagtgtgtcctgcgccttccctcaggtgctgagaaggctgttgattcaagatgccatgctacaattggtatagtctccaacccaagccatggtacacgcaagctaagaaaggcagggcacagcaggtggttaggcagacgccctgttgtccgtggtgttgctatgaatcctgtggatcatccccatggtggaggcgaggggcgtactaaaggaggcaggccttcagtttctccctggggaaagcccaccaaagcagggtaccgatcaccaagtgtggccagtcggaaagcgtttgctggaacaaagctcatacagttcagaaaataaagaatatgtgtttgtggcagagggaactgtgataatcgacttgattctggtgcagcagaagaaatggttgttatcactccaatcgacaacacagaataaatgttttcactccaatggttgttatcgctacttttccccttttgtcattctgcagaaactagctcttcatgaaacctgattagtgaatttcttcctgt

SEQ ID NO: 17207 - DNA, 463 bp, Zea mays
  Clone ID: LIB3068-043-F2_FLI
gcgaaccagtacgagaccacgtcgcttgtgcagatcgagggggtgaacaccaaggaggacgtcgcgtggtacgctggcaagcgcatggcgtacatctacaaggccaagaccaagagcagtgagacccgctacaggtgcatctggggtaaggtcacccgtccgcacggcaactccggcgttgtccgcgccaagttcaagtcgaacctcccgcctgagtctatggggcgcaaggtcagagtgttcatgtaccctagcagcatttaaggttttgttggagtaaagatggactagaaatgccatgcgtatttcttacttttttctgagcttaaaatgccatttgttggcaacttagattgttcatgcagtcatgcacttgaccggtggaagttctgtctaaatttgttgtcgaacggatgaactatatattgtcggtgttatgccagcagcagagcttattttgtcc

SEQ ID NO: 17208 - DNA, 851 bp, Zea mays
  Clone ID: LIB3068-043-F7_FLI
gtgaggtgaagcaggagggagaatatcaacctgaggaacacccagaacctggcactgattacatccgggctcaagaggctaggaggtttatgatctatgttcatgccaaaatgatgatagtggacgatgaatacatcatcattgggtccgccaacatcaaccagaggtccatggacggtgccagggactctgagatcgccatgggcgcgtaccagccgtaccacctggcgactaggcagcctgcccgtggccagatccatggcttccggatgtctctttggtacgaacacctggggatgctggacgacgtcttccagcgccccgagagcgtagagtgcgtgcagaaggtgaacaagatcgccgagaagtactgggacctgtactcgagtgatgacctggagcaggacctcccgggccacctcctcagctacccgatcggtgtcactgccgacggcaccgttactgagctgcccgggatggagaacttccctgacacccgtgcccgcgtcctcggcaacaagtcggactacctcccgcccatcctcaccacataggctgcaggctgcaggcagcgccatggcttctctcctgtctggcctcagcttggtgcccctctgtttgtgttgtttgagatactgaaagttcagatagcagtgtttttattatagttattgagtgataataagtgcattgtgcatggtgggacgataggagttagagttgttcataactacaccagatgacgagattgtgttgccccttgtctggtgtagcttgtgtagctttctgcgttgcagtgctgtttgtaaaggcgacttcagagttcagaattaaaacatggttgctttttc

SEQ ID NO: 17209 - DNA, 588 bp, Zea mays
  Clone ID: LIB3068-044-D8_FLI
cccaaggccagcctgtgtgtgcgttcgattcgcttctgctgcagctagggtttagaggttttctgggcgcggagcggacggcggcggcggcggcggctatggctgcggcggaggaggagatcgcggtgaaggagccgctggatctgatacgcctcagcctcgacgagcgcatctacgtcaagctccgatccgaccgcgagctgcgcggcaagctccatgcgtatgatcaacatttaaacatgatacttggagatgttgaagaggtcgtgacaactgttgagatagatgatgaaacatatgaagaaattgtgcgcaccacgaaacgcactatccccttcctttttgtccgaggtgatggtgtcatattggtttctccaccccttcgtacggcatgaagtttgaagttagatcatgctgattgttaattatgataactggtgtatttggccacttgatggcgttgcatggagtgtatgttatgggcctagccgctactttttctgatgggatgtaggtttaacatgtgatacaatcgtgtaaacaactgcttgtgcttggattatctgtcggatctcaggggtgcttctc

SEQ ID NO: 17210 - DNA, 1078 bp, Zea mays
  Clone ID: LIB3068-044-E8_FLI
atcaggctcccccgtcgtcctcgccgggcggctaggtcagagccgggagaggcgggggccggcggcgctaggctaggctaggctaggcagcggcgtacgtgcgtggccgccgcgcgatcggcatgggcgacggcgaggcggcggtgccgagcaggttccgcacggtctgcgtcttctgcggcagcaacgccggccgccgcaaggtgtacgccgacgccgccctcgagctcggccacgagctggtgcggaggggcatcaacctcgtctatggcggcggcagcatcggtctgatgggcgtgattgctcggacggttcgtcacggcggctgccatgtcctcggggtgattcctaaagcgctcatgcctattgagatatcaggtgaaagcgtgggagaggtgagggtcgtggacgacatgcaccagaggaaagccgagatggctcgtcagtcccaagccttcatcgctctcccaggggggtacgggacgatggaggagctgctggagatgatcacctggtgccagctcgggatccatgacaaaccagttgggttgctgaacgtggacggctactacgaccccctgctcgccctgttcgagaaaggcgccgccgagggtttcatcagcaccgactgcagccagatattcgtctcggcgccaaccgcgagcgagctgctcacaaagatggagcaatacacgcgggtgcaccaggaggtagccccagcgacgagctgggagatctcggagctcggctacggcagaggaggagacgccggcgccgccacgccgccagcagcagcagcaggaggagcagaagagggaaaaggcggctcgtagcacccacatccatctcctgaagcgttaccttcctccacctactgcttgctgatgtgatgacgcgtctgttacggtttcctggcaaatttgtttcgtcaaagtcgacctctccaaagtccaaaacccggttgaaccaggtgccgggtcgggacgtactggggagacgacgatgatatctctgtgttgggtgcttggattgtgtaagcttgctgctgctggtactattcttgttttctttaaaaaag

SEQ ID NO: 17211 - DNA, 419 bp, Zea mays
  Clone ID: LIB3068-045-D5_FLI
agatgaagaagatcgcctgcgccgtcctcgtcgccgcctcggcggccaccgtggcgctcgccgcggaggctccggctccggcccccaccagcggctcctccgccgtcgcgcccgccgtcggcgccgccctcggggccgccgtcgcctccttcttcgcctactacattcagtgagccggccgggcgcccggaggccgaggaagagacgaaggggagagagtgagacatggctgcgcgcatcccgatgcgtgggcatgtttttgattcgacacaccttttgtcctcttttttctttgttcctctttctccttaacttaacgaattgatgcatgccgctgatgttcttcccctgagagagggattaacacttgtatcatttcatcgcttgccatttgtttgaatccattcaacaattcattc

SEQ ID NO: 17212 - DNA, 470 bp, Zea mays
  Clone ID: LIB3068-046-A1_FLI
acactggaacttaccatgaaaaaacaatatctacttcagaggacacagtacaagataatttgacagaagatgagccaagttttggtagtcaagaagtagatgatgcagagtcaacagaagaaactaagcaaaacatagctgagaatattgcagaagtctctgatgtggcgattgttgatgacgcaattgaacagaatgtgctacagactgaggatatcgttgaaatgcataaacaggagctggaacgagaagaaacagagagaatagaacctgttgaatcagaggaagcttctgatcagaggaatgatgcaccattcgattattcagctcgagaagataatacaaaggaaagtgagatacagcagacagaatcagcaacggaaacaaatgaaattgaacccactgaaattgaagcagttcctcgagaaagcaatacctgtgtttcagaggagccttctcaagaagatcat

SEQ ID NO: 17213 - DNA, 1159 bp, Zea mays
  Clone ID: LIB3068-046-G3_FLI
gagagggggaggtcgacgagacagagagagaaggccaagaggcttcctctccccattcctcccttccgtgccctagccgagccagccgcgaggaaggaggcatcccgccgtctcgcctggcgcccgcccgtcggccgaccttctgccgcagcttccaattgtaaaaagatcatagatttttgtgcaagagcgagtggatatggaaccatcccctcagcctatgggtgtcgctgccggtgggtcacaagtgtatcctgcctctgcctatccgcctgcagcaacagtagctcctgcttctgttgtatctgctggtttacagtcagggcagccattcccagccaatcctggtcatatgagtgctcagcaccagattgtctaccaacaagctcaacaattccaccaacagctccagcagcaacaacaacagcagcttcagcagttctgggttgaacgcatgactgaaattgaggcgacgactgatttcaagaaccacaacttgccacttgcgaggataaagaagatcatgaaggccgatgaagatgttcgcatgatctcagctgaagctcctgtagtctttgcaaaagcttgtgagatattcatactggagctgacacttaggtcgtggatgcacactgaggagaacaagcgccgcaccttgcaaaagaatgacattgcagcagcgatcactaggactgacatttatgacttcttggtcgacattgttcccagggatgagatgaaggaggacggaattgggcttcctagggctggtctgccacccatgggagccccagctgatgcatatccatactactacatgccacagcagcaggtgcctggttctggaatggtttatggtgcccagcaagggcacccagtgacttatttgtggcaggagcctcagcaacagcaggagcaagctcctgaagagcagcaatctgcatgaaagtggctgagaatattgctcagaagctatcacctgattcagagttctcattttaggttgtccaaactgcaggttttcttagtaatatcgttggttatcaaactgaaacaggcgattctaagtagggtgtagcatcatggtagtttcatttctgcttgtgatgttagttgaaaggataatgattagtggctagtggattaaagttaccatacc

SEQ ID NO: 17214 - DNA, 811 bp, Zea mays
  Clone ID: LIB3068-046-G7_FLI
aacgcgctcccggtccgaaaggcaaaccagccaccagtcccaccaccaccctctgtcttcgcctccgctgccgattcgaaagcacccgtcctgtcccctcgcaaaaccctagctccagccaccatgaagggcaaggctgacacctccaagaaggacgagggcaggctccgggcgggcggcgccgccggaaagcgcaagaaggccgccgcgagcggcaagcccaagcgcccgccctccgccttcttcgtcttcatgtctgaattcaggcaggagtatcaggcgctgcaccctggcaacaagagcgttgcgaccgtgagcaaggcagcaggggaaaagtggcgtgctatgtcagatcaagagaagcaaccatatgtggaccaagctgggcagaagaagcaggactatgagaagactaaggcaaactttgataagaaggagagcacaagctcaaagaaggctaagactgaggatgaggatggctcgaagtcagaggttgatgacgaggatggcagcagtgacgaggaaaacgatgacgatgagtaaacactgtctccaaggccacgaggtagcaaatcaagtgttaggtccccaattagcttactgttttgctgcctttaaatgttaagttgtttcaaacaggtgtttatgaaggggatctattagtttcgcgatgtcgttagtttagtgcattagcaaagaaaaagccaaatgctgctagctgttctgttgcttttcttttgctaaccacttgtgtcacaactttctgtacctgcttcattgactaatctagtgactagtcagttattggttc

SEQ ID NO: 17215 - DNA, 618 bp, Zea mays
  Clone ID: LIB3068-047-A11_FLI
cagcatcggccactaccacctagctagcgaacgagaacgaccatggcgtcccaggccatcgagagccaccgtgcaggcgctgaggtcgtcaccggaggagacgcaatctgcaggaagaagtcaatcgagctgctggaggagctcggcctccccaagggcttcctgcctcttgaggacatccaggagttcgggtacaaccgcgtgacagggttcatgtggctggtgcaggggaagaaggtggagcacaccttcaaaaagatcaagcagactgtgtcgtacgccactgaggtgacggcattcgccgagaagggcaagctgaggaagatcaccggcgtgaagacaaaggagctgatgctctggctcagcgtcgtcgaggtctacgttcccgaggcctcaccagagaaggttaccttcaagactggcactggcctatccgacaccttcgatgcctctgcctttgcgctgggagagtaattagcagtcaaaaaaatggttggcttcaaaagacatgcataatctatcttttgtatttgtaaatttttcatatatcttgagatgagtttgtggtactcatgggcgatgcccattgcaacatttctatgtattttcttgtttatc

SEQ ID NO: 17216 - DNA, 872 bp, Zea mays
  Clone ID: LIB3068-047-B6_FLI
cacccgtgcctgtgtctcaccagcccactttccccagtactctactcacccacccactcacggactcatctactgagcagcgcggtgggcatccgagcgagagggcgagcgcggaaggatcggaattccgaaggttgggcatggaggcgagcggcgagaaggctgcggtggtgcgacggctgatggaggcgaaggaggtgtccgggaagaccttctcgggaatcgccgccgagacgggtctcaccaacgtctacgtggcgcagctgctgcggcgccaggcgcagctcaaggccgacacggtgcccgcgctgagggcggccctgcccacgctcacggacgacctcatcgaactcatgatgcagccgcccttccggtcctaccaccccaacatcgtccacgagcccgccatttacagattgaatgaagctgttatgcattttggagagagcatcaaggaaatcatcaatgaggagtttggtgatggaatcatgtcagccatagacttctattgttcagttgacaaggttgaaggggccgacggaaaagatcgtgtggtggtcacatttgatgggaagtatctaccttacactgaacagaaatctgaacatatgatgtctaggccaacccgcaagacatcttgatgtggctggtgaggaggagaaacatgatcgtagtggttggtatcgggctcagcaaggatcgagcatgccattttctttgtgtagtccaaatcatcaacacaataaacagacctatattgatgataactgtcaaaaggaacattaaagtcaatgttctacctggcatgattgctggactgtattggatgatgctgagataaaaagagagaaaaagtgaaacaaactggattc

SEQ ID NO: 17217 - DNA, 324 bp, Zea mays
  Clone ID: LIB3068-047-C7_FLI
gcaggatcacgctggcctgcgacgcggcggtcatggagtacgccatgtgtttgctcaggagaggagcctctgccgagctagagcaggcgttccttagcaccatggccatgtcatgccactgtgccagctacatggcgccgtatgttggacgagccaggcagcatcagatcgttgtttagttagttgctgttccgtgtatgtagacgtgtagtgtagagcgatgattttaactaggtgggtgctattcaaagccttctgatccagcaaccgatcaagtgaggtgttgtaagtacaagagaataaagagacgtgattcttgctttg

SEQ ID NO: 17218 - DNA, 720 bp, Zea mays
  Clone ID: LIB3068-047-E9_FLI
ggaactgtgactagaactagtagatccaatccaacactcgggacgaaattaaaggagacgacgcatcatccggccggcaggcatcgcacggtcaccaccatggcggcgcaggagggcggcatgaggctggtgtcgcacccgatcgcggcgcacgacgggcggctgccgcggcagtacacggcggaggggcagggcgccaagaaggacatgtcgccgccgctggagtggtacggcgtgcccgagggcgcgcggtcgctggcgctgctggtgcaggacatcgacgccgaccccgtcgtgccgtggacgcactgggtggtggccaacatcccgcccgccaccaggggcctccccgaggggttctccggcgccgcgggggcgggggcgggggcgggccgcgaccagctcggcggcctgcaggagggggtcaacgactggaagcagcccggctggcgcgggcccgtgccgccctcccacggccaccgcatccagttcaagctctacgcgctcgacgacgaggtgcacctcggcaacaaggtgaccagggataagctcatggaggccatcgacgggcacgtgctggaagaagccgagctgatcgccgtgttccagggagtcgtcgccaacaactaacacacacactcagagatatcttcgttggcgtgctttgtatttgcttgtgtggctaccatgtaattttgatcgaataaaagggaacttcac

SEQ ID NO: 17219 - DNA, 1232 bp, Zea mays
  Clone ID: LIB3068-047-F1_FLI
ctcgtcgtcgcgccgcagtgagaggagggggaggcgatggatctcaacgaatgcgagaggagggggccggcggggccggatccgctgtcgaggcaggggtcgatctactcgctcacgttcgacgagttccagaacacgctcggcgggatggggggagggcttggcaaggacttcggctccatgaacatggacgagctgctgcggagcatctggaccgccgaggagagccaggccatggcgtcggcttcggcctcggcctcggcctcggtgtccgcgctgggggcagccgtcgacggcggggcggcgctgcagagacaggggtctctcgcgctgccgcgcactctcagcgtcaagacggtggacgaggtctggcgggacttcgtgcgggaggcgccgcccgggacggctggcggcgaggagccgcagcccaaccgacagccgactctcggggagatgacgctggaggagttcctggtcagggccggggtcgtccgtgacaaccctgccgcggcagctgctgctgtccctgcgcagccggttgctccacggccgattcaggcggtcagtaatggcgcctccatctttttcggcaactttgggggcgccaatgacgccggggctggagcgatggtgtttgcgccggtggggatcggggatcaggccatgggcaacgggttgatgcctggggtggctgggatggcaggtggtgcggtcaccgtgagtccggtggatacgtcggtggcccagctggattctatgggcaagagcgatgaggatctgtcatcgccaatggctccggtgccatacccctttgagggagtgataaggggaaggaggagcggtgcgggtgtggagaaggttgtggagcggcggcagaggaggatgatcaagaacagggagtctgcagctagatcccgtgcccgtaagcaggcttatacaatggagttggaagccgaagttcagaaactgaaggaacaaaatgcagaattgcagaagaagcaggaacaaataatggagatgcagcaaaaccaggtcccggaattggtcagcaatccatatgcacaaaagaagcgatgcctgcggagaacattgacaggtccctggtaactgagttgttgttgatcggactcgacaggatatttaacattatggtacttgtacattcttcaggatttggagaacccaaatttctgttgtatattagcgatcaacagagtcgaatgtaccagtgc

SEQ ID NO: 17220 - DNA, 1830 bp, Zea mays
  Clone ID: LIB3068-048-C10_FLI
tagcactcccagtcccggctcccgccgtcgcctcgacgcttcccccctcttcctccgccgccaacccagcgagagagctcccagtccgcgaagacatggcggggaagaagcgcaagtccggctccgagaagccgacgaagcaccgcctcccgctgggagccgatgccgacgctgtcgccgaagcctcgaagcgccgccgatcgggcgccaccaagcagcaccaggcggacgaggaagcgtccatcccgccctctctcagcgccaagatcctccgcgaggcgcgcaagcagcaggaagaggagatgcgcgccgactccagcgacgaacagcgaccctcagccgccgaggcgaccgcggggccgtccacgtcgtcctcgtttcccgtccccgccgccgatggcgagaatgaggaggacgacgttgatgagttcgacgggtttgacgcgctgagcgagtacgatggcggtgaggtggagatcaacgaggaggacgagaaggccctcgctgctttcatgtcaaaggacaaagctgccgagcgcacccttggcgatatcattctccagaagatcagggagaaggacgccgaggtcgcaactggtgaaggacgacctcgtgtaaaattggacaacagcattattgaactttataaagaggttgggaagttcttaagccggtacacaagtgggaaaattccgaaagccttcaagcgcataccatcgctggagtgctgggcagatgttgtgcagctaacagagccagaaaattggtctcctaatgccgtgtatcaagcaacacgcctcttctcttcgaacatgaacacaaagaatgctgagcggttctatgaagccattttgctacctcgtgttcgaaatgacataaggaagaacaggaggctgcattttgcactctaccagtcgctgaagaaggccctttataagcctgcggcatttaacaagggaattttgctaccactctgtcgggaaaggaattgcaccctacgcgaagcagtgattattgggagtattatccagaaagtttccattccatttctccatgcaagtgtagctctagtaaaactagcagagatggagtactgtggcactacaagttacttcatcaagctatttctagacaagaaatatgctttgccataccgtgcacttgatgcagtgcttgcccatttcatgcgttttgttgatgatgagaggatcatgcctgttatatggcatcaatcactgcttgcatttgtggaaagatacaagaacgagttagagaaaaaggataaggagaaacttgcacgtttgttggatcaccagaaacactatttagttactccagaaattcgaagggagcttcgagggagctgcaacaggggtgaaaaagatacaaatttgcatactttgtcacctatctccgtcattaccaagcctatcgaggaagacaaatgggacgtaccacaagtgccaatggagcaagattagccagattctccaacatcgatttttacacttcatttgtttttgaagcaaatttctaaagatattgctgtattttattgggcgtgaacttttagtgccaatattgcggtaaaataggttcccagtagattgggcccccaatgttctgagggcattttgcagtcggaatgtgattcacacacggaaaagtttgttttgatcatttggagcattccaagggggcattcagcatggacatgtagcatactgtctttcgcagaagtgggtaagaaatggttgatcatgttactttgtagctgcgacaactaaaggtgtaccatacttgaaccagaaatgaaaatgaataacccgg

SEQ ID NO: 17221 - DNA, 703 bp, Zea mays
  Clone ID: LIB3068-048-H6_FLI
gcaataacaccaggagaacccattggtgttgatgatgtcaataggatgaagtacaaggacaacatttatgcctcaactccacaggtcgagacatctgacatctggattcagcaagctagagagatgccacctatgcaggttccttcatattacaacataccaggtcaagcaacaccaggtgcttttgtgccaaatccagcaaatgcatctttcaatgctacagctcaatcctctcatgtgcagttcccaggcttgtaccatcctcagcaacctccctctattgtaagtccgcaccccatggtgcatcaacaggtgccatcggccattggtcccaatgttggggttggggtggcagctccaggcccgcaagttggagcttatcagcaaccacagcttggccatatgaattggagacccagcttttgaagaaggtttcttaattatctgtaattagggggggtcacaagagcctttatgtaacaacagtaggctccttttaacaggaagcacctttgtttttagtgcagctctttctgatctatttaagctataacgaggtttttgttagcctttccatcccccaagtgaattcagtatcccatctgaactggtatgatgtagattatgagttaaaacattgggcaaaatctcgcacgagcccaaggttgagtgccttccattttgttatattgttttgtttcct

SEQ ID NO: 17222 - DNA, 589 bp, Zea mays
  Clone ID: LIB3068-049-A1_FLI
gtgttcaacaacatggatacagacaggagcggcacgatcacggtcgaggaactcaaggacgggctggcgaagctcgggtccaagattagcgaagcggaggttcagaagcttatggaagcagttgacgtggacaagagtggcagcattgactacaccgagttcctcactgccatgatgaacaggcataaactggagaaggaggaggatttgttccttgcttttcaacacttcgacaaagacgatagcgggtacataacaagagacgaactggaacaagccatggcggagtatggggtgggtgatgaagcaagcattaaggaagtgctggacgaagttgataaagacaaggatgggagaatcgactacgaagagtttgtagaaatgatgaggaagggaagttatacctgaggaagctctgttctcatggtgggagaggttgtgtatatatgtttcagcaaatgtgtcaagtacaagcaacgaagcaagtttaacttagaacaagttgcttctgcagctatggtccgaggcaagcatgtacagctatttatttattgaccgaatatgcaacgagagagaaaatgtccagttt

SEQ ID NO: 17223 - DNA, 457 bp, Zea mays
  Clone ID: LIB3068-049-F6_FLI
gcatcgtcatcaatcgagcagaggggagggagagagatgaaggagggcacggcgaactgcatcgacatcctcatcgccatcatcctcccgcctctcggcgtcttcctcaagttcggctgcaaggtcgaattctggctctgcctcctgctcaccttcctcgcctatctccccgggatcatctacgcgatatacgttatcaccaaggactagccagctagcgccgtaaaccgggacaaggtgagagagctagctgatcagccagcggaggtaatggagatgaacgtactgctgagatcactttaatttgccctgttgctcaatgtttctggatggagactgaatctcagctgtgctgtgattctgctatatagcttgtgccgcctgttctctattcactagtcggtgctcccgcgtaatatttctctcagactcttgtgctatagtatgtgatgcatgc

SEQ ID NO: 17224 - DNA, 1059 bp, Zea mays
  Clone ID: LIB3068-049-H10_FLI
atgtatgtttgctccctgcctttgatgccacacgtcgtcttcggattcgtcagctccctactggcgtcagctcccaactggcagtcctataaagtggatgatccgaatgcgccgagaatgattcttctcgttattttctacgcgaacgtcatcttgctggctgaaattaagaacgtcaggatctacatcgagacggcaactgccgtggtgatatcttacgtgtcactacttaaaatcagctggagttacatctggctcgttctcttccccattgtggcgatcggcttcatcgttgctctgtgcaaggagctcagtcacgaggacgaggccggtggatcacattcacaggagcagagcaatgaaggtgaaggtgaaggcgaagctactacgtcttcatgggaaaagtttcatgctgggggcactgaccatgatgatgactcggctggtggagacggggcgggccactgcccaccgcggcatcgtgccggcgtccgagctgctttggaaagcctcgctcgtggtgctgctggtggcggtgcacgcagtggcggcagagctgctgggagagaacgcgttactcctgtgcatgccggaaatcctgccggtgctgctgtggctcagcgttcgccttgacactgctgacgacaggatcaagctggtcctggacagtaatctgctccccgcagcaccacctgcagtcctcgccatgctagcgacgggcgagcccctgctctactggtgcagaaaggcgttggtgtcttgtgttgtttcggcgcttcttaccttctacgtttatttcatgctgtgccagtggccgggaggacaacgcaatcgcacgctcacaggtgcctctttgcagcacgcggtcatccacctcaagtcttgggcaaaggttttgctcaaagcggtggttgtgctgctaatatttgtatgctttcgttccaactagttctactgcaagaaccggtggtctcatcatcagccgaccaaatcttcatcgactatatgtaaaaaagatccaccagttcataatttgactgcgaaatgaatagtttcact

SEQ ID NO: 17225 - DNA, 933 bp, Zea mays
  Clone ID: LIB3068-049-H6_FLI
gtcatttatcgcgattttaaaacatctaacatactgctggatgcggagtataacgcaaagctctctgattttgggcttgcgaaagacggacctgtaggtgataaaactcatgtttctactcgagtaatgggaacctatggatatgcagcaccagaatatgtcatgactggtcatctgacatcaaagagtgatgtctacagcttcggggtggtgcttcttgagatgatgtcagggcgcaggtcgatggacaagaaccgcccgaacggggagcacaacctggtggaatgggcgcgccccctcctaggcgagaggcagcggttctacaagctaatcgaccctcgcctggagggcaacttctcggtgaagggcgcgcagaaggcggcgcagctagcgcgcgtgtgcctgagccgggaccccaaggcgcggcccctgatgagccaggtggtggaggtcctgaagccgctgcagaacctcaaggacatggcgagcgcctcctacttcttccagacgatgcaggccgagcggatggcgcactcgagcagcatgaacgggaggagcagcatgaacggcggcttcaagacgcagagcccgtttgggcggcatgggcagccgccgcccgtgaggagcctctctgacgggccccgcgcgtccccgttccgctactcgccgaagcctaacgtgaagtgagcggagtggtggaggcgcggttttctgctggctggaaggcacggcccctggatgaaacctggtttgttgggggtgactggttcgggccgtgcatttgcattgcattgcattgatgtgtgtgctgtagattgacatgtgcacaaagtaaaaggatataggcgaaaaagggtggtgtaggtatcggagtttgcttggcggatgtttgctctgaggttttaactgaatgaatgcggatgcaccgttgct

SEQ ID NO: 17226 - DNA, 1035 bp, Zea mays
  Clone ID: LIB3068-050-A7_FLI
agggagtgcaaagaggcacagttgcttttattagaagtgttagcattgaagcagtaggtcttggagtccatttggctgcaggagctcatgatatacttatgaagacagaacatgctcttacaactgttccaccacctttagcctcatgtgaagcgaaacgaacaaaacacaacattagagctaaccaacctgaaagtgcacaacaaggaatgaaacaggcatatgaaagtttgactgttggttttggaaggacagcctctgctctcattggcaaccctattaaagtttataaccgaggggcgggtgttggatcagttctagctactgcaatctgtggagcaccagctgctgcagtagctccagtctcggcatctgctcgcgctttacattatgcacttcttgggctaaggaacagccttgatcctgagcacaagaaagaatccatgtacaaataccagggaccctctcaagcatagacgtgattgagaagatgagttgggagttcagttcattcttttggcgcgccttacaccatctccttgaacttacaccatctccttgaaacaactggtttaggaacttctttgccagtctcgtccaatggtgaggtgcaaacttgtacagtgtgtacagatcgtaggacagattatatgtggcaccaaagccttacactatgtaaattaacgcattagggtttaattaccactgatcttttccaccacgaaggcaagtggaagttttgtatcccctcttcgcttagtttagtaagatacctatggctcgcatgactgtccccaatgtacataatgtggttgcgagctgtgcggatgtaaatattctcgtttgctttggttgtgtgcgtgcacgcctcttggtacgctgacaacaggattttgaagagagtttccagtggagcatttggatacagcctaggggtatggtagcacgaagcggttccactctaaatttgttgtttgaattggttttatataggatagagtgactctgaaaaagaaaaattatgtttagatgctg

SEQ ID NO: 17227 - DNA, 1930 bp, Zea mays
  Clone ID: LIB3068-050-B8_FLI
tgctcgcctgccccatccgccgcgccgcgagccagcgagccgcctctccttcctcggcgtgttcctggcttgcctttgccgcgtagcagtggcatgagggcggggcggccgaagatcggcgaccaagcgaccagcgacgtggtagtgcggctacggacgccggagggccgcgacgagtggctctactgccactccgcggtcctcgccgccggcagcacctacttcgccgaccgcctctccgacgcctggccgacgtgccagatcctcggctcgcgctactgcgtcgaggtctactgccaggagctggacctgagctcctatgtcacagcgctccggctcctatacgccatcgagccctgctcccatttcggcgtccgcggcgcgctgggcgtgctccaggccgccgtgcaccttggatgcgggcagatcgccgccgcctgcgccggctacattgagtccgccccctgggaggaggccgacgaggaggagattctgaggaccgtccccagcctcggcccgcagtacgagtgcatcctcgcgcgtctccggccaatcgatccggctccggtgacgagcatattcctttcggcgttccggcacgcgacgctctcgtcggcggctgggccagcgcgggagctcaagtccgccgctcaggagcagctggagtacatgctcaccgaagatgacgacgccccattggtagcccttgacaacgacactgtgaagtctcaagtgaaggattgtgccactgctttactaagccagttcagtgctttcatgagctctatcctgacgaaacaaaaggaggcgcctcctcttgatggtgagcacggccagcttcagcaggagttacagttttttctttgtgatatctcttgggtctctcaggtcctgagcaagctcgagatgatgaagtgcattgttgtctactgggtcggagtgtccactgatatggtagaaactgttgacgcggtatgcactggggatgactgtctgaagaccaggctgaaggtggtagaggtgtctgcaaaagtcctggaggctgttgcatttggcaatgtcatccttccagccgaaaaacgccgtcatatggtgaatttatggattcgattcgcaagggtgacaaaatctttggctgatcaggccgatcaggatggtgacggcgaagctgagacaccaaaggaaaacctggacaatgaggtctggcagggcctggagtctgcaattgtttcgattgtgctgacactgccgtcaaatagtcaagctgagattttgtcagagtggcttcagtcgaaacatgttagatatcctgacctgacagaggcatttgaagcctggtgttatagatcgaaggttgctaaaagaaggctctctttcttgagcgacattggccaggtatcttgattcctgaccaattaacaattaaccgaagcggacatgagatatctgaattgaacaagtttgcatgctttctgctggggaaaatcatcaggttctgtgatcaccagcataaattttggaatttggaggcagtgcagaaaagggctcttgccaatattcgtatccatgacatgaatcctgataacaagtagccgaagcggggagggcctgttcggttgtttgggattggagccccgaattaattcctagccgaattacttatctaatttatatagattttaataagctggaatgaatcctggcttattccggtacaaccgaacgggcccttagtaaattacccagagtttgtctctatagattgcaggctaactttaatctgaagcgaaacggcctgtgattaatagggtgtcatttcttgcttgtggaaaagaagtttgtaatgagtgatcagttaacattgtctttgagaaaagactcaagggatgcgacatattcacttaccgaatgtaaatcatgattcatgagc

SEQ ID NO: 17228 - DNA, 734 bp, Zea mays
  Clone ID: LIB3068-050-H10_FLI
ctggcttctcctccccctcttaccaagtcctcttcgggttagggttacttagggttttgtggaggggcgatggcggcggctgatgtggagtaccgttgcttcgtcggcgggcttgcctgggccaccagcaacgagtcgctggagaatgccttcgcctcctacggcgagatcctcgactccaaggtcatcaccgaccgggagacggggaggtctcgcggcttcggcttcgttaccttctcctccgagaactccatgctcgacgctatcgagaacatgaacggcaaggagctcgacggccgtaacatcaccgttaaccaggcccagtcccgtggcggtggcggtggcggcggtggctacggcggcggtcgcggcggcggcggctatggtggcgggcgccgtgacggcggttatggcggcggtggcggctacggcggtcggcgcgagggtggtggcggcggctacggaggcggtggcggctacggcggtcggcgcgagggtggtggtggcggctacggcggcggcggcggcggctggagggactgatgtgtgggcccatcctggcttcggccgagttatcttatctatctatagtatcgtgttaccgttcgcttctgtcaccgtgttagtgtccgttctacctttggattaggtgttggtacccctgttgttccctttggttgctcccgctatgaaacgagacgagagaagaatgagcaaggtttttgttcgcagct

SEQ ID NO: 17229 - DNA, 2062 bp, Zea mays
  Clone ID: LIB3068-050-H11_FLI
ggcctcgccgagctccgcgtgctcagcctcaagtccaacgcgctccacgggcccgtcccggacctctccccgctcgccaacctcaaggcgctcttcctcgcggggaaccgcttctcggggcccttcccgccctcgctcgcctccctgcgccgcctccgctccatcgacctctccggtaacaggctctccggcgcgctcccgcccggcatcgaggccgccttcccgcacctcaccctcctccgcctcgacgccaaccacttcagcggcaccctcccgccctggaaccagtcgtcgctcaagtgctcaacgtctcctacaacaacttctcggggccagtgcccgtcacgcccgtcatctcgcaggtcggcgccgccgcgttcgcgggcaaccccgagctctgcggcgaggtggtccgccgcgagtgccgcggctcccacctcctcttcttccacgggggcggcgcgaacggtaccgccgctccccctgtgcagagcgctgctgctagcgacagcgggccgcagcgggagaacctgagcgtgccggattcgtccgtgccaaatgcgaagagagcgaggcggaggatgaccaaattggccgtcgcggtcgccgccgggtctgtcctcgccgcgcttcttgtcttcgccatgattgcgatgaagaggagcaacaagcggaggcgcccgagcaccgcgtcgtacgagagccccaaccccaagaagagcgcgcccgcgtccgaggtgagcagggacaatgctgacatgggctacgtcgagtgcgtccccgacgaggagacggcggccattatggtgccggaggagaaggcacggcgcctggagcggagcgggtgcctgacattctgcgcgggcgaggcggcgagctacagcctcgagcagctcatgcgcgcgtcggcagaggtgctcggccgcgggagcgtggggaccacatataaggcggtgctcgacggccggctcgtggtcattgtcaagaggctggacgccgccaagattggcccagcggcactggaagcagaggcgttcgagcagaacatggatgctgttggccgattgcgccatccgaaccttgtaccactccgagcattcttccaggcgaaggaggagcggctgcttgtgtacgactaccagcccaatggcagcctctactctctcatccatggttcaaggtcatcccgggcaaaaccacttcactggacatcatgcctgaagatagcagaagatgttgcacagggtcttgcttacattcaccaagcttctcggcttgtccacgggaacatcaagtcttccaacgttctgcttggttcagactttgaggcttgccttacagacaattgcttgtcgttcctcctggaatcatcagaagtcaaagacgatgctgcttacagagcaccagaaaacatgaaatccaacagaatgctaacgcccaaatcagacatatatgcttttggtgtcctccttcttgagctccttagcggaaagccaccgcttgagcactcagtcttggtcgcaagcaatcttcaaacctatgtccagtcagcgagagaggatgaaggagtggacagtgatcgcatcacaatgatcgtggacatagccacgagctgcgttcggtcctcaccagaaagtcgacccgccacctggcaagtacttaagatgattcaagaagtgaaggaagccgacgcaactggtgataatgacagtgatcttaccagcaactcctagttgcctgtgtgggtccatctctggtggatgaatcattcctactgaacggatgtagactgtataatttgaagtgagggtgaaccctagataggaccgtaggagagtactgcaatagcataaggatctctatgttcggtgtggtttgagctagggatgctgtaacatattataggatttcttattgtcagcaactcagcatgttctggtctggttctactagtggcagttttagcaccagtctgttgtgtgaaagtttattagattgatagtagtgaagccacaaaagctgtgtgaagactgaagatctggttttaaattctattaccagc

SEQ ID NO: 17230 - DNA, 289 bp, Zea mays
  Clone ID: LIB3068-051-A1_FLI
gctggcacatgagtatttttgttcaaactttaacggtggctgtctgttatcagaaatgcgtcaagagagttgagaatgatgatactggtcacaaacactgcactgggcaatactttgattactggtcatgcatcgacaaatgtgtagcatcaaagctctttaagaagctcaaatgatttgtgcgatgtgatgcgacttctgacaaagtgaatcgaatttgcataccttacacctttggaaagtgtatgagctcgtacatcttggaataaaacatcaatttttctttgct

SEQ ID NO: 17231 - DNA, 2080 bp, Zea mays; identical to SEQ ID NO: 13515
  Clone ID: LIB3068-051-B10_FLI

SEQ ID NO: 17232 - DNA, 320 bp, Zea mays
  Clone ID: LIB3068-052-B11_FLI
attgtcgacgatcttgtgtccatcgacactctaattgaggaccaccttacgcaagagcccatcaatgagtacgtccagagttgcgacattgtggctttcaacaagatctagagttcagtttctgagattgggcaacggcagcggctcagctcgtcaagtttgtgctgggatgccagtttatcccttctagtctattacagaaatgttgttcggagctgagtctattataaacatcttggtctgagtttattgttgagtggtgccagtttttttcaatatacatttatcttaaaaacagcggtactgatgtttttttgtct

SEQ ID NO: 17233 - DNA, 813 bp, Zea mays
  Clone ID: LIB3068-052-B8_FLI
gtcccgatgacgccgccgtcgcggtcgtcgtcctcaaccagccgctgccccgcttcgcgcccctcctctggtccagagcggcggtgcgggtgtgcgcggacggtggcgccaaccgcgtcttcgacggcatgccggccctgctccccggccaggaccccgacgaggttcgcgcgagttacaagccagatgtaatcaaaggggatatggactcagtaagaccagaagtgaaggagcattattccaacttgggcaccagaattgttgacgagtcacatgaccaggacacgaccgatttacacaaatgcatagcttttatagctgagaattattctgccactaacaaatctaaccagctcagcatcttggtccttggagcacttgggggaaggtatgatcacgagatgggaaacatcaatgtgcttcatctcttcccaagcatcaatatcgtcctcctatcagatgattgtctgatctttctgctctcgaaaatgcatacccacgagattcacgttgaaaagtcgatcgagggaccccactgtggattgatcccgattggcatgccgtcgactagcaccacgaccaccgggcttcgatggaatctagataataccagtatgagcttcggaggattgatcagcacgtcaaatatcgtggaagaggacaaggtaacggtcacctcggattcagaccttatgtggacaacatcgctccggaagtgaatctacactggagtatagggtaccattatactgttgtaatattagagaaataagtgacatgcttttaatatatttatatatatatatattaaat

SEQ ID NO: 17234 - DNA, 1312 bp, Zea mays
  Clone ID: LIB3068-052-D4_FLI
gcgagcacgcaccagcatccttggcagcgatctgcttgcttctcccagctagcgcgcgcggccaagctaggggatccatcagatatccacgccggccatggccgccgccgcctccaccacgtcgaggaccaactcgcgggtgaactactcgaacgagatccacgacctctccaccgtgcagagcggctccgccgtccccaccttgttctacccggacaagtccatcgccgacatcttcccgccgcaccttgggaagaaggtgatctcggaggtggtggcgacgttccttctggtgttcgtcacctgcggggcggcgtccatctacggcgaagacaacaggcgcatctcgcagctggggcagtcggtggccggcgggctcatcgtcaccgtcatgatctacgccaccggccacatctccggcgcgcacatgaaccccgccgtcacgctctccttcgcatgcttccggcatttcccctggattcaggtgcccttctactgggcggcgcagttcacgggggcgatgtgcgcggcgttcgtgctcaaggcggtgctccaccccatcgccgtgatcggcaccaccacgccgtcggggccgcagtggcacgcgctcctcatcgagatcgtcgtcaccttcaacatgatgttcgtcacctgcgccgtcgccaccgactccagggcggtgggtgagttggccgggttagcagtcggttccgcggtttgcattacttccatcttcgcagggccggtgtcgggcggatcgatgaacccggcgcggacgctggcgccggcggtggccagcaacgtcttcacgggcctctggatctacttcctcggccccgtcatcggcacgctctccggggcgtgggtctacacctacatccgcttcgaggaggcccccgccgccaaggacacgcagaggctctcctccttcaagctccgccgcatgcagagccagctcgccgccgacgagttcgacaccgtctaaattaaaacgcccacacgcgcatccacaacactgtcagcctgcaggtcaactcttcgcgcgtacgtacgctggacgctggctgagagagtgagtgagagagagagagagtactgtactactgtgtgctcgctcgctcgctctgttcaaagacctcatcatatcaggtgggagctagagagatagagctgcgtgtatgtatgtgtgtgtgtgtacgtgcttggtgtaccctacctagcgggtgagagcagctagcgtgatgtttatgtatcttcgtcagtgttgcaaaagttaattgatatgcagctgatgtgtctggctttgctggtt

SEQ ID NO: 17235 - DNA, 830 bp, Zea mays
  Clone ID: LIB3068-052-F1_FLI
ggttgcggcacacccttcggaagcaagccagtttgctctagggctgactgatggtggtgtttttgtgttggaacctttggaatcggagagaaaatggggaaatcctccaccagtagagaatgggtctgctagcaacttgtccacaccgcctcctaatggagcttcaagttctgaccaaccagaaagatgattaagaagttggaactggtagatttttcgtggcacgagtctaaccaagaaggtatccttcaaagttaatgaaacaaattggaacttctttatttaaattccttggcatgatatgtatagaacatttatttataacgtattgatgcaatttaggagtttgacaataagctgccatgatttactcagaaatatgatcaatataatcatgtgaacatagaatatagtgtatgtttttggccaacagattaatttctcttttactgacggacaaagacccaactatgtttgatgaatgccaaatgaaacatattgtcaaatacagatattcaggatagagttcttgttcagttcataacctcatcttgttctgcagacagggcttcaaagggtggtgcgactaaccttggcagataggttccaagggagccggacaacgcgctcaataaaaataagttcaacagaagtttgtccgttgcttgtataaatatttgtattgactatcgagtgaggagtcctagtatttcatttttgctttgtttgcggtgctgtgaaaaggatcagtagataagctgtagtacaacaactatcagactggatgtacttacctatatttatgactattagttaatgtatgttgtttc

SEQ ID NO: 17236 - DNA, 575 bp, Zea mays
  Clone ID: LIB3068-052-F5_FLI
tcggttcacttctccaggtaaggaaagggttcgtactcatggcgccgccgcagccaaagtcgggcctcttcgttggcatcaacaagggtcatgtcgtcaccaagcgcgagctgcctccccgcccgtgccaccgcaaggggaaatcaacgaagagggtgtctatggtcaggggcctgatcagagaggttgctgggtttgctccttatgagaagcgtatcactgagcttctgaaggttggcaaggacaagcgtgccctgaagcttgctaagagaaagcttggaactcacaagagggcaaagaagaagagagaggagatggcgggcgtcctcaggaagatgaggtcggctggtacgcacactgacaagaagaaatagagagcatttcaagttcatggagcctgccagagattatgttccagtgtctgattttccatacatgtagaacctaatagacatgtcaaagtattatgtatcgaaccagctcatgggattttgctccttccaatgcatccagggtttatgtatcgaaccagtttatgggatcttgctcctattccaatgcatccatggtttgtg

SEQ ID NO: 17237 - DNA, 719 bp, Zea mays
  Clone ID: LIB3068-053-A4_FLI
cgcaccgccgtcggcccaccgcttcagttggcagttgcgacttgcgagtggctccaacaaggcaacacaatccaccggcaccaacccagcgcggcgccaccggcgacccgtacccccttccccggagagcgatggcgacggagctgacggcggcgcagctgcgcgcgtacgacggcaccgacccgtccaagcccatctacgtctccgtccggggcaaggtctacgacgtcacctccggccgcggcttctacggccccggcggcgcctacgccgtcttcgcgggccgcgaggccagccgcgccctcggcaagatgtccaaggacgaggccgacgtctccggggacctctccgggctcaccgacaaggagctcggcgtcctcgccgactgggagaccaagttccaggccaagtaccccgtcgtcgcccgactcgccgccgacgcctgaactcggcagtctcggtgtaaatttactctgtcctgcctcttgcggtgttcagtgttgtgcttgcttgcttgttgctagttgctttgctacccaataatctgaatggaaggacgtatgtgatgtgcctgctgaatagctcgagctcctagtccttgcatacactgctgtgctaccacatgacatgatgtactcgtgtgtgctttggttgttgtgtaattccatgaccatgatcagtaatctgaataaaaaatattggagatgtgcttgcttcct

SEQ ID NO: 17238 - DNA, 743 bp, Zea mays
  Clone ID: LIB3068-053-D8_FLI
ggcggcggccagcggcgagaggaggaggggtgggtcagccatgacggggaaggcgaagccgaagaagcacacggcgaaggagatcgccgcgaagatcgacgcggcgacgacgaaccggggcggcggcaaggccgggctggcggaccggctggggcaggacaagggcgggcatgcgaagctggcgtgcccgctctgccgcaccccggcgcccgacatcaagtccatgcagatccaccacgaggcgcgccaccccaagctccccttcgagccggagaagctcctcaacctgcactcctccgcccccgctgctgctgttgccgccgccgccgccgccgccgccgctgccgaggccaccacctccaagcccaagcccggcgtccgcggcagcctcaagaagtaagcttgctggcttggttggctcgcccgcctgcatggggcacaattcccttcggtttcaatcccatccgccgacccgatctataatcaatcaaaccgccgccctccggcctggcggctgccgcagtcggcctgcggtgtactgttagtctgctgctgatttccgttgttatactgctggtacatgtgtcgtgtgatagatgtgtcaactatatatcaatctcgtcgccggcagctctagcatgtttgagtatgtgttgctgctctgtggtgccggcgacgatgactgctagtactgttattgtgatcgggtctccttgaacaatggcataaatatgttgcttgtt

SEQ ID NO: 17239 - DNA, 723 bp, Zea mays
  Clone ID: LIB3068-053-G11_FLI
ccaggttcctgatcttgaacggggccagcgtggacaaggcgagcctcgacgacgacgacggctcaggttcaggctccggctctggcgccgcgcggctagcaatgtcgcccaccgagctgcgcgagctgctgcagaagcgggagctcggccactcgataacgatccacgactcgccagcggtggtcccgaacggcggctcgtcggggcacagccgtccaggcagattacagagcacaagttcggacagccagcgctggcctcgggtgagcgtatacaagggccaccctttcctcagaaaccgcacctctgaagctggcaagctgatcaacctaccaggcaccatggaagaattcaaagtcatcgtcggtgagaaactgaaagttgacgcggagaaggcgttgatcgtgagcgacgaaggagcggagatcgactcgatcgacgtgatccgggacaacgacaagctgttcatggtcaccgaagaagatctgaggcggctggcatcaatggactggctgtcgtgcgagtgatttggttcctcccaagataattggaggctaaatatagaatacagtacaagagtattgtgcttctactatgtctaggattgatagattgatgacaactactgagtggcatgagctctatccagcgactaatttgcatgcaatgtgtaccatgagttcggaccactgtccgttattaatgcagggtcattcttcttgt

SEQ ID NO: 17240 - DNA, 558 bp, Zea mays
  Clone ID: LIB3068-054-D12_FLI
tcatcctcgtgtcttggacaatttggtgtgagagaaactcacgaatatttgagcacaaagagaagaccgtgacacagactatagcgatcattaaggagcaaatccgcctgtggattctaggaggagcaaaacacttagcaaggctgttgtaggttttagggaaggggaggggttggttttgaaacatttgtgtcaccatacttaatgtctccttcactagtgtgatgtacttgtatattttagtcctcgctgcttcaccttctttttaatataacagacaattctcttgccagatttttttttaaaaaagaaggcaggaacgtgatactgcccagaggggccagggactccttttagctagcctaaatgcgtgtcactctccttgctgtagctgattgcagcttccatgtgttcctgattgctaaatgctaactaacatatgcgtgcaaccaccagcaagggccagatatatacttatttttcttgactctttccctagctagtaccaataatcacgcacattgtcatattaattatacatccggcctgtggaccacg

SEQ ID NO: 17241 - DNA, 2609 bp, Zea mays
  Clone ID: LIB3068-056-E4_FLI
ctggttcttgcggggattgcgctgttctcatctctgtgtgttgcttctgccggaataagaatgagacattgctatgtggagacttgatggtaaagggggagctgtctgaggaggacggggtgttttcttgcaatgaggtatgtggccgcacgctcgcctgtggcaaccatgcttgcaaggatatgtgccacccagggccttgtggggagtgtgagctcatgccgaggaaggtcagtacatgtcattgcggcaagaccaggctgcaggagaggagggcgagctgcttggacgcaatccccacctgcgataagatatgcgataagaaactgccatgtggggtgcacaagtgcaaggtcaattgccatgagggagaatgcccaccttgtttggtgctcgttgagcagaagtgccgttgtggctcatcaggtcagatggtggagtgtcacaagttctcaatggaagagtttcgctgcaagaagccttgtggtctcaagaagaactgtgggagacatcggtgcagtgagatctgttgtccactgtctaggaaagttgcacaccttgaaggtggcaactgggatcctcatctctgccagatatcatgtggcaagaagctccgatgtgggcagcatgcatgccagctactctgccacagtggtcattgcccaccctgcttggagactatattcactgatctcacttgtgcctgtggcagaacttctctcctgccacctctgccttgtggaacaccaacaccatcttgtccacatcagtgctcagtgccccagccttgtggacatcctgcctcacattcatgccattttggggactgtccgccttgtattgtgccggtgatgagagaatgcattggaggacatgtgatgctgaggaatatcccttgcggatcgaaggatatcaggtgcaaccaaccatgtgggaaaaatcgccaatgtggaatccatgcttgcaacaggccttgccaccctcccccttgtgatcagacacctgcaaatggagatgctagttcaagctctggcggcaaagctgcttgtggacaagtatgcggtgccgcgaggagggaatgcaagcatacatgtactgccccatgccacccatcgtccccatgcccagatttgagatgtgaatttgctgtgactattacctgctcttgtggccgaatcactgcaactgttccctgtggtgctggtggatcctccatgggtgataatatgtttgaagtctccatcatacagaagctgtcaatgcctctacagtcagtggaatcaaatgggagggtgcctcttgggcagaggaagctttgttgtgatgaggagtgtgcaaagatggagaagaagagggtccttgctgaagcatttgacatcactccatccaatttggatgcattgcattttggtgagaattcaagttcatcagatttggtttctgacttgttccggcgtgagccaaagtgggtgctggccatagaagagaggtgtaagtttcttgtacttagcaaggtgagaggcagttcttcaagcaatgtgaaactgcatgtcttttgccacatgatgaaggacaagagagatgctatcagacaaatcgcaggccggtggaagctttctgttcagtcggctggttgggagcctaagcgttttgttactatccatgccacacccaaatcaaaaccacctgctcgcatcctgggatccaaagcaggtgtacctgttacagctgcccatccttactttgatccacttgttgacatggatccgaggctggttgtcgccatgcttgagctgccacgtgatgctggtgtcagtgctctagtcctaaggtttggcggggaatgtgaattggtctggctgaatgacaagaatgccatagctgtattcaatgatccagctagagcagcaacagcgctgaggaggctggattatgggtctgcttaccagggcgctgcgatgtttatgccaagcagcgctcaggcatcttcttcaagcaatgtttggattggagagcagaaggatggggggattactgctaggaacaatccgtggaagaagcctgcttctgctgctgagcctgattcgccctctggagactggactggtgttgctggccatgctccagcaccaggacggagaggcgtcaacaccgcctctcaagtcatggggactacaaaccgatggaatgttctggaatcagacgctgctgcaagctctggtccaggcgacgagcggaagcctgctcagcgcatggatactgcatacagcgcaataccaaatgttgggaatgctgggccatcgatgaccaagctgcagcctgacgcagaggtggaccactgggaagaagcttgtgaatgaggtagcaagtagcatcgggaagttgggtccagattttttttttgggttcttaaatctggttataggtcgctctgcttagctggtataccgagcctctatgttctagcacattttaaattagtttggtgatttcctggtggactgttgggtcagtgtcagaagtgtttgattttgttacgcaggccaatgagccggcaaatgaatatctgtaaggctgctgattattttagcaggtcttcttttgagttc

SEQ ID NO: 17242 - DNA, 754 bp, Zea mays
  Clone ID: LIB3068-057-A5_FLI
tgcctcgacattcttaaggacaaatggagtcccgctcttcagatacgtacagttctgctcaggtaattgcttattttatcgtctgtttggctaaatagctgtgatggtgggtggtatatgatgatgtactctgcattgtatcaatactgcatccaatttttggcttgcatatggttctagcatatcagtgtgctaccacactgcccccctgacaatatttggtcttcagcattcaggcacttctgagtgccccaaatccagatgatcctctctcagacaacattgcgaaacactggaaatcaaatgaagctgaagcttttgagacaggtacttgtagttgcagtaaacacagttatgaacatagtgttggtatggtttctgcttcacgtctatattacagatgtcctaacatggcagtctcttgcagcgaaggagtggactcgcctgtatgcaagtggggcattgtaaccaagtgttgtttcagatgtgatgttataacatttccatagtttggggccgactgaatacccctcttgcttgatgagagcaaatttgtgaaatgttgcaatggggtcaaaaaaaattgtctaatcgtgctttgtacttgtggctgtacctcctcgctgcagtgcccgtgagcatcaaagcaggtgttcctttgtatacccctatctgaccatcagttgcatgtgtttcttgtgctgtgctctgaggattcagatttatgctgccggaacgttgccggattgttctt

SEQ ID NO: 17243 - DNA, 638 bp, Zea mays
  Clone ID: LIB3068-057-A6_FLI
ggacggacacccttccctccgcagctgcgctgccggacgctttctgtcgtgttccactcttcgctgcagaaagctttttttttttcttggcggagattgttctctgctcccttttttcgcgaggaaacctaactcgtttctctctctacgacatctgcaggctacggggcatgcgtgtacaccgggggaggccaataatgcacggcgcacggcggtgccaaccccgtggcacatgattagttttgcgagtaccacgcacgcacgatggtctggattgccgagtgaaaaaggttgtgcgtgcctacaggctacagcaagggaagggctctgggcggaccgaataattgcggttgttgccgtggttggcgtgttgtagcgtagtgcagtgcagtgcagtgcagtgcagatcctcttgtttgtttcgtcgtaccggaagaaatttcccgttccttttcagctgccctgcctgccttgggacaggctgggacgtgtgagtgtgacttcgtgtaaaagaactattggacgctgtcagtgtcgccgtgagctctgtggacggtagtacatgtgtctaatgtacaagtagagtgagattgtatctatatattgttttttaaaaaaaataaaacttcattcggctc

SEQ ID NO: 17244 - DNA, 1297 bp, Zea mays
  Clone ID: LIB3068-057-F5_FLI
tcgtctccctccgctgtccgattgtgcgctgtcgcagcctctgcccagactgccctctcccagcccgcttctccatctccggtgagacgcgaattgaatcgcatcgaatccatgggcagctcctcgaataccaacacaagcggcggggccagcgacaaggaggagaagaaggaggacaaggtcaaaggcaaggactcgtcggggccatccttcaaggagaacgaaagggtcctcgcctaccacggccccctcctctacgaggccaaggttcaaaggatcgaaaaccatgaagatgaatggcgctactttgtccattatctcggttggaataagaactgggatgaatgggttgcaaatgaccgcttgttggaattgacggaggaaaacgtgcgcaaacaacaagagcttgataagaatcaggtagttgacaaaacaatgaagtctggacggtcaacacagcataaaccaaaagtctccaatgcggatgcaaaagctgataaagatgacactaagagtctcatttcagtgaaggggaagaaacgtaaaagtcagcttgggactgagattcaggacaaggaaaaaagatcatcacatagtctactagtgttgcagtttcctttgccactgaagaagcaacttgtggatgattgggagtttgttacgcagatgggtaagcttgtgaagctaccacgatcacctactgttgatgatattctaaagaagtacttggaacaccgggcaaagaaggatggcaagataaatgactcctatgctgagattctgaaaggattacgctgctactttgataaagcattgcctgcaatgcttttatataagaaagagcgagatcagtatgctgaagaagttaaaggtgatgtctcaccatcaactgtatatggagctgagcatctattgcgcctttttgtgaaattgccagagctacttgcttctgttaatatggaggaagatgcgttgaacaagctacagctgaaactgctggacgttctcaagtttcttcagaagaatcagatcaccttctttacctctgcgtacgatggttcttgtaaaggtgcagatgaggataaaaccaaatgattgcatgcgaacgttttatatcatgtaacatctttcgatggacttgtctggcactattgttgatatgaatgtcgcttaggacaacaatcggtttatgtaggatagatgctgcagattcctgaaagacggtacttgaactgcccggagcatgttgtattttcttaagatgctggaactaagacggcttagttgaatttgcact

SEQ ID NO: 17245 - DNA, 1065 bp, Zea mays
  Clone ID: LIB3068-057-F6_FLI
cccgccccttggcttttgcttggttgcatcgggccggtcgagccggagaggaaaagctagctagcagctaccagctctcggccggcggtggtagtctgcctgcagctggggttagctgcaagggttgggagctagccatggggaggggtcgggtggagctgaagcggatcgagaacaagatcaaccgccaggtcaccttcgccaagcgccgcaacggcctgctcaagaaggcgtacgagctctccgtgctctgcgacgccgaagtcgcgctcatcatcttctccaaccgcggcaagctctacgagttctgcagcggacagagcattaccaaaacacttgagaggtatgaaaaaaacagttatggaggaccagatactgctgtacagaacaaggagaacgagttagtccagagcagtcgtaatgagtacctcaagctgaaagcgagggtggataatttacagaggactcagaggaatttgcttggtgaagatctggggtcacttggtgtcaaagagcttgagcagcttgagaagcaacttgattcatccttaaggcacataagatccacaaggacacaacatatgcttgatcagctcactgatcttcagaggagggagcaaatgctgtgtgaagcaaataagtgccttagaagaaagctggaggagaccagcaaccaggtgcatggccaagtgtgggagcacggtgccaacttactcggctacgagaggcactctcctcaacagcaggccccatcacatgttggcaatggtttgttctttcatcccctggaagctgcagcagagccaaccctgcagatcgggttcgctcctgagcatatgaataacttcatgccaacatggctaccctgaagatggatcttgaggcaaaggaaataaataaagatgcggtggcagcatcatactctatgcaagctaagagtgacagctgtgtttcagtcacatatatgatctagtctgtgtgtcaatgtgtcgaaaaacatgtctgtgattttgttatatgaatgtaacgcgcaatgaaacatacaggactagctgcttgcttgcc

SEQ ID NO: 17246 - DNA, 933 bp, Zea mays
  Clone ID: LIB3068-057-H12_FLI
caccagtgcctccaccgaatcttcaacaggcaaagccaatcaataatcaccagccacatcaatccattccctttcctctcccgctccacttccatgggcaaggttcggtccttcttctcccgctcccgcagcggcaagcgcggcagcgcccggagggcaggctcgtcctcgccgcactcctccgcggcgagcgcgccgccgtccccgtccccactcccactcccgaggaggtcgccgtcgtcgtcgtcaaccacaaccagggacgagacggagcgcgtgttccgcaagttcgacgcgaacggcgacgggcagatctcgcggtccgagctggcggcgctgttcgagggcgtgggccacgccgtgaccgacgacgaggtgtcgcgcatgatggaggaggcggacgcggacggcgacggctgcatcagcctgcccgagttcgccgcgctcatggagtccgcgtccgccgacgccgccgccgtcgaggaggacctgcgccacgccttcatggtcttcgacgccgacggcaacggcctcatcacgcccgccgagctcgcgcgcgtcctgcgcggcctcggggagtccgccaccgtcgcccagtgccgccgcatgatccagggcgtcgaccgcaacggcgacggcctcgtctccttcgacgagttcaagctcatgatggccgcgggcggcggcggcggattcggcaggatcggtgcctaggaacaaggatcctgtgcctgtcctgctctgcctctgctttgctccgctcccacaaattggatttctttcattttatgtatgtacatatactacactggaatcacacggacagcgccacgtaaaaaagacccctttttcatttggtttatgtgtactatacaatgcaaatctgcatccattgtactgctatggatgttcaatggaattgtttcggctttc

SEQ ID NO: 17247 - DNA, 517 bp, Zea mays
  Clone ID: LIB3068-058-C3_FLI
gcagcaaacaagcaagcaagcaatggagatagaatcggtcaagtgcgagtgctgtggcctgaaggaggactgcaccccgcactacattgccagcgtgagatcaggcttccatggccaatggttgtgtgggctgtgctgtgaggcggtcagagatgaagcatgcaggaggaaggctcaccatggagtagaggaggctgtgagggctcacatggcgttctgcaacatgttcaagttgaaccccgccgtccgcgtggccgacggcatgcgccagatgctccggaggcggtccggtgatatgtcaaagccagaatcggccaagaagtacgaatcatcagtgacactgtattgaagagttcatccatcctaaggcctgtagaccgtctagccctcttctcaggctgaaataccttccaccttttgtcagtttgctgtatgttcttcttatcatgcctatgccttcttggaatgtacatacgattcatgcaaacagatgctagtactgtatggctttttgatg

SEQ ID NO: 17248 - DNA, 529 bp, Zea mays
  Clone ID: LIB3068-058-E2_FLI
tgagctccacggtcccgtacacggcgctccggcccgacgtgtacgctccgttcgtcaaggcgttcgacgcggcggcggccgggcccaacttcccctggatgtccagggtcgccgcggtggcgccgttcgaccggtgctacgactccaccaagctcccgcagagtctgctcggctacgccgtgccgcagatcgacgtgatgctggagggcgggcagaacttcacggtgctcggcggcaactccatggtgcaggtgaacgccaacacggcttgcctcggcttcgtccaggcgccggggcaagcgccggcggccgtcatcggtgggttccagctggagaaccacctgctgctgctcgacgtggacaagaagcagctcggattcaccactttcctcaacgcaatcgggctttcctgcagcagcttcaatttcactcttgctagctagtgtgctgctgcatgtatacttaactgtaacaacttgtactgccgtgtattacaaataaataaataaagtgggaataaattgattgg

SEQ ID NO: 17249 - DNA, 824 bp, Zea mays
  Clone ID: LIB3068-058-E6_FLI
tcgtgttgtggccggagagacgagaggactccagagagattccgacaccgctgggctcagatgccgccgccgccgccgccgccgcagcagcagcagcagcagtccggcatgactctctgccgcctccccacggccactcttggccttcccctttctctcccctgtttgctacctcgttcccgcccccgcctgtgcttcgccgcacgtcatgccagggccgtcgccgccagggcttcctcatcctctccatcaccggactcttcattcggttcgcggatggaggagtccgtcaagaagacggtggccgacaaccccgttgtcatctactccaagtcatggtgctcatattgcatggaggtgaaggcgctcttcaagcggatcggtgtgcagccccatgttatcgagcttgaccatctcggtgctcaaggaccacaaatacagaaggtattagagaggctgactggacagtctactgttcctaatgttttcatcggtggaaagcatgttggtggctgtacagatactgtgaagctgtatcgcaagggggagctagctagcatgctgtccggcctggatatcaacattaacaactcatgacaagtttgaccatgttttgcaagtatagttttgatgtttgagagacttgggcagtcatgtattgagtttttttaacttatgcagattctttatgtctgcaagaaaaaaaaaagctgtgtcatttacacatttttgtttggtactctgattaaatcattgaatttgaccactgtatgcaaattgctagaaagaaaaacgaacgaactcacagattatgtgttcttggc

SEQ ID NO: 17250 - DNA, 882 bp, Zea mays
  Clone ID: LIB3068-058-H12_FLI
ttaggattcagctatgtgcgagtagcaccaaaagcacctgcctccaattcagtgctcaagaagaagtcagctgctgcaaagggtaccactgtaactggcactgatgctgatctccgcagattgagcatggatgcagcccgtgagttgctgctaaaatttggcgtacctgaagagcaaattgataaattaacaaggtggcatcggatcgctatggtgaggaagctttcaagtgagcaagctgcatcgggaattactatcgatgaaattcctgttagtaagtttgcacgtggacaaaggatgtcttttctgcaacttcagcagcaaactagggagaaatgtcaggaaatttgggacagacaagttcagtcactttcagctttagatggtgatgacaatgccagtgacacagaagctcacagtgatctagactcatttgctggggatcttgagaacttgctagacgcagaagaatttgatgatgaggatactagtacagcagacttgagaattgacaaagcagatggaatgagaggacttaaaatgagaaggtgctctacgcaagcccaaattaacaaggaaattgaagatgatgaaacagaggcttctctggcaaagaaactacttgaagacgatggcaatgatgtgaagaggaaaaaacagcctgtggaattgacaaattgtggcacctctttagttgccaataaaatgaagcagagtaagactgggcaaacgatcaaatcatctggttatgctggtgcattaaccccaaaggagaacacaccaagagaaggaaaagaggttgaaaattcttttgttgagggtggtttgtcctcaaaactaaaaccaaagatggcactcgatgtaaatgagactgttctagtt

SEQ ID NO: 17251 - DNA, 1211 bp, Zea mays
  Clone ID: LIB3068-059-A10_FLI
aagatgacggtgacgccacggatcacggtgagcgacgggcggctgacggtgcgcggccgtacggtgctcaccggcgtgccggacaacgtgtcggcggcgcacgcggccggggcggggctcgtcgacggggccttcgtcggcgcccacgccggcgaggccaagagccaccacgtcttcaccttcggcacgatccgggactgccggttcctgtgcctgttccggttcaagctgtggtggatgacgcagcggatgggcgtctccggccgcgacgtccctctggagacccagttcatgctcgtcgaggtccctgccagtgacggcggcggcgacgacgcccccgcgtacgtggtgatgcttccgctgctggaggggcagtttcgggcggcgctgcaggggaacgaccgcgacgagctgcagatctgcatcgagagcggggacaaggcggtgcagacggaccaggccgcgcacatggtgtacctccacgccggcgacaaccccttcgacaccgtcaccgccgccgtcaaggcggtggagaagcacctgcagacgttccaccaccgcgacaagaagaagctgccgtcgttcctcgactggttcggctggtgcacctgggacgccttctacaccgacgtcaccgccgacggcgtcaagcacggccttcagagcctgtccaagggcggcgcgccgccgcggttcctcatcatcgacgacggctggcagcagatcgcctccgagaacaagcccgaccccaacgtcgccgtccaggagggcgcgcaattcgccagccggctgaccgggatcaaggagaacaccaagttccagaccaagcccgacggagacggcgacggcggcggcgagcaggcggcgggcgggctgaagcgactggtggccgagaccaaggacgcgcacggcgtgaagcaggtgtacgtgtggcacgccatggccgggtactggggcggcgtgacgccgacggcggggacggcgatggagcgctacgagccggcgctggcctaccccgtgcagtccccgggcgtgacgggcaaccagccggacatcgtcatggactcgctgtccgtcctggggctgggcctggtgcacccgcgccgggtgcgggacttctacggcgagctccacgcgtacctcgcctcctgcggcgtcgacggcgtcaaggtggacgtgcagaacatcatcgagacgctgggcgccggcca

SEQ ID NO: 17252 - DNA, 1306 bp, Zea mays
  Clone ID: LIB3068-059-F6_FLI
gttcagctgagcctgagcatggcgtcgccggcggccgtgctcgtcagcaatggcggtatctccccacacgctccaccttccgccgccgccttcctcgtctccactccgggcgcctacaccaccgcccccggaaccctcctctggtggacacgtcacctccgccgcctcgccgaatccgccacgctcctcgcccgttcccgccccaacctgctcggcctccccctcccccgatcgcgcgccctcgacctcgatttactatccatccattctctcgtgaacccctccgtgcgggtcgccatccgcgagatgcgcacaaggctgcccatgaccaaggacgaggatttggcgctcacggccctggtcaggggagccgatcccatttctggcggtggcggggctggcctcgacgtcttcgtccacgtggggacgtattccccgccgatctttggagaatcgggggccaggcttgccgcggccggcaggggaagggacgccgctgccgccaagtacgcgtcctgggccaggatccggaagagtttggaaaagatgaggcctcctggggtcactgagctcttgctgactaatgacggggatcacattcttgaaggcgctgttacaaacttctttgttgtctgccaacaggaggaatgcgagagcaacggaaaattctctaatcaaacaatggctactaagtttgaagtgcaaacagcaccactgagtgacggagttctccctgggattatgcgtcagatagtgatcgaggtgtgccatgatattggaatcccagtacgagaggtctctccatcgtggtccatgaatgaattctggaaggaagcctttgttacaagtagcttaaggtttatccagcatgtagagtcagttcaagtgcctttattttgggaggacatacaatctaaaacctggagtgatgtaccttgggcggtgaagaagtttcagggtgttggatgcattaccacacagattcagagggaattactgaagagagcaagaagtgatgagtacggcgttaacggtctcctttgagttatgatcattgttgttgattcatttgaagggacttcttttccaggcacttaattatttcatttctgctgggacgacactgttaagactgggtttcttgtgtgtataattcagacattttttgtctgctcagtgctgtgtcggccttctacaagctgcagatagatagccactgagcagtagcgaagcaattccatgcttgtttattactgtaattatgaggatggatcagatttagctacctgtcggagtcctttttttt

SEQ ID NO: 17253 - DNA, 2030 bp, Zea mays
  Clone ID: LIB3068-059-G6_FLI
cgcttttagcaaggctagtatctcatgtactgcaccagttgcaacttactaacttacatcaactaccgtagtaggcgggcagtagcactgaataatgatcttatcacaactttttttttgcatggcaatgccttaccaggtatctatgttcaagaggacttatgatcatcttcctaaagatacttactttggcatgtataaggaagcgacacgaggaaatccaaattattttctcacctatggtaatggaaaatctgctgcacgaattcaagaccatctccgtcctaatggcgcgcacaggtggcataattatgcaaagagcccaaatgagatcaagttggaggaggctgcagttctgcattatacatacactaaattttcagatttgacatctagacgtgatcgctgtggatgcaagcctacaaaagaagatgttaagagatgtttcatgttagattttgacagagcagcttttataattgcatcaactgctagtgaagaagaaatgcttcgctggtaatttcctaaattttctttgcttattaatattttttgtaatgctttagagacgctgcagctctgctaggttcagaatgtcactttattgattggaacaaggaagttagatatactaaaagttttcttaaatggattattttttataagagatttatgctgtgttggactgaacttccttaactttagagattgcttcttaaaggtttattcaagtaaaaatgtcctaaaaaatggaccacactgtaccatattctttaattccatctcatgtcttcttcctcagttatggtttatgtctacctatactagtacagtcctcatttggcatggtagttactcattcatgaacatgaaataactttctaactgaaagcacatggtaacaagtggatgcataactgaaataactttctaactgttaagcacatgccccaagtctaggctctggaccagcttgagaaggcgtggctcaaaactccaaaggctgaaagtcttgttaggttttttcaatagatactgtttttttttcatgacataatttatgaaacgtaattgtttggttcagcttttttctgaccagcttttttgagaatctggctttgtagagaatctgagtatcattaggattacgtgcggaggaagataaatgtgtccataaggcttaggatctagaagatggcggattcctactattgcaacgactcaaccgattatgtgtttatgttgattttgaatggtttttacccaaacgaattttatagaagctggctgaaaagctgatctttcgacagtccgtagtagcttttggtggccagaagctgcaaaaagccgaaacaaacaggggcaatgtattgcttcaagatgaaccagactgggaatagatacattggctgaaagcttaaaccgcagcctgccctgaatctggaataatcagactacactgtactatttcatggaaagatctagtatttacaaacacttttccagctgcctcttggtgccagttgcatgcattaaaattgtgtcggtccattttttttttctccacagagaaatggattttagtgttcggttcgctaatcttttttcttgtaatgtttcttgtttctttttggctaggtacaatgaacgagtcgtgtggaccgataagcagctgaacttaaagcttctgaggaaaggagtgctgactcgcatatacaccccaatgacaattgttcagagtctgcgcgaatccggtgtcttcacttccgccattgcagctggccaacctgctgtgaatgccaaactctcacccaaggaaaccaatgcgcagagccaaaatgttaccgcatctgggaacatgacaagagtggtcagatctactgattcaaaggcatcaggcagaaagatactgcaagccgttgatcttgccttcagcgatactaatgtaactgctgttccaccgttgtcgccgcccagtttggacgaacacaggcatcatagtgaataataatgtcatacgtatgatatat

SEQ ID NO: 17254 - DNA, 355 bp, Zea mays
  Clone ID: LIB3068-059-G7_FLI
gtctagtctccagtgtaaataatggtacattgagcatgatctattcgagcagcttattaaggaaacatcatccgatacagaacaaacatcgcaaatcgaccacagtattagcgcaacatcctgcaatacagtacaatacatcacatcactagtcacgcctcattacgctactacactttcttcaagaggtggtactctgatatcgcgaaaccgaacgacgcaacgagcacgtaggcagcagcgtactattatgatacgtactagagctttcaggcgacgtgcagcgcgctaccgagcgctgcgcggaggctgtcgatctcgtcgccgggcaaaaccgccgtgacgaggcggccgc

SEQ ID NO: 17255 - DNA, 1177 bp, Zea mays
  Clone ID: LIB3068-059-H10_FLI
gaaagaagtccactggctacagagcatcacggagtgccgagtgcagaccaaacaaatcaggccttctaacgcctcggccgccgcgtctggcgccgcagctacctcctctacggctcgccgggcacaggcaagtccacgttcgcggcggccatggccaggttcctaggctacgacgttgacctgtctcgcaccgatgccgccgccgacgacctccgcgcgctgctcctgcacaccaccccgcgctcgctcgtccttgtcgaggacctggaccggtaccttcagggcggcggcggggacgcggaggcgcgcgtggccagggtgctaagcttcatggacggcgtcgcgtcgtgctgcagcgaggagcgctgtcatggtgttcaccatgcacgggggcaaggactccatggacgccgcggtggtgcgcccgaccgtctagacgtgcacatccaattcacgctctgcgacttcgaggccttcaaggcgctggccaacaactacctggggctcaaggaccacaagctgtacctgcaggtggagaaggggttccaccgtcggcaggtgaaagagatggtgaacgaggcagttgattcagacattcaactttggactctgaggacatggaggaagaactatttcatattcaatgatcggcacagaggaatggggatggatatcgatgacatgtcgtacgaagagttgcttgctttgggagagcggattggtactgtaaacacaggcctttcagacgatgtattgtccacgtgcctaaacttgagcctctacatgccacaactttaggttctcatgaagattgtgaaacaaaatgtagcgtatgccaggaggagtatttatccggagaggagtagggcaagatggcatgtatttatccggcgaggagtatttatccggcgaggagtactaccaaccagtccaccttccctgcatggagcactggcttcggcagaactggtgttctatctgtaaatttgttgccctgagaactaactagcaacgtgtttcatgtttcttcggaaatgaaatgtatagattctccatgtcctgtattccctccccacctctcttccttttctcttttggaattcctttccttcccttttttttactcaaaacactcatgttttgttatcaattaatcataaaaggaaatgttgtgttg

SEQ ID NO: 17256 - DNA, 1116 bp, Zea mays
  Clone ID: LIB3068-059-H2_FLI
gctgtccggctgtcccggctccagcatttccaccctcgcgcggcggtcgccggagcgagcagagctgccggaaggcccgtcggatccgccgccgccaagatgaatgacgccgatgtagccaagcagatccagcagatggtgcggttcatccgccaggaggccgacgagaaggccaacgagatctccgtctccgccgaggaggaattcaacattgagaagctgcagcttgttgaagctgagaaaaagaagattagacaagagtatgaacgcaaagagaagcaggttgaagtacggaagaaaattgagtactctatgcagttgaatgcttctcgcatcaaagttcttcaagctcaggatgatctagtaaacaaaatgaaagacgatgcgatgaaggaactcctccttgtcagccacaaccaccatgaatacaagaaccttttgaaagatctaattgttcagggcttgctccgtttgaaagagccagctgtattgctccgttgccgcaaggaagatcaccatcatgtggaatcagtactgcattcagcaaagcacgagtatgcatcaaaagcagatgtccatgaaccagagatatttgttgaccatgatgtgtacctaccacctgccccaagccatcatgatgctcacggccagttttgctctggaggtattgtcttggcttctcgagatggaaagattgtgtttgagagtacacttgacgccagactggaagttgttttccgcaagaaattgccagagatccggaagcttctttttggccagactgcagcctaattgactcaatccgcagatgatggtatggctcgcttctacctagtggtttttgccaaattgatcgtttacggtattcatccccaatgtacaaactaccttatttgttcattactgtcgccgagcaccgactgtttgtacttcgttcgctccgaggaataagaataaagcactgctagacttcccattgcgaagctgaataaatattgtaaagccatttgtcgtgctgaacttcccgttccgttcctgtcctgtcctgttgatgtgtatatctagttaatgtcggatacggttcttgtgggaaaaataaaaaataaaagttcttgt

SEQ ID NO: 17257 - DNA, 961 bp, Zea mays
  Clone ID: LIB3068-059-H7_FLI
catcccgtccccgtccgcgccggccgacgccgccttttcgtccccgcgtcagcgtcgcggctccactgagcgtgcgtgtcaccggcgggaggcaagggcaggcggtggtggcgatggcgtccgctgacgcgcgcttggcggggatcgcctcctccatccgcgtcatccccgacttccccaagccagggatcatgttccaggacatcacgacgttgctgctcgatcccaaggcgttccgtgacaccatcgacctctttgtcgagcggtacaaggaccaagggatcaccgtggttgctggtgttgaagctagagggttcatttttggtcctcctatcgctttagccattggcgcaaaatttgtgcctttgaggaagccgaagaagttgccaggcgaggtgatctccgaagagtattctttggaatatggaactgacaagatagaaatgcatgtcggagctgtacaggccaacgaccgggctcttgtagtcgatgatcttattgctaccggtggaacactatgtgcagctgtcaaacttattgaacgtgttggagcaaaggttgttgagtgtgcttgtgtcattgaattgccagaactgaagggccgagacaagcttggggacaggccagtttttgtccttgtggaagcagacgcctgagcggaacttgggacttctcagagagtttggcgccgtcgatgctcagtttcccatgttaccatgttggctattttctggctgacgcgtaataaagttttattccaaattgtgatcccctgaatgatttgtcaatgtagacatgattgctgatctttgtaaactgtggcttatgttttgtcaaaatggttctaattattcacatcaattaaggataaatcctgattggagcttgttgtttgttctagtaatgttgctttcttgctttgtttgtgcaaccattgatgaaataaagttgccatcacaat

SEQ ID NO: 17258 - DNA, 1111 bp, Zea mays
  Clone ID: LIB3068-060-A4_FLI
gtagcagagccaccggccaagaaggctaggaagaccaagaaggttgcaagtgttagtctcctggggttgatttgcgttgcaatgctttgtgggtgtttgattcctgcagtaaatcggatgtatgactctgttgatgctggagaaggtgctgcatacggtccatctcatcgtgggagggtgctggctgttgaggggcctcatgataatgtttcagatggtgtcgatccaaagccgccacagcgtgccagtgagacgcttccagcactgttgtatctaccaaagaatgggaagcatgtcaagattaatgggaatcttgttattaagtcgattgttgctagtgagaaagcttcattgcagatgtctggcaatgatgggaagcgtcctcaaaaccaagaggaggagactagactggcaattcctggctatgtgactccattgaaagctggagaggttatggaatcaaccgaaggaatgatgaacaatgaactgttggcgttagctcctgcagatggaagcatgtatagggaggaggatggattgctgccacagtggtttagtgaagcaatgtctggccccctgctgagctcaggaatgtgcactgaagttttccagttcgatgtgtccccatcatctgctcatccaaatggcatcattcctgtctattccaatgccatgtcaaactcgtcacagaacttcactcaagatcttccccctgctcgtgttcgcacggtcaagaacagaaggatttcgtactccgaggccattcctctgagaggttcaacatccaacgacactgagcacctcaagagctttggcagtacgaagcctgtttcgtcagtggtcgtctctgtgctggctgatcccagagaggctggcgatggggatggtgagggaaggatctcttcaaaatcattgtcccgcatcttagttgtcgttcttatagatagtgttaagtatgttacgtactcttgtgtcctgccgttcaaaagccatagccctcacctttaggtctgggttttggacgtgagttgataaagctgacctatacattttatagcagaagaggtgtaagacagctgcctttgttcatttattcaagttttgtgtgctc

SEQ ID NO: 17259 - DNA, 559 bp, Zea mays
  Clone ID: LIB3068-060-B12_FLI
gttctgcccattctacaaatccgtttggatgatgcgcaatattattcacttcaacacattggcaaatcaggctgtggagcgggcagctggtactgatggccaaaagataacatacggtgtcataaaacaccgtttgggcgatctattttatcgcctagtatctcaaaagttcgaggatcctgccgaaggtgaagaagctttggtcggcaaatttaagaaactgtatgatgacctcaccactggtttccgcaatctcgaagacgaggcacggtgaactagtgtagattctgtgtaaacaaggactgccaaatgttttataagatacataaattgtagattgagatcatctgtaagaattattcccaccgttgcaccatctcttcgccaccactgttttagtcatcggtgcctgatgggcaccctgtttatttcatgtatcatttattgctgtcattgtaataagcgatgggcatgattgtagttgaataagtacaatgtccatgtattcagacaccagtatcgtgcttatttgtttgttaaaaaaactatgttgcctttt

SEQ ID NO: 17260 - DNA, 533 bp, Zea mays
  Clone ID: LIB3068-060-B5_FLI
tcgtcacttacagcaatattagcgccccagcctgtgtagccacggcgatgaccacaatggttgttgggtccgcggtaggctggcgaggcggtgcttggtacgctcgaaggggcttgagaagagagcaacaaaagctggtggggatgggtcacatgaagtcgcacgacagatggcactggcggcccttcaacaggctcaggaacagcaggttagcctccaagaacaagcgcgccgacgcccatccaagcaccgaggccccctcgacgtcaagcaacacggcctctgcggacgttagcagtgcttctcagccggcagcgggcagtgcatgagcttatatatcaacaacaatggactaggatgtgagcttggggccgcgtagtagtccataagacttggtagaacagaccatgtgagtcagctcgatctgtggtggatcttctttacatgcgtgaaccagtacagtgtacatacaaatgtacaataatatgtactttgataaaccattacataagctattcacctttttttctgat

SEQ ID NO: 17261 - DNA, 1257 bp, Zea mays
  Clone ID: LIB3068-060-E8_FLI
cttttcttctcgaaagataaaaggtgtttgtctttgaaagctagaaaaggtagctttctattatggcacatcagtccaaaccataatttagtcatttttatactacacgtgcaatgggtatgaatccaagttgtgagagcgtaagaggtgaacatagcaaccagtatgaaactacttaagttgatggaagagcagttcccttgctatgactgatattttatcgaaatgcatagcaaaagctatgtgactagaaaaaaacggaaacatcttatagtttggaatggagacttaacattttgttggctaggacattgggctatatcttgctacctcctcacttggcacaaataacttcatttgtttcccagagactgttattaatgctttgcaggaatacacattatttcttgttatccattgaagtatacaatacttaagcccttggttgatagtgtgcttgtaaagattaactctttcgaggagaagacaactagtggaattttgctccctacgacttctcagtccagacctcagggtggagaggtagttgttgttggaaaaggaatgataattggggataataaagttgatgtcaatattcagaaatatgtcaaggaaaaatttagaacaacaaccgaaaagataaattcaagaactggccgcttcaacaagagtctgtccatgaggatggcatgcagcattacttgcccttcgattgagctgggtggctacaatgcatagttctttgacaagtttcaaagtttcaagagaaccaagctcctgaatgaacacagcttcacaactgaacatggaatgtgcccggttcattttgagatgtttcggaaaagagagaaaaatcaagacaccaattcgagagaagtcgcaaacggatcgaacagatctgttaggcagcctttaagcagaagtgatagcagaaggctttcatcaaatggaagacaagctggtgcaaagtagggacttacaatggccttgttcagtttttgcctttttcttagtgtttgtcatgagagattgcgaggatgttctcggctaagcaatgagtgacaacaaacccaattgaaggttgtcagtgtggtgagttgtgatatcaacgactggtgtgtgatgccattaacccctttttttcttattggccttccagctatgttgagttctagctaatcctttgtatcatgttcataatataagtatacatagtgaaaagaaaggaaatcgattgatcaaaagatggcgcct

SEQ ID NO: 17262 - DNA, 1078 bp, Zea mays
  Clone ID: LIB3068-061-D4_FLI
gcctgcgctcgcctcagctcctttcttccccgccccttggcttttgcttggttgcatcgggccggtcgagccggagaggaaaagctagctagcagctaccagctctcggccggcggtggtagtctgcctgcagctggggttagctgcaagggttgggagctagccatggggaggggtcgggtggagctgaagcggatcgagaacaagatcaaccgccaggtcaccttcgccaagcgccgcaacggcctgctcaagaaggcgtacgagctctccgtgctctgcgacgccgaagtcgcgctcatcatcttctccaaccgcggcaagctctacgagttctgcagcggacagagcattaccaaaacacttgagaggtatgaaaaaaacagttatggaggaccagatactgctgtacagaacaaggagaacgagttagtccagagcagtcgtaatgagtacctcaagctgaaagcgagggtggataatttacagaggactcagaggaatttgcttggtgaagatctggggtcacttggtgtcaaagagcttgagcagcttgagaagcaacttgattcatccttaaggcacataagatccacaaggacacaacatatgcttgatcagctcactgatcttcagaggagggagcaaatgctgtgtgaagcaaataagtgccttagaagaaagctggaggagaccagcaaccaggtgcatggccaagtgtgggagcacggtgccaacttactcggctacgagaggcactctcctcaacagcaggccccatcacatgttggcaatggtttgttctttcatcccctggaagctgcagcagagccaaccctgcagatcgggttcgctcctgagcatatgaataacttcatgccaacatggctactctgaagatggatcttgaggcaaaggaaataaataaagatgcggtggcagcatcatactctatgcaagctaagagtgacagctgtgtttcagtcacatatatgatctagtctgtgtgtcaatgtgtcgaaaaacatgtctgtgattttgttatatgaatgtaacgcgcaatgaaacatacaggact

SEQ ID NO: 17263 - DNA, 1273 bp, Zea mays
  Clone ID: LIB3068-062-E10_FLI
cgtcggggcaaaaatttcaccgcgcgcgatcaagcgattgatgcccccgtcatggcgtccgtgccgctgtcctcgccgtcgcaggccggcctccttggccccccgttcccgctcctgccaccgcccttcggtgcatgcctccgctaccgcttgccgaggctgcctacaggcctctcgtcgagcgtgaggaagggagggctcctgccgctgccgctcctggtgcctcccagggccgcggggggcaaggacgggcgggccgtgaccaaggaggagttggaagaggaggaagaggagttcgaggtgaccaaggagggcgaggaggttaatcaggagacaggaggaggcagtggagccaccaaggaggcggcggcaaggggttcgggtcgattcgctgcggactacgtctcgctcggcgtcagggagcccgtctacgaggtgatagaagtgagatcaaatgggaggatgtccaccaagaaaataagcaggcggcagctactgaaatctagtggtctccgcctacgagatactagaagtgttgacccatcactatggttaatgaattcaatgccttccctgctggtacgtgagcaagctattttactcaatcttggttcgttgcgagcaattgctatgtatgcgcgtgttcttatattcaactataacagcccaggagggaaggcctttctagggttattactgtctaggttaaatccaagaaacatcaatggtgggcctgcaatgccttttcagcttgaggttgttgaagctgcacttctttctagaatacaaagattggagcagagactaatgaaaattgagcctcatgtggctacattgctagaagttctgccaaatcgcttgacagctgatgtgttggagcagcttcgtctaagtaaacaagcattggttgagctgggatcacgagcaggtgacctcaagcagatgcttatcgatctcctagatgatcctcatgaaatcagacgaatatgcataatggggagaaattgcacacttgatagattgagtgatattgtggagtgcactgttcctttagagaagcagattgctgaaggtacagctaaatttatcattgtaactttgcatatttctggagattatgacttgtatctatcttggtaaagcttgcatctttacttcgttagctggacacttaatatgccaaccgatggcatgttattagactagttttctagtaaaacccgtgacatatgcaaaaaaaaaagactgcagttagcaaggatttgaacaggtt

SEQ ID NO: 17264 - DNA, 1186 bp, Zea mays
  Clone ID: LIB3069-001-A8_FLI
ggtgaggctgctcgtccacatttcttacagtcctcgaagatgggcctgccgtatatgcgaggttgcatcaggaagtctgcgcccgtgcgattttaagtacagcaaactattagcttctcttcaaactttcagatgcacatataattttgagataaggttgacatctgttcaagctgagccgtttaagaaaattattttgaaggcaatcagtcatctcacagaggaagtgcagaatgccagagctttggtagatgggcaactgttttcagaagagatgaacataagtacagaggacccacaccaagttgattttcttgtgccattcaagaatgctgtgcctgttgaagaatgcagtttagagggagttgctgggctcattcgctttattggatctgtcagcgccttggcatatttaggccctaaagaatctatttcagaagctatatctgatctaaaggcggacatcgttacaagtctaaaaagccggttggatatcatccttgatgaggcagatgatggccctgccactgctgaagtggagaaatcaccatctcagaaggccactcaagttatatttcatgagttgagagaaccttacagtttttcattcccgagaagggtcctgataccttggctgagcggcacctatgtttgtgattacttgcaacaaccagagacagcagaggatgcagtggatcgcttcaaggaagtgataggtgcactggaaacagccgtggagaggtcttcaatcctggaaccagaaagcgcagcagcagcttgtagcgtactagaatccttttgggatatggtgcctggatctggcagcggaggacaaggtggatccagcaagctgaaggacagtcattctatacagaaggatgattcaagcaaaggacaaggcggtttgaatttcagtatcgtagccgctctgattgtgctactggttgctctgatagctggactgctcttcactggttccgccggatacccaatataatacctacgtaactaactgcgctgtaccccaccagtagatgcgaaaagcaaagatgttagaaactgttgaagtggagagttgaatttatttaatgttagaagctgttgttcacatctctattgtgttgtgcctgcctgtctaggctatttttgatgagctattggggctcccatggacgagagaatccat

SEQ ID NO: 17265 - DNA, 1755 bp, Zea mays
  Clone ID: LIB3069-001-C8_FLI
ggaccagaaaacatgcaggcgattcaagttgaacctgtggcctcatcattgaattcatcatattgttacattctacataatggaaacactgtgttcacttgggctggaaatctgaccactgcattggaccaagagttaatggaaaggcagcttgatgttattaagccaaacacacagtctaggtcacaaaaggaagggtcagaaacggaccagttttggagtttactgggaggcaaatctgagtactcaggccaaaaaatggtgcgagaactcgaaagtgacccccatcttttctcatgcatcctgtcgaaaggcaatttgaaggtcaaagaaatacaccactttactcaagatgatctaatgacagaagatgttttcattctggactgtcacacgagcatatttgtttgggttggtcagcaggtggatgttaaaggcaggttacaagctatggatgctggggagaaatttattgtgcttgattttcttatggaaaaccttgcccgtgaaacaccagttttcaccgttatggaggggaatgagcctccctttttcactagattcttcacctgggactccgcaaaatcactgatgcatggcaattcataccagaggaagctcgccattgtaaaaggtggaggtgctccagcattggataaaccgaaaagacgaacaaccgtctattcaggaaggagtactacacaagataaatcccaacgctccagaagcatgtccttcagccctgaacgtgtgcgtgttaggggaagatctccagcattcactgcattggctgctaattttgaaagttcaagcaacagaaatctttccactcctccacctgtagttaagaaactttacccgaaatctgttacacctgatccgtcgaatactgcttctaagtcacctgcaattgctgctctggctggttctttggatcacccttctcaaactcctgctctagaattcatgaaaggtggctccgagtcagagaagccaaaacaggagggagatggtaaaggtgttgatactgtggcccctagagttgaatctctgactataaatgaagatgtaaaagaaaacgagccagaagatgacgagggccttccgatttacctgtatgaacgtctgaaaaccacagctgctgatcctgttactgaaattgatatcacgaggcgagagacctacttatcttcaactgagttcaaagagaagtttgggatgacaaaggaagcatttagcaagcttccgaagtggaagcagaacaggctaaaaattgctcttcaacttttttagcctgatcatcaacacttccaatgtctcatagttcatgggtcaaatggccatttgctgaaagtagttctactctacatctgattagcccatgacaacgacagctattttgcagaacgcaatcaccatatgcaatgccacatcaattttcacattgtcctggatcggtctcctttttctagtttggatttgttttgctagctaagtagctctcttattcttccagttcataggtgtgctattccctttttcctttttttgtcaagtgctcttcattgattcaaggtcacacaggtttgattctgaggcttgattttttttgtgtatcaactctgcctgctgtgttcttttttgtttttgagatgagttgcggtttgagggagcgataagtatgtacagcagagtgccggcactgtaacatcacaataccgttatctttgatcaatataattattttttgtgtgt

SEQ ID NO: 17266 - DNA, 934 bp, Zea mays
  Clone ID: LIB3069-001-D4_FLI
acactagctagctaggtcgtcgttcctaaagatctgaccttgcagcaggcaccacagcacggggagcataaagctgggcgtgccgcaccggagcgccggcgcggacgagcgcggcgagagctccgcgccggcgatggccggcgtgcagcgggaggtgtactcgaagaagggcgtgatgcggcggctgatgcggtggagccggccgcggtgggccgcggcggagcaggcggagtgcgcggtgtgcctggacgagttccgcgcgggcgacgtgctggcgcacctgcgctgcggccaccgcttccactgggcctgcgcgctgccctggctcgagggcacctcacggtgccccttctgccgcgccgccgtggacgccggcgccgccgccgacggcgcctagaagcggccgaggctctggtcttgctggggcttgcccgtgggacggcgcggggcgccttgtcgctgtcggcccacgccagccacgccacccccatggcgttgccacgctaggcagtggctagtgggggtggtcatggtgagtggtgaccggcctgcttgtgtggcgcggagcggaggaggacagcgagacgcgcacgacgaacccgtgagtgccttggcagtttttgcacgctttgcgcgcgcaaaggcacacggttggtgcacatttgttggttgggccgtttgccccccctttgcgtgtcctcctcccatcatcgcgagtaactgatgaacggttttgttttcgtgtctggggagcgctttgtttatggactctggtgttagcggatagcggctccatcatgtaattcatgtcaaaaaaaaaaaagatcgtctgatcgatcttggagaacgaactgtaatttagatcaacatcaatccacatctgtgtacagtctcagtgttgttgctctgaacttgtatatttttctgtttgctc

SEQ ID NO: 17267 - DNA, 2657 bp, Zea mays
  Clone ID: LIB3069-001-F12_FLI
aagggagagagaggcggcggcgacggctagggttacgcccgccgaagttgcccacgcgggaggctcttcaagcttatgttctataacatggaggaatccagtttcagcaaaccaactgtcaaaagacttttggaggacgagctacgaaagctaaaacagctgaagcttccaaatgatgaggttgagagaatattagctgacctgggacatggtgcctgcctggacaaaagttcaacccagaacagcaaagcgaagaagggagaccaaaatcacatcagaggtatcaccaccacggctgctccatctggatctttggatcccactgcttccaactgcatgaaagaagcagaagaaaatgagcttgaatttgccttggcagatttcttaggacggattcatagaaattgcaacaataatggggagttatgtacggagatgaaagccctaatccaaacaaagattgcagagctagataatcctccgtgcacatttgcttatgagcagcaaacttcacggggtgacgaaaatgatactgctggtggcaaacatcgatgtagcagtagtaaaactcagcccaaaaaattcagagatgcgctggagatgctaagctcagacaccgaacttttctttcagaagtcaaattcacgtattttggagagcgcccaaagaaaccaaaacagactgatagggagcaatctagagcccacaaaaatagcagataataccgactccaacaaagatccaaagagtctgaaccagcatgagttggccaccaggagatatggtaaagagagcaggaatatctttttctggaagaaggaaagatcctcaccaaggcagactgcacaaggaaccagtagttctcagccagttaacaaaatagttatactgaagccaaatccaaggagagagatcggccatgctgtggctgttagttcaacccaagctccaaaactaggtgcaaccgagagctcaaaattttcaattaaggaggtcagaaggagattcagaatcgtgactagtgaagctacaaaaggaataccctcagtgtcagaagataacctccaaaaaggtcagcattggctcaacagttcagctttcacaataataaaagataccagacagctcgctgaacagacctcagaagggaaattctcatcttcagttatgaaggattttagatcatcaaacagcggtaggcaaaagaaaataaaaaatgatgggccaaccgaaaaaaacggtagcataattacgtcatccaaggatgaatctgtcttctatgacgaggccaggaaacatctaacagagattctcaaggacaaaagacaaacaaccaagcagcacccgacacttgagatctcaaggtccttggtgaggatgctttccctccctcagtccagcacatcatcacctaggagtagccctagggcaaaagactgcatttacctctcacctgaagaggcaagcattcgtgccatatacaagtcaaataaagattttttagaagaagaaagccagtcgggagaatttccagagaatgttgtgtgtgatcctagtgaagcgctgcatgagcaggctgttcaggaaaggtggtgcgtcaaagaagaaagtcaagaaacaacacaagaaggtgcagaacttgacactctgcgcactaaagaaattgacaagctggattgcatgggaaaaaatagcaatgcatggggcaccccagcaaagcaatgcacatataaaccatcacaagatatggtgggagaagcagagccaggacaaaggcatgtcaggacgtttccaagctcccctgagaacgactttgaaaaactggaatgccaagagcccacgactccccgaccgagtgcacagatcgaacagatatcacaattttctcctgacggaaaccacgaaaagcaagaacagccgagccctcaatctgttcttgatgtgttcttcctcgacggtgagttgcacaaagatatcttgaggacacgctacaacaccacaggggatggttcagaccaagggattttctgggaggacaagcatccgaggttatgttacataaaggaattgctagagctgtcagaattgtgtgcaaaccagaacttagaggtatggtatctagaagatgaattaatcagcccttgcttgttcgaagaagtacatggaggcaatcaaattgatggtacgaagcttttatttgactgcatttgtgaagctgtgacagaaatccaggacatatactttagaaaccctgcatgcctatcttctctcacacacagcataagggcacctcctccagcgggacaaaaccttatctcagaaatcaataagcgtgttgaacgccatcttcactatcgatttccaagcacattagaccagctggttaacatggatcttgaaggtggcagttggatggatcttggatcagaaagcggagaggtcgctgtagtaatatgggactgcacactagatgagcttttggaagaattagtttacgacctgtggatttcaggcttcaatctcgcagccggtaaccatctgtagatttggtagagtcataccgttaaatagaagtaacatgtttgtgtggcaaaatcctgtgatttggacatggagggctgcatgagtcgttcttaaaggcatgagcatggtacggg

SEQ ID NO: 17268 - DNA, 870 bp, Zea mays
  Clone ID: LIB3069-001-F3_FLI
gcggcaaggagcaggccatcgacatggtgctcacggactactgcatgccagagatgaccggctacgacctgctcaaggccatcaaggcgctgaacccgctgaagccgatccctgtcatcgtcatgtcgtcagaagacgagccccagaggatcagccgatgcctgaacgccggcgccgaggacttcatcgtgaagcccctgcagagcaaggacgtgcagcgcctccggaactgctccacggtcgggaggcccagcaacaagggcggcgccacgttgccgtgcgaggagaacgccgtggccaagtggagtaacaacaagctgccgccctccgccggcgccggcgccggcgccagcgccacgtcgccgtcggggcggcgggcgaacctcgccggagtcgccatgcgccaggtgctgcactcgtcgagagtggagatctcgcagtacctgccgctcctgctcaagctcgtcgtgctggcgtacgccgcgctgtgcctgggcgagctcctgcacagatggtcgtcgggtggcagctgctcgctctccccgtggtgcgcctgatcaggaaggagcaagcagcgcaaaaggccagcaacggtgcaagagcccccctgggcaccgacgacaggagactgctgatgcaccaagcattatttcagaggctccaatagccctagtcttttaatttaggtagatgagattgtctgctctgagatcctaaccggggtttcgaccgatgatgagtccccccgtggcttttgttcgttgatttgaggggccggggccgtagacgtaggaaggagaggaacggaacgaaccccttgtatcctctgctctgtatagaatgaatgaatgaacgaatgaatcagaatgc

SEQ ID NO: 17269 - DNA, 472 bp, Zea mays
  Clone ID: LIB3069-001-G2_FLI
agcgcttccctcatttgaagattgtaacctcagagattgatagtggattgaacgatgaatatcgtgtcataccaggacttggagagtatggtgatcgatacttcggcacagactaaccgatgactgatgctgttgtagttagcagtgtgaaaaggtactcaaattagagctgacattaccgtggcagatatactggtgtttggttgctttatggtatactggaagacaaacgtggataggtttctggtaggtgctgaaaccgtgaccgtgtggtcttgtccattatcatatgttttgataccacaaaccgttggttgtgaggcaaatttgtttttttttgcattttgaggctcctagctgaagtgcctgctcctcgtcacacaatactgttatacagccttgtgaaatgtatgactgaaccctgttcccggcatctaacagttgccgtggggtcacagctgtggttggaatg

SEQ ID NO: 17270 - DNA, 471 bp, Zea mays
  Clone ID: LIB3069-002-B12_FLI
tcttttacacatagtgcacctgagattgagaaactgtttgagtcagtggctaggtcctgcggcgcaaaagctgtagatgaaggaatcagtgtgcaggatggcagtcactaataaagtaatttgctttgttagtgctgtttttgtgctatttcgcactgtaaattgtgtgctaccctatctgggcttgtacagaccacggaaatacatagtgcgtcacgtcagctatttgggtgcctgtgctttgcctggtagctaggaattactattgatcgccagatgctccaggtgcaaatttttccgtggactggttcacttatttgattcaactatgtcagaatggtagatggtgcgaacttcagcttagatagtgagttgagttgcaggcatgtttgtaaattatatttttgatgccattctgttttctcatagaacggaacatttcaagatcagtctatactcctatgccgtttt

SEQ ID NO: 17271 - DNA, 708 bp, Zea mays
  Clone ID: LIB3069-002-D3_FLI
gcttgcgctgggtcaaatcaacacagctaggaacatcattgcaaagatatccaaggactacttgaggctgctcaagtatggagactccctttaccggtgcaagtgtttgaaggtggctgcactaggtcgcatgtgcactgtcgtgaagaggatcagtcctagtttggcttacttggagcagatcaggcagcatatggccaggcttccatccatagacccgaacacccgtactgtgctgatttgtggatatccaaatgtggggaagagttcgttcatgaacaaggttacaagggcagatgtggatgtccagccatatgcctttacaacaaaatccctgtttgttggccacacagattacaagtacctgcgctaccaagtgattgacacaccaggtatacttgaccggccttttgaagataggaacatcatagaaatgtgtagcatcactgcgctggcacacttgagggctgcagtgttgttctttctggacatttctggatcttgtgggtacagtatcgctcagcaagctgcactcttccacagtataaagtctctgtttatgaataagcctttggtcattgtgtgcaacaagactgacttgcagccacttgaagggctttctgaggatgacatgaagttagtcatggagatgaaggcagaggctatgaagactataactcaagctgttggtcctaatgaagagggcgg

SEQ ID NO: 17272 - DNA, 2046 bp, Zea mays
  Clone ID: LIB3069-002-D6_FLI
ctcccttgaggtgttgcctgagaggtgctgctgaccgagtagcatcattgaagagttactgtcgagcacttggattatgtgatcgatgtgcagagaagtggttccaagggcacaagtgtgccaacatggtgcaacttcacgccattgaggaagtctaggatttgctcaccttggatgaagctatagtggaagtcattgaaccagcagaggaactgatgatggttgtatccctgtctaatgcggcatggtccggatctgacacgatatcaaccatgagattacagggtcagattcagcgacataatctcttggttcttattgattcagggtcttcacatactttcctcaatgacagtcgtcgaccactattgttcggagtccaagaattgacaacaccaattacagtttaggttgctaatggccaagttattacctgctcacaccaccttccagcagctccatggaccatcggtataacccaatgagagtggattggacaaacaagtggatggttatttcttaccaggaaaatactatctaccttcagggcatcaggtcttccttactagtgggaatggtggtggaattattgttactatctgaaacatcattatccacatctgactctagcatagcagttgttgtagtgtattctagagtgcaagctgtactcgacagttatcctagcattttcatcgatctagtgggactcccaccaacctgcccgtgtgatcattcaatttcattgatccccggtgcccagccgttccacataaggccataccgttaccctccaaccctcaaagatgaaattgaaactcaagttaaggaaatgctatcccagggggtgatacgaaagagcagcagcccctttggatctccaattctcttggtcaaaaagaaagaccactcatggcgattctgtgtagattaccgttatttgaatgccacgacggtgaagagtaaataccctgtgctgatattcgatcagttctttgtgctcaggcactaggcatgtagaggtattttttgttgttattttctctttatgtggatgtggttacaaggctgttgacaaaatattactactccatcgtcctccctctcacccataaggtatttgatatattactttgtccagtcgatgcaatgcagcttacaaggctgttgacaaaataatccaggtttgttggcacacttttaatctttcttgtacgggtacactacttctaacaatggaatatgaatgttgttttttgcacaaaagttgcctggcttttagcatcgtttgaaatactagaacactagggatatttgttctctcaaataaagctttacctgttatattatataatacttccgtaagaagagctgttagtggctggagtgaatagaatttggttggtcggtgcctccaagttgtttggtctgccgttcaaatgccttattattctgcgagctgttttaagactgggcctcaattttcttttccaggcagaaagtgctactgccgctctcaactgtagcggtgtggtactgggatccttgccaataagggtgagcccgtccaagatgcctgtgcgtccccgtgcccctcgccagctgatgtcgtcctaggatctcaagccatcttctggacctcacaagtccagggagtgcctgcctctgatcctcattatcaggaacatgctcaagtatgcactgacgtaccgtgaggtcatttctatcctgatgcaacaccatgtacttgttgatggcaaggtcaggactgacaagacctaccctgctgggttcatggttcaagctctgcaaggtgaggtttgttcagtttggccagaaaggcatcccctacatgaacacctatttgttgtacaggaaaacatagaatggaattcaaatttggtggccgcaaaagtgtggagacttgaattcatataaagttaggcttaacattagtgcaaacagttgtattttagtttagatttagagtacacttatgtatgcgttgtttgacaatgcttatttatgatatattgagttgtactt

SEQ ID NO: 17273 - DNA, 323 bp, Zea mays
  Clone ID: LIB3069-002-D9_FLI
aagtgttccttttccatatcttttctggcaaagacgcagttatcacagatggaaaatatttaatactacgactgctacagaggaaacaagatacctgtaccgatggaatatgattcgtgtattattccttgggaacttgaacttatcatatggagttgtaaattattttgtcatttcgacttatgttcacttcatcattgccttgtatgatcatgtaattcagagaccgcagagcaaaggtgggctggggcttagggcgtatttggaaacaaagtattttaaaactatagttttagaataatatagttttaagatgttacgac

SEQ ID NO: 17274 - DNA, 245 bp, Zea mays
  Clone ID: LIB3069-003-B9_FLI
tttatttaaaaaaaaaatattccctccgtcgtttcaaaaataaactaacaggtaacaaatatttgagaacaaatattcgagaacagagataatgaaccaatattcgagaacagtgataatattatacaagacgttttgatactacaagacaaattaagtgcacaagcctctccacaagagatgacgccgtgagaactaccctccccaagcagcaaccagtgaaatgacggagggaatatttattt

SEQ ID NO: 17275 - DNA, 1706 bp, Zea mays
  Clone ID: LIB3069-003-C3_FLI
gtatcctccttgctagctccttgccttgccttgcctttgccttccctccgcgcgaggagaagagccagcggacggacggagcacaggaaagccggacggacggacggagccggacgcgcgagatggagatggcgggggcggccgaagcggacacgccgtcgcaggagccggtgcgcacgggccggagcaacaccatcctgctccccatcggcggcatcctcctggcctacctgctctaccgcttcctccgcccgcgcctccgcggcctgcgcctcgacctgcccgcctggctgcgctgccgccgcgcgccgaccggcgggggcgccgtgctgccctacttcgcgcccatcgccgaccgcctcggcgccgtcgcgctgccgtacctcggcgccttcgccggcccgcaggcggcgctcctcaggttccccggcggggaggcgctgtcggtggccgccatcctcgaggcgcccggggaggtcgtcgccaagtccgcgcacagcacgctgtaccgcgccgccgtgcgctccggggaggccgccgtgctgctgaggttcgtgcgccccgcgtgcgccgacgaggccttcgccgccgccgcgcggcggatcggcgccgtccgccaccccaacctcgtgccgctccgcgcggtgtacgtcggccccaggggcgagaagctgctcgtctaccccttctacgccgccggctcgctccaacgcttcttgcaagaggggatcgcggagtcgcagagatggagcatagtgtgcaagctctccgtcggcatcgccagggggctagaccacctgcacacgggcctggacaagccgatggtccacggcaacctgaagacgagcaacgtgctcctggacggcagctacgacgagtgcagggtgtcggactacgggctgcacctgctgctgagccccgccgcggcgcaggaggcgctggaggccgccgcggcgcaggggtacggggcgcccgagctggccaaggcgcgggacgccacgcgggagagcgacgtgtacagcctcggggtggtcctgctggagctgctggcaaccgcgcccgcgggcggcgacggcgtcggcgacggcatcctcctcctccctgcctcctcctcctcctccttcaagaacctggtcctcgagcgcaagatctccgacgcgttcggctcgtctgggcttgctaggcagtgcaggagcggggcggggaaggagaggagcctgggcgcgttcttcgagctggccacggcgtgctgcagcccgtcgccgtcgctgagacccagcgccaggcaggtactccagaggctccaggagatcgcgcggtgaatggatgcgaggaccgactggcgactatacatacatactgagtgtctgcgttgatcggtctgcgaaaagtgtcctcctgccccccagccaggatagatgatgaacccaacaacgtgtttcgtggtgggcggtttgaacccctgtgctgtacagtttcaccgggagcagacagcagaggtggtggtggtggtggtcatcgctgctagatgaacaagcatcactactagactgtgtgtctttgagtttgttcctcaaagtggaaacgtacgatcgtggagtacctgccctgaaaatatgtaaaaatgcttgtagtgatattagtgaacagggtacgtgttgtatttcgataacacgttacagagaaaatcgtggaatgttcctttc

SEQ ID NO: 17276 - DNA, 404 bp, Zea mays
  Clone ID: LIB3069-003-C6_FLI
cacagctcaccgcagctcaaaagccagcacaggcaaacccccgtcatggcctcctccaagatgctgcgcgccgccgtcgtcgtcgcggccgtcgccgtgtcctccttcgccggcgccgccctcgccgccgaggcccccgcgccgagcccggcctccggcgccgcggccctcccctcgtcgctcttggccgccgccctctgcccggccgtcgcgctcctcctcggcaacctgcgccactgatgacgcctgcctgtctcctagaccgacgagagccgccgtgtgctgtcgcgtgatgttattgtcctctgtatgtgtgtgtgtgtgttcctgacctgtgcgtgccttgtaccgccaccccgcgcgtggattggaactctatcgatcgttcggagattcagtgcgtt

SEQ ID NO: 17277 - DNA, 1453 bp, Zea mays
  Clone ID: LIB3069-003-D7_FLI
ctcgtaccctccttcccttcctcgcgcgcggtcctccgatcgaactgccggacccgagcggaggagagcagggccctcccgagggccctcccgcgcggcgaccccgtggcgttcctgcgaggctgctgctcgttcgggtcggcggggcggaagcggcccaaggcctcgcccttgccctccccaccgcgcctgtccgccgctgcagcggcagcggacgacggggccaagatgaagggcctcttcaagaccaagccgcggacgcccgtcgacatcgtgcggcagacgcgtgagtgcctcgtccacctcgacctccactcgggctcccggagcggcgacgccaagcgcgacgagaagatgacggagctaagcaaaaatatcagggatatgaagtctatcctttacggcaatggtgaatcagagcctgtaactgaagcatgtgtgcaactgacccaagaattcttcagggagaacactttacggctattaatcatacatcttccaaaactaaatttggagactaggaaagatgctactcaagttgttgcaaacttgcaaagacaacaagtatcctcaaagatagttgcatctgagtacctagagtcaaataaagatctcttggacattttaattttagggtatgagaatatggacattgctttacattatggtgctatgttgagggaatgtattcgccaccaaagcattgcaaggtatgttttagagtccgaacatatgaagaagttcttcgactatatacagcttccaaattttgacatagcttctgatgcttctgctacctttaaggaactattgacaagacataaagcaaccgttgctgaatttctctccaacaattatgattggttttttgaagaattcaactctaggttgctgtcatcaaccaactatataacaaaaaggcaagctatcaagttgttgggagatatgctgctggatagatcaaatgttgcagtgatgatgcgctatgttagttccaaagacaatcttatgattctgatgaatctcttaagggattcgagtaaaaatatccaaatcgaggcatttcacgtgttcaagctgtttgctgcgaataaaaacaaaccacctgaggtcgtgaacatactggtcaccaatagaaacaagctacttcgtttttttgctggattcaagattgacaaagaggatgaacagtttgaagcagacaaggagcatgtcataaaagaaatatcggcgctttgagtatgtctgaggttgtaattagtcattctgatgattttcttttctcgagaaagtgcatgtaaaataataaactttttgtatattattctgttgggcttagaggaacaatatgactcgttgactcgagttgcacttggatactgccagcaaatgtgatagtttttaatagattgcgtggttgcccttgccctttttatgggcttgtttcaatgac

SEQ ID NO: 17278 - DNA, 2444 bp, Zea mays
  Clone ID: LIB3069-003-E2_FLI
gcaccagtgaaatccgctgctcaggatccactatcccagttaatgtcagctattgaaggtttgaagcctgttcaggaagatagtctggcccatataaaatcagctattggtgaagcaatcaagtctatcccagagccaatacctgatgcccttgcaaaactttctcatgaaatacttgatgcagcaccaccaccattagctgagctgatgaaaccttttgcacaattgatggcaccaaacaataatggcaatgggccatctgatgtgcatgctgaggggtcatctagctcttccagtgcacaggtgccagctgaagctaaaaatgagcccaaagttaggccaagtttgggtcttaagaccgtgttgaaagaggctgctggacctgttcctaatgctggagcttctcaggttcaacagccattaatgtatccatctgtcgaggagatgctgttcccctgtaattcagtcgacaaatctgtttgcaaagggaagattgatgctcaaagtaagggaaaatctgttacgtcctcaggcatccaacctgctcctcattctcttcgtactcatgccccacctccaccacatccgtgcatttcagaatggtcccgagcacaaagaagccaacaccgtcaattgaaatttgaagacaatgcaaaaaccactaatgattctagatggcgcattccgatgtataaaatgccctatgcaccaccacctccagcagtgccacccccaggctatgtaccttctccacattttccttatccaggccgcctcttatcttctgggcatccatacggagatctcgctggtaacatggaaaactcagcaccacatagtctgcatagatggattcagtgtgatggctgtggagcgcaaccaattgttggtccacgttataaatctaatgtgaaggaagactatgatctatgtgattcctgtttccagcgcatgggaaatgaaatggagtacaccaaaatagacaagcctattttaccccacaggtttctaagagatccccatgtgtaccggaaggtgcaccatccacgggttctaatgaagtcaagacgggagaaacttgaaagtcgcttcattttggatgtgactgttcttgatggaacactgatgacaccttctaccccgttcactaagatttggcgcatgcataacaatgggtctgttgtgtggccacggggcacacagcttgtctgggttggtggagatcagtttgcattgcagacatctgttccattagagattcctgtggatggttttcctgtggacaaagagattgatgttcctgttgattttgtggcacctacaagaccagggaggtacatatcttactggaggttggcttccccttctggtcagaaatttggtcagcgagtttgggttcatatccaggtggaagacccttcttttgttaatgacaataacaggaatgctgttattaacctgaatctgcctccagagagctatagttcaaacacaaccaacttaattgatgtgaacattgagcctgctgactcagcccttagtgcacatgctaagcgcacaaaggagttccatttctgttcaactgattttcctgaacccagtaagtctgtgccttatacgttggccactacctctttgtctgcagcagctcctacaaaccaaactggtgatgttcccatgtccagtacacctgctgctgcttgtttgccctctgttaatgtgcatatgcatgaagtcgttactactcatacaccgtcacctattacgcctgtcttgcctacaactatacacttttcagccccagtatctgctcctgcaattgcccctgagcttgcatcaggggctgttggtgtgcctccacctgttagtgctgtggtacctgagctgtcagaactggatgttcacaatgaggagaagttgctgagggagctggaggaaatgggttttaggcaggtcgatctcaacaaggaaatcctcaggcagaacaattacaatctggagcagtctgtcgatgacctatgtggcgtcaatgaatgggatcctctccttgcagagctggaagagatgggatttgatgacacagagatgaacaaggagctgcttgcgaagaatgagggaagcatcaagcgagctgtgatggagctcattgccagggagaagaaggacaagtgaagatcgtgtgctatctagatccaagtatatattcgtaaataatgagacggctgtgccactgcggtgcaagccctggtgcgtctcagagcttgcttatggtgaactcttcgtgttaggtttcttccttatatctgtcgtgtctgtggtgtcgatgaactatctagtatgtggagcgtgtgcgtctcagcagttaccctgccatgccacgtggactggctgtcgtgcctactgtctgttaccatgtatattatataaaaaatgatgcgtggacc

SEQ ID NO: 17279 - DNA, 762 bp, Zea mays
  Clone ID: LIB3069-003-F12_FLI
gaccagcccacggtcagtagccatcggccactaccagcctcgggcgctggctgtggcctgtgggctgggcggggcccctttaaatgccggccatacgcgcggcctaaagcctccagagccacgctgcttcccggccgaagcctccgtccgcgcccacggtttccattccatcccccaggcttgcgccgactcgccacttgcaccgccggccggtttcgccgaacgcctcgcgcccacccgcgcgcggagacctgcatataagccggccgcgtgtcgtccggcgctcccgggacaggcgatccgttcgtcatccgctgcaaaccaccaggcaccagctccgcgcgcagaggccggaggactacgaccgacgagggcgacgaacaccaaggctccgaagtccgaggaggcaggaagcggaagacgtcgggaatgggcgctgctcgtgactccacggcggcgggccagaagcgcggcaccggcacgcggtgcgagctctgcgggggcgcggcggccgtgcactgcgccgcggactcggcgttcctctgcctgcgctgcgacgccaaggtgcacggcgccaacttcctggcgtccaggcacgtgaggcggcgcctggtgccgcgccgggccgccgaccccgaggcgtcgtcggccgcgtccagcggctcctcctgcgtgtccacggccgactccgcggagtcggccgccacggcaccggctccgtgcccttcgaggacggcggggaggagggctccggctcgggcg

SEQ ID NO: 17280 - DNA, 1061 bp, Zea mays
  Clone ID: LIB3069-003-F4_FLI
gttctgcctccgtctcaatctcgaccggtcaccccatctccaccgccacatccgtcgtcttccgccgccgccgatggcccgcctcttcacgcaaaccctcaccctagcccgccccgccgcctccccctccactaccgccgcatccgcttccctccgtggcctcgccaccaaggtcgagatcatcgagatcgatctcgccgaggaagacgctggctcctcgtcccacggctccccctcctcgtccccatcggtcgaggcggtcgggatccggcgcctggaggaggccatccacggcgtcatggtgcgccgcgccgcgcccgactggctccccttcgtgccgggagggtccttctgggtgcccccactgcgccgccagcacggggtcgccgagctcgtgggccggatcgcggctgccgggggcaccgaagggggcgccggggccgttggtggcgcggtcgaagtcttggagctcgacgcgcccatgacggaggagcaggcgttttgtttctccaccacgcgcggctggccctcggcctctttcttcgtcgaagggaaatctacacatttgaggaaatcgaggaaaggtgcaactcaaactgatgatgaagaaagctgattcgtttgtgctatgttgcaaggggctcctacaagaaaacacagtgcagacttggatgactgccaagattaatgtagatatggatgcaaggagcctattgctggtaaaccatggcacctgctacggttgatgctgcctcatccgtcttggaagataaatctgtaaattcggtctgaatctcaggtggttgttgtatcaagtcctggcacaaagccttcggttgtaataagcattgcatggagctgtgtgctgaatgtgtgctacggtacattcaaagctgggctcagcatcaatccagaagctgtactctaaacaaagattctggatggcttcctgtgccaactaggaacaatgtaaaatttatgcaagcatctctgcccactcctgatccatgtaaaactaagctaaaagcttaaattgttgtcatatcgacagttttaggagt

SEQ ID NO: 17281 - DNA, 1921 bp, Zea mays
  Clone ID: LIB3069-003-F9_FLI
ccgactccgagtcgtccgtcgcctgcccgctgcccgttccgggcgcctccgccccgtttcgtcgaccacctctccggcgccgccgtcctgagccgtcgcacgcgccaccggggcgcctccggcgcgcgctccctacgccggctccgccccgccgccatgggctccagagtccttcacttagacgttcctgcagattctgaggcctatcttatgagaaatgtaccagggagtgtaagtagccctcgcacgaatggtgaaaagggtctctttcgaaatcagaatgcggggttcactgcacttgcaagtcctgtgaggagagaaatcggaaacagatcgtcgacaaggtccttctgtgttgaagacaatgacttggaagatggtaagacctcaaaagaaagggagggttctgcacagtcactcaggctcccaaagattcagaatcaggctctcttatctggtctggcttactgcatatcatcatgcagcatgatcttagtcaacaaatttgttctatctagctatggtttcagtgctccagtatttttgatgctttaccagaacattgtatcagtgaccatagtttctacactatccctgtccggtgctgttccaactgaaccattgacatggaatttaatcaaagtttggttgcctgtgaatatcatctttgttggaatgctgatcacaagcatgtttagtttgaagtacattaatgttgccatgctgactatattgaagaatgtcgccaatgtcctgactgcttctggggaaacttattttttcaagaagcagcatggtactcaagtttgggttgctcttatgttgatgataatctctgcagttgcgggaggaataacggatctgtcattccatgctgttggatatatctggcagaccttaaactgtgttctgacggcggcatattcgcttacattgcgacatgtaatggacagtgctaagcaagtcaccaagtctgggaatttgaatgagctttcgatggtgttgctgaataatgttctttcactgccattgggaattatcctcgtgcttggtttgaatgaagtggagtaccttttgcagacgtaggctattgattcaatcttcactatttctatataccataaacctaatagactacacgcaaactgctgagatatccatttatgcatcaataatcatttttcaatgacttgtcaagtagttaggcttcttctgaatatttacacgttgaatcctccattttatggttatgtatttgtgactgaatctgcagatcactcttaaggatgcccgagttttggctggtcatcactgccagtggagttttggggcttggaatcagctttacatcgatgtggtttctccatcagacgagtgcaacaacatatagccttgtgggctccttgaacaagatccctctttccattgctgggatcgtcctcttcaacgttcgtacaagcgtgcagaactctttgagcattctgtttggtctattagcaggagtattcttcgccagggccaaattgcgagataactcaccgacctagtgatcaccgtgcaggcattatagtttgtagatcatcaatcagctcagaaacactctctggaaattacctctgcgggaaatttgtgcagatgcaatggttgtttcccacctgactatgcagagagacaacatatgcacccggattgggctgggactctccagttctcctcttccccacaagctgacttgacccacagtggttagtcttctggtggtatacgtcttcgttcttgctgtaaaatagtacccaaaaagaaaattgatggacgcaactgattctcaggcagtttgtgatggaaaggcgggttgattgtagtagtttgtaaagacacggttgctggatggaaggggatgtaatggtaataggttccgtgc

SEQ ID NO: 17282 - DNA, 715 bp, Zea mays
  Clone ID: LIB3069-003-G1_FLI
gcgcagcagccaaaacctacctagccgccgccgcaggcggccccccatcgccgccaagatgcagatctttgtgaagactctgacggggaagaccatcactttggaggtggagtcctccgacaccattgacaatgtgaaggccaagatccaggacaaggagggcatccccccggaccagcagcggctcatcttcgccggcaagcagctcgaggacggtcgcaccctcgccgactacaacattcagaaggagtccaccctccacctggtgctccgcctccgcggtggcgccaagaagcgtaagaagaagacgtacaccaagcccaagaagatcaagcacaagcacaagaaggtgaagctctccgtgctgcagttctataaggtggacgacgccactggcaaggtgacccgcctccgcaaggagtgccccaacacagagtgcggcgcgggcgtcttcatggccaaccacttcgaccgccactactgcggcaagtgcggcctcacctatgtctacaaccagaaggcgtaattgcttgccccgatttgctttatccgccaacctatcaagcattcagatgttggttactcaaattgtatctcatttagatctgtctgaggttgaaacttaaatggagcagtagtatctatcatattggtacccctgttactgagtataattttgttttcatatctatccttacagacgattgcacttttt

SEQ ID NO: 17283 - DNA, 909 bp, Zea mays
  Clone ID: LIB3069-003-G12_FLI
ggttctcctgtcgctcttcgtgcgggcgtgcggcacaccaccagaagagcggccgagcggcgcagagaagagagaaccagccgagcggagcggctgcgcttccggagggaggaaggaggatggagaaggctctcaccaagctcggcagcttcacaatctcccgcaaggccaagcaggagctctccgccatcggtgacgacatctcccgtttttcgagcacggtggaggagaaggcaaaatgggtgttcgagaaactcaaagggcacaagaagtcgctccctgatctactgcgcgagcacaacctccctccaggtctcttccctcgtaacatcatctgctacgagtacgacgaatcgacctcgaagctggtggtgcacctgtccaagccctgcgaggtgagcttcaaggattcctccaccgtaaggtatgctcctcgtgtcaaggcgactctgtcccgaggcaagctttccggggttgaaggcatgaagaccaaggtggtggtatgggtgaaggtggccagcgtgagcatcgagagctacaagtctgacaagatatgcttcatcgccggtgtgaagaagctgagaccgaaggatgcttatgaggtccctcgtgaagccatctctgtcgaggagttctgagctcaactcaactccattggtttgcctacgtagtatcattcattcgtagcatttttcgggtcccatgtgatcggcgattgatgtgctgtgatttggtagctttgtactgatattggaagcatgtggatctgttctgcctggcagaagataacccgtgcatgttatctgacgtgacgagtccttcacatgtgtcctggtcctggttctgcattggctgctcctagagttcacgtgttcctgttttattttatatatatggtattgcactgcc

SEQ ID NO: 17284 - DNA, 628 bp, Zea mays
  Clone ID: LIB3069-003-G4_FLI
cattctcgaattacgattcccaatccagcaaaccctaccagccttttgcaaactcagagagggacccgatggcacccaaggcggagaagaagccggcggcgaagaagcccgcagaggaggagcccgcggccccggcggagaaggcccccgctgggaagaagccgaaggcggagaagcggctcccggcgggaaaatccgccggcaaggaaggcggtgttgacaagaaggggcggaagaaggccaagaagagcgtggagacgtacaagatctacatcttcaaggtgctgaagcaggtgcacccggacatcggcatctcctccaaggccatgtccatcatgaactccttcatcaacgacatcttcgagaagctcgccggcgaggcggccaagctcgcccgctacaacaagaagcccaccatcacctcccgggagatccagacctccgtccgcctcgttctacccggcgagctcgccaagcacgccgtctcggagggcaccaaggccgtcaccaagttcacctcgtcctaagctcctttcgagtaggtccttaagcgccgtggcgccttttgactgtatggaatgtttgtcatctgaaagttgatctgagcagtgcaatatataattctggc

SEQ ID NO: 17285 - DNA, 2357 bp, Zea mays
  Clone ID: LIB3069-003-G9_FLI
gggagatagcgccgtacccagtggtcagccgccagtgtttcgcactttgctattcagcttcgttcttcaccggttcaccctagccgccaccccaacccccagcgacagggaccttcgccgccaggccgcccccaatccctagcgactgcgagcaccgtcgccaggcgccgtgcagcgagcgtcgccgcctggcgaagtcgcgcgactcgtgccctgcagcgagcgccgctgtcccgcacccaccgtcgaacggctgccgatgcccaacgccctgcagcgagttgcgccgtcgtccgcttcctctcgctggtaacttcgtgtttcgatttggacagattgctcgtgacttcgtgttgcgccgccgaccgagcctccttcccctaagtccctaaccgcctaccctagtccaccacctgccgcagctctcgcctccgtcaagatccgaacccctcgcacgcggcacgaccaaatcctagacacctgatcccaatgcgcagggccctcggcagagagacgttactgcgccggcaccgtggatcggcactgctgtgggtagctgtaacggcactggtcacaggcaccatctgcctctggtcgtccttctccgttggcctcctcagcacctacagggtccaggatgttgttgcaaatgagttgtggagaaccgtagattcaaatggttggagagcatcttctgcaccacacatctgttggcctcccccaccagctgaatctgagagcaatgggtacttgcgtgtctggtgcaacggcggcttgacccaacaacgcagtgcaatatgtaatgctgttgtcgtagcacgaatcatgaatgctacactagtgctgccagagttagacacaaattcattttggcacgatgagagtggttttgtagatatatatgatgttccccacttcatcaacacattgaaatatgatgttcgaattgtcatgagcattccaaaaatcactgcacaaggaaagaccaagaagctcaaagcatataagattttacctcctagagatgcacccgttacttggtacagaacaactgctttggagagactaaggaagtatggtgcaatatatttaactccattttcacaccgtttggcagaaaaaattgatgatccagagttccagagattgagatgcagggtgaattatcacgcactacgatttaagccaagtatcatgaaaacaagtagtgatatagcgaataagctccattcagaaggccatttcatgtcaattcatcttcggtttgagctggatatgcttgcatatgctgggtgcttcgacatattcacacctgaagaacaggaaatcctgttgaggcatcggaacaaatattttccatttctgttgaggtattggggcaaatattttccaggaaacacacctgactacagggaaagaaggctcattggaaagtgccctttaactccagaagaggtaggtcttattctacgtgctacgggatttgataactcaacatggatttaccttgctcctggcaagctctttggtgggaaacgcttcatgaagccattcaaggctatgtttccacgtcttaaaaaccatagtatgatcagaagtggaaagctggaagaaaatatccgagggctagcagggtcagcagttgattacatggtctgtctcctgtcggacatttttatatatgatggtccgagcaacttcgcagacaatctcatgggtcatcgtctatactatggtttccgaaccacaatcacaccaaacaagaaggcccttgctcggatattcatggacagggaggaagggcacacatctgcatttgaggagagggtcaggcaggtcatgctcacccattttggcgccccccacaagcgcatccatccagagtctttctacacaaacccatggccagagtgcttctgccagacgaaagctaggaatcatgctgaccggtgcccacacaacagtgtaaatgatgtccttgaaagttggttccataataaagatgtagaagtggaagctactaatcaaactgactccaccagctaaaccgagagttggctggtggaactgagttatcaaaggtttattgattgagaacagattgtttgtcacagacctgcgaatgacatcattggaggaaggattgatggctccagatctctgtaggcgattatgttcgactcaagatttagttgttgagattcttagtctgggagggtcagaaccagattttggataggtttacattgtcatgtagagttctgtggaagaaaaatcatacgaacgtcatgaactatgtggctactacaattggagatctttaccccatatgctatagctgagtgtttggtggcttc

SEQ ID NO: 17286 - DNA, 657 bp, Zea mays
  Clone ID: LIB3069-003-H10_FLI
cctaccggctggtgctgcaccaggtggtccggtggctggagcgcaacgtggaccccgtcaagtcgcgggtgttcttcgtcaccgcttcgccgacgcacacggacggcagggcgtggggcgacgacgacgcggagggcagcggcaactgctacaaccagacgtcgccgatcagcgccgcctcgtcctaccgtggcggcacgagccaggagatgctgcgcgcgacggaggaggtgctggccacgtcgcgggtgcccgtcgggctggtcaacatcacgcggctgtccgagtaccgccgggacgcgcacacgcagacctacaagaagcagtgggtggagccgacggccgagcagcgcgccgaccccaggagctacgccgactgcacgcactggtgcctccccggcgtgccggacacgtggaacgagctgctctactggaagctcttcttccccagcaacgatcaggtcctctgatggtgcattggtgcctgcatacatacgcctggaaaccaactgctaggggctagcccaaagaaaatgtgtctagatgaacaaagccatggggttcaaatgttttgttttgatttcggatatggacgctgtcgatgctcttgttctctgtggaattcttcttaccaactgtgcctcccatatatacatc

SEQ ID NO: 17287 - DNA, 889 bp, Zea mays
  Clone ID: LIB3069-003-H4_FLI
gagaggagagggagggttcctcaaagagaacctgaacccaaacccaagcagagaacactagcgttccctcaccagggcgggcgtccatcccagtagccatggcgatggcgtacaagatggcgacggaggggatgaacgtgaaggaggagtgccagcgctggttcatggagatgaagtggaagaaggtgcaccgcttcgtggtgtacaagatcgacgagcggtcgcgcgccgtgctggtggacaaggtgggcggccccggggaagggtacaacgagctcgtggccgcgctgcccggcgacgactgccgctacgccgtcttcgacttcgacttcgtcactgttgacaactgccagaagagcaagatcttcttcatcgcctggtcaccggcggcgtcgaggatcagggccaagatcctgtacgcgacatcgaagcaaggcctgcggcggctgctggacggggtccactacgaggtgcaggccaccgacccctccgagatgggcttcgacgtcatcagaggccgcgcgcaatgaggcccccgctgcgctctgctcctatttacgtacttacctgtgcgtgggcgtgttctcctactactcactgctcagtagtcagtagtcatctgcgttcgtgtgtgtgtgtgtgtgatcggccggatgctaattggcgttggtgtgctcccgtagcgatcgatgctgccaatctgacgaggcttcgcgtgtgtttgctttgctattttcggttctcgggagagatggtgcaggcgtggtgtgttgatgttgatgggtggagtagaagctcaggggagtggcagcggactaatgaaacgtccacctctgcgacgtagaattccactgaaaaaaaaatgctccagtgtaccataagctgcttc

SEQ ID NO: 17288 - DNA, 1128 bp, Zea mays
  Clone ID: LIB3069-003-H8_FLI
caaaatcactttgcgtgcagcatcgattgggtcggaaatcgagggtttggtaagcgagatcgccgccggtgacagctgacagggacgagatggacgccggcggaggcggcgtcttggtcgccgttctctgcatgctgctggtcttcgccatcttccccctcctcctctggcgccgccgctccgatgccgccaccgccgataaccaccgcgtcccgccccagcccctccaggaggatcaggtgctgcacggtcgcgcggcggcgcgacggatgcgtcggaggcctggggctgccggagcaggctcctctactgcgtcaactagccgcaatgctgtagaggacgacgcggagagtgacgatgaggaggtccccgaaggtcgcaacgtccccagatcctccaaaaaggagaagaaaaggcaagagcgagagatgcagcgtcaggccgaagaacctgcacgggattcatggaggagtaaacaagaccgatacgatgaaatgaggaggaagaaggatgaggagcgtgaggcacaagagaggcaattggaagaagaagctagggcgcggaaagcaaaggaggaggctgctgctgctttagagtttgagaaatggaaaggggccttctctgttgatgctgaaggtacaacagagagtgagacacaagacgatggtcagggtttgctccacaactttgtggaatacatcaagaagcagaagtgtgttcccctagaggacctagctgcagagttcaggatgcgaacccaggactgtatcaatcggattgttactctggaaagcatggataggttatctggtgtgatggatgaccgtgggaagttcatctacatctccactgaagagatgaaggcagttgcagagtacatcaggaagcaagggagagtgagcatatcacatctggccaacaactcaaaccagttcatcgatttggagccgaaggcccagtacgaggtggagagcctgcaggatgacagtgcagaagcaggcacagaagcatgagaattccttgtgacctggcaccatgtcatgtttccgcgctcaatgatgttttgtagtgtgacttaacatggtttgagttgggcactggccgtataatatatgcagtagtcggtat

SEQ ID NO: 17289 - DNA, 1037 bp, Zea mays
  Clone ID: LIB3069-004-A5_FLI
gcgcctgccgcggcgtcgggcgcggggcgccggccgtatacatacccggcccgtttcaccatctctctagtctctccctggccccaaggcatcgcccgaccgccgtctcgtcccctcctccgacctctcgacccatccccaccctacacccactctgcccctggctgcgcgcgttccagttggtgtgcgtgcgtgcgtgtccatggggaacacgccgtcgtgcataccgcttgcgcccgcggggggcggcgcctcggcggcggcgaccagcgcagccaccgaggtgatccacgcggacggcaccgtcacccggctggcgcgcccggtgcgcgcgtcggagctcatgctccaccacccgggccggttcgtctgcgactccagccgcctcgcggtcggctgccgcgtccccggcgtggccgccgccgagctcctccgcccgcgccacgcctacttcctcctgcccatggacatgctctactccgtgctcaccgacgacgagatggccgcgctctccgagtcccacgccgcctcctcctcctcctcctcctcctggaagaggatcaccacgtccacccgccaaggccgccggagcgcgaccgggggccggggccggggccacgcgaaggacgaggcctgcagcagcgatggcgccagggtgtacccgatgctcgggctgctcgagaccgccggtctgcagggcgcggatagtactaagaaacatgaagtacgcgcaggccccgcaggcaagtcgagcggcggcgggttgaggcgccaccggtcgtactcgtggcaaccggtgctggacaccatcgaggaggttccgttccgtgacgcggcggacggccggttcaccagcggggcgccgcaagagtgagcagctttggttttctctggtgctaggcgagcggcagctagcttgagctggctaccgactacccagtgtacactagctagcactagtataaataagctcaaaacctgcggcacgttcaacttttcactggcggtttccgttatcaaacgtcagtgaaagaaac

SEQ ID NO: 17290 - DNA, 541 bp, Zea mays
  Clone ID: LIB3069-004-B4_FLI
gtttgggaaaagcattgaagccgaggaggcgtacaagaacggttgtcagtaccttcttggtcagtttgggcctccgtttgctacgctaaggcttgatttctctcccgtcaagttgactgtgccttcaccgtctcttgcttcaaagcctccactccgagatattaggaagaaccttgaggatatgatttcagcccgtcgttcggctctggcaacctcatcagatgggcagctgaatcctgttccagataagcttctgggggagatgcagggccttttggcaaacgttgacaggatgcttactaggccgcctgagaatgctccttagctctgccaatctgaaggattatggctgtaacctattggtagttagacaactttggtggttctgttagttgtagcttttgcatctaactttatgatgaactacatcgtttacccagttcagcagctgcgatttggaattcctgtgaatggtaggggcttattgtgtcactgcttcgtgtactatatatgccaataaggtcgcagcttcttttagtgc

SEQ ID NO: 17291 - DNA, 713 bp, Zea mays
  Clone ID: LIB3069-004-B7_FLI
cacccttctctcagtctcagcgccgtctttcttcgttacctgcccccgctccccgaaggctcgaaccctttacagccggcgaagaagatgcacctgtggccatcgctccggatccgcgactcgttcaagcacggctacctccagaagctggagctcaacctcggcaacatgaagcgcgcgcagcggcagcgccagggccggcagggagagagccaggaggaccaggacggccagcccggcggcaacgggaaggcgccgctgctcgaggaccgctcgccatcggggtccgtgcttgccggcgcgctcgagctcgcctgggacgccgtcttgctcctcacctgctgctgctgttgcttctgctgcggagcttgtagcgacgaagaggatcacccaactgcccgctaagaagcaacttcaggtgcctgataattcatcagatcacgaaaaccagataatttgtgggcataatgaattggagtcaaatagttcaaatagttttgatcagctttgtacatatggttttctattcatccttatgccgcccatagatgtcattgataaacgggaaaaaggatccttaatttttttgttggaaacccgttgtgtaggtattttgggcgtgtaatcaggtcgtatctgtatttaggataatctgtggggttgctgtttctcaccgacacaaaggcgtttagtccaggtgatgcttgcagcgc

SEQ ID NO: 17292 - DNA, 1030 bp, Zea mays
  Clone ID: LIB3069-004-B9_FLI
attttttctgttaagatgagtcatttgtatgcactgtggcatatattctaaaattcttgtttcttaataaattgcagccctttgttgtgttcttggccagcttagttgatttgtagttaagcttcttcacccttagttgtgtttatgctctgcttagttgatccattactgcaggtcttggctgaacttccagctccagttctaaatggtacaatgcttacagtcgaagatttgcatcaggaactaaaatgcagtatcaacatcaaacacagggatgagttcgatgaagaaaaggagcctgacagaatggttcttgttgggtggtctggcccagttgataagcaaaccactaataatggtgagactaaatcagttccatcttcatccaatacagaagatgtggatggtactgccgaggacatatcagcaacttctggaatgaagcgtaagctgaacgaaatattagagacaaaggagaactttgatgctctcgaaaatctttcgggtgttgattccagcagcgctcaagttgttgaagatgacaatgacgatgaccttgttatgtttgatgaggacccaaggcaaagtaagaagaagagattgcagtagcatcctgctgcggcgataacagctcttgactcccggcatcgtggctaacacattgttcgatcgtaacatctttgataacttatttatgcggttatgtaccaggttgatgttgaaacattagtaacaatgcccagggcaccttttggcctcagatagtcagataccctgtagggttgtaatttgtaggatttaggaacaagagcaactaatgctcagctgacagcctgctgcgagatagaatttgtatctcaagagccaaggtactgttttggttatgtttttgttcagttgaggggtgaccgggtgaaccaagctctgtcttgttagctgccattcacagggtctggaaatatgtactcatcctgtattcttgctaaggttatggatcagatggtgtatatatccgtgcaaaatactaatt

SEQ ID NO: 17293 - DNA, 484 bp, Zea mays
  Clone ID: LIB3069-004-C10_FLI
ctctaggaggcattacttccagaacacacagggtcttatctttgttgtggatagcaatgaccgtgaccgtgttgttgaagccagagatgagctgcacaggatgctgaacgaggatgagctacgtgatgctgtgctgcttgttttcgccaacaagcaagatcttcctaatgccatgaatgctgctgagatcactgacaagtttggattacactccctgcggcagcgacactggtacatccagagcacttgtgccacaactggcgagggtctgtacgagggcctggactggctgtccagcaacattgcgagcaaggcttgaatatcaaatgcgaactgactaggagctccggatgtatcatggaaacttaggacagaatcgcctctacaacctgttaggtgtcttctaccggcacaatatattttttgtttggaatatgtaatgatgttacggttcaacgtttattctaccttactatactgttgg

SEQ ID NO: 17294 - DNA, 798 bp, Zea mays
  Clone ID: LIB3069-004-C11_FLI
agcgcggccaccgccaggcgcaagcgcaagcgccccgacgccgacaacaccggcgacgccaccgccgccgccgccgccgccccggccgccgtcgacgaggcctccgacgccgaggtcgaggagttctacgccatcctgcggcgcatccgcgacgcctcccgccggctgtgcggcgccggcgcccggcccgccccgcgggcgccggcgtggcggcccagcttctcctgggaggacttcgcgaccccggcccctggcgcgccggcgcctgagaccccgacgcccggcgccgcgcaggagccggcgcagccgcggcccgacgagcctgtagccgtcgtccgcgctaccgccccgtcgccgcgtgccgggctggacctgaacgcggagccggagccggaggcgccggccacccctcgctcggcgcgcgtccaggcgtagcgtagcgcgcggcgcatcgtcgcctgcctcctgcaccgcgccaagttgggcccgcgcgtcagctcggctgctgggaggtggccggcccggtgatccggtgatgtcatgtcagccgaaagccgacggtggtcgccatcgtccgcgggcggcacagcacacacagtgcgtaccttcccctcggtgaattactgatacgaatccccatcatgtaatcgtatttttttagtggctctctttggtgcgctgctccgtgtggacaggtgagactggttcgttgctttggttgcaggaaaataccttttaatcggagcagttgatgtaccgtccgaaaaaatgacgtgtttaactattcgttgcgttttt

SEQ ID NO: 17295 - DNA, 761 bp, Zea mays
  Clone ID: LIB3069-004-D10_FLI
gtgagcctcccggtggagcgtgggtggtgctgggtgccggggatgagctgcaacgggtgccgcgtgcttcgcaaggggtgcagcgacgcgtgcgtgctgcggccgtgcctgcagtggatcgacggcgccgaggcgcagggccacgccaccgtcttcgtcgccaagttcttcggccgcgccggcctcatgtccttcctcaccgccgtccccgagccgcagcgcccagcggtgttccagtcgttgatgtacgaggcggccgggcggacgatcaaccctgtgagcggcgccgtggggctgctcggcgcgggcagctggcagctgtgccaggcggcggtggagacggtgcttcggggcggcgccatcggcccgctgcccgagttcgacgggggccgcgacaacacgtttgctctggcggcgacggcgaggcgggccgtggggtgctcgacgtcctcctcccgtcccgccggagccgtcgtgcgacctcgggctgtggctcagccccgggtcgtgcccggcgccgggcgagcggcggcggcggcggcccggcacgccgtccatgacctccgaggagtccgtgacgacgacgagcggcggcggcggcggtggagggagggagcccgagctgctgaacctttttgtctgagactttagctacaccgacggcctggctaaaaggccagcggccgatcatgtttcatgtggcgcccctcggcgcgcggtgtgctgtatgcttgatctgatcccggcgaaaacgtctgtct

SEQ ID NO: 17296 - DNA, 1866 bp, Zea mays
  Clone ID: LIB3069-004-D11_FLI
cgaaggaatgcttgctgtacttgagccattgcatgcaatgcttgagaggggggatgagacaattaaagaaaatgccttcattcaggcttatgggcatgaattactggaagctcatgaatgctgtttgaaatatcgggctacaggagaggatgctgagctaactaaggcctgggatttgtattaccatgttttcagaagaatcgacaaacagcttccaagtcttacgaccctcgatctgcactctgtttcgcctgagctactcaaatgtcgaaagttggaacttgctgtgccaggaacttatgctgcagattcaccacttgtgacgattgagtattttgttccccaattgattgttataacgtccaaacaaagaccaagaaagctgacaattcatggaagtgatggcaatgattatgcattcttgcttaaaggccacgaagatttgcggcaagatgaacgagtaatgcagctttttggtttggtgaatactctcctagagaactcaagggaaacatcagagaaggatttatcaatccaaagatatgctgttatacctttgtcacctaacagtggtttaattggatgggttccaaactgtgacacacttcatgctctgatccgtgaatacagagatgccaggaagattttcttgaatcaggagcacagacttatgttggcttttgcacccgattatgatcacttacccctcattgcaaaggtggaagtgtttcagcatgctttgcaaaatactgagggaaatgaccttgcgaaggttctgtggctgaagagtcgaacttcggaagtatggcttgagcgccgcacaaactacgctagaagcctggctgttatgagcatggttgggtatttgcttggtttaggagatcggcatccaagcaaccttatgttagatcgctatagtggaaaaatattacacatcgacttcggagattgctttgaggcttcaatgaatcgagaaaagttccctgaaaaagtaccattccgtttgactcgaatgcttgtgaaagctatggaagttagcggtattgagggtacattccgaacaacttgtgaaaatgtgatgcaagtccttcgcacaaacagagacagcgttatggccatgatggaggcatttgtacatgacccgttaatcaattggcgtctgttcaatttcaatgaggttcctcaagtgtcgaactatggtaatgttcatgctcacacggttgtcagtagtgaagaagcagtggctaaccgagagctcatgcaacctcagcgaggagcacgtgagagggaacttctacaggctgtcaatcaactcggtgatgccaatgaggttttgaatgagcgtgctgtagctgtgatggcacggatgagtgacaaactaacagggcgtgacttctcttctgggtcagctttggctggagcaggtagctctatccaacatggcagtgagcatttggcttcaggagatgcccgggatgcccaacctggtctctcagtgaaggttcaggttcagaagctcatactccaagcgacttcacacgaaaatttgtgccaaaactatgtcgggtggtgtccgttctggtgagctctcttggaaacagtagcagtttataacatgtaaatattgtgaataccgtgtgcatagaagtttcgtggtgacagtttgtatgtgcagctttgtaattagcagaacttcaagatgccttggaccatccttttgtcagtttcttagaccgagtttagcagttcacccttatggccattcaaaacactgtttttttactgtagattgtattgtttgtagattgtactgttcgcagggtggattttgaatatgagtatgagaatgtgtaagctgttgaagat

SEQ ID NO: 17297 - DNA, 757 bp, Zea mays
  Clone ID: LIB3069-004-D7_FLI
gcatgcggcacttgcaggccaccgtcgagcacctggccggggtggccgccacgcccccgccggcgtccgcggggggcggcgtgcacacggacacgttcctcatcctggccgccgtgctctgcttcttgctctgcgtcgtcgggctggccttcgtcgcgcggtgctcgcgcctgtgcaacccctcgtcctactccgtggacgcgcgggggcccgtcgacgacgacgacgacgaggcggcaatgccggcgccgcgcaagggggtcgacagggccgcgctggagaagctgccgaccgtgccgttcgcgttcgaggacgaggacgcccaggacggggagcggccggagtgcgccatctgcctcgccgagttcgcgcccggggacgaggtccgcgtgctcccgccctgcgcacacgccttccacgcggcctgcgtcgacacctggctcctctgcacgtccacgtgcccctcctgccgcaccgccctcgtgctggcgcaggcgcaggcgccgccggcgtccgcggaccccctgatgcagtgctgcgcctgcgcgtcggcgcaggcctcggcggggccggcagagtgccccgtactccccctccccctcgccgtcgtcgtcgtcgagcgcggaccttgccggacgtcagtaccgtaggctggcgatgcccggcggcgagcgtccaattgacgccgacaccttgtacatactcgccagattactagtgaagttgtgtacagtgcgcgatggtgcattgattagac

SEQ ID NO: 17298 - DNA, 2012 bp, Zea mays
  Clone ID: LIB3069-004-E8_FLI
gcatcaggaaatcaacgactgagtctccacgactgtcggtcacttcggatggcggcaccaccggaggggaatgtccgcttaggcgaggggtgggacgaggacgacgtgctggagccgcagccgctggaggtcatagcgccggatgtcaagtccaagaagcgcaatccggcgcccggagttcgggttgttggtcgccggatctacgatccagagaatggcaagacctgccaccaatgccgccagaagacaacagacttcgcagcggcgtgcaagcaagtcaagaagaagggtccgtgcccagtcaagtattgcctcaagtgcctccttaacaggtatggcgagagtgccgaggaggcggccggcaaggaggactggatctgtcctaagtgcaggggcatctgcaactgcagcttctgtagaaagaagaaaggcgagatgccaactgggataatggcccacatcgccaaggcttccgggtgcacctctgtccatgatctccttaaaaaggggtcagatgtggtttctgctgcacaggcgattctcaaggtgaatggtagtgacaagggcacaaagagatcccgagggacagatgctgctgctgaggtggcgactgaaaaggatgtaaatataggcattgatatcaatacagttatagcagatgaaggagatgaaaatataggtgttgatctcaattcacttccttctgttgataccaagaaaaggcagaagcggcagaagctcaagcacaggacaaagaaggatcctgctgatgcaacgtcacatggagtcaatactgaaccattgcagatggatgggaaccttgattttctcaatagtaaaactgtgcgacccaggggtaccccagtcactaaaattgcaggcgcagagcttgatgacgaggatactggggctgcaattcagtttatagaattctgccgtgcatttacagagatttttcaaataaagaaagggcaaccagaaaaaattcttcaagatttagttggaggccgtgaacttcggtttgtatcctcagttgttgctgggtttcatataaatttgttatctgtcattcaagaaggaaaggggaagaagcctctggcttacacaagagacggagatgcatgggtaattgatattggcaaatatataagtgaatcagcttctatatcaaaagggtttcctctcaaccatatcaatcaggggatatcaggatataaaaacttgagcccttcttgtaagctgcgtgttctgaattttctttgtgatgagaccctctctactgacaagctgaggaactggattgacatgcaaaatgacatagctgctgaaccagtgaatgctgctagagaaaaggcgcgtgctgcaaaagaaatggtaaaggagctaaaggaaaggctaaaggacaacatgaacaaaataattgtttcaccaaatgaagcagcagcctctaacagtgaagcaaataagtatattatttcccaaataaaggaggcacaggaagtcaagcgtgcagccataaatgacatggcaactatggagaagcaaggaggtttttggaccaagcctctgatggtagagaaaggggcagcatattggaagttagatggttactgtgataactcagcaatattgcttcaagagtatggtggcgatgaattaatggcaaataaagacaagtggtttatgtttactgaagacgaggagaaaataattgaaaaacatttagccactaggtaatgagtttgtcttgccacgtttggatgtgtttctacctttccaatgatggtgaacttctcttttgttgcttgtatatcatgaaatttatctgttggaaaccctatctgtattttcttctgttgttgatcctccaactattgctatcaaaaaccattttatgtagtagcatcctaacaaatgtggcatacaattcattccagtatacctgaactattgtgatcaatgaactccaacatgtaacgaatgattagagttgacaatcagtccttctacgg

SEQ ID NO: 17299 - DNA, 1133 bp, Zea mays
  Clone ID: LIB3069-004-F1_FLI
caactgtgtggctaggaaaatggaatctgctggtattgacgccgctttgatgggtaaaccaaatcgtgagcctcgtgttgttgtacaaactgttagtgaagttgatatcttggacgatgggtatcgttggcgcaaatatgggcagaaagtagtgaaaggaaatcccaacccacggagttactacaagtgcacaaatacaggatgcccggtcaggaagcatgttgagagagcatcacatgacccgaagtcggtgatcacaacatatgaaggaaaacataaccatgaagtccctgtttccaggaatgcaagccatgagatgtccacagctcccatgaagcctgctgtgcatcctattaacagcaacatgccaggccttggtggcatgatgagagcatgtgatgccagggccttcaccaatcaatattctcaggcagctgaaagtgacaccatcagtcttgaccttggtgtaggcatcagccctacccacagcgatgcaacaaaccaaatgcagccttcagttccagaatctatgcagtatcaaatgcaacacatggctcctgtatatggtagcatgggacttccaggaatgcctgtgacagcagtacctggaaatgcagctagcagcatatacggttctagagaagaaaacggaaatgaagggtttactttcaaagccgcaccattggaccgatcaactaacttatgttacagtagtgctggtaacttagtgatgggtccatgagtgtctctgctgatggtaatacctccatggagcacatattaccgtaatcatgaagattgcttcagaaggtgctctactgtgtatcgtcatccacacataattgaatcggaggtggtcaaggtatacctgggagctgcagcgttgacacatgagccttttgctgtttggaattttggatgtacttgctgtatgtgacgctgcagctcaacattcgttgtacagcaaaccagttatgattaattagattctgataatttggttatgtaaacttctttctgtactggaatatgggatagaaccaaagatccgtctggtggcaaagctttgttatgccctgcatatgaacggtgccagtttgatatccatatgaaatgaaatatatcatttcacc

SEQ ID NO: 17300 - DNA, 1444 bp, Zea mays
  Clone ID: LIB3069-004-F5_FLI
ccaccgcgggatcctcctcgacaccgcacggaactactaccccgtccgtgacatcctccgcaccatccgcgccatggcctccaacaagctcaatgtattccactggcacatcaccgactcccagtccttccccatcgtcctcccctcggtccccaatctcgccaacttcggctcctactcccccgtcatgcgctacaccgaccaggacgtccgccgcatcgtccgatacgccggggcctttggcatccgcgtcatccctgaaatcgacatgcccgggcacacggggtcgtgggcgggcgcgtacccggagatcgtgacgtgcgcgaacaagttctgggcgccgacggcgaagccggcgctggcagcggagccctgcacggggcagctgaacccgctgaaccccaagacgtaccgcgtggcggaggacgtgctgcgcgacctggcggccttgttcccggacccgtacctccacgcgggcgccgacgaggtgaacacggcgtgctgggaggacgaccccgtggtgcggggcttcctggcggacggcggctcccacgaccgcctgctggagctgttcgtgaacgcgacgcggccgttcctagtccacgagctgaaccgcacgtcggtgtactgggaggacgtcctcctggggcccaaggtgtcggtcgggcagacggtgctgccccacgacaccaccgtgctgcagacgtggaacaacggcgccgagaacaccaagcgcatcgtggcggccgggtaccgcgccatcgtgtcctccgcgtcctactactacctggactgcgggcacggcggctgggtgggcaacgacagccggtacgacgtgcaggagaaggagcacgatggcatgccgctgttcaacgaccccggcggcacgggcgggtcgtggtgcgcgcccttcaagacgtggcagcgcatctacgactacgacatcttgcacgggctgacggaggacgaggcgaggcgggtgctgggcggcgaggtggcgctgtggtcggagcagtcggacgccgcggtgctggacggcaggctctggcccagggcctccgccgccgcggagacgctctggtccgggaacaaggggtccaacggcaggaagcggtacgccaacgcgacggtccggctgaacgagtggaggtaccgcatggtggcccgcggcatccgtgccgaaccgatccagccgctgtggtgcccgatgcacccgcgtatgtgcaacctctcgcagtagcagcctgaagcgcgacgcctttcgactttcttttagagatagctttgctgcttcctgcaagctgccatggacagaaactggatatgcagggagtcatacagggaggcggaactttgcaagaacagtcggtatcgatcttcggatcaaggtccggatgaatcaagagaccagaataaaaccaaggcatcgccaatgtaccatgac

SEQ ID NO: 17301 - DNA, 1615 bp, Zea mays
  Clone ID: LIB3069-004-F8_FLI
gtaactggccaatggttttatagaccagaagaggctgacaaaaaggagggtggattctgggtagcacgagatacacgagagctattttacagttttcatactgatgatgtgcctgcagaatcagttatgcacaaatgtgtggtccatttcattcctcagcaaaaacagattcccagtcgaaagcagcatccgggatttattgtccagaaggtctatgatgcagttgagaagaaactgtggaacctaacagacaaggactatgaggataacaagcagcaagagattgatcttctggttaagaaaacaatagaccgtattgggcagcttcctgatctcgaacctgaagagacacctcttgagaacaattatttgtcaaataaacgaggcctgcgtaagaaacctgttaaccctatagatgtaacaagagaacctccagttggcaaatccgagcagtttgcaaaagcagagacacctggaagtgataagatacggaattatgatacccttgttaagtataaagtacttactggacattctcatcgtgataggtggctcgataaattgatagaaagtattccgcttgcatcaaaggagaatgctggaacatctgctgatgctaattctacagccaaaagttcaatcagtggttcacctgcaaaggatgttggttctgctgaaaatgaaaaatcatatggacttgatgttgttgttgagataatgactgcattagaaagatctgcatatgaagctcttggaacagattttgggaaatataaccagaaactgcgacaactacagttcaacatcaagaatatctctaaacttcgcaggaggctgatggacaaggagcttgatcctccagttcttttaaccatgtcccccgatgaattaaaggctggcttgacttcagcagagaaaacatctgaaccagaagaatcaaggaaattgcagatgactgatacaagatgtcaaagatgcagcgaaaagaaagttggcatatctgatattatccatgcaggtcatggagaccgctatcagttggaatgcacttcctgtggctacacatggttttcgtccagagatgccatcacaacacttacagaggatgccccaagcactgctgggaatgtgggcactgcccccttggcaacagcaaagttcgaggtcgttgagaagaagctcacgagcccacgggaccaatccggcaagcctgcttctgatgctctgcagaagagcactgcagcttacatgccaactatggagaggcagaagtcgtttgctaagaccaagctgttggatgaaccctcccccgcaccaaaacaggggtagagccgtattcatgctgcagattggtctttgcaggatttcgagatacatacttgtacataggggtgatccacccccgcaccaaaacaggggatgaaccctcccctgcaccaaaacaggggcccttttcttgacatgctaccacctcgtactggttgtcttcgtttcggtagtttgttttgcagtcatgcatagccagttacctctcgttttattatttgcttgtttgttgtagcactcatcagttgacatgaggacgtaggtttgtggcgtttaccagattgatttt

SEQ ID NO: 17302 - DNA, 1134 bp, Zea mays
  Clone ID: LIB3069-004-G6_FLI
ccccttgcaagtatagtctcggcggctctagaagacgatgggcaaggacgacgtgatcgagagcggcgctggcggcggcgagttcgctgccaaggactacacggaccctcccccggcgccgctgatcgacgcggctgagctggggtcctggtcgctgtaccgcgccgtgatcgccgagttcatcgccacgctgctgttcctgtacatcacggtggccaccgtgatcgggtacaagcaccagacggacgcgtcggcgtcgggtgccgacgcggcgtgcggcggcgtgggggtgctgggcatcgcctgggccttcggcggcatgatcttcgtcctcgtctactgcaccgccggcatctcggggggccacatcaaccccgccgtcaccttcggcctcttcctggcgcgcaaggtctccctggtgcgcgcgctgctctacatcgtggcgcagtgcctcggcgccatctgcggcgtcggcctcgtcaaggcgttccagagcgcctacttcgacaggtacggcggcggcgccaactcgctcgcctccggctactcccgcggcaccggcctcggcgccgagatcatcggcaccttcgtgctcgtctacaccgtcttctccgccaccgaccccaagcgcaacgcccgcgactcccacgtcccggttctggctcccctccccatcggcttcgccgtgttcatggtgcacctggccaccatccccgtcaccggcaccggcatcaacccggccaggagcctgggcgccgccgtcatctacaacaaggacaagccctgggacgaccactggatcttctgggtgggccctctcgtgggcgctgccatcgcggccttctaccaccagtacatcctccgggctggcgccatcaaggccctcggctccttcaggagcaacgcgtgatgagcggggcttggctgtggagcaatggcgggcgacctacgggcgggggaagtcgtgagcgaggagaatgacatcatcgatcgacttgggtgccggtggttggttcgggtcgccttttttgtttcagcagctgctgcgttgcgcgcgtgcgtgagatttggtttggtttcgttcccctgcaatgtaatcatgtcgtgactctcaagggattattccgctctgct

SEQ ID NO: 17303 - DNA, 874 bp, Zea mays
  Clone ID: LIB3069-004-H6_FLI
ctccgcacgcgcctcaacccttcctctcgggcggcggcgccggcaaggcggcagccaaccggagcgggagctgcgatgaagaagatcttcggcgccaagaaggacaaggggccgcccccctccatccaggacgccaccgagcgaataaacaagcggggtgagacggtggacgagaagatcaagaagctggacgaggagctagccaggtacaaggagcagatccgcaagacccgccccggcccgtcccaggaagccatcaaggcacgcgccatccgactcctcaagcacaagcgcatgtacgaggagcaacgcaacatgttgtacaaccaaacctacaatctcgaccaagttggctttgctgccgatggcctcaaggatgctcagcagactatgaatgcaatgaaggcagcaaacaaggagctcaagggaatgatgaaaactgtcaaaattgatgaaattgataatatgcaagatgaaatgacagatctgatggacgtgagcaatgagatacaagaaactcttggtagaagctacaacatccctgatgacgttgacgaggaagaactgatgggcgagctagatgctttggagtctgatatggaatttgactcagctgcagtcccctcatatcttcaaccagattctgactttgatgctgacctcaacttacctgctgcaccaagtcgccctgcaatggtcccagcaggcgggctgcaggaggatgagctaggattgccagcggtgcctcgggcatcacttcgcagttagaaataatcttgtgtttcgattttaagttggtgtgaaaactctgtagtttgtgtctgagtctgaacaatctaatgcttttcgtcatggtaatgcttcagtttattgc

SEQ ID NO: 17304 - DNA, 1688 bp, Zea mays
  Clone ID: LIB3069-005-C12_FLI
cctcttgcctcttgcgccttgctagcttgcttgcctccctgctccctcctcctccctcttcctcgtcgcttctctgattcttcctggcctttgccggagcaaggctaggcgcgaggagagggtgctgtgctcagccagaggtcatcggcgctacgcgagcgcactgcctgttgtgctgcactgccggagtatcaggggaaaacgctgaaatcatggaaatcaccttattgcatgatgaatctgatgcaggaagcaccagtttgctaccgccattgttgtcatatggtccaagatcaatggttccaatacaagtaccatcgtcatcagaccttgagagtatcctgtcaccagatccagtctgcagtgatcttcagttgaaagagataaactacaatgctgcagcaatggatgaaagcactgagctccttcacttgattcttggtggcaatgatgaaggatacaataccacaactgaattacaagtttgggatgttctggacttctatgtctcagaaaacttctcggctctccaatttgatagtttgatgggttttacaaatgaagttagtacttcctacaatgattgtatgaatttagttgacatggtagagtggcccgtggctcgtctgtctctagatgatacaccaaaactcagtaacagtgatgatgcggttctggcagacaatgtcacaacggaccctgatgaaacatccttataccttcgtacaaaaccaacagattcagaaactgaaagtagctctgacgcaggagatgttgaaactgaatatctagatcaaaagctactttctagatgtctgcctgatttaatggatgttgactcgcccaaccacttactgaaaacaccagtgagaacaaaacatgtgactcttgtgcttgatttggacgagactcttgtacattcaacattggatcagtgcgacagtgctgattttaccctagaagttttcttcaatatgaaaaatcacacagtgtatgtgaagaaaaggccttacctgaaagtgtttcttgagaaggttgctcagatgtttgagcttgtcattttcacagctagtcagagaatctatgctgagcaacttatagataaacttgatcctgatggaaaatatatctcacggcgtatttatcgtgaatcttgtatattctctgacggttgctatacaaaggatctgacaatcttggggatcgacttggcgaaagttgcaatagttgacaatactccacaggttttccagttgcaagtggataacggcataccaattaagagctggtttgatgaccccgcagaccaggaattaatcgagttactcccgttcctggagagcctcgtggactcagatgacgtgaggccaataatttcgaaggccttccatgacaaacctgagtagaaatagtcctggagagctggagaggttcactggaattaatccagtgaacctctcgctgaagttagcttcgctccacacggtgcaggccattcttgggaagttaggtataggatcaagattcaccatttatgttatgttagctgttacaaatagcaagcataaactgcggtcgtcgatgaaaatggcttgtgtgtgtatgtcccttcggtgttccgtgtcacagatcattgtacagagacgaacaatagtgctgaataaagtgatctgagtgcaattttgctc

SEQ ID NO: 17305 - DNA, 1309 bp, Zea mays
  Clone ID: LIB3069-005-C2_FLI
actgcctcagacatgcttaaagcctaccaccttttccttgcagcaagcccatttaagagactttcacattttctttccaatcaaacaatcttgagtttgactaaaaatgcatcaaaggtgcatatcattgacttcggcatttattttggattccaatggccatgcctaatcaggcgtctttccaagagggaaggtggtccacctgttctgcgcatcactggaatcgacgtacctcagccaggtttccgccctaccgagagaattgaagagactggacaaaggcttgcagagtatgctgagaagttcaaggtgccttttgagtatcagggaatagcgtcaaagtgggaaagcatccgagttgaggatctcaaagttggcaaggacgaagttgtgattgttaattgcctatacagattcagaaacctgattgatgaaacagttgctgtagacagtcctaggaatagagtgctcaacaccataaggcaagtaaacccagcgattttcatccatggaattgtgaatgggtcatacagcgttcccttcttcatcactcgtttccgtgaggcgctgttccatttctctgcattgtttgacatgctagagacaactgtcccacgggatgatgcacagcgcgctctcatagagagggaaatgtttggccgagaggcactcaatgttattgcatgtgagggctcagacagagttgagagacccgagacatataaacagtggcaggtgaggaacctcagggctggatttgtccagtctccgctaaaccaagaaattgttatgaaagccatggacaaagtaaaagacatttatcacaaggacttcgtcatagatgaagacaacggatggctcctacaaggctggaagggaaggatactctatgcaatttctacatggaagcctaagaataactaggttattggtctcacgcgtaatctctcctattccatcgatggtggcagctaattaatcagtcctgctatcttataacatttgggccttgacctgtgaacctgtctgatcaaggcaatggcttgaagacggaccatgatcaacatggaggtttgctagatttacatctgtccagccagtactctgataaactggaaaggagcagctgtagacgtctctaacttggtgttggtaccatcacctttatttaattcgtagttttcttctttccatttacttgtatgaccggcctggcgtcctattaccaacaaccagatcaccgcttctagttcaaaatggctaggcaaactacctactatcttgagcttaatatttttgacttgtatcc

SEQ ID NO: 17306 - DNA, 627 bp, Zea mays
  Clone ID: LIB3069-005-F10_FLI
ccgcgctcctgatccttatctctgcgcgcgctgcatcggcgcccgccgggaggcggatcccgcccgcctcgtccatgttgtgggtccgcaatatccgccgcttcgtcgacacgggcgccggcctcggatccgaggccatcatggaactggagactaaaaggatattgcttgagattttcaaggagcggcagcggaagagtgccgaggctggttccatcccaagtttttacaagaaacctgaagaaggatccattagctctagagttcaaaggttggccaagtacaggtttctaaagaaacaatcagagcttctgctgaatgctgatgatcttgatgccatgtgggtttgtctcagagaaaattgtgttattgatgatgctactggtgctgaaaagatgaattatgaagatttctgccatatcgccacagtctgcactgagtagattggtcagaaatgcaaacgatttttcagcccttcaaacttcatgaagtctgcacggagcacttgcacagattgtttggctaattacaagattatctcagtgttttggtttgaatttagagtatacttatgtatgaaatattgattggtactcatttatattatattaattatattattattac

SEQ ID NO: 17307 - DNA, 1399 bp, Zea mays
  Clone ID: LIB3069-005-H11_FLI
gcaattgcttcagagagctaccgccaccagctattgagctactgcctctgaccaagtcccaagctgcgctgcgcctgctatgtcgtcgtcctcgcccgtatcggcggtctcatcagccactgcgccgcacgtcgtggacgactgcctcggcatcgtgcagcttcttagcgatggcaccgtgacgcgctccgcggactactccgacatccctctcctgggcgaggtgccgtccaacctgcccgtccagtggaaggacgtcgtctacgaccccgcgcacgcgctccgcctccgcatgtacaggcccaccgacaccgacggcggcaggacgaccaacaacaagctgccggtgctagtctacttccacggcggcggcttctgcatctgcagcttcgagatgccccacttccactccggcgggctccgcctcgccgccgagctcccggcgctcgtgctctacgccgactaccgcctggggcccgagcaccgcctccccgcggcgcaccgcgacgccgaggccgtcctgtcctggctccgcgcccaggccgaggccgacccgtggcttgtcgagtcggctgacatgggcagggtgttcgtctgcggcgactcggccggcggcaacatcgcgcaccacatcgccgtccagtacggcacgggccacctcgccctcggccccgtcgtccggcttgccggctacatcatgctgtggccctacttcgccgccgaggagaggacggcgtccgagacggccggtcttgacgtcgaccaccagttcgttagcacggcgctgttggatcagatgtggcgcctggcgctgccggtcggcgcgaccagggaccacccagcagcgaacccgttcggaccggacagcgtcccgctggaggacgtcgccttccagccgctgctcgtcgtggacccagaccaggacgtgctgcacgaccgcacacaggactatgccgctaggttgacggccatggggaaactggtcgagctcgtcgtgttcagaggccagggccacgggttcttcgtcttcgacccgtgtggtgaagcttccgaccagctgatccacgtcattcggcgcttcgtactgttgcataagcatccatgtaatcttgttgatcttagtactaccatgtagttgcattagtgagtcatgtactcatgtgttcgtcagtcggacaagtttgtttcgtagaatcgcggacgagctggagagtgcacagcccgtgcagtgaccgcgtctagggatgtgtttccgccacggtgtgcatgtcatgcacgtcgcacgttcgtccttagaagtcggatcgtgcagctgtattccctggcggggaaacgtggaactaccccagtgtatttggttcacgaaatgcatgtgtgagaggtgcgcgagacgcatctg

SEQ ID NO: 17308 - DNA, 1324 bp, Zea mays
  Clone ID: LIB3069-005-H6_FLI
aagctttcatcatttgtgatttatcatttatgcaacttatgcattgtgtttgattgttgatcatggcaccttttcactgtgtatttacatcaatggttgttccttttcaagtctagcagctgtgctcacgcaacttcgtattatttgttcataataggttgagggaagttgaagcaaaagtctaacaaaaaatgttttacgggggatatgcttaccatggcaactcgtttgagcaaacataccgttgttatccagcatcgttttttgataagccacacctggaaggcggcgataaagtaataatgccaccttctgcccttgatcgtcttgcttccttgcacatcgagtaccctatgctatttgagctgcacaatgatgcaacccagcggatttcacactgtggtgttttggagtttgttgcagaagaaggcatgatcatcatgccctattggatgatgcaaaacatgctgcttcaagagggtgacactgtccatgtcaaaaatgcgactcttcccaagggcacatatgtgaaattgcaacctcacacaactgattttctggatatttcaaacccgaaagccatcttggaaaaaactttaagaaatttttcctgcttaaccacgggagacagcatcatggtagcctacaacaacaaacaatattatattgatattgttgaaacaaagcctgcttcagcagttagcattattgagacagactgtgaagtggactttgcacctcctcttgattataaagaacctgagaaaccacgacaaccaacagttcttgcaagcaagacacctgctgaagatggcaacactgcagcggaggatgaaccaaaattcaaaccatttactggttttggaaagcggttggatggaaaagcctcaaaactgcaagcatcagaggttccttccactgcactttctgcaccttcagattcaaacaaaagagcaaatcagcaaatctcagcaccggcagcttcaggagctagcagttacagtcgacagaaaactggaaaacttgtttttggttcaagcgcaagcaataataaggaaccacaaaaggctcctgctaaagaggaacaacccgcaaagaaggacgacgagctgaggttccaagcgttcagcgggaagagctactcattgaaacgttagctgcttcagttaaccttcaaattcgccgctactctttcgtttcgtgcatggtgggtgttctggcacctggtcaccaccatgtagatatgaattgaagtatgtatatgcttatcttgatggaaacatgacagtctgtttatttaagcccaaaagtttaaaacagcgct

SEQ ID NO: 17309 - DNA, 1241 bp, Zea mays
  Clone ID: LIB3069-006-A11_FLI
atcccgtccgccgccccccaccaaccacgaaccacgcaagcgaacccggccggcgcggggcagcggcgatggcggagatcccggtgatcgacctgcgcctcgccggctcgtcgcccgacgagtcggcgcggctgcgcgacgcgtgcgagcgcctgggctgctttcgggtgaccggccacggcgcgcccgcggggctcctggccgacatgaaggccgccgtgcgcgcgctcttcgacctccccgacgacgccaagcgccgcaacgccgacgtcatccccggcagcggctacgtcgcgccctgccccgccaacccgctctacgaggccttcgggctcctcgacgccgccgcgcccgccgacgtcgacgccttctgcgcgcgcctcgacgcgccgcccaaagtcagggagaccgtcaagacctacgcggagaagatgcacgacgtgatcgtcggcgtcgccggcgagctggccaccagcctggggctgggcctggaggagcactcgttccaggactggccgtgccagttccgcatcaacaggtacaactacacgcaggagacggtgggctcctccggcgtgcagacccacacggactcgggcttcctcaccgtgctccaggaggacgagtgcgtcggcggcctcgaggtgctggaccccgccgccggtgagttcgtgcccgtggaccccgtcgccggctccttcctcgtcaacatcggcgacgtcggcacggtataccactcgccacacgacacgacacgcctcgctccctagcctagctttttttctgacgacgccgagcgtctcgtttcgtttcccaggcgtggagcaacgggaggctccacaacgtgaagcaccgggtgcggtgcgtcgcgcccgtgccgcgcatctccatcgccatgttcctgctggcgcccaaggacgaccgcgtgagcgccccggaggcgttggtcgacgcgggccacccgcgtcggtacaagccgttcaactacgacgactaccggaggctccggctgtccaccggcgagcgcgcaggcgaggcgctcgcgcggatggcggcgtgatgtcgtcacgcacgtgcaagccgttaattataggctcgcgcatgcatacgcctacacgagaggttgtctcgttaagccgttctattaaaatgtgtgggggagaaagatgactaccgtggtgccatgtggattgctatcgggtctgatcaataaaatcttgcaacacttgcacgtgcgattc

SEQ ID NO: 17310 - DNA, 1881 bp, Zea mays
  Clone ID: LIB3069-006-A4_FLI
tgcagaaacttggattgcaaccaacaagttatacatatgacggttttattaaaaccgtgatagctgggaaaggaattgcatatgccagcatagtgattaacgccatggagagaaggggcattgaaccttacagtgatacacttgctgctctctcagagggtcatagcaatagtttacagttggatttggctgaggagtttttggaaagaatttcagagataaaaccaaagcatataggttcctttaatgctttgctttctggatgtgcgattatgaatgaaccagaaagagctgtccgcatactagctaaaatgaaacatgtgaacatgaagccaactctcaggacatatgaacttttgttttctctgtttggaaatgtaaatgttccttatgaacaaggagatgtgctctctcatgtcgatgtttccaaaaggataagtatcattgagatggacatgtttaacaatggaatccaacacagctttgtgtccatgaagaacttgatacgagcttttggagctgaggggatgatagaggaaatgctgaggtacctgaatatagcagaaaatactctgtggaacataaatccttatcagaagagttatctctacagcactgcgttgcatgctctggttgatgtgaaggaaactcacagagcagtaaagatgttcaaaatcatgagatcatgcagtcttccaactaatatttcaatttataataccatgatagagtgctgcaaatggctgccatgcttcaaatcagctagtgctttgctgtctttgatgcttcgagatggtttcaatcctacggttgtgacttttacatcactcctgaaggttgtattagaaaatgataattttgaaggggctctggatctgcttgatatatgcaagattgaaggacttcagcctggcatacagactttcaacacagtactcttacgtgcatatgctagaggtcaaattcatgtccttgaatatattttggagtgtatacatcgatcaaaaatccaacctgatccatcaacactttggtacacgttttgtgcctacgaggagcatgaactgtacaatactgcaattgagtcactgctagtcctcagcatgagaatgatatctgaggatgccggcattcctagtgagaaaagaattgtttttgaagatctaatcctcagtgaagaacctgatgctgaattcaggatcataagggcattccaagcaggcgaagaattccttgcgacagctttactgaacctaagatggtgtgccacaatgggtgccaccgtatcttggtcaccggaggaaagtctttgggcaatgaggctggcagcctcgtatgatgctaacaagagaccacatataaacccctcggatgttcccaaatctaggggaaggaatccacttaaccgcccatattgggaggctaacaggtgattggttgattggttggctacgctccggcccgcggcgttccgttgatcacgcttggcacgtgtttggatggctgcagagcatctctatcgcctgctcccacgcatgcagcgttgttttttttcttcactgggtagcctgcatgcgcggaaacgcaactccccttgtttccagcggcccaggctggcacgatgctggtgcgagatgcccccacaaccaatcatgcgttaactgaggcagacctggagtctagcgtttcacagaatgaaggcaaatctctctgttgagtatgatgacaatgtcgtgttctgttttgctggaagccagtcgatgttttgtttacctaactaacatgattgcagtacgatcgggtggcctccctacctgtcgtgaagcttgttccgcatgattgctccaaattggcctcgtaccgttttcaggcttctaggcc

SEQ ID NO: 17311 - DNA, 972 bp, Zea mays
  Clone ID: LIB3069-006-A7_FLI
gaaaagttactacggtgcactgttgtgttgctcttggagtgcggatggcaaatatttgttatcaggtggtgaagatgatcttgtgcaagtatggagcatggatgatagaaagatagttgcatggggtgaagggcataattcatgggttagtgcagtttcttttgatccgtattggtccccaccaaattctgatgaaacggaagaaaatgtcatgtatcgctttgggtcaattggacaggatacccaactgcttctctgggatctggcattggaagagattgctgtccctctacgccatccgtctggtggctcaccgacattcagtagtggaagcccatctgcacagtgggataatgcgtgccctccagccggtgttctacagccttctccacggatgcgagatgtgccaaagctctcacctctcgttgcacaccgggtacatgtagatcccctatccggcctggaattcactagtgaatcaatcctcactatatgccgcgaggggctgataaaaatttgggcccgacccatccatagcgaaagcaaccagcagccggattcttctgaacaggttgtaggcaatgccactgctaaggataagatgttaacatcgtcaaataaagcaggtgcttccagccccagcttcaagcaaccaccacctgttcttttcacataattgaagaggctttgctagcatttttgttatgcttgcttggccatggctattcatctatctttagtcactaacatgaggttaaatggagcggaataacttggggaggctggcacggaaggcttgaagaggctttgctagcatttttgctagacattttcttttcctgcttcatcggcgacgtcttagttacagaagtgtcattgttgccatcgatgttggcaaaagaaaataacggaacttgctcctgtacatatacagacattgctgtaagatgaaatattacaagcttactggtt

SEQ ID NO: 17312 - DNA, 508 bp, Zea mays
  Clone ID: LIB3069-006-B12_FLI
accaatttgatgaggcactcctttgttctcatgaaggtgcttcaggttgccacttacatactgtggaagaatgtaccccagggagctgcgactacttgctacgtaggactgagccctcaactcaagggagtgacaggaaagtactttgctgactgcaacgtggagaagacgagcaaactggcgaggagcgaggagttggcgaagcagctctgggacttcagcgaggagctgatcaagtctgcgaagtgagagccgaaagagctggatcagagaaaatgttgtggtcctgcttggcatctagtggtacaagtgatgactgattagtatatagcacggaggaggaacctgggcgatggctggacctcatggtgttcaggaataaaatctgcttgctttcgtacattaattagtccggtgtggcaaacatcaatttgtagtgctgtcaatatctgttcaatatacgtgcagcttagttctgacttgaaaaatgcagagtcgtgtttgcctg

SEQ ID NO: 17313 - DNA, 342 bp, Zea mays
  Clone ID: LIB3069-006-B3_FLI
aacaccttcttttcttttcttttgttttttttttttttttttcttcttcttcttctggtgtttcaggtttagtaatctgctagtgagatggaagaactgaggtcagatcagacgtggtggtgactagccatgaaagtgaactttactgttaccgtactgtgcgatcaactggtgggggtaattagctagctagctagctgctggggttatggttaatgcatgaactgctattagttaccaggtgtaagtgtaactctcgagtcctgctcttgttactgtttgtgtactgactgtgtcactccactactatgtaagaatcagagcagtaagtttactagtgtc

SEQ ID NO: 17314 - DNA, 995 bp, Zea mays
  Clone ID: LIB3069-006-C7_FLI
ccagccgccaccaggtgcagagtctttcgtcatctcttctccggcgaagaacccccagtcgcccaccagatcacttgttaaactttgttgaggggtgatggcggtttctttcgcaaacctcaacaccgaggcagggcttaaaaagcttgatgagtaccttctcactcgcagctacatcactggctaccaagcttccaaggatgacttggctgtctacacttcgttttcgtctgctccctcgtccaagtatatcaacgtagcaaggtggtttaatcacattgatgcgctcgtgaggctgagcggaattactgcagagggccaaggtgtgaaggttgaatcctcagcagttccttcagccccaactccagatgttgctgaagcacaggccccagctgctgaggaggaggacgatgatgatgttgacctttttggtgaggagaccgaagatgagaagaaggctgctgaagagcgtgctgcagctgccaaggcttctggcaagaagaaagaatctgggaagtcatcagttttacttgatgtgaagccatgggacgatgagactgacatggccaagcttgaggaagctgttaggagtgtccagatggaagggctgctctggggcgcatccaagcttgtcccagtcggatatggtatcaagaagctgcaaatcatgatgaccatagtcgacgatcttgtctctgtcgacactctcattgaggactatctgtgcgctgagccagttaacgagtacgtccagagctgcgacatcgttgccttcaacaagatctaggcgtgactttcgatcagtccttcccctggggtgctggcgatggtggtggctgggcaatgcaccagcctaatttttccatagctatatgtctgctttgtgtggccagtgatattgccgtgagtatttttggatcctattcgagtcgaatgtaccagtaccagagttaatttgctttaattcgaaacaccgttccggttggaattctgtt

SEQ ID NO: 17315 - DNA, 478 bp, Zea mays
  Clone ID: LIB3069-006-D5_FLI
gtcgacacgtacggcaccggcgcgatccccgacaaggagatcctcaagattgtcaaggagaacttcgatttcaggcctggcatgatcatcatcaaccttgacctcaagaaaggcggcaacgggcgctacctcaagacggcggcctacggccactttggaagggacgaccctgacttcacctgggaggtggtgaagccactcaagtcggagaaaccttctgcctaaggcggccttttttttcagtaagaagcttttggtggtctgctgtgcttaatcatgcttttatatggcttctacatgttgtggttctttcttgatctgcaccgcgcttatcgtttgtgttgtactgccctaataagtggtgcttatgaggactgtttctggttttgctgcttatgttgtaatgctttgaaacaatgaaagaagctacaggccacagctattttgagaagtaatggaacctcgtgccgttttgatt

SEQ ID NO: 17316 - DNA, 1070 bp, Zea mays
  Clone ID: LIB3069-006-E1_FLI
aaaaccctcgccctcccaaaaactactcacgtctcgccgccccgccgtatcaccctttctcggcggccggcctcttctcttcacggactcgcaggtcatcgagatgtcgtcggcggaggcgaaggccgcggcgaaggcggtcccggagtctgtgctgcgcaagcgcaagcgggaggagcagtgggcagcggacaagaaggagaaggccctcgcagacaggaaggaggcgcttgacagccgcaagatcatatttgctcgcgccaagcagtacgcccaggagtacgacgcccaggagaaggagcttgtgcagctcaagcgtgaggctcggttgaagggtgggttctatgtgagcccagaggccaagcttctgtttgtggtccgcatccgtggtatcaatgccatgcaccccaagacccgcaagatcttgcagctcctgcgtttgaggcagatcttcaatggtgtctttctcaaggttaacaaggcaactattaacatgctacggagggtggagccatatgttgcgtatggatacccgaacctgaagagtgttagggaattgatctacaaaagaggttatgggaagctgaacaagcagaggattccgcttagcaacaacaatgtcatcgaggagggccttgggaagcataatatcatctgcatcgaggaccttgttcacgagatcatgacggttggcccacacttcaaagaggccaacaacttcctctggccattcaagctgaaagcgccccttggtggcctcaagaagaagaggaaccactatgtggagggtggcgacgctggcaaccgtgagaactacatcaacgagctcatcaagaggatgaactaggctctcttgtatcctgtgagaatgcattcgatgtcggcatggatatgcaattttgttccatggctgtcatacgtcacgacttcaactaggaaatgggtcctgtttatgtttgcagttgcctctgtaggttttaatacatcaagacataaaccaacacgtgccccaagtgtcactcgctagggctaccaagattgttgcaaaaaagatagcactttttcccgtc

SEQ ID NO: 17317 - DNA, 1309 bp, Zea mays
  Clone ID: LIB3069-006-F3_FLI
gtttggtaagttactctttatataggcctaccactattttcgtcctgcagatgttatcaaagtcaggcttcaaatgcagcttgctgggcaaagaggaaacttagttggaatggtacttaaagtcacagcacctacaggtttcatatttcacacttcttctgatgttaaattcatttcctagttatatgtgtattgtgaaatatgttagggaacaatatttacacaaatggttgaaagggaagggactcggtcactctacctgggacttgcaccagcgttggcgagagctgttgtctatggtggccttcggtttggactgtatgagccctgcaagcatgtctgcagttatgcatttggttcaacaaactttgcttttaaatttgcatctggagtcattgctgggggccttgcaactgctttaacaaatcccatggaagttttgaaggtgaggctgcagatgagtaaaagcagtaccagtacaataagagagatgagaaaagttatagcgcacgaagggtttaaagcactttggaaaggagtcggcccagcaatgacaagagcaggttgccttactgcatcacaaatggcgacttacgatgaggccaaacaggccttaatgaagtggacaccacttgaagaaggttttcagttacatctcatgtacagtgaattctctatttctctattatgatgtgtatcctttaatgagatgaatggatggctaatctttatctgcttggaagctcgagtttcatagctggaacagctggtactcttgtgacctcacctgtagacatgatcaaaacacggttaatgctgcaacaggagtccaaaggcgccagagtatacaggaacggattccattgtgcttcccaggttgtggtgacagagggtgtgaaatcactttataaaggtggatttgccacattcgcgagagtaggccctcagacaacgattacctttatcgtgtgcgagaaactgcgcgaacttgcaggaatgactgccatctagtgcgaccccaaattgcataatgtgtggggtccaacggttgaacagcatactctacccgagttttcacaccattctttattcaccattcatgatgagaagggagaagataagcacccactgggatgtctaaggattgggaagcccagagctccttcagatttatcatacctcatttgaaatttcgaaatagcgtgattgttgttatgtttgctctaagacttactcatcatatctccaatctcatcttgtatttcaaactacactctacaaacaatacagtctgtagtgtaaaaacatt

SEQ ID NO: 17318 - DNA, 951 bp, Zea mays
  Clone ID: LIB3069-006-F4_FLI
gtcaggtggttgagattcctagaggcagcaaggttaagtacgagttggacaaggcatctggtctgatcaaggtggaccgtgttctttattcctctgttgtttacccacataactatggcttcattccacgcacactctgtgaggataacgaccccctggatgtcctcatactgatgcaggaacaagttgtccctgggtgtttcctgcgagctcgtgctattgggctcatgcctatgatcgatcaggtctagtgtctccgtcacctgatcgcatagtgtttgctatgtttaccttaggccatatattttttccgtgtaattttgagaccacttgacatgttagttttgacttttgaccaagccaccataagacctttctatagaatataataatatagttcttgtaaactagttctgtcccaaggctgaattcttgcatcttatttaatcgttgttcaacatcactagggcgagaaagatgataagattatagcagtctgtgctgatgaccctgaattccgtcactacacggacatcacggacctcccaccgcatcgccttcaagagatccgccgcttttttgaagattataaaaagaacgaaaacaaggaggtcgcagtgaatgagttcctgccagcgaaagatgccatcaacgcaatcaagtactcgatggacctgtatggctcatacgtcatcgaaagcctgaggaagtgatctccagctgcttgattgtggttgtggatgctacaccattttctcaacagctcatccagagtaccgtagtacagacttaacacgaacgaactgtaatcgtgaccaagggatattattaccttctgttcatgttgaaacaatcagcagtgcctttctttccattatatgccataccgaatcaaggcaacttggccctgaaatctttgtggttcaagttaaaccagcactttgacagaac

SEQ ID NO: 17319 - DNA, 1413 bp, Zea mays
  Clone ID: LIB3069-006-G11_FLI
ctgctctccgacctcatcaacctcgacctctcgggccgcaccgggaagatcatcgccgagtacatctgggttggcggttccgggatggacgtcaggagcaaagccaggacgctgtccggacctgttgatgaccccagcaagcttccgaagtggaacttcgacggctccagcaccggccaagctccgggcgacgacagcgaagtcatcctttgccctcgggccatcttcagggacccgttcaggaaggggcagaacatactggtcatgtgcgactgctacgagccgaacggggagccgatcccgagcaacaagcggcacggggccgcgaagatctttagccaccctgacgtcaaggctgaggaaccatggttcgggattgagcaggagtacacccttctccagaaggacaccaagtggcctctcggttggccgctgggcggctaccctggccctcagggaccttactactgcgccgtcggagcggacaagtcctacgggcgggacatcgtggacgcgcactacaaggcctgcctctacgccggcatcgacatcagtggcatcaacggggaggtcatgccggggcagtgggagttccaggtcggccctgccgtcggcgtctcggccggcgaccagctctgggtggctcgctacattcttgagaggatcaccgagatcgccggcgtggttgtctccttcgaccccaagccaattccgggggactggaatggcgctggtgcacacaccaactacagcaccaagtcgatgaggagtgacggcgggtacgaggtgatcaagaaggcgatcggcaagctgggcctccggcaccgggagcacatcgccgcgtacggggacggcaacgagcgccgcctcaccggccgccacgagaccgccgacatcaacaccttcgtctggggcgtcgcgaaccgcggggcgtcggtgcgggtgggccgcgacaccgagaaggaaggcaaaggctacttcgaggaccggaggccggcgtccaacatggacccgtacgtggtgacctcgctgatcgcggagacaaccatgctgtgggagcccagccactccaacggcgacggcaagggcgccgcggctccttgatttgattctgcggagactgagctctgtgtgtgagccggcctgcgtagatggcaaatgggactgaccctgtcagaaacttgagatgaccataataatagctgcagtgtgctcgttctggggttggataagacccaagaactttttttagctttcttcgaacaagtaatcatggtgctgaaccaacacagatgtgctactaaacacatctaacgagtcaaacgccgaagcatatcccaacgcacaaccccggttaatcttgttacccatggattgaatgagattgaaaaaaattaaaaaagagtttgattt

SEQ ID NO: 17320 - DNA, 225 bp, Zea mays
  Clone ID: LIB3069-006-G2_FLI
accagacgccgtcagcgacgaccttggcgccgtcatggttgcggtgccacgagtagtaggcgtgcgtccggttcaccaacaggtactggatgcccaccgacgacgacacaaactgacgatcaccgccgcagagggaacaaattactgatagatcagcgtagcacgttcctgagctagccccgccccctttatgttctccaattcagtaatgcaatgcgtttttat

SEQ ID NO: 17321 - DNA, 876 bp, Zea mays
  Clone ID: LIB3069-006-G5_FLI
gcgctcgccaacgtgcagagtaaggaagcagctagctagcaggccgtccgtccactgaccggccggtcatggcgaggatccacctttacgtcgtcgccgcggcctgcgccgtcgccctcgcgctcgccgtcccggccctcgccggcgacccggacatgctccaggacgtctgcgtggctgactacgcttccccggtcaagctgaacgggttcccgtgcaaggcgaacatctcggcggacgacttcttcttcgacgggctgaggagcccgggcaacaccaacaacccggcgggctccgcggtgacggcggccaacgtggacaagttcccgggggtgaacacgctgggcgtctccatggcgcgcatcgactacgccccgggcggccagaacccgccgcacacgcacccgcgcgccaccgagatcatcttcgtcctcgagggcacgctcgaggtcggcttcctcaccaccgccaacaggctcctcagcaagaccgtcgccacgggggacgtcttcgtcttcccccgcggcctcgtccacttccagcagaacagggggcacggccccgccgccgtcgtcgccgccttcaacagccagctccagggcacgcaggccatcgccatgacgctcttcggggccacgccgcccgtgcccaccgacatcctcgccaaggcattccgggtcggcggcggggaggtcgagcacatcaaggcaaacttcgcgcccaagtagacgatgtatcgtgtcgcagcgtgcagttttcgattttgttgttcttcgttctgagacgacattgctgaccacgctagttcttgtcgttgctgctaatttgtgtggagccactgcttgtcctccaataaataacatgatcattttgctt

SEQ ID NO: 17322 - DNA, 559 bp, Zea mays
  Clone ID: LIB3069-006-G7_FLI
cgttaatccctctcctcccctctgctccccatcaactcttcacctcgcccaacgatccccaattcctccttcggatttcacattcaatgcaactcaagtggtaaagaaagcagacatagaggaatggggctcgtgtttaggaagctcttcagccggctcttcgtcgataaggatatgcagatccttatggtcggcatcgataccactggtaaaaccaccatcctctacaagctcaagcttggcgagatcgtcatggtcacctttagaggaacacattggacaaggttttggacactgttgcagaaggaggatacagatctcaagtaagatggggatgtcgtgtgcttgagacgacaaggatggagatcttttcaagtaatggctagtctttttatcatagattgagtgcttgaatttgtgaaacctttgtcgaacctgatattttcgttccaaagtggaaccaccatgtttgtgaatttgaatagccacatgtatcaaccgataccgaagctggaatattaatattattcccttttctaataaatatatgtttcttttc

SEQ ID NO: 17323 - DNA, 1897 bp, Zea mays
  Clone ID: LIB3069-008-A3_FLI
ggggttgatcttgcacatggtaatggacaaccaagagcaaatactgtcacagcccacaggggctctttcataactgagcatattctgcatcatggagtttcttcggatgctataggaaattcttccaggaatgcagagtgttttgttggtgcagcaggccaagacagtcatcatgcagcctttaagagaaagtatcttgatggatgtcatgcagagtcttctgctaacggaagctcacgcaatcgtcaccagaataatagtactctgctacctcctccgaccacctgtgaaagttttactatacccaccgcaacaaattttagtgttccgtaccatcctgtggagcagctaaaccagagtactaatattgctgcaagctctactttgtctgatcactattcttcatacagtgatccacgtggaaacgaattcgtgcgaaatacacggatgcgaataaaccctagtgattatgatcaatcgctgcccagtctattacctgaggggagtttcaggtgctcggcttaccaatctacacagcagcagtcatcatttattccagcgcaacctagacaagttagctcttcttctggttctcatagtcgatctcatgtgcctgctgttactcagttttcacaaaatcttcgccgtccatcaactgttagttttgggtcaagaattgggaattcttccacttctggttctacaataccaatacctgcttcacaagatcctggtacaagcttgttgggaagcgattatcctgagccacttttgttaggttctttgtttacagctgattcaacaaatttcttatctgcatctggaagcataagtaaccagcaaaattctggatccagctctagttccatgctcaggcctgctgttaatgttggaacacaagtccctgagttcaacgtatctcagccaagtacaactttaagaggttcatctgatgtgttcaggaggtccttaatttctgctggcatttctcattctagaagttcaagcatcccattgcagcaccgtggaaattcatccacatcacatgagattaggaatcatcagccaggatcaagctctcgtgcacatcagcagcaccccttaagacccggtcattcctctgtagacaggcagagctctggttacttggaccttcagtcttttatgcagaccatagcttcaagggaaggaggcagaccaatgtcagagatccgcaatgtcttcgatcagattcgtcaggggagaaatgcacgattggaggatttgcttctcattgaccggtcacttattatgagacgagctaatttgattgatagacatcgggatatgaggcttgatgtggataatatgtcctatgaggaattgctggcactaggtgaacgcattgggtacgtaaacacaggacttactgaagaaaagattttgagtaacttgaaacaatggaaatgtgtcttaaaatcattggatgatcctccaacaagtgttgaaccatgctgtatttgccaggaagactatgtggaaggcgaggacctgggcaggctggattgtggtcatgacttccacaccgcatgtatcaaacaatggctggttataaaaaacctgtgcccaatctgcaagaaaacagcactggacacctagaaacatggctgcctttttccttaggaaaaagccggtagcggcagggcaagtggttgccatctaaccacaccctcccatgactagcaaagtatgttacacctttcccatcatcaacatacatgtgggaatctatactataggtggtacatggcacttgcctgaagccaatggctgtagaccatggagttttatcctttgtttttttcaatcttagatttgggatttaaaatttattcaatgacatttgatttacttgggc

SEQ ID NO: 17324 - DNA, 2828 bp, Zea mays
  Clone ID: LIB3069-008-C10_FLI
agattctgaccacatttccaagagaactagaccggttggcatgtctgaggagatgaatcttccggtgaacatgctgcctgtgacttatccacagagccataattaccaacaagatgatttccacaaagctgttgcacggaccttgagccaaggatcagcacctatgagcatggatttccatccacttcaacaaactcttcttcttgttggtaccaatgttggcgacattggattgtgggatgttggtaccaaagagagactcgttgtaagaaacttcaaagtctgggaccttggtaaatgtacaatgaccctacaggcagcactggttaaggacccagctgtgtcagttaatcgcataatatggagtcctgatggaaccttgtttggtgttgcttattcaaggcatattgtacagatttattcctataacggtggcgatgatattagacaacacttggagattgatgcacatgttggtggtgtaaatgacatagcatttgctcatccaaataagcagctatgtataattacatgtggagatgataagacaattaaggtatgggaggccactagtggagctaagcaatttacctttgaaggacatgaagctcctgtttattctgtgtgtccacattacaaggaaaatattcagttcatcttctcaactgctttagatgggaagatcaaggcatggctatatgataatttgggatctagagttgactatgatgcaccaggtcattggtgcactacaatggcatatagtgcagatggttcaaggttattttcatgtgggactagcaaggatggtgaatcacatctagtagaatggaatgaaagtgaaggagcagtgaagagaacatatcagggattccgtaagcgatctatgggtgttgtgcaattcgataccacccggaacaggtttttggccgcgggggacgaattcatgattaagatatgggacatggacagcacgggtcttctgactaccattgatgctgatggtggcttaactgcaagtccacggatacgcttcaacaaggagggaactctattggctgtctccactgctgacaatggtatcaagatcttagcaaatgctgatggacttcggttgctgcgcacactggaaaatcgttcttttgatgcttctcgtaatgcatctgaggctgtaacaaagcctctaataaatcccttgactgctgcggcaaatgcagctgcagcaagcagttcaggagctggtgctccgtcagctataactgcaatgaatggtgatagcagaagtttggttgatgtaaaacctagaatagctgatgagtcacttgacaagtcaaaggtatggaagcttatggagataactgagtcaagtcagtgcagatcaatcaaactggcggataacatgagaacaagcaagatttcgagattgatttacacaaactctggtcttgctatcttggctttaacttcaagcgctgttcatctactctggaaatggccacgcagtgattggaattctggaaaggcaaccgcaagtgtatctcccactctatggcaaccaccaagtggcatcttgatgactaatgacacgactgacaataatcctgaagaagctgttcactgctttgctttgtcgaagaatgattcatatgtcatgtctgcttctggaggaaaaatctctctgttcaacatgatgactttcaagacaatgacaacgtttatgcctgcaccgccggcagcaacttttcttgcatttcatccccaagataacaacataattgcaattggaatggatgactcaaccatccaaatctataatgtccgaattgatgaggtcaaaagcaagctcagaggtcactctaagagaatcacaggtcttgccttttcaaatgtgctaaatgttttagtctcgtcaggagctgatgcccagttatgtgtttggaacacggatggatgggagaagcaaaagaacagatttttgcagataccatcaggtcgccaatccaatatcttggacactcgtgttcagttccaccaagatcaaatgcactttcttgttgtgcatgaaacccagattgccatctatgaaactacaaaactagaaccagtgaagcagtggcctgttcgagagaattcacctccaatcacacatgccacattctcgtgtgatagtcaactgatctatgcaagctttatggatgccactgttggcatatttaatgggtcgagtttgagacttcaatgtcggattcttccagcttcgtatcttcctccaaatatcagtccgagcgttcatcctgttgtggttgcggcacacccttcggaagcaagccagtttgctctagggctgactgatggtggtgtttttgtgttggaacctttggaatcggagagaaaatggggaaatcctccaccagtagagaatgggtctgctagcaacttgtccacaccgcctcctaatggagcttcaagttctgaccaaccagaaagatgattaagaagttggaactggtagatttttcgtggcacgagtctaaccaagaagacagggcttcaaagggtggtgcgactaaccttggcagataggttccaagggagccggacaatgcgctcaataaaaataagttcaacagaagtttgtccgttgcttgtataaatatttgtattgactatcgagtgaggagtcctagtatttcatttttgctttgtttgcggtgctgtgaaaaggatcagtagataagctgtagtacaacaactatcagactggctgtacttacctatatttatgactattagttaatgtatgttgtttcatttgcctttttggctcc

SEQ ID NO: 17325 - DNA, 1170 bp, Zea mays
  Clone ID: LIB3069-008-C6_FLI
tttaattccttgctttggttttggagacgcatctactcatgaccaagatgtatttgccttctatcctgatgaaagaccatgcaatggttttcaagaagctttagctcgatacagagagattgtacctcatcttcgcctttcgggtcctacgtcattcgccccaataattgacatggccacaaccattgtggagcaaagtggtggccaataccatgttttagtaattattgctgacgggcaggtcacaagaagtgtagatactgaatttggtcagttaagcacccaggagcaaatgacagttgatgctattgtacaagcaagccaattcccattgtctataattcttgttggagttggagatggtccatgggatatgatgaaggaatttgatgacaatataccagctaggtcttttgacaatttccagtttgtcaacttcactgcgatcatgtcaaaaaagataagtcaaagcaaaaaggagacagagttcgccctttcagcactaatggaaattccattgcaatacaaggcaacattagagcttggaattttaggacgtcgaattggagagtcacctgagcggattccacttcctcctccttttgcaagttatagcacagtttcaagagcagaaccatctcgggcaaatagttatcgaagtgtgccttcacatccaagggaggagccagctgtaaattcaactatcacagcatcagttacatccccatcagctgccgaaagtagagttttagaaccccagatgtgcccagtttgcctttccaaaccccgggacatggcatttggttgtggccaccagacatgttcagaatgtggaccgcaagtcacagattgccccatctgtcgaaggcccattgacacgagagtaaaattgtactaattatttttgggtggaactaggtttaactgaagcacatgccaggagtagaatccactaaaataaatctctatttgactgttaacgatgtagtgtgaattaatttaataaatcagacgtagagaaaaggaggatacttgttctttgcttgtatcctgttcctacattgtgcgttgatagatgtgaggctacttccattatctgatactggacaggcgccctacttcgctgcggcgattacatataatgttgaagtatggttatggtttgtctgt

SEQ ID NO: 17326 - DNA, 919 bp, Zea mays
  Clone ID: LIB3069-008-D4_FLI
gctgatcctctcccagatcaaccaccgcaacgtggtcaagctgcttggctgttgcctcgaggtcgaggtgcccatgctggtctacgagtacgtcccgaacggcagcctccacgcgtacatccacggcgatggcgacggcggcggcggcggtggcgaggccaagctgaatctgccacccggcgcgcgcctccgcatcgcggccgagtccgcggacgcgctcgcgtacatgcactcgtcggcgtcgccgccgatcctccaccgcgacgtcaagtccgcaaacatcctcctcgacggcgacctcgcggccaaggtgtccgacttcggcgcgtcgaggctggccccggcgggcgaggaggcggtggccacgctggtccagggcaccctcgggtacctggacccggagtacctgctgacgagccagctcaccagcaagagcgaccaggggcgggcctggctcaattcaatgcttcgcggtggtcgtgctggagctcctcacggggaggaaggcgttcgtcccggtggaggacgaggaagaggaagaggagggcggcctcgcgttctgcttcgtcacggcggcgcaggcgggacggcaccgggagatcatggaccagcgggtcatcgaggaggtcggagcggaggtgctggacgaggcctcggagctgctgatgcggtgcctcagcattatcggcgatgagaggccaaccatgaaggaagtcgccgacaaactccaaaagctcagacgccacgcttgcagcagcagcagattgtaatttaacttttgtatttaaatattccacatataacgacagctatgcaaccagattttactaggtgcaaactaggctgctagaccatatatataatcatagtttgtctatgattttcttaataaagctgcaccgaccgagagtttaaatat

SEQ ID NO: 17327 - DNA, 872 bp, Zea mays
  Clone ID: LIB3069-008-E5_FLI
cttgacagttctatctatccccaccacaaataagagaccacctctctgccttcttctcggaggtcggagaagagctctctgcttcattcggccggtccaactccaccgaccgatccaatccaacccactgaccatggggttcccgccggtgtgctgctgcgcccccatccccaagccggtcgtcgccttctgcaacctgctcggcgccatcaaggacgccgtcctgctgacgctcgccgccgtgggcttcccgcacgacgccgcgcgcggctcggcggacgcccaccagcccgaggaggtgaagacccggctccccgccgtggagtacgcccagctcctggccgagcagcagccgtcgcccgccacccacgcggcctgcatcgtttgcctggacacgctggaggcggcggacgaggtgcggcggctgggcaactgcgcgcacgccttccaccgggcctgcatcgaccgttggatcgacctaggccggacgacgtgcccgctgtgccgctccgacctcctgccaagcccccggggccgggccgggctgctcgggctgggccggctcgccagccgtctcacgcgcgttcgcgtttggtgaggaccgtctcggaggccacttttaccttttcggtggccaggccgcggtcgcagcccatcccggtggtgccggaacggcgcggacacgttagcgacggcgaccgggccgccggatggtcttaaatctgctctgccacttgccaaccgctaatcaaccagcgggcttaattagcagcggattggcttggtgtctgacagtcgatattatgacagctaaataagcagttaaatgtttctataggattgagtatacacggcagctaaatgtttcgtat

SEQ ID NO: 17328 - DNA, 592 bp, Zea mays
  Clone ID: LIB3069-008-F12_FLI
gtctcctgaaacattgcagcaattaatttcattccagcagtctttgatgtcacaacttggccaacaacaaactggacaggagcggacacaatcagcctctggtgcaggcaatgtgaacctcaacaccttgatgaacatgttcagtgggcttggtgctggtggtggcctaggtgttccaaatgctcctaatgtgccaccagaagaactgtatgcaacacaattagctcagctccaagaaatgggtttttttgacacacaggagaacatccgagccttggccgccactgctggaaatgttcatgctgcagtggagcgacttcttggaaacatgggccaatagaatatgatgacgaacataactgtgttctgatccatgcgatctgtagttggcattgtgagattatgtctggttcattggttttagacctgagattgagaggcggcatctagattctgtgtttaaggatgaataaagagtgtaccggtggaaccttacatataaatgtggtctggtgtcatggttaaaattgttgttgttggtacattgggttgctgtacatatggatcttttgcaatcttatttgcattgtac

SEQ ID NO: 17329 - DNA, 823 bp, Zea mays
  Clone ID: LIB3069-009-C2_FLI
gatccggagagtggcgaccgtttgcacattgagctagctaaatcaacttcacgcagacctcgtggaggtgtcgaaggctaccgagttattgacaaacgggctaacaaaacagaaggaaatgctgaccatgagaacgttggtgatgaagatgatgacgaagtatggggggaagatgaggatggaggcaatgacaataatggtgatggaggatcagatgagccatcgggcacagaaaatgaaaatccctagtgataagaatgaattgcctacggataagagtgatcaaccagggcacaagcagcagaatgggcaatctctctcaaatgaaggacgagacaaatcttcaagtgatataccaccttgctctactatcttcattgcaaatttgggacatacatgcacagaggacgaactcaaggaagttttatccaaggaacctggatttcatgtccttaaaatgcgtcgccgtggtggaatgcctgcagcttttgctgattttatggatattgaatcgtctaccgctgctatgaatagactccaaggcactgtactggcatcttctgataacgatggattgcacattgagtacgcaaggtcgaagatgaggaaaagctaagttgttggactgcaaggattggcagtgtcatctcctgtctgtcttcctggaggctaccagtaggcatccctgcacacgtagctgcgtgtagctgcttgcttagtcgttttatccatgtaagcgtgagaatccagaacggtgctaattgtcctgtatgccattatacaatactccctcttttaaatcatgagatactctcttcgtttc

SEQ ID NO: 17330 - DNA, 2427 bp, Zea mays
  Clone ID: LIB3069-009-C9_FLI
gatacgatgctcaagataaatgaccgttatgagttcccacttcaattggatcttgatagagatgatggaaaatatctttctccagacgcggatagaagtgtgcgtaacctatatactcttcatagtgtactggttcatagtggtggagttcatggaggacactattatgcctttattcgtccgaagctgtctgatcaatggtacaagttcgaggatgaacgagtgacgaaagaagacatgaaacgagcattggaggaacaatatggtggtgaagaagagctcccgcataccaaccctgggttggatactgcaccgcttagatttaccaagcattcaaatgcttacatgcttgtttacattcgagaaagtgacaaagataacattatctgtgatttggatgatgaagatatttcagaacaccttaaggttaggttgagaaaggaacatgaagagaaggagtacaagaaaaaggagaaggctgaggctcatatgttcactgcattgaaggtggcccgagactttgatattaaagagcaaattggaagacacatgcactttgatcttgtggactttgacagagttaatagcttccgtgcacctaagaacatgtcaatcaacgaagtcaaggaggagctttctaaagaatttggcatccctgtagaatgccaacgattttgggtatgggcaaaacgacagaactgtacctacagacccagtcgtccattaacctcccaggaggaaacatctactattggggttctcaaagatgcaacagtggcgaagttaccgaattctgaagtacgattgttcttggaggttcatttcagacaggagaaccaaccaattgctccttggaataccaaagaagatatattacttttcttcaagctctatgatcctgaaaaagaagacctaagatatgtcggcaatttttttgtgaaagcatcaggcaaaccatctgatatagtagaaaggctgaatcagattgctggatttctgtctgatgaagatattgagctctatgaggaaataaagtttgaaccagttgtgatgtgcgtacccattgagagtaatgcttcgttctgttcaagccagattgacaatggtgatataatatgctaccaaaagcactgtttgccagattcaatggatcgatatcgatatcctaccgtcccttctttctttgaatatattcataatagacagattgtccatttcagattgcttgagaaaccaaaagaagaaggcttctctcttgagctttcaaaatgctccacatatgatgatgttgttgagaaggttgctaagcaactacgtatggatgacccttctaaaatccggcttactcaacacaatccatcgtctcagcaacccaaacctcacttcatcaaatacaggagtcttaattatctttcggacatgctacataatcacaatcagatgtgtgacatattatattatgacatcctggatattcctttgcctgaactagaatctatgagatctctgaaggtcgctttccaaaatgccgcaaaccatgagatgtcgtttcacattatgcggttaccaaaaagtaactctctccttgatttgattgaagacttaaagtcaaaggttgaaatttcttgtaatgatgctgaatttcggttttttggagtctaccttcacaagatatgcaaggtgtatcaacctggagataagatagattcagttaatgaccatggacccttgtatattgaagaggttcccgaggatgaaaaaaatgccgggcctcatgaccgtttggttcatgtctatcattttgaatataatcatcatattcagtattttggtgaacctttcttcttcctaattcgtgatggtgaagctttgtcggatatgaaagtacggattcagaagagacttcaagttcctgatgagcagtttctaaagtggaaatttgctcatgttacattcagtaagccagaatacctccaagattcagatattgtaatgaacagattccataaacagagacctgtttatggaggttgggaacaacaccttggattggagcatacagccaccaccccaaaaaggtcctacttaggcaacaaccagaaccgccattcttttgagaagcctgtgaggatttacaactaaagctaggaatactttttacatgcgatgaatgatgaacaggatatgaagcagtcttgttccaaaagcagtcttttggtgatgtacatggagcttttgcatagagtagtttatgtggcaattatctcaagaattttcatctggtggatgtacagggtccgtatagcaacatttccttgtagaaagttgaagctgtatatcgagggtggatttacatgtgttaatcttttcgaccccaagcctctgggaggctgtgaaccatagcctcatgaaatatgcctgttgttc

SEQ ID NO: 17331 - DNA, 856 bp, Zea mays
  Clone ID: LIB3069-009-D3_FLI
gcagagcacaaaagaaatccatccgtctcattgcttccgcttgttcaccaaacaaaaccgaagccacactccaccgctctcctccccaatcagctatgctcgcccaccgcttcctcctcctcgtcgtcgtcgccgcggctgcggcgagcggcatcgcctccgctaagccgacggcgtacgaagccctcgccgactacgacttccccccggggatccttcccaagggcgtggtcgcctacacggtcgacaacgccacgggcgccttcacggccacgctcgatgcctccgcgtccggcgcgggatcctccatctgcgagttctccatcgagggctcctactcgctacgctaccagaccaagatcaccggcaagatctcccccgaccacctcaccgacctccagggtgtctccgtcaaggtcctcttcttttggctcaacatcgtcgaggtcacccgccatggcgataatctcgagttctccgtcggcatcgcctccgcggacttcgggattgacaacttcctcgagtgcccaacctgtggctgcgggttcgactgcaacgacctgctcatgctccagaaggcgggggcagccaccgccaggctgcgcctgcgaggtgccttctagaattccactcatgcaaatccaggatgggatagtaagttcaggactcgattttatgtttcaccaactgtttcagacagttttaggagagtcagagatttaattaagatctttcaaatatgtaaacttatatttctctatggaaattgccttctttccattgagatgtttgcccacatgtgaatcagtttctaaagtggtgatagttgaatcccatggttatggatggttgcttg

SEQ ID NO: 17332 - DNA, 1108 bp, Zea mays
  Clone ID: LIB3069-009-E7_FLI
ctaaattctccggaacccccgttgccagccggcgatcgcgccgtgggatctcatcgaacgaagcgggcggcgacggcgatgtcaagggaggcggcgaggacgaggagccgggtcctggtggttggcgccaccggccgcctcggtggaaacatagctcaggccagcctcgccgcgggtcaccccaccttcgcgctcgttcggccccaccacttcgcacgccccgattcccccgtgctcgagccgctcgtagctgccggcgccactctgctccaggggtcactggaagattactcgagcctactcgaggcggtgcgtcaggtggacgttgtcatctgcgcggtgtccacgaagcaggtgctcgagcagaagcctctgattcgggctataaaggaagctggacgcgtgaagagatttattccggcagaatttggagcagatccaacaaaggttcaaatttgtgacatggattatggcttctatgagaagaaaattgaaatccgtcattcaatagagagtgaaggcattcctcatacttacatatgctgcaacttctttatgcgctatttgcttccttcactggtgcaacctgggctagatgctcctcctagagatgaaatcaaaatatttggtgaaggaaatactaaaggtgtttttgttaaagagaatgatgttgctaaatttacaatatgcaccatagaggatcccagaacattgaacaagacgttgtatctgagacctccaggaaatgtcttctcaatgaatgaattggctgacctctgggagtcaaaactcaagaaatccctgaaaaggttatatgcaacagaagagcaacttcttaaagaaatccatgatgctccatttcccttgaagatggatttaatctttatatattcagcgtttgttaagggtgaccacacgtattttgaaattgacttgtcaatggaaggaactcaactgtatccccatgtaaattatacaacagtgaacgagtacttggatactctagtttaggatatttgttcggtttatatcttccttgtaataagtcaaaaataatgttttttttgtttcgaatggagcattaaaagaaggggactgatggcccccc

SEQ ID NO: 17333 - DNA, 1079 bp, Zea mays
  Clone ID: LIB3069-009-H9_FLI
ccgcgttcaagcagccgcctttcgccatcagcaacgccgtggccagttcgactgtgggttcctatggcggaacaagggatgcggtgaggccaaggacggcacaactgacgatcttctacgccggttccgtcaatgtgttcaacaacgtctcagctgagaaggctcaggagctcatgttcctagccagcagaggaagctcagcccccgtggcctgtaagccagaggctcctcctactctcgctccagcgaaggtcacagcgcctgaggttcttctgcctgcgaagcagatgctgtttcaaaaaccacagcatctctcgccgcctccatccagtgtccctggcatcttgcagtctgcagctctccccaggagcgcctcatctagctctaaccttgactccccagctccaaaatcttcggtcccgttagctgttcctcctgtaagccaggctccgccagcaacactgatcgccactacaactgcagcagcaataatgcctagagctgtccctcaagctaggaaggcgtcccttgctcgattcttggagaaaaggaaggaaagggtgacaactgccgcgccttacccatcagccaagagcccactggagagcagcgacacgttcggcagcgggagcgccagcgccaacgccaacgacaagtcctcgtgcacagacattgccctctccagcaaccatgaagagtccctgtgtttaggggggcagcccaggagcatcatcagcttcagcgaagagtcccccagcaccaagctacagatctgatcgtgccgtgcccagtgttcatagatttgtccaggctgaccgatgcagaaaaccataagaatacttttttccactcaagaggaagagattactatcgatgccgttgttgtttaccgtgatgctgttttgccgtgttaggttactgtactgctggtacagatggtagtgccccccacccacctaactaacaagagagctgtcacttgcagactcttgatttttttttgccatttctcttggaaatgaactcagatgtgttattctagcagtaatcaaattatacaggcatacaaattctgcgcc

SEQ ID NO: 17334 - DNA, 1175 bp, Zea mays
  Clone ID: LIB3069-010-A7_FLI
gtaccgtatcagtctcccggattctggtgccggttcgtgggagggccaaagcttcgagttaggaaaaccctaccgctgtgggagtagcctccggcgatggctgcggcggcgatcctgccggagctggcgacgcaggtgctcatcccggtcgcggcggccgtgggcatcgcgttcgcggtggtgcagtgggtgctggtctccaaggtgcccgtgatcgcgtcgggggtgtggttcgcgtcggcgcagggcgaggagtgcgcgcgcctggcgcggtggcccgtggccatcctgggcgggctgctcctgctggccgcgctggcgggcttcgtgggcgcgtactggaaccggcgcggcctgctggccttctacctcttcgccatggcgtcgctcgtggtgctcctcatcgcgctcctcgccttcgccttcgccgtcacccgcgggtccggcgcctaccccgtgctcggccgcgcctacgacgactaccgcctcgacggcttctccatgtggctccgcgggtacgtctccgacgaccccggccgctgggacaaggtcagggcctgcctcgccgtctccgacacctgcaagaagctcgcgcgccaggccgccttcaccagcgcagaccagttctatcagtcgcacctctccccgctccagtccgggtgctgcaagccgccgtcggtgtgcgggttcagctacgtgagcccgacggtgtggtccgccccggcggcgcggccggcggcggacgcggactgcgggctgtggagcaacgacccggggcagctgtgctacgggtgcgagtcctgcaaggcgggcctcctggaggcgctccgggaccagtggcacaaggccaacgtcgccctcgtcgtcgccaccgtcgccctcgtcatcctctacctcgtcggctgcagcgcctacaagaacgcgcaggccgccgccatcttcggacgccgcaagtattagctagctagctgccatgttagttttttttttgcgcttttttttctttattgtcatgtgggttgtggattatggattgcgtatgtgtgtcccccctggtggagagaagcatttgtagcggtggcgtggtgtgtgtttccggacttggttcatcatggtagtgtgatacatgtgtaagattagttactttaattactaattgtgctgttttcctcttt

SEQ ID NO: 17335 - DNA, 2275 bp, Zea mays
  Clone ID: LIB3069-010-B5_FLI
ctgctttctgcggcagagaaccagttagctgaagtagctaaggatgccaagagcacaaaagatccaaattactgtaaagtattgagttcaacattaagctcaataatgggctggacagagaaaagacttctggcatatcatgaaaccttcaatacatgtaatattgagtctatgcaaggcattgtctccattggagtgtcagctgcaagaatccttgttgaagatatatctcaggaataccgccgtagaagaaaagaagagactgatgtagcccgaagcagggtagagacatacataaggtcttcactaaggacagcttttgctcaaagaatggaagaagcagattcaaaacggtcatcaagaaaccctactccagttctttctatccttgcgaaggacattggtgacctagctacaaaggagaaaaatatctacagtccaatactgaagacatggcatccactcgcttcaggtgttgccgttgcaacccttcattcttgttatggaaatgagctgaagcagtttgtagctgcgcttacagagctgacccctgatacagttcaagtacttaaatcggcagataaattagagaaggaccttgttaatatcgctgtagaagattctgtggatagtgatgatggaggcaagtcacttatcagagagatgccgccatatgaagctgaaaatgcaattgctaatctggtgaaagtgtggataaaagatagagtagacagactcaagggatgggttgaccggaatttgaagcaagagacctggaatccaggtgccaacagggataattttgctccctcttctgtggagatgcttcgggttattggtgaaacattggatgcatttttccaattgcctataccaatgcatccagctcttcttcctgatctgacagctgggctcgacagaagcctacaactttatgttgctaaagcaaaatctggctgtggaacacggaattcttttatgccccaactacctccactcacacgatgcgaggttggctccaagttattattcaagaaaaaggagaagccacaaaatctgcaggttcgagtatcacaaaatggagcagcaaatggaaatgatcccttgggccttcctcaactctgtgttcgcctgaatacgcttcagtacatccgtggtgagcttgagaacatagagaagaagataaaaacaagcttgcgaaatgttgagtcagctcaggcagatgtcactgatggattggacatcaagtttgagctttgtcaggcagcctgtctagagggcattcagcagatttgtgagacaactgcatataaggtgatgttctatgacttgggccatgttctctgggacaccctttatgttggtgatactgcatcaaacagggtggaggtactgttgagggaacttgaccctgtccttgagacgatatctggtatggtgcacaacaaagtgcggaaccgtgctattactgcactgatgaaagcaacttttgatggtttcttgctggtgcttcttgctggtgggcctttgcgtgctttcacccgccaagactctcagataatagaagatgacttcagggccctcagagatctgtatttagcagacggggatggtttgccagaggaattagttgacaaagcatcctcccaggtcaagaatgtcctacccctcttccgagcagactctgaaagtctcattgagcgattcagacgcatgatggttgaatctaatcggtctgcgtccaagaacaggttaccattgcctccaacaacggggcattggagtccaaatgagcctaacacagtcctgcgagttctgtgctaccggagtgatgagacagctacaaagttcctcaagaaaacttacaacctaccgaagaagatatgacttgtgggatagatcacaaaccacatgtacattttcctgtcagtataaaaaggtttctctatgcctgtcacaatctctggctgaggacgcgcctcctcaagtgattgtcaacaagaaggtttattctgtggtgctggagagatgtgactgggtgttttcggtggttcgtatcatggataggttttgggttggagggtggattacttacagcttgatttgttcattataatatatatgtttgcttaatctagttcttttgctgaccttgcgctcatgtaatttgattcattctagtttgcgacagctatacccagcgtgtgaataagttgtgtactcgcgtgatactgtctggtgcctttgatgtgacaatatgaggagcatttgtatt

SEQ ID NO: 17336 - DNA, 727 bp, Zea mays
  Clone ID: LIB3069-010-G4_FLI
gcttcggcgcccgttcaggatccacatcttcccgagcgagttcttggttgacctcttcctcttcggaccacctccaaggctcttggtgtagcttgccactctcaccaatcaagttttcatgtctgatctcgacattcagatcccaactgccttcgatcccttcgctgaggccaatgctggggactctggtgcggcagcagggtcaaaggactacgtacacgtgcgcatccagcagcgtaatggtcgcaagagcctgaccaccgtccagggattgaagaaggagttcagctacagcaagatcctcaaagatctcaagaaagagttctgctgcaatggtacagtggtccaggacccagaacttggacaggtcattcagctccagggtgatcagaggaagaacgtctcgaatttcctcgtccaggccggcattgtgaagaaggagcacatcaagattcatggtttctgagcaaccgccgggtccatagcaaaccaaccctgcatgcagggccagcttattatatataatatctgaggtggagcatatctatctggctgtgtactgcaagcaggcctagtacgccgcctgcgcgttcctcctattacacatataggcccctccctgcgtgtatgcttgttaccgtcgtgtcgaaccttgtactacgaggctccatcgaacatcgatggcttgcttctttatcagaacatgtttgaataaacgctatttggt

SEQ ID NO: 17337 - DNA, 533 bp, Zea mays
  Clone ID: LIB3069-010-G5_FLI
gagcaagggaaagctaaaggagaaggtgaacaacgcggtgctgttcgaccaggctacctacgacaagctgctctctgaggtgcccaagtacaagcagatcaccccctccatcctatccgagcgcctcaggatcaatggctccctggctcggagggctatcaaggacctgatggcgcgtggcctcatccggttggtctcggttcactcaagccagcagatctacaccagggcaacaaatacctaaggatgggattcccttgtttgccctctctgtaggagctcgtcttctttagaacagttgccatctctgtcaagagtttgctaatgctatgttagatgagtttctcacgtggctgaaacgtttcagagagtttgcgttagtttggcttgcctattataccttatctggcctcaatagcttttttctatggaaatctgccttgaaacgtctgatccgtgattatgcgactctacctaaactactgttatgctgcaattctgtcaacttgtctgaccagcaagtctgatgaatg

SEQ ID NO: 17338 - DNA, 702 bp, Zea mays
  Clone ID: LIB3069-011-C5_FLI
cccagcaccaaaccgtgcaggttctgttgataattccagaaaccacacacaagtcgatgtcaaccttccaccacctgctctggatgatttctacaatggcaattggttccctccccaatgaattcagtatgggaggaaacaaatgcaataacattttgtacctgtgaaaaacaaatcagagaaggctaatggccagattacaaagcaatggtcgtgcgctaatgatttctacaatgacagttggttccctcccccaatgaattccgtgtagggaggggggaaaatgcaatgacattttttagctgcggaaaggcaaatcagagaaggctagcggccaaatcccaaagcatcaatcgtgcactcttgttagcactctgaactgaatgtgtcatcccggaggacacattttgtaaaaaaacagtagctttatagccttattagactgttaaaacacactcgactgaatgatgtccggttccatcaacaaggcttcacggagactgtcgagtacctgatctgggtcatgttttccatagtttgcttctgtgcagttgcctaataagcccattcgttgtaaactagctagttctaacttaagaaagctccctcagggcctatgcatgagtctctgattattgtgcagatgaactgttctggacattttgaacatgcaaatgtggaagcgtcactgtcagttgaatt

SEQ ID NO: 17339 - DNA, 232 bp, Zea mays
  Clone ID: LIB3069-011-D5_FLI
agttgtactgtagaaaatgtttgtttggatagcaacacgttagtatacaacagtggaataggatttgtttgtaatgttattagatgcgggcacctgttgcccattaagctatggcatggtatccctggtttcttgtatatcttggagagcgtcagctcttatgcaggacatagtgctatgccgtcaaactcttgtagaaatgttgtaggcaataaaccagtgacacttgtcg

SEQ ID NO: 17340 - DNA, 1636 bp, Zea mays
  Clone ID: LIB3069-011-E5_FLI
cacggcggcaccccgtgcgtcggctgcttgctgccccagtgccgcccccgcgttcccttcgctcccgccgacaccgacgccgccactgccaccgccggcatggcgaccccgctccgcgccaccgcggtcctcgcgtggggttccggggaggacgggcagctgggcatgggcgggaacgaggagaaggactggccccacttcgttgaggcgctggggccctacgccgtcaccgccgtcgtcgccggcagccgcaactccctcgccatctgcgacgacggccgcctgttcacatggggatggaaccaacgcggcacgctcgggcacccgccggagaccaagacggagagctccccgggccccgtcgacgctctcgcgggtttcaagatcgtccaggcggcgattggcgggtggcattgcctcgcagttgacgacaaggggcgcgcctacgcctggggtggaaacgagtacgggcagtgtggtgaggagcctgagaggaaggaggacgggacgagggcgctcaggagggacatcccgatcccgcagcggtgcgcgctcaagctcaaagtccggcaagtagccgctggagggacacattcagtagttttgactcaagaaggtcacgtctggacatggggacagccatggcctccgggtgatatcaagcaaatatctacacctgtacgtgtgcaaggccttgagaaagtgagggtcattgctgtaggtgcattccataatttggcactaacggaggatgtaattttgtgggcatggggtaataatgagtatggtcagctggggactggagatacccaaccaagatcacaaccgatacgtgtcgaagggctatctgatctctcactggttgacattgctgctggaggctggcattcaactgcactaactatagatggagaggtgtatgcttgggggagaggagagcacgggaggcttggatttggagatgataagagtagtcacatggtgcccctaaaggttgagcttctagctggagaggatattgttcaggtatcatgtggaggaacacattcagttgcgctagctcgagatggccgaatgttttcttacgggaggggcgaccatggccgtctaggctacggcaggaaggtgacgacgggccaccccatggaattgcccatcaacctgccgccgctcagcagcagccgcgacggtcggtggcaggcgaaatacgtggcttgtggcgggcggcacaccctcgctattgcggagtggacagaggccactgattgatcacgtaggtagtgctcgacttcctgagtcctgatctgcatgcaaatctgaggctgacaagcctgctataaaattgtagcgtttgtggaataagcacaaggccggtgccaacgggcgtaggtggggctgcagtcgatggcgctgccggccgccgcggtcggtacttaccagaagtagttcagtaccgactgccattgccatgtgtcgtcttttaattagttgatgtccaataaattcataagtttttttaaaaaagtctaagtaatctgaaaaggtatttatgaattatgtaacttttttactttttggtattatgtattttttatgttttatgagttatgtaaattttatttatgatttataaatt

SEQ ID NO: 17341 - DNA, 827 bp, Zea mays
  Clone ID: LIB3069-011-F1_FLI
ctctttcttcttcttcttcttcttcacacaagcgtgctccttctgctcttgtgctaagtagctagctcacaacagaagaggacgagaggaagcaaggcggcggcggcggcggcagcaacaacatacaccgctggccgtggcgccatgggcatcctggaccacatgtcgcatgtgtgcagcatcacggagacgaaggaggcgctcaagctcaggaagaagcgaccgctgcaggtaatgcttgcctttaatcattatatatttaatttcctcccatgcatctgcatgcatgcctgatgagttttgatgcatgggcggtggttgcagacggtgaacatcaaggtgaagatggactgcgaaggttgcgagcgtcgcgtgaagagcgcggtgaagtcgatgcgcggcgtgacgagcgtgacggtgaacgcgaagcagagcaagtgcacggtgaccgggtacgtggagcccgccaaggtgctggagcgcgtcaaggccaccggcaagaacgccgagatgtggccctacgtgccctacacgctcaccacctacccctacgtcggcggcgcctacgacaagaaggctcccgcgggcttcgtccgcagcgcgccgcaggccatggcagaccccagcgctccggaggtcaagtacatgtccatgttcagcgacgagaacgtcaacgcctgcaccatcatgtgatgcatgcatatgtatagtctctcgatcgtatcatgtgtagtagtacgagctagctagtgcatatcgatcttcgtactgtatcatatcgatcgaaagaaccttaatagccaatacaagaggaatgtgaattaagc

SEQ ID NO: 17342 - DNA, 362 bp, Zea mays
  Clone ID: LIB3069-011-F6_FLI
cccaccatcacctcccgcgagatccagacctccgtgcgcctcgtgctccccggcgagctcgccaagcacgccgtctctgagggcaccaaggccgtcaccaagttcacctcctcctaggcttgcacgctcgccctttgtaggcttctcttgtgttgatgttcgccttgtgttgtagttagatgttgctggtttctctgtcggcgctgctctgcttctgtaggaactgcgtcatgtaacccagcaaggacttgtttatttgtgaatcatcaacactttgttgttgatcacttatgttccaaattctgagtttgacgctggagcatgcctcatttgttgctggaatttgagttggtggtttgcat

SEQ ID NO: 17343 - DNA, 1012 bp, Zea mays
  Clone ID: LIB3069-011-F9_FLI
caccaccaccaccaccaccaatctctgcgtttttcgtctgcggcggcggcggcagcagcggaggaggtagacgagatgctgtccgccgacatccccccaaaccagaccatctacctcaacaacctcaacgagaaggtcaagaaagaagagttgaagagatcgctttatgccctgtgctcgcagtatggaaggatactggatgtggtggccctgaaaacgcagaaactgagagggcaggcatgggtggtgtttagcgagattacagctgctaccaatgctttccgtggattgcaagactttgatttctacggcaaaaaaatgcgagtacaatatgcaaaaacaaaatcagactgtattgcaaaagaagatggtacttatgcacctaaggagaaaaggaagaagcaagaggagaaagctgctgagaaaaaacgacgagcagaagagacacaacaagctggccctaatgctgctgctgctcaaagcaatggaactggctatcaagcgtctcgtctgggcaaggcttcgcaggagccacctgctcctccgaacaacatcctcttcatccagaacttaccagaccagaccacgagcatgatgctccagatcctgttccagcagtatcccggcttccgggaagtccggatgatcgaagccaaaccaggcattgcctttgtggagttcgaggacgacggccagtccatggtggcgatgcaggctctccagggcttcaagatcaccccggagaaccccatggctatatcctatgccaaaaaatgagaaccctcgcggaatccctgtacccaatacccataatattttccgttccgccatccggaatcgagccacagtatctagtctactttccggccatgtatttttggaaagcacttgcttaatttagaagttagactcttgccacttttaaaccgtgtttggtgctcagtctttatgttgtgcctgcttttgctcttgtcaagtctggtattgtgcctatatataggccttgttcgtt

SEQ ID NO: 17344 - DNA, 1103 bp, Zea mays
  Clone ID: LIB3069-012-D6_FLI
gggtgagaagcctgttaaaaggagtaccataatagcaaaaaaactcctctggagcatcgaccgactctccacctgaggaccgccagctccttcctccgcctcgacaagcgttggagagatggtgaagagaagcaagaagagcaagagcaagcgcgtcacgttgcggcagaagcacaaggtgctgcgcaaggtgaaggagcatgacatggaaaaaatggttacaaaggctgatccaagtaaacggattgtactacttcacaacaagatagatcttgttcctaaggaagcggtagagaagtggcttacatatctgagagaagaaatgccaacaattgcgtttaagtgtaatacccaagagcagcggaccaagccgggatggaaatcttcaaaactagataaaacaaacagcatcccacaaagtagtgattgccttggtgctgagaatctaattagattgctcaagaaatattccagaagccacgagctcaaactggcaattacggtgggtattgttggactccctaatgttggcaagagcagtctgatcaacagcctgaagaggtcccgagtggttaatgtcggttccactccaggggttactagatcaatgcaagaagttcaattagacaagaagatcagtgatcctgcgccgtggtgatcgcggccatcgttcgccgatggtctgcgtcgtcttcactcgtcagggaaccggctgtgacggcttggttctaacaggcgccgatggaggccatggagctcgtcgtcgcgctcaccgcctgcgccgactccgtcgcagcctgcaaccacgacgtcgccaactactacctcgtgcggctgggcgagatggcctcccccgcggggcccacgctgatgcaccgcgtggccgcctacttcgtggaggtgctcacgctgcgcatggtgcgcatgtggcccagtcgagatctggtcattagattcaatagtgtggtactggtggcatgtggcccagccgagatctgacagttcttagaaaaattcagctttcatttccaatcgttacagctttaaactattatgatcgttactttttcattggcattattacttgagaaaccattcaaaac

SEQ ID NO: 17345 - DNA, 863 bp, Zea mays
  Clone ID: LIB3069-013-D1_FLI
atcatatcagaaaaggggaagctgatgttatgctttgtggtggttctgatgcaccaatcatccctattggattgggaggttttgtggcctgcagagctctttcacagagaaacagtgatccagcaaaagcttctcgaccttgggatgtggatcgtgatggatttgttatgggagaagggtctggtgtgcttgttttggaagaacttgagcatgcaaagcaaagaggtgcagaaatatatgctgaatttctaggaggaagtttcacatgcgatgcataccatatgacagaacctcatcctgaagggaaaggggttattctttgtattgaaaacgcattagcagattcaggagtaacaaaggaggacattaactatataaatgcccatgcaacatctacacagatgggtgatttgaaagaatttgaagctctcaaccgttgttttggccagaatcctcagctacgagtgaactcaacaaagtcgatgacaggccatctgctaggagctgctggtggaatagaggctgttgctgctatacaagctataaggacaggttgggtgcatccaaatctcaatttggacaatccagagaaaaccgtggatgtcaggatgctggtgggcccgcagaaggagagatgtgatgtgaaggtggcgctgtcgaactcgtttggatttggcgggcacaactcatcgattttgtttgcaccattcaagtgatagccgttgacaaatttcttgtggtgggctacacaccgtcgaactgagaccttgtataagaaagtatttaccggacgcagcaatatctcctgtactgcaagattaggaagagatccaaaaggcttagtaggatgtgtattgccccac

SEQ ID NO: 17346 - DNA, 1119 bp, Zea mays
  Clone ID: LIB3069-014-B12_FLI
ttaattaccacggggcacggtaattaaaaaaactaaatcaaatcaacacacctttcgatttctggacaaaactaaaagaaaaaagaatgagaagggagagggaggggggagaagggggaagaaaaaaaattccggacgcgtgggccatcctctcctctcctctcctctcctctcgtgtctacagcttcccttgctggctagggtttgcagatgacgacggcggcgtgccccacctaggcgccggccaagggcggcaacgagcaggggggcactcgcattttcggcccctcccagaagtacttgtcccgcgacctcgccgcgcatacctcgctcaagcccagaaaagacggtcaatagacccaagaggagttacagaagaggaatctcagggaggaacttgaggaacgtgagcgcaagcactactcttccaaggataagtcctatgctaaaaaaagagaccggcggaaaagctcaagccagctactcctagaaggttcaaagagagaggcagaggataagatagttccacaagaaattgatgcagatgactccgatgtggagcctaaaagtgacgatgagagagaagacaacacaacatcttccctgacattgtttaggcagaagtggagcaactgcgagaagaacttaggcgacatcaagattaattgaagcaacaagctgcgcaacatgaatattatgctacacagattcaacaacagcaaacactcatacaacaactagcacaggcccaagggatacacgtcctggtgcccccccaccacctcccgttcattatccttggtcttcacctccacctacacttacatttccatctaccaaacatcagaccccttcagctaccttgccaacgcatgaactaccttgccaacgcatgaacgagaagacgggttagactttgtcgaaaccctcttcgctagtggaggtatcgaccatcactcgtcactgtaacccgatggtgatcggcgaccgtgagcttccatgttattgtgttctgatacttgagacttttattatgactatgtatgaaatattgtctcttattagtactggatgataagatgtgtcttattatgactatggatatgacttttgtgatgc

SEQ ID NO: 17347 - DNA, 561 bp, Zea mays
  Clone ID: LIB3069-014-C12_FLI
gtgcggaacgccatcgagggcatgaacggcaaggagctggacggccgcaacatcaccgtcaacgaggcccagtcccgcggcggccgtggaggcggcggcggcggctacggtggtggccgtggaggcggcggctacggcggtggcgggcgccgtgatggcggcggcggctacggcggtggcggcggcggctacggtggcggcggtggctacggtggtggtggtggcggctacggcggtggcaaccgtggcggcggctacggcaactccgacgggaactggaggaactgagcggtggggcccgcgcggccaagttatcctgttcgctaccgtgatgtttaccctagtccagagggtttatcttcgttcgtctcgtttgttgttgcccatctgtgtttttgattgcaaggtcgctctgtgtcagttgttagtgctgtgttcatcctcggctccagcagacccatgcatcaaccagcatggactgtggatcgatggatgctgttactcctgtcaggatttgttctaagttaatcctaaggaaaaaatggtgcttcttggtgctgc

SEQ ID NO: 17348 - DNA, 1104 bp, Zea mays
  Clone ID: LIB3069-014-C9_FLI
gcatgaccacatcggtctctccgatcagagttcaactcggttctttgccgagtcagataagaaccccaacagtttttaattgcgcgccaatctgttttatatatacggagagagcactcctgtttttactagctgcaaaagggcgtgtttgagactagcggaccgaccggcctgcgcggcgatggatgtcaagtgccggcgtctggaggggaaggtggccatcgtgacggcgtccacgatggggatcggcctcgccatcgccgagcgcctcggtctggagggcgccgccgtcgtcatctcctcccgcaagcagaagaacgtgaacgaggcggtggaggggctcagggccaagggtatcaccgcggttggtgccgtctgccacgtctccgacgcacagcagcgcaagagcctcatcgagacggccgtcaagaactttgggcacatagatatccttgtctccaatgctgccgcaaatccttctgtagatagcatacttgaaatgaaagagtctgttctcgataagctgtgggatattaacgtcaaggcttctatccttcttattcaggatgctgctcctcacctacggaaggggtcatctgtgattattatttcttcaattgctggttacaatccagaacaaggattgacaatgtatggtgtcacaaagactgctctctttggtctcacgaaggctcttgctggtgagatgggacccgatactcgtgttaactgtgtagcccctggttttgttcctacacggtttgctagtttcctcacagaaaatgagaccattaggaaagagcttaacgagaggaccaagcttaagagattgggtactgtggaagacatggctgcggctgcggctttcctggcatctgacgacgcatcatacattacggctgaaaccattgttgttgctggaggggtgcagtctaggctgtaaatctggctgaagtttatatttacttggttactaatgtgtactagtgctctagagcatcaggcgtggctaataatgtgtactagtgccgctagagcatcaggctaccttctatatatgacaggcaactctaaaagattttctatatcttattcctcttcaat

SEQ ID NO: 17349 - DNA, 1073 bp, Zea mays
  Clone ID: LIB3069-014-F11_FLI
gaagaacagtacagtgaccggacatcgaagatacttgctgctcaccatgcaaaatccatggggttagttgctgaaaaccggaatggagatagaaagagcaggagatctggtagatggggcttgttagggaataacttcacggtcgctctcatggttcaactgcgtgacccactacgtaactacgagccagtgggcacaccaatgttcgcgttaattcaagttgaaagggtttttgtacccccgaagcccaaaatctacagtaccgtctcagacaaaggcaacagcgagcaggatgacgaggaacccaaggccgaagaggttccagacaaggcattggtcacggaagagaaggctgaggaattagaggatcccgttccccaattcaaggttacagaagtgcatgtcgccggtttcaagagcgagcctgagaagacgaaaccatggggcaatcaaacgcagcagcagtccggctctagatggttgctcgcagctggcatgggcaagggaaacaagcatcctctgatgaaatccaaagctgtcgtgaagccaaccaaagaggcagctggccaggcaggagacaccctctggagcatctcttcacgtgttcatggagccgggaccaggtggtccgagctagcaggaaacaagagccattcacggaacccaaatatcatgcttcaaaaggacaagaggtttcggtgatggcttggtgtttcggtagttagcacggggaaggttggtctatctcgttagaagggtacttatctgcaattggacctcactgggaatgttcagcggatttgtgaaatcatgtacattgagttctcttgcctaggatcagtagttttttatacgctgcatagtttgtgttcggtgttccttccgaattctagtgagaaactggtgtccctccctcttgtcaccattattggcttagagcggcttctgcctctgaaggtgcagcactgtcttcttttgcaggctgccatagctatcatacatatcttgttatcttgctaatcattcgtccatagtttttagtgccatcttattatatatcagtttctgatctc

SEQ ID NO: 17350 - DNA, 425 bp, Zea mays
  Clone ID: LIB3069-014-G10_FLI
cagcctcctcgcgcacccggtcccgcttgcctctccccacctactcgccgtcgcggtgccgtacgccggtgctgtccagtctagggtttcggccctcgcccgccgatccgtcccccccgccggccatgtcgaagcaaggagggaaggccaagccgctgaaggcgcccaaggtcgacaagaaggagtacgacgagagtgatcttgcttatttgcagaagaaaaaagatgaggaaaaggcgctgaaggagctgaaggccaaggcacagaagggcgcaattggaggctcgggtctcaagaaaagtggaaagaaatgagcattgcccacccacccatctccaaaacacctaagagaacgataagacagctgcttatctgtgttgcgcttcactatatgatatatgtggctgtgagacaatgttgcctct

SEQ ID NO: 17351 - DNA, 336 bp, Zea mays
  Clone ID: LIB3069-014-G11_FLI
caaggattggagagagaagcgggatgagttcaagaagaaggttaggcaatgtgtccgcaggtctcaggaaatgctgtgaaggaggaacatgggggagttgaatgagtctgcaatcggtgtgctgcaattcacaaccaattatctcatgccatcattcttttgctttcccctgtatattttttcaaccggtgtcactcgtatagtggtgttgggtctctttagacaaactcgggacggttgcttatcctaaaaattcgattgtactgcgtggcatgaaatgatcgattcgaagaatattttgaacatgctgccacctaatcaaaaaatttcatgttt

SEQ ID NO: 17352 - DNA, 1428 bp, Zea mays
  Clone ID: LIB3069-014-H10_FLI
gtgacgtcgctgacgtgcgccgacttcctgcgcgcgcccggcgtgcggacgcccgtgatcgtgcgcttctcgacggtgatccacgagcgggggtccccggagacgatccgcgacccgcgcgggttcgccgtgaagttctacacccgcgagggcaactgggacctgctgggcaacaacttccccgtcttcttcatccgcgacggcatcaagttccccgacgtgatccacgcgttcaagcccaacccgcggtcgcacgtgcaggagtactggcgggtgttcgacttcctgtcgcacctccccgagagcctgcacaccttcttcttcctcttcgacgacgtgggcgtgccgtccgactaccgccacatggaagggttcggcgtgaacacgtacacgttcgtgagcgcggcggggaaggcgcagtacgtcaagttccactggaagccgacgtgcggcgtgcggtgcatcctgacggacgaggaggcggcgctggtcgggggacggaaccacagccacgcgacgcaggacctgtacgactccatcgcggcggggagcttcccggagtggacgctgtacgtgcaggtgatggagccggacacggaggagcagtacgacttcgacccgctggacgacaccaagacgtggccggaggacctgctgccgctccgccccgtggggaggctggtgctggaccggaacgtggacaacttcttcaacgagaacgagcagctggcgttcggcccggggctggtggtgccagggatctactactcggacgacaagatgctgcagtgccgggtgttcgcctacgccgacacgcagcgctacaggctggggcccaactacctgatgctgcccgtcaacgcgccgcgctgcgcgcaccacaacaaccactacgacggcgccatgaacttcatgcaccgcgacgaggaggtggactactacccgtccaggcacgcgccgctgcggcaggcggcgccgcccacgccactgccgcccaggccggtcgcggggaggagggagaaggcaaccatacgcaagcccaacgacttcaagcagccaggggagaggtaccgctcctgggacgccgaccgacaggaccgattcgtgaagcgattcgccgactcgctcggacacccaaaggtcagccaggagctcaggtccatctggatagacctcctcgccaagtgcgacgcgtcgctggggatgaagattgccacccggctcaacatgaagccaaacatgtgatgcatcatgcttgtgctgaataataatgaagacgcatgcatgtcgtcgccaggaacaaagatcgacaaataatacaagaccagcacgcatgggcatactctatatatacgtatagcccgtgcccgtgcccgcctttgtaccaatacaagccaaaccaagtggatgtgtattattattattatt

SEQ ID NO: 17353 - DNA, 1726 bp, Zea mays
  Clone ID: LIB3069-015-A3_FLI
gtcaaggccaagatccaggacaaggagggcatccctccagaccagcagcggctcatttttgccggcaagcagctcgaggacgggcgcacgctggccgactacaacattcagaaggagagcaccctccacttggtgctgcgtctcaggggcggcatgcagatcttcgtgaagactctgaccggcaagactatcacccttgaggtcgagtcttctgataccattgataatgtcaaggccaagatccaggacaaggagggcatccctccggaccagcagcggctcattttgccggcaagcagctggaggatggtcgcaccttggctgactacaacattcagaaggagagcaccctccacttggtgctgcgcctcagggggtggctatgcagatttttgtgaagaccacttgactggcaagaccatcacctttgaggtggagtcgtctgacaccattgataatgtcaaggccaagatccaggacaaggagggcatccctccagaccagcagcggctcatttttgccggcaagcagctcgaggacgggcgcacgctggccgactacaacattcagaaggagagcaccctccacttggtgctgcgtctcaggggcggcatgcagatcttcgtgaagactctgaccggcaagactatcacccttgaggtcgagtcttctgataccattgataatgtcaaggccaagatccaggacaaggagggcatccctccggaccagcagcggctcatttttgccggcaagcagctcgaggacgggcgcacgctggccgactacaacattcagaaggagagcaccctccacttggtgctgcgtctcaggggtggcatgcagatcttcgtgaagacacttactggcaagacgatcacccttgaggtggagtcctcagacaccattgacaacgtcaaggccaagatccaggacaaggagggcattccaccggaccagcagcggctgatcttcgccggcaagcagctggaggatggtcgcaccttggctgactacaacatccagaaggagagcaccctccacctggtgctccgcctcaggggtggtatgcagatttttgtgaagacattgactggcaagaccatcaccttggaggtggagtcgtctgacacaatcgataatgtcaaagccaagatccaggacaaggagggcattccaccggaccagcagcgcctgatctttgctggcaagcagctggaggatggccgtaccctcgccgactacaacatccagaaggagagcaccctccacctggtgctccgcttgcgaggtggtatgcagatctttgtgaagaccttgactggcaagaccataaccctggaggttgagagctccgacaccatcgacaacgtgaaggcaaagatccaggacaaagagggcatccccccagaccagcagcgtctgatcttcgctggcaagcagctggaggatggtcgcaccctagcagactacaacatccagaaggagagcactctccacctggtgctccgcctccgtggtggtcagtaagccatggttcatttaagctgctgctgtacctgggtatctgcgtcgtcgtcgtctaataaacatctgtggtttgtgtgtcatgaatcgtggttgtggcttcgttggtttaatggacctgttgtgtcctctgtgttgtacccaaaactcttctgcagcagtatggcttgaatccttgtgaagtttgatgtttgaactt

SEQ ID NO: 17354 - DNA, 1643 bp, Zea mays
  Clone ID: LIB3069-015-A8_FLI
cacggtccctgcctatttcaacgactcgcagaggcaggccacaaaggatgctggggtgattgctggcctcaatgtgctgcgtatcatcaatgagccaaccgctgctgctattgcctatggtcttgacaagaaggcaaccagtgtcggtgagaagaatgtcctcatttttgaccttggaggtggtaccttcgatgtctccctccttacaattgaggaaggtatctttgaagtcaaggccacagctggcgacacccatcttggtggtgaggactttgacaacaggatggttaaccactttgtccaggagttcaagagaaagaacaagaaggatatcactggcaacccgagggctctccggcggctgaggacctcttgtgagagggccaagagaactctgtcttccactgcccagaccaccattgagattgactcgctgtacgagggcattgacttctactccaccatcacccgtgccaggtttgaggagctcaacatggacctgttcaggaagtgcatggagcctgttgagaaatgcctgagggatgccaagatggacaagagcagcgtccatgatgttgtccttgttggtggctccactaggatccccagggtgcagcagctgctccaggacttcttcaacggcaaggagctgtgcaagaacatcaatcctgatgaggccgttgcctatggtgctgctgtccaggccgctatcctcagtggtgagggcaacgagaaggtgcaggacctgcttctgctggacgtcactcctctctctctgggtctggagactgccggaggagtgatgaccgtccttatcccgaggaacaccaccatccccaccaagaaggagcaggtgttctccacctactcggacaaccagcctggtgtgttgatccaggtgtacgagggtgagaggacccggacccgcgacaacaacctgcttgggaagttcgagctctccggcatcccaccggctcctcgtggtgtcccccagatcacggtctgcttcgacatcgacgccaacggcatcctgaacgtgtctgccgaggacaagacgacggggcagaagaacaagatcacaatcaccaacgacaagggccgtctgtccaaggaggagatcgagaagatggtgcaggacgcggagaagtacaagtcggaggacgaggagcacaagaagaaggtggagtccaagaactcgctggagaactacgcctacaacatgcgcaacacgatcaaggacgagaagatcgcgtccaagctggctgccgacgacaagaagaagatcgaggacgccatcgacgcggccatcagctggctggacgccaaccagctcgccgaggcggacgagttcgatgacaagatgaaggagctggagagcctttgcaaccccatcatcgccaagatgtaccagggcgcgggtgccgacatgggtggcgccggcggcatggacgaggacgctccggctggaagcggtggccctggccccaagatcgaggaggtggactaagcggattgtgtcagtctcgtgtgtctgctgcagtggctggctggcccagtcgctgctcgatttatcgtcgtcgtcgcggtgtatccgcgttagaaccttttgttggtgaacaatattatcgtggcacgcgttttat

SEQ ID NO: 17355 - DNA, 1241 bp, Zea mays
  Clone ID: LIB3069-015-B7_FLI
tcagaggctctaagagttagggatgagatggttggctttggatgtctgccagatgtggtaacatacaataccctgttgaatgggctctgtaagcagcacaggttgcttgacgcggagaaacttttgaatgagatggaggagagaggggttacaccagatttatgcactttcacaactttgattcatgggtactgtaggcaaggtaacttcgagaatgcattgcaattgtttgacacactgttgcgccagcgtttgaggccagatgtcgtgacatacaatagtttgattgatgggatgtgcagaaaaggtgatctggccaaagctaatgagctatgggatgatatgcatgctcgagaaatcttacccaatcacattacctacagtatcctaatagacagccactgtgagaagggacaagttgaggatgcattcggttttctggatgaaatggtcaagaagggaaatttgcctaatatcaggacctataattccatcatcaagggttattgccgatcaggtaatgtaaaaaaggggcagcagtttttgcaaaagatgaggcaagataacgtattcccagatctgattactttcaacaccctgatccatggttatataaaagaagaaaacatgcatggagctttcaatgtgtttaatataatggagaaggaaatggtacggccagatgctgtcacgtataatatgatcataaatgggttttctgaacaaggcaatatgcaagatgctggtcgtgttttcaagggaatgggtgacagtggaattgaaccggatagatatacatacatgtcattgataaatggtcatgttacagctggcaactcgaagcaggcgttccaacttcatgacgagatgatccatagagggtttgctcccgatgacaaattttgaggcttgtcagttctgacctattggacataagcaagagaaatgcatgtgttgtgtgtttgacagtgtctttgaaaatcacacctccagaaatttgtgatttcgaagcgtcgaaggtccagaaaaaaggggagattgttaaaattccattacttgggagtgaccgcacgaactatggtaatgttggcatgttgctccaactatgttctaaagattccatggcgtggctaagcaaaactgctgcacaaaaaggaaacagaatttgactggacgtctgaatatcttcccttcagtctgagctccagaccagagtgcaaaaagaaacattgaaccaatgg

SEQ ID NO: 17356 - DNA, 1030 bp, Zea mays
  Clone ID: LIB3069-015-B8_FLI
atctcaaacctgtgcgtctgcccctttccagctttcctctcaaacggagagatgtactcggatcagatctccaccgggcgcaagcgctccatccatgaccgccttgacggcgacctccctgccggcacgggcgccggcggccgtgtccgtcacacggtgtccaagaggcaacgacagatagatgaaaaatggaagcatgatctgtatcgggaagatgatgaaccagcttcaaaatcaacagatccgaaggatttgcgattgaagcttcagaggcgaagttttcaacaagattttaccagcacaagaagttctggtgtgcgtgatctacgtgagaagctatctggtataatgaacccacagccatcaaatgctgacccaccaaagccaaagccaaagccagtatcggaggttgttaacatctcaaggcgtcaaattgctgatgaaatgcatgcacgccaaaataagaaaccaccaaagcagacttcatcgaagaagacatctcagccaaaggctgaaagtccactcgacagtttcctgagttcccttgggcttgagaagtactcaattaccttccaggcagaagaggttgacatggcagccctaaggcatatgacggacagtgatctaaaagctttgggcattccaatgggtcctcggaagaagattatccttgccttggaatcgagagcataagggaatgacaagggagtacagtgtaggaaggtgggggatatgctaggcatgctcgtgtgcaagttcgacaaaaactttgtatccacatatcttggaaagggtacaacaacaatgattttatgggtctcttgtaacgcataccctgtcctgttgagcatgttcagcgaagtttaggattgctagaaggcaggccacggcgtctattgctgtaacttgtttccgtgttaattaagtggtgcggtatacatgttgaggcagttgggttcgtcttggaatgctatatcctataactacttgggtgtttggttcgaagaatgagatattacatcatcttctc

SEQ ID NO: 17357 - DNA, 1372 bp, Zea mays
  Clone ID: LIB3069-015-D12_FLI
ggaatgctacagtgtcatccttacccacatgaatatgcagacccttctaggcagtgtgctcattgtgctttcttcatgggcttgtcaaggaaagaaggtgtgaaaatacaggaaggacaacagttcgatattcgaggaacggtggatgagttcaggcatgaaatcaacatgtatatgttctggaagcctgggatggagttagctgtttctcatgttcgtaggaagcaggtcccagcttatgtgtttccagagggttataaaagacctcgcccttcaagacatgtgaaccatcagtctgataaaaatgacactgaagatggcacagcgaccaggtctccagacagtcaactgaagagaaagcatgattctgttggaactgatgatatcaggtatgcaaagaggtcatcgaccagcccagttcatccgaaaaattcacctcaatctggaagcactggcgatgagactagatgtaacaaccaaataaaaagggctcctagcgatgcaagtggtggcagtccggcttcacctcaggcatcagagagaagcccagatactattctgtctgcccctaggtgcacgacaacaggagcagtgtgttctggtgatgcaattagtaagcatagtagtgttcctcttgttgagaactgcaccactccgactgtagcagtgtgcacaactttgaagcgcgtagctgagaaagttgtttcagagctagttggaagtgaaaggctggggagcaacaacagtgcggaattgttggagagtatggaaaaggaggatgtccttgctgaaaatgttcgttttggcgggaatggagttgcgcaaggtggccttccagaagagttagaggtatgaacaagtgtacattgtggaagtcgtcactgagggttagtggcatcaaccacacaagattggggaaaaatggtgtagagatggataagttctacccccttgctggagggaatggtaagtagctcaactcacaagtttccttctggacacagattcgcaattacgggggtttctatgatgatggatgatgggagattatcggatatcatgtcttgcacaacggcatggcaaaaaaaaaacgacgaagaagattttgtggaaggccatggtcgaatgtcatgtcttgctggtacactctagatgagcatgaaccttaagttttcgttttttttaacttgttgagcagctgactcttgtgtatgaactgagctgcagcgggcttccctgagttgacttgtttgggtctgagatgcttctgccatgttctaggtctagaatagaactagatgcggtggtgtgttctctaccctaagtccccttttgtgccctttccttctgtaatataagatctttgactgtt

SEQ ID NO: 17358 - DNA, 1158 bp, Zea mays
  Clone ID: LIB3069-015-E8_FLI
aagcaagcagcctaaaaaaaccgtatcgtctcgcctgttcagtttccttctcttcccgcagcccggtttgccgaccaggttccaccgttccagagtagccaagcgaatcccgtgtctggttcgcgcgatggcggaggagcagtccaacccccagcaccagcaagcggaggagagggaggttatggtggagcagcagcagccgaggagggccccgaagctgaggtacctggacttcgtccaggtggcggctgcccaggccgcggtgtgcctcgctgggctctacggcctcgccaaggaccacgccggcccgctccgccccagcgttgacgccgtcgagtctgccgtcaagggcgtcgttagccccgtctacgaccgcttcggcggcctgccgctcgacgtcctcgccttcgtcgaccgcaaggtggacgacacggtgcacgaggtggacaagcacctcccgggcgcgctgaaggcggcgtcggcgcatgtctacgcggtggttcggggcgtgccggaggtggcgcgcgagctggcggccgaggcgcagcggtcgggcgtgaggggcgcagcccgtgcggcgctcgcgatgacggagccggtggcgcgggacgtgtacggccgcgtggagcccgtggccaaggacctctacgtgcggtacgagcccgcggcggagcacctggccgtctccgcctggcgctcgctgaacggcctgccggtgttcccgcacgtcgcggagatcgtcgtgcccaccgccgcgcactgggccgacaagtacaacagggcggtcgcagccgccgcggagcacggctacgcgggggccaagtacctccccgccatccccaccgaacgcatcgccaaggtgttttcgtcggcgccagaggccgagccgctggcagagggccagtagtgtgtgtgtgtgtgcgcgcgcgcgcgagctcgtctttgccggtggtgactctggatttggatcaccttccgaactgaactgaaaataaggaagcgtgaatccgggggccagttaaagatggtggtatggtatggtagcggcgttgtactagatgcgtgatgggacgatggttacggaccatgatgatgacgctgtgttccatttagctctctgctgcgtgcttttgtataaaagaagtggttcgatgtcgc

SEQ ID NO: 17359 - DNA, 878 bp, Zea mays
  Clone ID: LIB3069-015-G7_FLI
gcagcacgggcgctgatgtcgatgggggaggcgctgcgggcggctgccgctgacgcggtggtgacattcctgtgggtgctgtgcgtctccacgctgggggcctcgacgacggcggtgacgtcctacctgaggctgcagggcgtccacttcgcgctcctggtcaccgtctccctcctctccgtcctcctcttcgtcttcaatatcctttgcgacgcactcggcggcgctagcttcaaccccaccggcgtcgccgccttctacgccgccggagtcaccagcccctctctcttctccatcgcgctccgattaccggcacaggctgccggcgctgtgggcggtgctcttgccatctcggagctgatgccggcgcagtacaggcacatgcttggggggccctcgctcaaggtggatccccacacaggcgccggcgccgaattagtgcttacttttgtcatcaccctggccgtgctcttgatcatagtcaaggggccccgcaaccccatcatcaagacatggatgatctccatctgcactctgtgcctcgtcctctctggtgcagcatacaccggcccttccatgaacccagccaatgcatttggctgggcatatgttaacaaccgccataatacgtgggagcagttctatgtgtactggatatgtcccttcattggtgccattcttgctgcgtggatcttcagggctatgttcctaacaccgccacctaagcccaaggccaagaaagcatgatgaacatcatttggtcatggatgctggatttgataagtcaacatgaattgttagaataagaggaacgccaataagttcctggttcccagcatgttgaattaaattgattaatgtgatactctattactcgt

SEQ ID NO: 17360 - DNA, 553 bp, Zea mays
  Clone ID: LIB3069-016-B1_FLI
tttggagaacggctatttaactgacgatggtgttttctgttctggtttaagcaactcgtcaagcggcaagttctttggtggcaatcaactaagccacagcacgccaaagaaaccccaagagaagttcgatgctggtgttcctgagacgtcacgctcttattctgctgcagtccctgctggtacaagtagcaagcggcatgctactaggaagtggaagcgctcgctcagtgaccccttccgttcacggccgcacagtgctccggaattggtgtcaggatgcaagggatcaccgcccgtgcctgtggctccagaggagaggtagccgatgagctacagaagacgtatcgtgttatgttttttagcataaattgcaaatgaattatgaatattgttatctgaggcatcatggatgtgaaaaaagtactatgcaactaactttttaaggtgttgattttgtaagaggatgtttggtgaaaggaccaagatgtccataggaattgaattaggctaatgtaattttttaataattaaattatatcaaatagttcactcg

SEQ ID NO: 17361 - DNA, 1525 bp, Zea mays
  Clone ID: LIB3069-016-B2_FLI
ctcaacttcgacgccgagaggacgacgccggtcaaggagcggccggccttgtcgactccggtcaaggaccgcgctggtggcgcgacgcctgccagggagcgcggggctgcggcgacgcctggtagggagcggaccgccgcggcgtcgccggcgctgagctctgcgtcgttgaggaagagcagcagcgtgctgcccaggctgaccaggagcaagagctttgtcgcggacagggatcagcagcatcccaggatccccaagagcccattccccactgagaagagctcggtgagctgcacagcctcgagggcgacgaggagggtggccaaggaggaagagccctcctcgcctccttctgatgatgagctcggaagctcggccacatccaccaagaagcgatcggcgacagctgctcgcgtgccagtgccggggaagctcagtctactcgggaaggacgcaatggagcagagagagcaggcgcagaaggttgccctggaggcactgcgcaacgcatcagccaccgacaacgtggctaggatctacaagttgttctcggaagtgagcaagacggcgaggccggaagcgccggccacctgttttgacagcttcctcagctttcaccaggaggccgtgcaggccgtcaccgacatcgaggcgatccaggcggccacctcgatggccgcggccgtggcgagtgacgagcagcagctcgaagatgcgccgccggtcctgcaggagatagcacagaacaggacggtggtgcgtcggagaggcatcggcttggggagcgtgtccaaatcagtgtcgttcgcgcccggcacgttggacccgaagcaggacgatggaggcggcaaggccatccggagctcgagtgccagcaggaagtgcctcgccacggacaagatcggcgaagacggtggcgacgagaagagatcatcttcttctggtccttcctctgccaccaccaccactgcgcactctgctctaggctcctcgctgaagctggctaagaagatacaggccgaagcagggagctggttcatggacttcttggaggccgcgctcgagaccgggctgaagaagagcaaggcgtcttccatgggggacgggcggaagcaaagcagctgctgttgcccgcagtcgttgatgctgcgggtgatcaactgggtggagatggaacagagcggcggcgacagcagcggcaggaagactgcccacccaagagctgcggccgttgcgcggaagctcagaatcaaggccaaaaacccctcctgatgcgctgctgccctctgattcttgtgagaagctagtttgtctctgattcttgtgacaaaggtacccagatagaatccgtagaataagaaagtgattgcctccattgttcttgtcacggcatagcagattgtttcaagtgttcttgaagtaggatgacctgttcccttatcactaatcttaaacagcactacagcagcagaacaatggaggtgttgtaccgtagttacgatattcagtgtttgaattcgctgcc

SEQ ID NO: 17362 - DNA, 859 bp, Zea mays
  Clone ID: LIB3069-016-E10_FLI
gcaaatgcgtggatttgagacaatgtacaatggtcacactggaagaaaactgactgcgatgattttcctgggccccacatattaccaaagactcaagcacatggtggatgacaagatacattcgagaggacgtggtcctgtgcagatactcacccggcaaccagcagaggggcggtctcgtgatggaggtctccgctttggagaaatggaaagggattgtatgatcgcacatggagcagctttcttcctgaaggaaaggctgtttgaccagagtgacgcatacagagtccatgtatgcgagaaatgtggtctcatcgcaattgctaacctaaagaaaaactcgttcgaatgcaggggctgcaagaacaagactgacattgtccaagtacacataccctatgcttgtaagcttctgtttcaggagcttatggcaatggccattgctcccagaatgcttacccatgatatgaagacagggaaggatcagaagaagcgctgaacgtgtatcacgtgagatgtaaccagaactcatgccccgttgctatattcctggatcctggttcacacaatagtaccctgttgaggaactttgtggtcacttcttttctgatttggacttcggttcttcgcgatcgatggagggctgttactatctcttgatggattatcatcctatctgtgctcgtgttgcctgaagatcagtgctagcagatcgtcgagttaattttgtacattaggaatgtgttgtaatgtattaatctgtgcgagtagaaagatttttgactaaaggtgtcaatttggaggtgtaactgtacgttaatactaaacgcgatgccattgcaatttcagttttattttg

SEQ ID NO: 17363 - DNA, 1510 bp, Zea mays
  Clone ID: LIB3069-016-E11_FLI
gggcgccgccgcagccggtgcctgctccttcccgatccccgaggcaaagctgcgactccgcaaccgccgccatggcgttcgagaagatcaaggtctccaacccaatcgtcgagatggacggtgatgagatgaccagggtattctggcagtctatcaaggacaagcttatcctcccatttctggacctggacatcaagtactatgatttggggatactgcaccgtgaagcaactgatgacaaggtcacagtggaggctgcagaggctactctcaagtacaacgtggctattaagtgtgcgaccattactccagatgaaactcgggttaaggagttcaatctgaaacacatgtggaagagcccaaatggcacaattaggaacattataaatggcactgtgttcagagagcctattatatgcaaaaacgttccaagacttgttccaggatggactaagcccatctgcattggaaggcatgccttcggtgatcaataccgagctaccgatgcagttctgaaggggcctgggaagctgaagctagtttttgagggaaaagaagaacagattgatctggaggtattcaacttcactggtgctggaggagttgccttgtctatgtacaacaccgacgagtcaatccgagcttttgctgaggcttctatgacaactgcttatgagaagaaatggccactctaccttagcaccaaaaacacaatcctgaaaaaatatgatggcaggtttaaggacattttccaggaggtctatgaagctgactggaagtccaaatttgaggctgctggaatatggtatgagcatcgtcttattgatgacatggttgcgtacgcgcttaagagcgaaggaggctatgtgtgggcttgcaagaactacgatggagatgtgcagagtgatttcttagctcaaggttttggatctttgggtttgatgacatcagtgttggtgtgccctgatggaaaaaccatcgaagctgaagctgcccatggcacggttacccgtcatttccgtgtccaccagaaaggaggcgaaaccagcacgaacagcattgcttcgatctttgcatggacaagaggacttgcccacagggcaaagctcgacgacaacgctagactactcgacttcgctctcaaactcgaggctgcttgcgttgagaccgtggagtccgggaagatgactaaagatctggcgattcttgtccatggatcttccagcgtcacgagaagccattacctgaacaccgaggagttcatcgacgcagtcgctactgagctccgatcaagactgggagccaactgagcctacaagaaactttgcatggcgactttgaatgcttcgtcaccgtcaccgatctgctagtcgtcttttctgttatgaagaagtgaatgtgcgtcaccgcagtttcgatgcaagctaattatagatgtggtgtcacgtgagcgctcaaaataaaggatacacatgattaaattgtttttatgtcagtactaagctcagtc

SEQ ID NO: 17364 - DNA, 868 bp, Zea mays
  Clone ID: LIB3069-016-F3_FLI
gttcgccgccgccgcctgctctctgctgccgtcgccatggggagaaggcctgcgagatgctatcgccagatcaagaacaagccataccccaagtccaggtactgccgtggtgtccctgaccccaagatcaggatctacgatgttggcatgaagagaaagggtgttgatgagttcccctactgtgtgcaccttgtctcttgggagaaggagaatgtctccagtgaggctcttgaggctgcccgtattgcctgcaacaagtacatgaccaagtctgcaggaaaggatgccttccaccttcgggtccgggttcaccccttccatgtccttcgtatcaacaagatgctttcgtgtgctggggctgataggctccagactggaatgaggggtgcctttggcaagcctcagggcacctgtgctagggtggacattggtcaggtcctcctttctgttcgatgcaaggacaacaatgctgcacatgccagtgaagctctgcgtcgcgccaagttcaagttccctggccgccaaaagattattgagagcagaaagtggggcttcaccaagttcagccgtgccgactacctgaagtacaagagtgagggtagaattgttcctgatggtgtcaacgcaaagctgctcggtaaccatggaagacttgagaagcgtgctcctgggaaggctttcctcgaggccgttgcttaagtccaatctacagttggaatgcgaatccagacgttttggtttagcctatcttattttgctttgtgcaacatgaattttaagtgtatggggtattacagtgccttgtgtgaacctgcttatctcgtgctgaacatcgttatgcatggaagtacttatcttttgttctgct

SEQ ID NO: 17365 - DNA, 1140 bp, Zea mays
  Clone ID: LIB3069-017-B1_FLI
actaatgcattgttctgcgttcgctgaccgtaaatgcccatgtcaaattgctggtgacagtacgctagcactcttcttccccccccccccttaattatttggaggattgtttgcacgatactagctggagaaagttacgatgcacgttgcggtgattcctgccatcttgaattcggtttcccttgtgtcaatttcgctttcgcctgatctccaactgttccattaatgctctttggggtgacggatcatatgtaggggtgcgatctcatatgaacctggagcagatttgtgaagcatgttggagttggacgatggtttgctgatggacgagtaaccagtgcttggacaagatccagagcacgacggccaggttcaacaccctgatgcactcgccccccgggcggcggtggcatctgcgcgccgttcgcgcaccgcgccgtgtcggcgatgtaccgcgggctgaggcggtggctcgccggcgagatcatggctacgacgagcagggccagctgctggggcgagtcgtcgccgtcggtgacggtggctgcgggcagcgacgtggagcggagatgggagtcagccttcatacagaagcactggtcgacgcagcagctgcggcacaccgagcagcagtgctggcggccccagcgcggcctgccagcgaagtccgttgccgtgctcaaagcatgaatgttcaagaacttcctgcacccgtaagtctgtcccgcgacgttgctgtgcaaatcgtctatcgacattgttggccatgatcagaatcgcgctctgctttgctctgctcaggtatcccaaggaccatgagaaggacgtgctggcggcaaggagcagcctcaccaggaaccaagcacagatcgaaatcccaccagactcgtttcaaattcgattcttttttggcgagatggggtaatgatggattcgagtggttttgcatttgtaccaggtttcaaattggttcataaatgcgagggttcgtctgtggaagccgttgatcgaggagatgtaccaggaccttaagaggagctcgggtgcaggaggagggcacggtccggcgatggagccgcaacagcagcacttgagcaagcgtcgaatttgcgagctggaagatggtggccagtgaaccat

SEQ ID NO: 17366 - DNA, 800 bp, Zea mays
  Clone ID: LIB3069-017-B3_FLI
gtcgcagcccgtgttccagcgcatcgcgctctacagggctggcattgtccccgtctcctaccgcagggtcgcgtgcaacaagaagggcggcatccggttcaccatcaacggccactcctacttcaacctggtgctggtgaccaacgtgggcggcgccggcgacgtgcacgcggtggccgtgaagggcgaccgttccgcggggtggcaggccctgtcgcgcaactggggccagaactggcagagcaacacgctcctggacgggcaggccctctccttccgcgtcaccaccagcgacggccgctccgtggtctccagcaacgctgccccgcgcggctggggcttcggccagaccttcagcggggcccagttcaactgaacaccctccatggttcccgcagcgtcgtctcgtccgtcgtcggcgcggtgccacaagtagtagttttccgttggtcgtggtagagtcgtccaccctcactcggagcttgccgagaggcgccatggttttatgaatggtgcatctcgctttggatctggggaattaccagtagtttaggcctagtattagcgcgggttttgtcgtgctggtgttagcctggttggtgtggtagcgttttgcttggttgttttggaattggaagtggtggtaaggctggcttgcagattaacggaggtaggccgccttttatcacccgccaattaagcatttgtggggtctcatggtgatggcctctttcagatgagatgttttgcgtgttacccaagtgtgttggttgtaatgagccctattaagtttgtgctgg

SEQ ID NO: 17367 - DNA, 797 bp, Zea mays
  Clone ID: LIB3069-017-C10_FLI
tgagagtgctgttgctgaaaagtcacatgaagatcacgcagagcatgatcatgaacaccatgagcatgagaatgaacacgaccatgaccatcatcaccatcatgatcatgatcatgatcatcatgcacatgaccacactcatgatcctggtgtttcttctgtgagcattgtttgcgaaggggagatggatcttgaaaaggctgacatgtggttggggaacctactgctggaacacagcgaggatatatacaggatgaaaggtctgctttctgtcagtggaatgccgcagcgatttgtctttcagggagtccatgacattttccagggatctcctgagagaatgtgggagccaaatgagccgcgcatcaacaagattgtcttcatcggcaggaacctcaataaagaagagctggataaggggttcaaggattgcctactgaagaaatagagtgatttcagaatagtcgggatatagatctccagttttggccttcttcgaatgtagtcagattcacatcaattcatatctgttggagtggattgaagacagtgaagcttgaactaaattctaccccaattcatccgacatatgtagattaaggtgaatccgacaacatctaaacaaggccttcatgattttgagttttgtggccgcagaacttatcctcgatatctgacatgacatgtaacgagagatgtatcgaatcgatagcattattgcaaccttgcatcctcacgaaatagtctatcatagttttattgcacggtgttgcaatgtaaccaatagagattattat

SEQ ID NO: 17368 - DNA, 1915 bp, Zea mays
  Clone ID: LIB3069-017-C3_FLI
gggagacagtgcaagcgagcgaggaagctagcgagattgcgagaaggtcaatccgccaagagaagagacccacggcacagacctctctcccctgtctctttctttctctctcctcgaccctcccgacgcggaaaaaaaacagggaggagaggagggagaaagggaagaggaggccgaaatctcctccccctttccaaatcctggctcaataatctctccatcaggggatcctaaggctgatcactgatcaggtcggaggactcggcgggcgcaggcatgaacgagaaggcgtccgtctccaaggagctcaacgccaagcacaagaagatattggaaggtcttcttcggcttcctgagaatagagaatgtgcagactgcaagtcaaagggtcctcgatgggcaagtgttaatctcgggatctttatatgtatgacatgttctggaattcatagaagcctgggggtgcacatatctaaggtaagatctgctaccctggatacatggctgccagagcaagttgcatttatccaatcaatgggaaacgaaaaagcaaatagccattgggaagcagagctgcctcctaactatgatagggttgggatagagaatttcatccgtgcaaaatatgaggacaagagatgggtaccgaggaatggaacattgcgaccttcctccggtgttcgagatgagaagagccaagagtctccagctagtgctaataggagtggacatcatagatcttcatttgagcaaaaccgtgcttcaccagctcttccgagcaaagttgcacatgtagcttcaaggataccctctcaggcatcacctcagcccccaaaggtagaaccaccagttcctaaggtggtttcacctcctcagccacaaaaatctcctgccaaagttgaggcaacaccccctaaagttgagaagccatcagttgcgccgcctcctaaagttgattatgctactgatctctttaacatgttatcaatggatggaacaacagagaaagagtcagagtcatctccaaacgatgataatgcctgggatggcttccagtctgcacaaccagtacctagctcggaggaaaaagattctgccaaaccagcagaaagcatgacccagtctacatctggaatagaagacttatttaaagattcgccagttgtgtcattatcctcagctccagctgtttcccaagtaaatgcaaagaatgatatcatgagtttgtttgagaagtccaacatggcatcgccattcgctgtccaacagcagcagctggcgtttatgtctcagcagcaagctcttctaatggctgctcttaaagctggaaattcaccacaaatagttccagggaatgccaatcaactaaacactaacgtttctagtccccctcttggaaccttgcctttccaaaactggacaaatcttggctatcaaaatcctgggttgactctagcagcagcacagaatggtgccaccaaggttgcgaacaacaatcaagacctctcttctggtacctttggttttggcacacctgggatgcacaacattactccagctgtcccagcaaatggtgccacggcagcaggtgctagcaacaacggcactgcatcaactgcctcttccactctcccctcacaatctggcaaagattacgatttttcctcgttaactcaaggatttttcaccaagcgatgagtgcctagtgggcttggaagccaaacggatcaccgggggagcttgcacatgctttatttcgaggcagattttattctggtggatatatatatatatatagttgtcacatgaccttgtagctgtcagacaataagagtggaaatatgcggctaaatagctcatgttgtttgtacaagtgaagaattccttgccgttttatgtcaacggttttgactcg

SEQ ID NO: 17369 - DNA, 786 bp, Zea mays
  Clone ID: LIB3069-017-C5_FLI
gcggccgcggctgctgccgcccaggtggcgggaggaggtggaggcggcgagggagatgccgccgctgcggcgcgaggcggaggcggaacggaggacggcatgtacacggagctgtggaacctctgcgccggcccgctggtcacggtgcccagggtcggggacaaggtgtactacttcccgcagggccatatcgagcaggtggaggcgtcgaccaaccaggtggctgagcagcacatgcaattttacgatctcccgtggaagatcctgtgtgaggtcatgaacgttgaattgaaggctgagccagacaatgatgaggtttatgcccagctcactctgctacctgaatcaaagccagaggagaatggctctagtgaggagatgcctgcttcacctcctgctgcacttgcaaggccacgcgtgcactccttctgcaagacattgacagcctctgataccagcactcatggtggattctcggtgctgcggcgccatgcagatgagtgtcttccgccactggtagcttgctggattcttgacttgatattgccagtgcatcagttgtaggtttgctatttgttgctttactggtagtggtaatctttgctttggctttctggtcaggatatgacccgtcaacctccaacacaagagcttgtagccaaggacctgcatggtgtggaatggcgctttcgccacatattcagaggtcaaccacgaaggcatcttttgcagagtggctggagtgtttttgttagtgccaaacgtcttgttgctggcgatgccttc

SEQ ID NO: 17370 - DNA, 1086 bp, Zea mays
  Clone ID: LIB3069-017-F12_FLI
cccacaccccccgagctcagcttacctccactccagctccaatcacagtcgtgaccagagcgagagctagctagagggccgtgaaaatgccgatcaataggatcgccctggggagccaccaggaggtgtaccacccgggcgccctcaaggcggcgttcgctgagttcatctccaccctcatcttcgtcttcgccggccagggctccggcatggccttcagcaagctgaccggcggcggcccgacgaccccggcgggcctgatcgcggcggcggtggcgcacgcgttcgcgctgttcgtggcggtgtcggtgggcgcgaacatctccggcgggcacgtgaacccggccgtgaccttcggcgccttcgtgggcggcaacatcaccctgttccgggggctcctgtactgggtggcgcagctgctggggtccaccgtggcgtgcttcctgctccgcttctcgacgggcgggcaggccacgggcaccttcgggctgacgggcgtgtcggtgtgggaggcgctggtgctggagatcgtgatgaccttcgggctggtgtacacggtgtacgccacggcggtggacccgaagaagggcagcctgggcaccatcgcccccattgccatcggcttcatcgtgggggccaacatcctggtgggcggcgccttcgacggcgcgtccatgaaccccgccgtgtccttcggccccgccctcgtcagctgggagtggggctaccagtgggtgtactgggtcgggcccctcatcggcggcggcctcgccggcgtcatctacgagctgctcttcatctcccacacccacgagcagctcccctccaccgactactaaaagccgaagccgaccgacccaggggtgcgcagctagcatccagctctctctccccgctcgccgtcgatcgtttagtttctctcgtgcacgtgcatgcatcgtcgactgtctcaggccgccgctgcgccggcgccgctcgcatcgtttgcttttccttggaccagcagtcgtcgccgtcaggctgagctgcttgtaaccgtgaatccggacccgtttgcttctgtaagatttgtgcatttgcctgagt

SEQ ID NO: 17371 - DNA, 841 bp, Zea mays
  Clone ID: LIB3069-017-F6_FLI
ggttctccatagagctgcatggcaatgtcattggagcagtggaaacttgtttagagtcgtttcatcggtatcacaagtatctaaatttttcgcatcctactatcagctccaagattgatccacatacttgtggatgggcttttggaatgaacatttttgacttgatagcttggaggaaggcaaacgccacatcattgtatcattattggcaagagcaaaattctgacctattgctctggagaacaggaactcttcctgcaggccttttgacattttatggcctgatggagcccctagaccgcagatggcatgtcttgggtctcgggtatgatgtagacatagatgatcgtctgattgagagtgctgctgttgtgcactataatggaaacatgaaaccctggctgaagctggctattcgccgttacaagtatatatgggaacggtatgtgaatatctcacacccgtatgttagagagtgtatgttgcattagaaagtctgcaaatctctgtatgttcttgcatggcactgaagctgcatgcttcagtttcttcacatgaggctgcttttgagcaccttatgtgccggaaagttccagaggtagaatatatactcaagggacagcatcaaagaagtcaactgttaagttttctttttgggttgggagaagattcattttgggatgaaaataattcctttgcagagtttacatacaatttggactggaaaatttagcagtctaaccagatacatctggatagatactgtaaaagagatacagttggatcaatggacattcttttttttagatttaggaaatgcaaattgtgagctcaactgtgc

SEQ ID NO: 17372 - DNA, 2079 bp, Zea mays
  Clone ID: LIB3069-017-G9_FLI
gaattcgctctccgcgaggtcggcacgggacgccaccttaccgttgaggagttggcccgctcacccatcgttcaggagcttatgcgccgccaagctttcagtactcccaactccaactgcacctcaaattcccaaagcggcacctccacgccgatcgagagatcgagctcaggttccagcaacggtgtggggcgcgccaagcggcgtagcagctggctccgcagcatccgctgcgtagctggctccttcgcgtcccactcacgtgaccgccgcagcagcgacgagaaggacgcgtctccagagaaaggcgggcaccactccagctccacgacggatgacagccaggacagtgttccacgccatggcccggcccgtgtcaaggtgcggcagtatgggaagtcatataaggagctcagtggcctgtttatgacacaggagatacaggcacacagtggttccatatggagcatcaaatttagtcctgatggccgttaccttgcgactgctggggaggattgcgtaattcatgtttgggaggtgttggagtttgagagggcaaggaaggagaatgaggtgtgcaatccgcttgttgctatggtgtgcaatgagtcatcagagacgacggtgggatcagctgctccaagtgagagccattgggagaagaagctgagatcaaaggtactgcacggtgggggatcggtgagctcagacaggttgatggtgcctgagtatgtgtttgcactgtccgagaagcccgtgataacctttgcagggcattcagaggatgtgcttgatctcagctggtccaaatctcagtatttgctttcatcatcaatggataaaaccgtacggttgtggcacatgtcaagcacttattgtttgaaaaccttctcacacactgactatgtgacttgcatccagttcaatcctgttgatgatagatacttcattagtggttccctggatgagaaggttcgcatttggagtattccaaagcgtgaaatagttgattgggtcgaccttcatgaaatggttactgctgcctgctatactccagatggaaagggcgctctggttgggtcccacaagggcagctgccatctgtatgatacatctgatgacatgctttgctacaaaacacagatcgacctacaaaacaagagaaggaaatctagccagaagaaaataacaggatttcagtttgtcccaggggattcttcaatggtcataatcacatctgcagattcacggatcagagttcttgatggttttgagctagcgcataggtttaaaggattccgaaacacaagcagccaaatctcagcttgtttagctggaaatgggcggtatattatctcggcaagtgaggattcccatgtatatatctggagaaacaatgatggtccgaaaccaagtagaaagaagggcattgtttctgtcacagatagccatgaatacttccactgccagagtgtgacagttgctgttacctggccttttgccagcaccgcaatgacttgtttaatgaaccccgggaagcaagaagagcttgagcgtgggtctgagccgcaagatctgcaaaccaaacttgccaaggcacaggagatgccagatgttgagtaccggagcacaaatatcacgagtaacaactcgaatcataataatggtgaccggacatctccgacttggcctgaaaaacttaacacaccaccaaatcaaagtctcagggctactacctgccatgccaacgagggagatcaagctctgaatcggtcggcctggggcctagtgattgtcacagcaggccgtggaggtcaaatcagaacatttcaaaactttggttttcctgtaagagtatagcatgaatatgaatacctaagataatagtcactgccattcaggagtgtagtttgtgtatagataggagatagtgggtgagtttcacactattcagggattgggtctgattgttccttggcgtgcatgctagagatcagaatcttcatctgacatacactgtgtactgcgaaactttttttttttttgaacgaacggcacgagattgtgcacgtttctatt

SEQ ID NO: 17373 - DNA, 2420 bp, Zea mays
  Clone ID: LIB3069-017-H3_FLI
accgtggtggcgacgagctccgcctcctgcaccccctccgccttctggccccttccgctgaggcccgcgtcggcgcgttcctgccatagtcggcaaccaataggagcgtaaaactggagctagggattgaagctgttgcaggtacatgtcatatataaatggacatgggcaggcactcccgctgagggtgcttcttggcttcgtctgtagaggcttgctgatatttggcataggatattgttaatttgtgggtatgatgcatggattatttgagatctttgagcagataaagcaatcattatcatctcaaagggagggtattgatttcatggccgtgattccccctctcccagtcaaagccatccaagccgcaattacttcagggacagggtgttcactggggttagaaggattctgtttttattgcacgacacatgacaacatatccaagtagtccttgattgatttagcagcagggagtaagcgtcttgctaaaagtggctccacaggtgaacttagcgatcgtcttgctaaaagtggttgtacaggtgatcgcttgaaggaaactcaggttcaagaaggacacataagtatccgagaaaaaactcctcaaatcctggaatagcctcgatggttccagacggcgaacgaacggggtgaggaaaagaacccaccggcctgctgtccattgctcctagaagcatcgcgtcgtggatcggctttctccgtgctccacctcgtcggcctcatgccccgtagccccgactccccatctgccgcctccacctcatgggccgccgggtccaccctcgccgtccagcttggcgacatctttaccgtggtggcgacgagctccgcctcctgcaccccctccgcctcctggccccttccgctgaggcccgcgtcggcgcgttcctgccatagtcggcaaccaataggagcgtaaaactggagctagggattgaagctgttgcaggtacatgtcatatataaatggacatgggcaggcactcccgctgagggtgcttcttggcttcgtctgtagaggcttgctgatatttggcataggatattgttaatttgtgggtatgatgcatggattatttgagatctttgagcagataaagcaatcattatcatctcaaagggagggtattgatttcatggccgtgattccccctctcccagtcaaagccatccaagccgcaattacttcagggacagggtgttcactggggctagaaggattctgtttttattgcacgacacatgacaacatatccaagtagtccttgattgatttagcagcagggagtaagcgtcttgctaaaagtggctccacagcgatcgtcttgctaaaagtggttgtacaggtgatcgcttgaaggaaactcaggttcaagaaggacacatgagtatccgagaaaaaactcctcaaatcctggaatagcctcgatggttccagacggcgaacgaacggggtgaggaaaagaacccaccggcctgctgtccattgctcctagaagcatcgtgtcgtggatcggctttctccgtgctccacctcgtcggcctcatgccccgtagccccgactccccatctgccgcctccacctcatgggccgccgggtccaccctcgccgtccagcttggcgacatctttaccgtggtggcgacgagctccgcctcctgcaccccctccgcctcctcgccccttccgctgaggcccgcgtcggcgcgttcctgccatagtcggcaaccaataggagcgtaaaactggagctagggattgaagctgttgtaggtacatgtcatatataaatggacatgggcaggcactcccgctgagggtgcttcttggcttcgtctgtagaggcttgctgatatttggcataggatattgttaatttgtgggtatgatgcatggattatttgagatctttgaacagataaagcaatcattatcatctcaaagggagggtattgatttcatggccgtgattccccctctcccagtcaaagccatccaagccgcaattacttcagggacagggtgttcactggggctagaaggattatgtttttattgcacgacacatgacaacatatccaagtagtccttgattgatttagcagcagggagtaagcgtcttgctaaaagtggctccacaggtgaacttagcgatcgtcttgctaaaagtggttgtacaggtgatcgcttgaaggaaactcaggttcaaggacacatgagtatccgagaaaaaactcccaagaaatcttcccaaaactgaatgttgccttctaccatcaacaacctttgaagttctcgggtgtttatttttgtatgttctctacaattatgtgtatatatatatatattcatccttttcaagacaatttttataaatataacaacttgattt

SEQ ID NO: 17374 - DNA, 1615 bp, Zea mays
  Clone ID: LIB3069-017-H9_FLI
aataaagggagggtgactgtgaaccttggaggtcgccccaatagcgatctccaggcccagcccacccgatttttctcaaatcccaccgcttgttccaatccaacggaccagatcgctccaactaacccccacacacaaaccctagtcagctccacctatatagcctcttcccctttcgccgcgcctccattcgcaccaccgccgcgccgcccaaaccctagccgccgccgccgccgccgccgccatggtcgccgtcaaccgccccctcgtctccgtgaaggccctagagggcgacatggtaaccgacgcccccggcatcgccttaccgcccgtcttcggggcgccgatccgccccgacgtggtcaggttcacccacaagctgctgtcctgcaacaagcgccagccctacgcagtctcccgccgcgccggccaccagacgtcggccgagtcctggggtaccggccgcgccgtgtctcgtatcccccgcgtccccggcggcggcacccaccgcgccggccagggagcgttcggcaacatgtgccgcggcgggcgcatgttcgcgcccaccaagatctggcgcaagtggcaccgccgcgtcaacatcaacctccgccgcgtcgccgtcgcctccgcgctcgccgccaccgccgtcccggccctggtccaggcgcgtggccaccgcatcgagactgtccccgagatgccccttgtcatttccgactccgcggagtccattgagaagacctcccaggcgctcaagatcctcaagcagatcggcgcccacgccgacgccgagaaggccaaggactccgtcggcatccgccccggcaagggtaagatgcgcaaccgccgctacatcaaccgcaagggcccgctcatcgtctacggcaccgagggctccaaggtcgtcaaggccttccgcaaccttcccggtgtggatgttgccaacgtcgagcgcctcaacctactagaccttgcccccggtggccaccttgggcgctttgtgatctggacccagagcgcgttcaataagctcgaggaggtgtatgggagctatgacgccccgtcgcagaagaagaagggcttcgtgctgccgaggcctaagatgtccaacgctgacctgggcaggatcatcaactctgacgaggtgcagtctgtggtgaagccactcaacaaggaggtgaagcgcagggagaagaggaagaacccactcaagaacatggctgctgtgctcaaactcaacccctacctcggcactgcccggaagatggccacccttgctgaggctgctcgtgtgaaggccaggaaggcgaagctcgactccaagaggaccaagcttaccccggagactgccaaggttaaggctgctggcaaggcatggtacaagaccatggtctcggacagcgactacaccgagtttgagaacttctcaaagtggctcggcgtgactcagtgagcggcaagggtagttaagttttgagtagctcagcttatgttgagaggaaagagaatccatcaatctgttttatcctgcatcatcataacaagttgctacaagtcttgcatgttcgtgttgtttgtgcatttccgcgagaacatagtatttttatattcg

SEQ ID NO: 17375 - DNA, 559 bp, Zea mays
  Clone ID: LIB3069-018-A3_FLI
aaagagaatcccggcccgtgtccagaagacgcctcagccaccgcaaaatccccaaatccgcggcggagaggagagagccggagagaggggcgcagccagagagatcggagaaggggaagaagatggtgcgggtggcgacctacttcgcgatgaccttcggggcgttcctcttctggcagtccatggacagggtccacgtctggatcgcccttcaccaggacgagaagaaagaaaggatggaaagggagctggagataaagagaatgcaggcagagttactggcccaagctaaagagaatgaatcatgattgtcatttgtccaatggtttcaggcagttcctttatcgtatttcctctgctgtattttccatgcaatatcttgactgatgtatgctcatgctcagcacctccaataaagcgagacatgctatagcattgttgaatgcaagtgggtatgcagtttgcagtatgcttatgttgaattgatgtaacttagccgaactgaaagaggctgccccagcttgattggaacagaggaatttgctgctgtttttgttct

SEQ ID NO: 17376 - DNA, 1734 bp, Zea mays
  Clone ID: LIB3069-018-B5_FLI
caccaattctagcaaggcagctcagcagcttttgtagcgagcttcttggagccttgaaatgagtagtagtggtagcctagccaccacgagtagcaagtaggcactataggcactaggaagtagctaaagcagtcataaccatgggttcgctgccgccggtggacgggcagagacgccccccacacgttgtgatgatcccgtacccggcgcagggccacatcacgccgatgctgcagtttgccaagctcctccatactcgcggcttccacgtcaccttcgtcaacaacgagttcaatcatcgacgccacctgcgtgcgcgagggcccaacgcgctcgacggcacggatgggtttcgcttcgccgccatcgacgacggtctcccgctctttgaagcggacgccacccaggacatccccgcgctctgccactccaccttgaccacctgcctgccccggtttaaggatctcatcgccaggattaacgccgaggctgaggccgagggacaacccaccgtgacatgcgtcgtcggcgacagcaccatgaccttcgcgctccgcgccgcgcgagagctcggcctccgctgcgctacactctggaccgccagcgcctgcggcttcatcggctacttccactaccgccacctcgtcgagcgtggtatggtccccctcaagaacgaggagcagctcacggacgggtacctagacaccatcgtcgactggatcccgggcgcgcccaaggacctgcggctccgggacttcccgagcttcgtgcgcaccacggatccgaacgacgtcatgctcaacttcttcatccacgagacggagggcatgtcgcaggcgtcggcggtggtcatcaacaccttcgacgagctcgacgcgacgctgctcgctgccatggcgaagctcctgccgcccatctacaccgtgggcccgctccagctgacggtgcggaacaacgtgcaggcgaacagtcctgtcgctgctattgggtccaacctgtggaaggagcaggaggcgccgctccggtggctcaacggccgtgcgccgcgctccgttgtgtatgtcaacttcgggagcatcacggtgatgtccaacgagcagctggtcgagttcgcgtgggggctggccaacaccggctactacttcctatggaacgtacgcccggacctcgtcaagagtggcgactccgccgggctgccgccagagttctcagctgcgacagagggacgaagcatgctgtctacgtggtgcccgcaggcagctgtgctggagcatgatgccgtgggggtgttcctgacgcactccgggtggaactccacgctggagagtatttgcggcggcgttcccatgctgtgctggcccttcttcgccgagcagcagaccaactgccgatacaagtgcaccgagtggggcatcggaaaagagatcggtgacgatgtacagcggggcgaggtagagtcgctcatacgggaggccatggagggggagaaagggcaagagatgctccggcgcgtgactgaactcagggacagcgccgtggccgctgcagggcctgacggacggtctatgcgcaacgtagacaggctcatcgaagaggtgctcctagcctagattgagcactggtgagcatcctagcagtcatgtgtcttcgcgtctggcactccaatcgattcaaatcctttgtgttttgatgtcaagcgtttactttcggtacccataaaagtattttctcgta

SEQ ID NO: 17377 - DNA, 1160 bp, Zea mays
  Clone ID: LIB3069-018-D6_FLI
ctagttctagaccgcgctctccgcctgctccgtcgcgaccaagctcatctcctccgcattccgccgctgcagaggcaagcaccaggacagggcctcccccgacgatgatgccgctgcgaccagagacggcggatgtcgcgccgacggcaggagggacctataatgtactgcagccgcactatttttgaggatgctactcctgaactggttagagatttcttctgggatggtgattttcgtctaaagtgggatcccatgcttgcatattgcaaatctttggatgagttccctcagaatggagcaacaattgtccactggataaaaaagttcccgttcttttgcagtgaccgtgaatacatctttggaggacgcatatgggaatctgggaagacttactattgtgttactaagggtgttccatatccatcattgcccaagaaagaaaaaccgaggcgtgtggagctgtacttctcaagttggcgtattagagctgttcaatcgcctaaacatgtgggtcagcaatctgcgtgtgaagtaactttggttcactatgaggacatgggtataccaaaagatgtagcccgggttgctgttcgtcatggcatgtggggtgctgttaagaaacttcagtctggattcagagcataccagcaaatgagacacacagaaactaccctgtcacacagcgtcatcatggctcgaatgaccaccaagatatccatcacagcttcaaatgatcccttggaccatgacctctcggttgccgataaaatcagtgacgagaatgacagctccaatgcagttcaacatggttttgattggaagtggttggtggttgggggtgcagtggctgcggtttgtgtgctcaacaccggtctggtaggcaaggccgtcttgcttggagcagcgagaaggcaagcaaagaagtgatatgaggagcagccttccagccagacattcatcagattgtagctacgatcgtacaggcaaaaaaatgttgagaaaataggtggggttcaacagagataactgctgtttgaggcgtatgcaatgggtctatcggatctagtttcacagtatagtctattttatttagagataaaaatcgcttgtttaagaataagtaaagctctttatttaagaagaggtgtttgagaatt

SEQ ID NO: 17378 - DNA, 1079 bp, Zea mays
  Clone ID: LIB3069-018-E4_FLI
agaaacggcaacgcaataacgcaaagattcggctgacaatggggaaggggttcgcgtcgtacttggcgatgaagacggggccagagggcggcgacggcgcggcggcggcggcgcagcaggcgctcatcgacgctgacctgcggaacctcgccgtcgccgcgcgaaagctcgccaaccacgccttcgtcctcggcggcgggttggggttcggcacttctttcctcaagtggctggccttcctcgccgcagtgtatctcttgatattggaccgcacgaactggaagaccaacatgctgacagctctcttggttccttacattttcttcactctgcctaatgtgctgttttctatgatcagaggagaggtggggaaatggattgcgattattgctgttattctgcgactattttttccgcgccacttcccagattggttagagcttcccggttccatcatcctgctcacagcagccgcccccagtctgttcgcacacaccttcagggacgacctcgtcggtgtcttcatatgccttgcgatcggatgctacctgctccaagagcacatcagggcgtcagatggactcaggaacgccttcaggaagggcaatggcgtgtccaactccattggcatcctcctgctcttcatctaccctgtctggaccggggtgctgcagatcctgtaggcgctgttgcctccgtgttcccgtctgctgtccaggcgcccagctccgttgccgttcgtctcttgtgcaaatgtttcttctatggtgatcgtggttctgtgccatccgggtgggggatgcgtaatgtatgcttgaggtaatcagttggacccgttgccgtggtggtggacagttttgctatctcatttgtcgtagttcgacgttggcatttggtttgttcgagtacataaacaccaataaaatcattcgagtacataaacgccgccaataaaatcattagtggtggcttgatgtagatcgagatgttggccatattatcaggcgtgtaaatccttgtcggttcagttaagttgtcgcaagtttgaggatggatgtttatagcaactactgtataat

SEQ ID NO: 17379 - DNA, 692 bp, Zea mays
  Clone ID: LIB3069-019-H1_FLI
aacctgcacgtcatccgctaccagctcgccgccgacgcgccctactacgacaacgagtggaacaacggcacctccttcttctacacgccggcgctccgcacctgccgctccgccgccgtcggggtcggcatcctccgcccggactggctccgccccggggccgtctacctcggccgccgcgacgccggcggattcgactgccacgtctgggccaaggccgacttcatcacctactacgaggacgtcaacaccaagcgacccgtcaagtgggtcttctacacaggtaggaccgcctacgttatgagctttgaggtgggagcggtgctggaggacgcggcgtggcaggccccggagtactgcttcaccaacaacggtgggcttgggctggccgacgagaccaccaccaccatcgctggcggcagcagcttcgtccccaggagcgtgctgtgaggtccccacgagcggcagcagcttcagtatttggagaaatacgatcgatatgtgcacagcgtacgcgcagtaatgtatgtaatcttttgcctgtctgttgtttatctctgagcgaaacgtgtggcttttgtggtgtccacgagctctgcggactgcgtgacactattgaggaagagacggaaacaaaagcaaaaaaagaaagacatcggcatgcacaaatagcatgacgagacgactgtacg

SEQ ID NO: 17380 - DNA, 1245 bp, Zea mays; identical to SEQ ID NO: 17030
  Clone ID: LIB3069-020-A4_FLI

SEQ ID NO: 17381 - DNA, 1150 bp, Zea mays
  Clone ID: LIB3069-020-C3_FLI
gttcaggagagccttattcatgcaatggagactggtaggtacaaggacttgcatgggggacgagtgactgatcttaatgactcgattgtggtgttgtctacaagaatgatccaaggatgccaggatgcttctcttggggtggaagagggcaatgctttttcagaagaaaaggctgtggcagctcgtgggcatcaactgaagatcatagttgagccgggcacaaccaacatcggtggaggcaacgttgtagtttcgtcaaggcattccttgggaagcagtgaagcctcaagtaagcggaagctccacatctctgatgggcaagaaaagacagaagaatcggcaagcacttcaaagcgactgcatagaacatcaagcatcccattcgacttgaacctcccaggcgacgatgaggaagcccatgatgatggtgatgatgacaagagcagtggcagccacgaaaactatctagagggatctgtcggaaacctcttgcgttgggtggatggttcaatcaatttcaagccatttgactttggcaagctttgtgaggacatcctgcaggagttcagcaatactaccagcaaaattctgggcaccagggggtgcaggctggagatcgacgctggggctatggagcaggtagtggcagcggcatgggcatccgattcgcatgagaatgagaagaggcctgtgcggacgtgggtggagcaggtgtttggcaggagccttgagcaggtcaagatgaggtgtgagaatctgagcagctgtaccctgagactggtttcctgtgaggtgaaagaagatggttttggagctttgcttccctcgagaataattctggattggtgatggtgatatgtgtcgtttgcattattgctgctagctatctagctgtaagtattggttagttagctgacaccacccaccgtactgtagcatatataggttcatatcattatttgggtggcttcaaaataatgtaattaagctggagtatgtacgtacggtagtctagcaattaaactactcgttcaagtccatgacctggggatggatggctgtatttattgttgctcctgcgtgtatatatatatttgtaagaccgacgtgatggccttttcatgtggaattccatatactgatgtccttt

SEQ ID NO: 17382 - DNA, 1185 bp, Zea mays
  Clone ID: LIB3069-020-C4_FLI
gccaaaatacacagcttttcactgcattgaacaatgcaaagaaatctgctaggtcgaatggcactggatttgctgggcgtaagagtgttcgatcttcccagcattttggttatagtaaggacaacttcaattgggtggatgatatggacatttcagacagtgagcactcggatgagttagagaatatgagtgatggatccgattcagactgggtacagtcgacgaggaaagccaaaaaacaccagagaagagtgtctagccattcaaatcctaacctggattgtcaaaatacacaaggcagtgcagaaccagagaagccctcagatgaaaagtgcattttgcccaaatacatttcatcagacggctgttcatgctcaaaatcctcctcatgcaagaccaacaaatgcgagtgcagagggtcaggtgcacaatgcggtgcaggctgtggttgtaaggattccaaatgttctaacagggattcttctactatagaaaaagccaatcagggagccatgcttcttcagaccgcgttttctgagaaggaagcccaagatgcaaagccaagaaagcctttgactaacattggtaataatgtggttaaccaaactgccgagacaaagaagcccaggaaaaaccggcgcaagtcggcaattcaactcgtcccaggacctctcctgccgtccgagccagtggccaccgaagctgcccctcgggacattgccaacattcccctcaagctaccgagagccatgtcctcggtgactcctgcggagagcaaccctcccctcacagaccgcaatgctgccaaacccgacgaatcagtgagcaccggcagcaagaatagcaccggagctgcagccacgagagcaccgtctcagctgagaaaaaacgcaaccaccgagaaggagaaccagttgcgataatccgattgctgacatgcagtatccgtgactccgtgtcgcttaagccttctgtttaacagtgggggaggctgcctcggcgtcctttggagaggcaggtagactctggaagggctggcgctctcgggttcctgtgggaaatggcgtgttctgtggaaagccttagctctgctttggctggaatgcgaccttcttgtataatggaaaagtaacatgctggattaagctatgtcagtctcgtaaatggtctccgttcattttgaac

SEQ ID NO: 17383 - DNA, 888 bp, Zea mays
  Clone ID: LIB3069-020-E12_FLI
cacagttcccatataggcagccatcggctacacagcctcgcctccgtaagcagagtgtgtcgttgcggaggcaggaagagagacgacggcggccatggcgacctccttccaggggacgaccaccaagtgcaccgcctgcgacaagacggtgtaccttgtggacaagctcaccgccgacaaccgcatctaccacaaggcctgcttccgctgccaccactgcaagggcaccctcaagctcgccaactacaactccttcgagggagtgctctactgcaggcctcacttcgaccagctgttcaagaggacagggagcttggacaagagcttcgaaggaactcccaaggttgtcaagccagaaagaaacgttgggaatgagaatgctactaaagtctcaagcgcctttgctggcaccagagagaaatgtgttggatgcagcaagacagtctatccaactgagagggtcactgttaataacactatgtaccacaagagctgtttcaagtgctgccatggagggtgcaccatcagcccttctaactacattgcgcacgaggggaagctgtactgcaagcaccaccacatccagctgatcaaggagaaggggaacttcagccagcttgagaatgaccacgagaagacatcacaggctgggtcactggaggaggatgaacaagagtattgatcactgagcacaaccacagatgaataatgaatcctcttgcatttgcctagagcactatgtatttctgtggcgtggttcgatttcagttttaccaatggaggtcatgtgtgttcagagaacaatgatattgttgtcttgtatctgcatgtaaacgttgttatctttgagtcagatactctacctggtttcaccattttcattggtcg

SEQ ID NO: 17384 - DNA, 594 bp, Zea mays
  Clone ID: LIB3069-020-E3_FLI
aaacaagggcatgttcaggctgtcattgttggtgctgatcgaatagcagcaaatggtaaatgtccacatcatttctgtgatcaatgtataactaaatattcctactgttaaatttgtttcctttatgaaattgcaaggtgacacagccaacaagattggcacatataacctcgccatctccgcgaagcatcatagcgtccaggtctatgtggcagcgccggtaacttccattgatctctccctcccatctggggatgagatagtcatagaagaaagatcaccaaaggagttgctgaactctgaaggtggtctgggaaagcaagttgctgcatccggtatatcagtctggaacccagctttcgatgttactccagcaaatctgatcactgcaatcataacagaaaagggtgtgatcacaaaaactgatgctgatggatctttcgacatcaaaggattccttctgcccgcaaaataatactctctagcgtggcttccattctgaatgacataaatgtctggatcaacactgttgtattctgttttctctattatacacaataataaagtcatgtcctctcataggattttgaatcc

SEQ ID NO: 17385 - DNA, 933 bp, Zea mays
  Clone ID: LIB3069-020-G5_FLI
gtcacaagcaaccaccttgcatagttcttagcctcatggaattctgcccctaccctgcattgtctgccctgtgaagagagagaccagagagagagagagagggcttcgatgctcttctcaggctgcaggtcaaggagtgagaacaagaaagccttctttgaagttgggttgttgaggtgctctgaagaagtattagcgtgtcttccatcagtcagttctctcataatttcatcttcctttccttgtgttgtccttggcctctctttctgtgtccctgcactctcttgttatggactcctctcagcttactggggacaatactgaagagtgcaacagtaatgaatctgggtggacgatgtacctgggctccccagtgaacagtgatgatctcaaagccaatggcagcaaatggagtaataatgttggcagtggctgtagcaatggtagaagcaaaaacgacaacatggattatgatgatggagactatgattcattagcttctgatgcttccacaggaccagctcaagtgaaggtgcttaatggcaaggaaaagaaaattcatgagaaaagagacaattccatagaagaacaagatagcgatgagcaagacgaacaagccaaactccctaacaactgtgacaaaaaggcaggcaagatgaagaaggaagagaagaccaccaggaggagccacaacaagagacgtagttcctgttcttcccgaacaagcttctttaggtaactgttgtaaaacccttgtaggctgtctcccaaccatttacaatctagctaaaatcagcatggggaatgcaaatcttttgggatcttagggcaaatatgtaccccttagatactcttatcaccatcctcatagtatcatataaaaaagtgcatgtatttatatagatattaacagagagcactctctccagatat

SEQ ID NO: 17386 - DNA, 1075 bp, Zea mays
  Clone ID: LIB3069-020-H6_FLI
gagaaagcagcagaatcgctgagggatcgtcgatccggagaggcaaacaagtcgagagatcaggcagggcaccatggggcgcgggaaggtggtgctgcagcggatcgagaacaagatcagccggcaggtgaccttcgccaagcgccggaacggcctgctcaagaaggcgtacgagctctccgtcctctgcgacgccgaggtcgcgctcgtcctcttctcccacgccggccgcctctaccagttctcatcctcctccaatctgcttaagactctagagcggtaccagaggtacatctatgcttcagccgatgctgcagtgccatctagcgatcagatgcagaataactatcaagaatatgtgaagctgaaggcacgagttgaggttttacagcactcacaaaggaatcttcttggtgaagatctggccctacttagcccaagtgaacttgaccagcttgagaatcaagtagacaagaccttgaagcaaataagatcaagaaagactcaagtgttacttgatgaactttgtgacttaaagagaaaggaacaaatgctgcaagatgcaaacagggttctgaaaaggaagctgggcgagtttgaggcagaggcggcttctcccccgcagttagcgtggcaaggcgaaggcggcatgttgtcccatgaccctccacagccagaacacttcttccaggctctggagagcaacccatgtctgcaacctacataccatacgatggacatgaaccagcagccagtgccagcgccgggcggctgctatcctgcatggatgtcttagccagtgcttcattccattgccttgagaagtgtcctgaccttcacagatccctacgagctttattactgcttttgcctgcccctttgctgcttgcggtgcttactgaactgtccaaatgaccacatggtcatatataggttattgctgtctttatcttatgttgatcacggcctgctcagctgctttagcgccatgcaaaatggcttgggcgatgcacgcttgaatgggtcgaactgcttatgttttgggagtataaatcacttagcaataagcattggc

SEQ ID NO: 17387 - DNA, 1308 bp, Zea mays; identical to SEQ ID NO: 16980
  Clone ID: LIB3069-021-B11_FLI

SEQ ID NO: 17388 - DNA, 1098 bp, Zea mays
  Clone ID: LIB3069-021-B8_FLI
tatttttttaggagctcttggagatgctctaatctcttctgcacttgggctcggcaaccctgacccgatcttccagatttcccgtcgccgagccacgcgggtcgagtacccgtcgaactcgccgctgtcggatcgttctcgcttggggcgatcaagctaacgggatttgaggagatctaggccagccgcgggcagcagccatcagccatgagcgaggtgttcgagggctacgagcggcagtactgcgaggcctccgcctcgctctcccgcaagtgcaccgctgcatccgccctcgatggagagaggaagaagcagaagctctccgagatccagtccggcgttgaggaagctgaatcgctgattcggaagatggacctggaggcaaggagcctacagcctagcattaaggctggtttgcttgcaaagctgagggagtataaatctgacctcaacaacgtcaagagtgagctcaagaggatatctgcgcccaatgccaggcaggctacccgggaggagctcctggagtctggaatggctgatactctcgcggtgtctactgatcagaggggaagattgatgatgacaactgaaagactgaatcagtccactgacagaattaaagagagccgaagaactatgttggagacagaagaacttggtgtctcgattcttcaggaccttcaccaacagaggcagtcactactacatgctcatactactttgcacggagttgatgataacattggcaagagcaagaagatcctggctgcaatgtcaaagaggatggataggaacaagtggatcattgggggaatcatcacggctctcgctctggccatccttttcatactctacttcaagctcgctcattaagcttgcctgcaggtaggttccttccacatatctgtgctcagtaattgtgtgataagagttgtctgaatgctgtgtattgagcgacacacggctcttgaagcatcatttattccctcccaaacctgtaaacttaacgtggttcatgttgtgtacagtcagatacgtccaactatgtaaacctaacgcacgttgttctgtcgtgctaactaaactagagaggttagt

SEQ ID NO: 17389 - DNA, 608 bp, Zea mays
  Clone ID: LIB3069-021-E1_FLI
aaggggatcgaagcggagagcaagggagcggtcgagcgggtgacatcatcgtcatccagggtttctcaatcggcagcgatggcgaccagggcggcggcgaggttcctgcagcgcaggtttctgtcttctggcggtaaggtcctcagcgaggaggagaaggccgccgagaacgtgtacatcaagaaagtggaacaagagaagctggagaagctcgcacgcaagggccccagctcaggagagcaaccctcgtcaaccacaggctctgcagcaagtgatgtgaaggccgatgctgggccaacggagtcagcatctgcaagtgtgtcgacggacaagaacaggaactatgctgttctggcaggcgcagttgctgccctgggtggcttgggttggtatctattgtcaaagcctaagaagtcggaggaggttgtggactgaagagggaggttgtgaatgcgatctgcggatggtcggccttatatctcaccatggttttactttctgcgcatagacctgcaacttctggaaataattgttgaaatttactctgcactactcgttcttaggcctgttgcatcacagaaccttgaagtatgcactcgagttgttca

SEQ ID NO: 17390 - DNA, 705 bp, Zea mays
  Clone ID: LIB3069-021-E6_FLI
gatccgacagcacgaaatcccatggaatcatatcgtgctttctttttgtttcacaaaataaaagaacccgtgaacacaagtcatagtgccatgcagattgccacgcgtatcacatgacagaggtaaatcagagaggtcaaccaccgcatccgccgccgcagccaccgccaccgcatccgccgccgccgcagccgccaccgccaccgcagccgccgccgccgctggagtcgagcgccgagccgatgatggcgccggcggccagcccgccgaccgcgccgacggcgagccccgcggctcccgacccgagcccgctacggccgggcctccctccagcgccctgcgccgggtagccgtacgcggcctgcgcagggtagccgtacgcgcccgcgggaggcggcgggtagccctggccgtagtagtatgcgttgttgttgctgctctgccggcgcggcttcttggcgccctgcgcgcacccgaacgccgcgatggccgccacggccgccgtcgcggccaccgcgaggagcaagatcgccacgggaccgagcggggcggcggaggcgccgtgccgcgtggccgcagcagcgccgaccgctagcgcctcgcgcacggcgagaaggctcgcccgcaccatggctatgccctccttgcggatgattgtggggagcgaggtcggcacacggcgagggagaggtgggcaggcgcgtg

SEQ ID NO: 17391 - DNA, 1273 bp, Zea mays
  Clone ID: LIB3069-022-H12_FLI
cttgggagttgagaggcatgtgaccctcttcactcgcttgaccctcctcttcactcgcttctcccagaagtcacgcaccaaacaccaccaccaaagaaggcgagaacgtactccgtccctcccctcccctcccctccccttcccctcgaggctccaggaccgtctcctcgcctgctcatccgccgctgctccccttctctgggctcggagaaccggagagaagcgcgcgcggccatggcgtccagcgcctctcggttcatcaagtgcgtcacggtcggcgacggtgccgtgggcaagacatgtatgctcatctgctacaccagcaacaagttccccactgactacatacctacggtgttcgacaatttcagtgcaaatgtagttgtggatggcaccactgtgaatttgggcctttgggataccgctgggcaggaagattacaaccgcctgaggcctctaagctaccgaggtgcagatgttttcgtgcttgcattctcacttgtgagccgagctagctatgagaatatcatgaagaagtggataccagagcttcaacattatgcacctggggtgcccgttgttttggcaggcacaaaattggatcttcgtgaagacaagcactacttgatggaccatcctggattggtgcctgttaccactgcacagggggaggaacttcgtagacaaattggtgctatgtattacattgaatgcagctcaaagacacagcagaatgtcaaagctgtgttcgatgctgccatcaaggtagtaatccagcctccaactaaaataagagaaaagaagaagaaaaaatcacgcaaaggatgttctatgatgaacatcttcggtggaagaaaaatgctatgcttcaagtcctgaatggttcaagggggtcttacatggactgataccacgagtgtgaccccaagttcgcgaagcttgaaatcttgatgtgctcgttgcgcatgtcagcatgtgtatatttgcacctttggttattaatgactagaggtaggtaattgaaactagtctgcttaagccttctgcactgctggtgtggttagctctatgagttaggcagttcgacagaggccaaaccgacagtgagattttgttctttcatggcaatgtcacagcttttttcgtgaatctgagctcatcatactgtctgttagtttatcccccacgattccatgttagaatcgatccatagcaacattgtgttgaatggaccttttgcatttgctcttgagcctgagcatataattattcc

SEQ ID NO: 17392 - DNA, 463 bp, Zea mays
  Clone ID: LIB3069-022-H2_FLI
catcagttgtttggccttgttcattagtagaagtttttgatactatatcaacattttctgcattctcctgttcatctttgttatcatttttggcagcatcatcttcttcagttccttcacttgtttccttaatgttttcaaccttcatagccataatgcttggggtggattccttggatatatgtagggctttattcttgagaatctcactattggctgcctctgtttgttcaaccttgaatgcatcattgtcttttgtgttgtttgaagctctgttttcgaaattctggtactccactagtggttctttggctaaatcatccctcttgtcttcatgtttctgttcatctacctgaagttcatcattctgactttcaatctcctcaacttctttctgcttttgatctgagtcaatcttttgcagagcctcatcttgttccaaaatggataaggcctctgtctc

SEQ ID NO: 17393 - DNA, 945 bp, Zea mays
  Clone ID: LIB3069-023-C8_FLI
tatacctcaagccagcagaaaaatagtaggtataggcgtagagagcgagcgagggagcgagcgagctcagtccgtgttcagtcgagagagctcgtttagcttggccaacgacgagcagagcagtagctaggatagatccatggcgaacgcgggcatgaagccggtggccggactcctgctggtgctcaacttgtgcatgtacgtcatcgtggcggcggtgggcggctgggccatcaaccacgccatcaactacggcttcttcatcggcaccggcctccacctcccggctcacttctccccgatcaacttccccgtcgggaacgcggcgaccgggttcttcgtcatcttcgccgtgatcgccggggtggtcggcgcgggctcggcgctggcggggctcaaccacgtccgcgcctggagcaccgagagcctgccggcggcggcctccgccggcttcattgcgtggacgctcaccctgctcgccatggggttggcggtgaaggagattgaactgcacggcaggaatgccagactgatatgcatggagtccttcaccatcatcctgtcggcgacgcagctcttctacctgctcgccatacacggaggcttgagataaaatcgatcatgcaccatgtataatggccggaggcagtgactgaagaatggagactttgtcgtaggttccgtatgtgtgtgtctgtcggattgagtgggcgtgcatcggattcacggggcagcgcgtgtactatatatgtgacttcattcggttcgctctgtgtcgttgtgggctgggctgtcttccaagatgcagggagaggcagtacgtatgtacgtgtatctatctgttcgtgtgtgtgcgcccgattggttacgtcattccgtgacattcattgattgtttcggagatggagagtcaatatgtctacacgtcatgatgacgtggtgatt

SEQ ID NO: 17394 - DNA, 883 bp, Zea mays
  Clone ID: LIB3069-023-F6_FLI
gttaggattcagctatgtgcgagtagcaccaaaagcacctgcctccaattcagtgctcaagaagaagtcagctgctgcaaagggtaccactgtaactggcactgatgctgatctccgcagattgagcatggatgcagcccgtgagttgctgctaaaatttggcgtacctgaagagcaaattgataaattaacaaggtggcatcggatcgctatggtgaggaagctttcaagtgagcaagctgcatcgggaattactatcgatgaaattcctgttagtaagtttgcacgtggacaaaggatgtcttttctgcaacttcagcagcaaactagggagaaatgtcaggaaatttgggacagacaagttcagtcactttcagctttagatggtgatgacaatgccagtgacacagaagctcacagtgatctagactcatttgctggggatcttgagaacttgctagacgcagaagaatttgatgatgaggatactagtacagcagacttgagaattgacaaagcagatggaatgagaggacttaaaatgagaaggtgctctacgcaagcccaaattaacaaggaaattgaagatgatgaaacagaggcttctctggcaaagaaactacttgaagacgatggcaatgatgtgaagaggaaaaaacagcctgtggaattgacaaattgtggcacctctttagttgccaataaaatgaagcagagtaagactgggcaaacgatcaaatcatctggttatgctggtgcattaaccccaaaggagaacacaccaagagaaggaaaagaggttgaaaattcttttgttgagggtggtttgtcctcaaaactaaaaccaaagatggcactcgatgtaaatgagactgttctagtt

SEQ ID NO: 17395 - DNA, 1505 bp, Zea mays
  Clone ID: LIB3069-023-H11_FLI
gcgcctctgaaagttcggagccgccggcccgtccgcctccctctccgcctcccgtccccaaggccaatagttttcaagtggcaatggcggaccaggctaaccaacccactgtccttcataagctcggtggccagttccacctgcgctcgatcatctctgaaggtgtacgggcccgtaacatatgcccatctgtctcatcttatgaaaggagatttgccacaaggaactacatgacccagagcctttggggcccttcaatgtctgttagcggtggcatcaatgtcccagtgatgcagaccccgctctgtgctaatgctcctgctgagaaaggaggcaagaacttcatgattgatttcatgatgggcggtgtttcagctgctgtttcaaagactgctgctgctcccatcgagcgtgtgaagctgcttattcagaaccaagatgagatgattaagtctggtaggctatcagagccgtacaagggtattgttgactgcttcaaacgtaccattaaggatgaaggtttctcttccttgtggaggggtaacactgctaatgttattcgttacttccctactcaggctttgaactttgcatttaaggactacttcaagaggttgttcaacttcaagaaggatagggatggctattggaagtggtttgctggcaacctggcctctggtggtgctgctggtgcttcctctttgttttttgtgtactccctggactacgcgagaacaaggttggctaatgacgcgaaggctgccaagggaggaggtgaaaggcagttcaatgggcttgtcgatgtctaccgcaagacactcaagtctgatggtattgctgggctttaccgtggatttaacatctcctgtgttggaatcattgtttatcgtggtctgtactttgggctctatgattccatcaagccagttgtccttactggcaacctccaggacaatttctttgccagtttcgctctgggttggctgatcactaatggtgctggtcttgcatcttaccccatcgataccgtccgcagaaggatgatgatgacatctggtgaggctgtcaagtacaagagctccttggacgcgttccagcagattcttaagaaggaagggcccaagtccctgttcaagggtgctggtgctaacattcttcgtgccattgctggtgctggtgtgctttctggctatgaccagctccagatcctcttcttcggaaagaagtacggctccggcggtgcttaaatggagaaatatgatgacgaacaagagcagtgtgtgttcccggtcctttccaatcaggatctggtgaagtttttgcctttcatatcgaagaaattaataattcatgtagagggaggattcttccaacaatttgttttggatggagacttagatctccaaacactcgtaactatcctactaggtggtgacatcggtccccaaaaacatttatggtcatagagtctgcccttcgtttgtcagtcgggcaatttttcttgc

SEQ ID NO: 17396 - DNA, 2691 bp, Zea mays
  Clone ID: LIB3069-025-E5_FLI
attaatcttctgaaaactggtgatcaagaagcatatatgaggatggttgaagagagcaagaatgaacgcttgaaaatgctccttgataaaacaaatgagcttcttgaaggaattggaaaagctgtacagcgacaaaaagatgctgaacatgttagtaagccagaaggagggagtgaagtgccaaaagggtcagaatctgaggattgttctcaaatttcgggcatcaagagtgaatcagctgaggagtctacttcagatgacgatggagacctccctggccctgcagatgaaagtaaattcaatgcaggacgtagacttgatgttactgttcattctattgaagaaaaggtaacagaacaaccatctgctctcgaaggtggtgaattgagaccatatcagctagaaggtctccaatggatgctttctctatttaacaacaatttgaatggcattctggctgatgaaatgggtttggggaagacaattcaaaccatagctttgatcgcttatctgttggaaaagaaggaggttgcaggaccacacttaataattgctccaaaagcagtattaccaaattggtctaatgaattcaaaacttgggctcccagcattgggacaattctttatgatggccgtccagaggaaaggaggctgttaagggataagaattttgacggagagcaatttaatgttttgctcacacattatgacctgatactgaaagataagaagttcctaaagaaggttcactggcattatttgattgttgatgaaggacatcgtctgaaaaatcatgaatgcgctcttgctcgaacactagtttctggatacatgatccgccggagactacttttaacaggcactcctatccaaaacagcctgcaagagctctggtctttgcttaacttcatcctgcccaatatttttaattcatcccagaattttgaggaatggtttaatgcaccatttgcatgtgatgtcagtcttaatgatgaggaacaactactaatcatacatcgtttgcatcaagttttgcgtccatttttgctgaggaggaagaaagatgaagtagagaaatatctccctgtgaaaacacaagtaattctcaagtgtgacatgtctgcttggcaaaaagcgtactacgaacaagtcacaagcagggaaaaggttgcgctaggatatgggatcagaaagaaggctctgcaaaatctgtcaatgcaacttaggaagtgttgcaatcatccctacctattcgtagagcattataacatgtaccagcgggaggaaatagttagagcatccggaaagtttgaattgcttgatcgtctacttccgaaattgcagagagctggtcacagggttttacttttctctcagatgacaaaattgcttgacattttagaagtatatttgcagatgtacaatttcaagtacatgaggcttgatggatccacaaagactgaagaacgtgggaggttactggcagattttaataagaagaattcagaatatttcatgtttctcctcagcacacgagccgggggtcttggattgaacttgcagactgcagacaccgtcattatctttgatagtgactggaaccctcagatggaccaacaagctgaggaccgtgcccatcgtatagggcaaaagaacgaagtacgtgtgtttgttcttgttagcgttggttcaattgaagaagagatattggatcgtgcgaaacagaagatgggtattgatgcaaaagtaatccaggctgggttgtttaacacgacctccacagcacaggacaggcgagcattgctgcaggagatactcaggagaggaacaagctcactgggaacggatatccccagtgaacgtgagataaaccgcttggctgctcgaaacgatgaagaattccggttgtttgagaagatggatgaagaaaggaggctaagggagaactacaaatctagacttatggatggaaatgaggtcccaaattgggtgtttgccaatgataatgaaaccttacgcaagaaaaccgtggcagatgaattccggaatataattgttggttcaaagagacgtagaaaggaggttgtctattcggactcttttggtgatcagtggatgaaatccgacgagggatttgaagagattgcaaagatgactccaagggtgaagcgaactgcttattcgcctgacattcaagttgagtacaatgaaaggaggaaaaggcccaagtctgtggaaaacagcgcagatggcgcaagcaacccaacacggacacccgacaaaggaagggctggagtttcatcatacagcaaggatgagaccgaagatgatggtgaagacgaagtcatcaccagtggcttacagaagggtaacagtttcacatggaagacccttggaagaaaaaggtcaagccacttaagttcgtcgtcggactcaaaagggcgaccaccattctaatgtcagttgccttgatgcttttgctcgatgaagcccttctaataatggagtacccctggaggctagcagcgctaccatttcgaaagtaccttgaacctataaacttcaggatggaggctgtagctagcaggactaccattttgaaagtacattgaagctataaacttcagaattagtaatttactctggacttgttgccatgaattcgtaactcaaacgaacttaaattgcgtt

SEQ ID NO: 17397 - DNA, 598 bp, Zea mays
  Clone ID: LIB3069-025-E6_FLI
aagcccttgagctcagtggctctgacattggtggtggctatgagctttatgttgatgaagccaaaccaagaggcgatggccagcgtggtggtggtagatctggtggccgttctggtgggagatttggtgaccgttctggtggccggcgtggtggtggtagatttggtgaaagatctgggggcagggatggtggcggcagattcggtggccgacgtggtggtagggatggcggccgaggacgtggtggccgtggctttggtaacaagcacagcgctggcactcccagtgcaggaaagaagactacttttggtgatgattgatgatgaacgcggaggatgcggcaaaaggatccaatgaaattgtgtttttttggtcttgttgtggtaccgtaactggaatttggtattttttgtctactatttactgtagtggtttctggattttccttgtgttgcctatgctgcaatacaccgttttgttgttgcgatacatctgtagtttggttttgttatccacctgtcgtttataagaagcggctgtactcaggctactatgccgaactgaaatgggaatggagcaaaacgaaatcttagttctg

SEQ ID NO: 17398 - DNA, 1169 bp, Zea mays
  Clone ID: LIB3069-029-A12_FLI
ttgactatcgtagccatatttgtattgtctgcgagaagcttggcccaagcttatatgattttctgcagaaaaccggcttccatccattcccaattgatctaattcgccggatcggacagcaacttttggaatctgttgcattcatgcatcgtcttcagctaattcatactgatctgaaaccagagaacatcctcctcgtttcttcagattatgtcaagttacctgatcccaaggacggatcattctcaaggaaactgccaaaatcaagtgccattaaattgattgactttggaagtgcagcataccatcaccaggatcgcagttacattgtatctaccagacactatcgcgcccctgaagttattttgggtatgaatgtagtcgctgcctaattgcacacgtccttttcattacttgtggagcccagttgcttaatatttgtgttgctgttgtaaggacatggatggagctatccatgtgatatctggagtgttggttgtatacttgttgagctttgctcgggtgagacactgtttcagactcacgagaacttggaacaccttgcaatgatggatagagttctaggtcctcttccacggcacatgctggaaagagccgaccagcatgcggagaagtacgtcagaaaaggaggattgaactggccacaagcaataacaacagtagagagcgttagagctgttctcaaactgcctcgccttcagaacctggtgatgcagcatgtggatcactctgcgggggacttcattgaccttctgaagcgcctcttagcctatgagccctcgggaaggttgactgctcaagaagcgttgggccatgtcttctttaccagataccggcaataacaagtcgcctcgccatgacatcttcgatgatttgctatggcacatttatctgacgcagaattaacaaaatctagagacagttggcgagttctgagtattcagaggcaagagatacagccttgagagaattcagatggtcgttgaacagagagaacttggcgcgagtgcttgtagacatatctggtatatgtgtgtgtgcacgaagattgcggttggataccaatgtaaatgcaagtgtaactgaattaactgttacaaatttttctttataagctgcaagctcacacacgcagagttccgttgaac

SEQ ID NO: 17399 - DNA, 1713 bp, Zea mays
  Clone ID: LIB3069-030-B1_FLI
cagatccagagtacttttgcaggaactgatggttattgctggtagatactcttttaatcctttattattttggtcagcttatggtaggggtctgatgatctagtgttgcatgcacattagtcttgctgtttcagggaggcgcggacacaagtatataccactcagtcgacttcaaattgtgctcgatgatgagggctatactcctcggtgctctttcccatctgtgtcatcatgcaaagaaattgaagttacaccttctagttctgtctatcactgtaaaattggtgctgttgatgctgctgcaaagatacgatatctggatactcgtagggtctcaaatgatgaagttaaactttttgaatacaagcttctgggggaagtaaggatgctgggtgcgctaaggaagcacagatccatagtggacatatatggacaccaactttcatctaaatgggttcaagtcggcggtgataaagaatataggatattgcagtctataattttaatggaatatgtaaatggaggttctcttaagagatatttgacaaagctactgaaggagggcaagaagtgtgtccccattgatctgtcagtttacattgctcgggaagttgcttgtgcattgttggagatgcacaagaagctagttattcacagggacataaaaagtgagaatgttttgattgatttggatcccaagaggaatgctggtgcaccccccattgtcaaactatctgattttgacagatccgttcctttgtattctttgtcccatacatgctgtatatctcagcttggtacacacccacctgatgtttgtgttggaacaccttgttggatggctccagaggttgttaaggccatgcatgaaaaacaccactatggactggaaatagatatctggtcatttggatgttttttattggagatgcttacgcttcagatgccttaccagggactttctgacactgaaatatatgatctgatactgaggaagaaacagaggccaaggctaactcaggaactagaagcattctggacaatggatgagccagctacgagactcaagttagggatcacatctgatgctcatgcagataaattgagacacctgatagatctcttctaccagtgtaccagaggacatgcatccaggcggcccaaagctgtgcaaatttacaactcactgtgctccttgcccacatgttacgacatgaggtgaacgttctgatactgtatgaacgcgaaacttgatgcagaagtgcaggggaagaaggtcaaggcaggacatctagccagcctcagagggtttggtgctctaacccgaacatttcaccgtgagttggccttcaggtgctgccaggcagaacatgagaagtgggaccaaggctagcggctgtggtcgccagagctcctcctgagttggtcagttttgtagcggcacggcatctgcgtccacttgtagtcatcatcagttggtcagttttgtagtggcacggcatctgcgtccacctgtagtcatcatcatgtatgtgttatcacatccattgtttccccttttcatggttgttgccatcacaatggggtttaagttatcaaattaggtcattggtgccccaggggcatttgtctgctagaccgctgcatttacttctctatgtgtattgtattgtttatatctgtttagaaaaaaatgactgttgtccatgtaac

SEQ ID NO: 17400 - DNA, 488 bp, Zea mays
  Clone ID: LIB3069-037-F10_FLI
cgcattggtcgtagtggtcgtttcggtaggaagggtgttgccatcaactttgtgacccgcgacgacgagcggatgctgttcgacatccagaagttctacaacgtgttgattgaggagctgcctgccaacgtcgctgaccttctgtgatcattttgaagaaaaacagaactaaaagaacggtggtgggggtgatctggtaaggcttggttttgccgaaatattgtgggggaggagtgataaggtcggtggggtttctatgttaaagtcgtggtctcgggcaatatgcgatttttctttatgccatgttttgggaaattttgtagctgcctaggcctcgtgctgttgtggtggttcattagtatgaagacgaaggctctgctggctatgggagtcctttttctttttgttagtattttgtttaaaactatgtatgaccgaattatttgtcatccttgactcaattctgctgcaaccagttgtatcgtgcc

SEQ ID NO: 17401 - DNA, 658 bp, Zea mays
  Clone ID: LIB3069-037-G10_FLI
cattcctcccatctcccaagacctcctcagacccgagaagcgcagctgcggccatggacgccaccggcactggagctggagggaaggcgaagaagggagcggccggtcgcaaggccggcgggccgaggaagaagtcggtgacgaggtccgtgaaggccgggctccagttccccgtcggccgcatcgggcgctacctcaagaagggccgctacgcgcagcgcgtcggcagcggtgcccccgtctacctcgcggccgtcctggagtacctcgccgctgaggtcctggagctcgccggcaacgctgccaaggacaacaagaagacgcgcatcgtcccgcgccacgtgctgctggcgatccgcaacgacgaggagctcgggaagctgctgaccggcgtgaccatcgcccacggcggcgtgttgcccaacatcaacccggtcctgctgcccaagaagacggcggagaaggcgtccagcggcgggagcaaggaggccaagtcgcccaagaaggccgccaagtcccccaagaaggcatagggtttggaggcggatccgatgttgtcatgtgtaggttgtaagcgggcaatgtgattggctgtgtatctgcttcgctcaagttgctttatgtcattcctaatggaataggaaatgccgtgtttctt

SEQ ID NO: 17402 - DNA, 765 bp, Zea mays
  Clone ID: LIB3075-025-C1_FLI
cttctcctccccctcttaccaagtcctcttcgggttagggttacttagggttttgtggaggggcgatggcggcggctgatgtggagtaccgttgcttcgtcggcgggcttgcctgggccaccagcaacgagtcgctggagaatgccttcgcctcctacggcgagatcctcgactccaaggtcatcaccgaccgggagacggggaggtctcgcggcttcggcttcgttaccttctcctccgagaactccatgctcgacgctatcgagaacatgaacggcaaggagctcgacggccgtaacatcaccgttaaccaggcccagtcccgtggcggtggcggtggcggcggtggctacggcggcggtcgcggcggcggcggctatggtggcgggcgccgtgacggcggttatggcggcggtggcggctacggcggtcggcgcgagggtggtggcggcggctacggaggcggtggcggctacggcggtcggcgcgagggtggtggtggcggctacggcggcggcggcggcggctggagggactgatgtgtgggcccatcctggcttcggccgagttatcttatctatctatagtatcgtgttaccgttcgcttctgtcaccgtgttagtgtccgttctacctttggattaggtgttggtacccctgttgttccctttggttgctcccgctatgaaacgagacgagagaagaatgagcaaggtttttgttcgcagctatttttgtccaatgatattgatatgttgttcccct

SEQ ID NO: 17403 - DNA, 932 bp, Zea mays
  Clone ID: LIB3075-025-F10_FLI
ccaagatctgcgtggacagcctcgccgccaagccggagagccagaaggcgacgccgcgcaagctggcggagctgttcgtgaacatcgcggccgagaagggatccgggatggccaccttcgtgcaccgcaagtacagcgacaaggaggacagcgacatattcaagtgctacgacagctgctccgacgacgtggaggaggccgtcgcccacctcaacggcctcgtccgggagcccaccgacgccaagttcctcgagctcaagtcgtggctctcctccacgctcggcggcacctccacctgcgaggacgcctgcaaggacctgcccaagaccagcgacaaggacgacgtcgtcaacttcagcctcgacttcgagaagctgcagcgcgtcacgctcgacctcatcaccgaggcgtccggcaccatgtccgcaggcatcgccctgccaccctccaacgccggagcgccctcctacggcgcggcggcgccttccgggggctccgccgatgcccccgccggcgcctccgagggccctgcgagcgccagcggcccgtctggtgacgacgcgccggcgtccggtgctggtgccagcgcgtcggctgctgatgctccggcggcggcggcctcatccggtccctctagcgcaccagcgccatcgtcgtcgtctgagtcctccgccgcaccaggcccatcttctgatggcacctccagcgccccagcaccatcgtccggcgacgattctgattccgacgacgatgggtcagcttgagcctgaccgatgacgcgggtttgggttaccggtgccactcaaaatacgatcccttttattgtaaaagagggatcccttctttccattgcattcttgcaatccgtttcttcttgactatgtttcttcttgactatgtaacgataataacatgagaaaattatctgaatg

SEQ ID NO: 17404 - DNA, 842 bp, Zea mays
  Clone ID: LIB3075-041-F5_FLI
ggatcacactcgtagagagaaggaaaaatatccccaaaccctagctcccgatctcgatggcgaaccctcgcgtcttcttcgacatgaccgtcggcggcgccccggcgggccggatcgtgatggagctgtacgccaacgaggtgcccaagaccgcggagaacttccgcgcgctgtgcacgggcgagaagggcgtgggcaagtccgggaagccgctccactacaagggctccaccttccaccgcgtcatccccgagttcatgtgccagggcggcgacttcacccgcggcaacggcaccggcggcgagtccatctacggcgagaagttccccgacgagaagttcgtgcgcaagcacaccgcccccggtgtgctctccatggccaacgccgggcccaacaccaacggctcccagttcttcatctgcaccgtcgcgaccccttggctcgacggcaagcacgtcgtcttcggccaggtcgtcgagggcatggacgtcgtcaaggccatcgagaaggtgggcacccgcaacggctccacctccaaggtggtcaaggtcgctgactgcggacagctctcctagatctctctgatctggtctgttcggccgccctccctccgtcatcgtcgactccccctgcgtccgttcctttggatctgaataagatggtggtgatctgagtggtggtcttagtttatcatgtatcgctcgcagtttaatttagcggtttaggtgtggatctgtgaaccccatggcgcctctgcttgattcgtgtttcacctgttatgttctgagattcatgataatgctatgagaactgaaattcccgtttaaaaaaaaaaaaaaaat

SEQ ID NO: 17405 - DNA, 715 bp, Zea mays
  Clone ID: LIB3075-041-F9_FLI
ggcgaaggcataagccatcagtttccaccgcacgtccgcaccccctctccggcgtgccgacggtatccatggcggcggtggtgcgcggcgtcttgaggggcatcaaggagaagggactcaccaacttcatccgcgacgtccgcgacgaaggatacttcaaatgccttctggacgggaaccttttgcaaacgaaaatccacaatattggcgcaacacttgtaggagttgacaagtttggtaacaaatattatgagaaactacatgacactcagtatggaaggcataggtgggtagaatatgcagagaaaggtcgttacaatgcatcccaagtgcctgctgaatggcatggatggctgcaccacatcacagatagcaccggggataagctgctgaaccagaagactgctaggtaccttgtagagcacaagcagaactactccggtgagggtgaagagcttatctaccactccaaggggcatgctttgaatccgggacaaagggactggacgaggtatcagccctgggagccaaagaaagagcaagcctagctcgtgagtacattgtggggaagctgctgaatgttttgcgttttcttgcattgcgctgggtcaggtatcaccgagctgaatagcctctgggttattgcctggacgggacccaaataatgttgttctgaataccaatatattgtatatttgatcatcttttgacattg

SEQ ID NO: 17406 - DNA, 1113 bp, Zea mays
  Clone ID: LIB3075-042-B10_FLI
agatgagaggcgtaaaacatgggatagctggtcaacgaaacggaaactgatgcacattttagctcggaggtttccatcactactaccattcttttatcgccaaacctttctttctggaaagcaaggacatccagagagttggttgtcgctgtcattggggaagaaggacaaaactttactggaaggtcctgcgttcaatgcattctgggaaaggaatgttgcagagtctgtgcgccagggagatgcaaggccatttgtggaggaagctgtgctgcaagtatctgactggggtttcagcctatctgacatccaaatgcagaagaaagaggctcgaggcttttttgaactcatcaagtctctcttcaatcaggctgaaagagagtgggtgggatttctgggcccaatacatatatggcaggggatggatgaccgagtgatctcgccgtcagtggctgaatttgtgcggcggttggttccaggagccacggtccacaagcttcttgatgaaggtcacttctcatacttctgcttctgtgacgagtgccacaggcagatattctccaccctcttcggcattccccagggccctatgaaccctgcaccgcaacccagcgaggtcgtttcagagctcaacgaagaaataacagtaccagacaatgtcacagatcaggaacaaggaaaatcaggcctgccctgatcaagatcagttttcaggatcaacagtatagatacaagacattactactaaacacaacacctcatatcgacgggacaggcttttcgtcgctgcttgtggactgagctgctcctcttgcggagtcttgaaggatgaaggcaaagtattggatagaggctgtgccgtttcacttggatgtacaaaaatgctcattacagattcgcacggcacctgctcggtgtgcttttagtatagtcggcattaacattcgattaacctgctatgactgcattataggcttcttttagcacatttgttttggcatgcgaacccaatggttcaattgcgtcctcagctgaattttgttactttgtcagggactgtttgatgtagctccactaactctagattgacctaattcagctttacttcacaag

SEQ ID NO: 17407 - DNA, 752 bp, Zea mays
  Clone ID: LIB3075-042-C11_FLI
ccgcgccgcgcccccagcacagccacacgcgtacacccgtacacctcccgcagccatggcatcagtaggcttcggcacggtcgcgccggccgtggcatcatcgccggcggccaggacgacgagcgtgggccgcccctccgcggcgcacgtccctgcggcgacgaccaaggtcgtcgcggcggcggcggggaagcgggaggaggagaagggcctgttcgacaccatcttcggcgcgctgtacaaggaggagcagctgctggagacggaccccgtcctgaacaaggtggggagcaagggcaaggccgccgccgccccggcgcccaagaaagccgctgaagagggcggcaacggcgggctcagcctcggcgggttcttctccaggcccaagaaagggtgaacgtacgtacgttatgtagctccgactccgagtgaggatcgttttgcgctgctcttgctttcttgtacgtaatccttggattggattggaatggacggctcgcatgttgtatatatatatggcacaaacgagagcagagcagagcaccagcgtataactaattccttcctttcagttgatctcgccctgtgttctgttctgcaacaagcacacaccccagccagcatcagtggttcgctgctggctgttgatcatcatcatcatcactagtaaatgtagcagttgtgtgtctctgtactgaagctcgtgtagcaccatggctcttggatgagagcttattattgtacttgctctt

SEQ ID NO: 17408 - DNA, 1003 bp, Zea mays
  Clone ID: LIB3075-042-E5_FLI
tagccggggcggtcgccccaccttgccgatacgaggtgtccgctcctatttcattcggtccattccgcctctcggaagagttgagagaggagtaaggaaggcgaggacctcgcgccccgcgatgggcggcgacctgtacgccctcgacttcgacggcgtcttgtgcgacagctgcggggagagctccctctcagccatcaaggctgcgaaggtgaggtggccgtcgctgtttgagcaggttgacgccgccatggaggagtggatagtggagcagatgtacacccttcgtccagtggtggaaacaggatatgaaaacttattgcttgtaaggttgcttgttgagatccagatacactctgttcgaaaatcatcagttgcagatgggcttagcatccaagaaatattggagaactggtcaaaactgaagcccactctcatggatgagtggcaagaagatagggaatctcttgtagatctctttggccgtgtaagagatgactggattgaaaatgatttttcgggctggataggtgctaacaggttttatcctggaacagctgatgcattgaagctttcaagctccgaagcatacatagtcacaacaaaacagagtagatttgctgaagcgctactcaaagaattggctggaatagactttccctctgaaaggatatatggccttggcactggtccgaaggttaaagttctccagcagctgcagcaaatgctgcagcaccaaggcctaaaacttcatttcatcgaggaccgactagcgactctgaagaatgtgatcaaagaaccagcactggacaattggaacctctacctggtgaaatggggatacaacacacagaaagagagggaagaaacagaggctataccaaggatccaactcattgatctaccagatttcagtaggcagctcaaataactaccaatggcgtcgacttgtgaatcttggaaactttgtttttgtttggtatacgtaactaatgaacagcag

SEQ ID NO: 17409 - DNA, 1159 bp, Zea mays
  Clone ID: LIB3075-042-E8_FLI
gcttctacgccgtcgtcgaggccgctgcagttcgcgcagacaacagccatcttggagggttggcgaggtatccggtctctgcaactcttccacagattggatccagattattccttacatggggtgtcttctggagttttcctgaggtgattgactgactcgagaatttgccgacgcttgaagaaggacctaatgtgagcttttacatacttgatgaacagcttgagctcttgagcaaggtgctgaatgcaggggatgacatgattggtgttgagtgcttagaagaagattgtgatggcaaggttctatttgtttgaggttgcttcaccattccccaaagcacattgcatcttgttttagtgtttttttgattgccgtcgtcgaggccgctgcagttcgcgcagacaacagccatcttggaggtatctaattccaatattgtatgtctcggttgaacttgtgaaggcgttgcaagcacatatcattaactgggatattcatatgtttgatgaggagatcggcaataccactcagggtggcaagtttgaccatgcagatcgtttgttccaaagcattgagaacgcttacataaatagcttatcaaatacaagtgacgtcaaagagcttattccagaattcttttacatgcccgagtttcttgaaaattcaaattcatatcatcttggtgtcaagcaggatggggaacctataggcgatgttgctctccctccatgggcaaaggatgataactcaagtgacgagtttgacaaagattctattgagagtgatgatagatctcttgaagagctaagctgggagacactagaacttcttgtggtacctcatatattcagcatcagacgaagcacatggagatcaaccttcacttcgtccgtgagcgtgtcgccgacggtgatgttcgcattctcagcatcccgaccacttcgtagtttgccgacattttcaccaaggggctgccgtcgagtgtattcactgagtttcgatctagtctcaacatctgtacaggatagaattgagactgtaggaggtgttagactcctgctaagggttaggcctgggccttcttgtatttacctgattacccctatgtaatgggcttggcccacctaactgccatatataaattaatataatttac

SEQ ID NO: 17410 - DNA, 976 bp, Zea mays
  Clone ID: LIB3075-042-H1_FLI
cgcaaggactgcaaagtgctgccaacaagcgtgttgttcgtgaacaaccagaacacggtggtgcgcgacgtcacgtccgtgaaccccaagttcttccacatggcgctgctgtcggtgaagaacatccggatgagcgggctcaagatcagcgcgccctccaacagccccaacacggatggcatccacatcgagcgcagcagcgggatatccatcatggacacgcacatcagcacgggcgacgactgcatctccatcggccagggcaacgacaacgtggacgtggcccgcgtgcagtgcggcccaggccacggcatgagcgtcggcagcttgggtcgctactccggcgagggagacgtcacacgggtgcacgtccgcgacatgaccttcacgggcaccatgaacggcgttcgcatcaagacatgggagaactccccttccaagagcaacgccgcgcacatggtcttcgagaacatggtcatgagggacgtgcagaaccccattatcatcgatcagaagtactgcccctactacaactgcgagcacaagtacgtgtccggggtgactctcaatgacattcacttcaagaacatcaagggcacggcgacgacgccggtggcggtgttgctccggtgcggtgtgccgtgcaggggtctggtgctgcaggacgtggaccttaggtacaaggggcagggtggtacatcggccaagtgcgagaacgccaaggccaagtaccttggctaccagtttcccaaaccctgcccctaggtgccggtgcttgtccggccgtattttagctcatctctgtccactctctggtgtccggtgaagtgggctttgattcttcggtcgtgttctctagacgttttttcttcttctcttctgggttttcctgtttgctttcttgattagctgaatttcgcggtataatgtcagttgcttgtatcagtgaatttgtgaataccagtcattgttgaat

SEQ ID NO: 17411 - DNA, 1236 bp, Zea mays
  Clone ID: LIB3069-021-F10_FLI
gcaacaattagttcgaagatcattcagaacagtgcgcagtgccttctgtgctacggatttgaaaatcattcagaacttgtgctttttgaataaaaccagctgcagccgctaggcaactcgcggtttcgacagaaattagatgtttgcagcagacaagttgggcttaaataattgcagggcgtaatcctaggttctttctagtagctcacagtaccgactaccgagttcaatcattggcatgcagctgctgcagcagcaagtccaacatctgctaccaacctgtacctgaaagagagccaggctctgggcggcacgagtggttcggactccgacagcgattcgctgctggacatcgagggtggcccgtgcgagcagagcacgaacccacaggacgtgaagaggatgcgacggatggtgtcgaaccgtgagtctgctcgacggtccaggaagaggaagcaagcccacctagctgaccttgagacacaggtcgaccagctgcgaggcgagaacgcgtcgctcttcaagcagctgacggacgccaaccagcagttcacgaccgcggtcacggacaacaggatcctcaagtcggacgtggaggccctcagagtcaaggtgaaactggcggaggacatggtggcgcgcggcgcgctgtcgtgcgggctgggcagcctggggctgtcgccggcgctgaacccgcggcaggcgtgccgcggccccgacgtgctgtccgtgtccggcctggacttccccggcgccgacgacgcctgcttcacggggctgtccccggcggagcagctgcagctccagagctcccccctgcagagcatcgccgccagcctcgagagcctggacaaccggatggccagcgaggtcaccagctgcggggggcccggcgtcgacgtctggccgtgggaccaccactccaacggcggcctgtccaagtgaagccggagacgccgggtgggagtggggtgagactcgcgccgctcgccgacggcacctatcctgtcctagtgtatgcgtatcgatatgcatggcgggcgctagctatgaccatgagccgccgttatttctgtgttcgctggagtggtgaaagtgaacggacttgagtttttcagagtccctcgtctccgtcggtacatttactagttctgtaatagaactgactagcttaagctcgtgctactacatatatatatgtatgctgagagactgaactcgaagcataatcatgct

SEQ ID NO: 17412 - DNA, 585 bp, Zea mays
  Clone ID: LIB3069-021-F12_FLI
ggtagagttggtggacttaaggtaagtgctgttgacacaactggtgctggcgatgcctttgttgctggagtgctatctcaattagccacagacttttctctgctccaggatgaaggtcggttgagagaagccctgaagttcgcaaacgtctgtggagctctcaccgtgacacagagaggcgctattcctgcgctgcccacccgacaacaagtgcttgatgccctgaccaattttgttgcttgaaagtagccgtgcacacctacttgttgtgtattgtaatgtggaccgcctgagcgccatgtcgatagattacaggcgtgatttcgcttgcataccacttggcatttttgttggtgcgtaccaaagcccccccagccaaaccaagtaactcggtggaagaggttgttgtttcccgtcggattttgatgtgtgtagttgtgtgttggggacattggggttaacactttgtgggcatgtgtaatgtgtgtgctgatgttgtaatgctgctggggagaacatgacacagcggagcagttttggtacctgaaaacatgagctatgaatgagtgattcagttattgggcc

SEQ ID NO: 17413 - DNA, 1084 bp, Zea mays
  Clone ID: LIB3069-021-H6_FLI
cacaccccccgagctcagcttacctccactccagctccaatcacagtcgtgaccagagcgagagctagctagagggccgtgaaaatgccgatcaataggatcgccctggggagccaccaggaggtgtaccacccgggcgccctcaaggcggcgttcgctgagttcatctccaccctcatcttcgtcttcgccggccagggctccggcatggccttcagcaagctgaccggcggcggcccgacgaccccggcgggcctgatcgcggcggcggtggcgcacgcgttcgcgctgttcgtggcggtgtcggtgggcgcgaacatctccggcgggcacgtgaacccggccgtgaccttcggcgccttcgtgggcggcaacatcaccctgttccgggggctcctgtactgggtggcgcagctgctggggtccaccgtggcgtgcttcctgctccgcttctcgacgggcgggcaggccacgggcaccttcgggctgacgggcgtgtcggtgtgggaggcgctggtgctggagatcgtgatgaccttcgggctggtgtacacggtgtacgccacggcggtggacccgaagaagggcagcctgggcaccatcgcccccattgccatcggcttcatcgtgggggccaacatcctggtgggcggcgccttcgacggcgcgtccatgaaccccgccgtgtccttcggccccgccctcgtcagctgggagtggggctaccagtgggtgtactgggtcgggcccctcatcggcggcggcctcgccggcgtcatctacgagctgctcttcatctcccacacccacgagcagctcccctccaccgactactaaaagccgaagccgaccgacccaggggtgcgcagctagcatccagctctctctccccgctcgccgtcgatcgtttagtttctctcgtgcacgtgcatgcatcgtcgactgtctcaggccgccgctgcgccggcgccgctcgcatcgtttgcttttccttggaccagcagtcgtcgccgtcaggctgagctgcttgtaaccgtgaatccggacccgtttgcttctgtaagatttgtgcatttgcctgagt

SEQ ID NO: 17414 - DNA, 2059 bp, Zea mays
  Clone ID: LIB3069-022-C8_FLI
gaaatgatttgaagagccctaagaagcaagacctagagagaactgctgcatctgttctttttgactgggagacagaaatatatgtagcaagggcacctggacgtttggacgtcatgggtggcattgctgattattcagggagtcttgttttgcagatgcctcttcgggaagcttgccatgttgctgttcagagaaaccatcccagcaagcagaagctttggaaacatacaaaagcaagacagcttgttaacggaggcttggtacctgtgatacaaattgtatcatttggttctgatttgagtaaccgtgcaccaacttttgatatggacctgtcagattttatggatgatggtaaaccaatatcctatgagaaagccagggagcttttctgtcaggatccatcccaaaaatgggctgcctatgttgctggaacaattctagttttgatgactgaacttggtgcccagttcactgacagcattagcattctggtttcatctgccgtgccagaaggaaaaggtgtttcatcttctgcatcagtggaggttgctacaatgtctgctatcgccgcagcctatggtttaaacatcataccaagggatcttgctttgctttgtcagaaggttgagaatcatgtagttggagctccttgtggagtaatggatcaaatggcatctgcgtgtggagaagctaacaaactccttgcgatggtttgccagcctgccgaagtgaaggaattggttagcatacctactcatatacggttctggggtctagattcagggatacggcatagtgttggcgggggagattatggatctgtgagggtaggcacttacatgggacgaaagatgatcaagtgtacagcatcagatttagtttcagaatccttgacttcagggtcccctgctcagtctgattgttataaagaaaatggtgtgggcgtactgaaatctgaagctgcactggagtatttgtgcaacctaccacctcacagatatgaagctgtttatgcaaaagacattccagaggtgattagtggagaagcattttcagagaaatatggagatcacgatgacacagtgacagttattgatcctaaaagatcttacagtgtgaaggctcctactagacatcccatatatgagaacttccgtgtcgaggccttcaaaacgttattagaggcaggtaatacagacgagcagctgtcagcccttggagaacttatgtaccagtgccacaacagctacagcgcatgtggcctcggttctgatgggactgacagactagtcaacctggtacgagaagtgcaacacaggaggacatccgaaggcggaagccctagtctgtttggcgcaaagatcaccggcggaggctccggcggcacagtatgtgttgttgggaagaactgcgccaggagcagtgaagagattgcagagattcagcacagatacaaggctgagaccgggtatctgcccattcttttcgacgggtcgtctccaggagctgggaagtttggttacctgaagatccgacgtcgttgtccctagtggctgattgggaaacgaagaacttcagttcgagctttgtcacatatcactcaattgttaagaacctcactccaactctccaagccattgtagaacatagaggcgtattgccacttgcgatgattcgtcgttcacacacaaaatattatcatgtgctacaccaattctggaagctactagaggaaaatgtgaggaatataaagaaactcttgttgagcagatgtagtctagtggtctccgtgtgcttgctgcagtgtaaccaaactccaagtagatgtgctctgggctctggcatgtggtatgtgatgaagtcgaggatggtttcttgccgtttgatgaccagtgtagtcgttggttaacttgtcagtcgtaaactgatgttgtcagttaggagcggataaagtttgtgtgtgttgtcagtgtatctgtgtgtaagtttattggacagaccgaaagatacaccacgaacccagatgaagtaggtaatagtcgtatgtgaagtttttatc

SEQ ID NO: 17415 - DNA, 1362 bp, Zea mays
  Clone ID: LIB3069-022-E10_FLI
cgccgacctcttacacgcgcacttctacgagtcctgcccctacctgaagttcgcccacttcaccgcgaaccaggccatcctcgaggccttcgccggctgccgccgcgtccacgtcgtcgacttcggcatcaaacaggggatgcagtggccggctcttctccaggccctcgccctccgccctggcggccccccgtcgttccggctcaccggcgtcgggccgccgcagcccgacgagaccgacgccttgcagcaggtgggctggaaacttgcccagttcgcgcacaccatccgcgtggacttccagtaccgtggcctcgtcgcggccacgctcgccgacctggagccgttcatgctgcaaccggagggcgatgacacggatgacgagcccgaggtgatcgccgtgaactccgtgttcgagctgcaccggcttcttgcgcagcccggtgccctcgagaaggtcctgggcacggtgcgcgcggtgcggccgaggatcgtgaccgtggtcgagcaggaggccaaccacaactccggcacgttcctcgaccgcttcaccgagtcgctgcactactactccaccatgttcgattctctcgagggcgccggcgccggctccggccagtccaccgacgcctccccggccgcggccggcggcacggaccaggtcatgtcggaggtgtacctcggccggcagatctgcaacgtggtggcgtgcgagggcgcggagcgcacggagcgccacgagacgctgggccagtggcgcagccgcctcggcggctccgggttcgcgcccgtgcacctgggctccaatgcctacaagcaggcgagcacgctgctggcgctcttcgccggcggcgacgggtacagggtggaggagaaggacgggtgcctgaccctggggtggcatacgcgcccgctcatcgccacctcggcgtggcgcgtcgccgccgccgccgctccgtgatcagggaggggtggttggggcttctggacgccgatcaaggcacacgtacgtcccctggcatggcgcaccctccctcgagctcgccggcacgggtgaagctagacgtcattgagcgctgaatcgcagttagcgaccgggccaaggttctcgccggcgtgatgagatggaacactttgactcccgcggccggatcggcctgtgttcgttcttgtttccgatctcccttctctttcccgttgcttcgatcccgtcaagtatggtagaccgtagcctattgttatgtttaaatgtcaattattatgtgtaattcctccaagcgccgatatccaataaggacgaaccggattttcgttagctcgacctcgaatgagaattttgtatacaatgcatcctcgttagct

SEQ ID NO: 17416 - DNA, 1273 bp, Zea mays
  Clone ID: LIB3069-022-E8_FLI
aaattgacaggaatattacttggtgatcctataagataatgtgctgtgaaccctgatttgttttagctgcttgtgttcgttttgtctacttagtcttgcacactgaggacctttatcgaggttgtcagtctgcaagttgaatcatggcggagcacttggcttcgatctttggtaccgagaaggacagggtcaactgccctttttacttcaagattggggcttgtcgtcatggggatcgctgttctcgtctgcacaacaggccaactatatcgccaactcttgtgcttgctaacatgtatcagcgccctgatatgataactcctggagttgatgctcaaggccaacctattgatcctgagaagatgcaggagcattttgaggacttctatgaggacatctatgaggagttgggcaagtttggtgagattgagaatctgaatgtttgtgataaccttgctgaccacatgattgggaatgtctatgttcagttcagagaggaagaacaggcagctgcagcatacaatgctcttcaggggcgcttttactctgggcgccctataattgttgagtattctcctgtgaccgacttccgtgaagcaacctgtaggcagtttgaggagaacagctgcaaccgtggtggctactgtaatttcatgcatgtgaagcaaattggcagggatctcaggaggaagctgtatgggcgttctgcttccaggaggtaccatgcgagaagccgaagccctccaccgcaaaggaggggctatcgtgaggactatcaccaccgtgatcgtgacgagtaccgtggcggcggcggcggcggtggacggggaagaggtagcaggcatgacaggtatgatgatggagcaggtagaggcggcaggcatgacaggtacgatgatggagcgggtagaggcggcaggtatgagaggtatgatgatggaggaaggcgtaggcatggtagccccccgaggcgtggaaggagcccggtcagggaaagcagcgaggagcgaagggccaagattgagcagtggaaccgtgagcgggagtcaaaacagtgagctctctgtggcaactgttctgagacgtgttattcggtggacttgttgcttagctcgtctttcactgctatattctaagtatgcttgtgtggctgatatgcttgagtgcaggactcagttcaattttgtggttaaatcggacatgtaaactctatttatttccttgtggattgtgttgaatcatttgccattatgttatgctgacaattggtatc

SEQ ID NO: 17417 - DNA, 546 bp, Zea mays
  Clone ID: LIB3069-022-F6_FLI
tccagctctagtgaagcaagatttccaattcctgatataatcctaagaacagttactggaagtatgtttcctgttattgatccagggcaagtaatctccattcaggaacatgagtatgtttattgcctggcaatcgtcaagagcatgaagctcaacattattggacaaaatttcatgactggtcttcgtgttgtgttcgatcgggaaaggaaaattcttggatggaagaaatttaattgtttctcaccttcaacatctgagaactactctccgcaggaagcaaggaacccagctggtgtttcccagttgagaccactgaacaattcagcaccagcagcgttatatgatagcttgctcctgatgcttatcttggtccacctggctgtaaattagtttggttcttaaaatagatactgtagagcttgactagaggtacaccatagagaacaatattgtttagtggttacacgtcctgtaatagagatacttgtgatgccgattttttatggctcattgtacaaccattcccccgtcttgttttcactc

SEQ ID NO: 17418 - DNA, 1091 bp, Zea mays
  Clone ID: LIB3069-023-H4_FLI
gcgtggaacgttttgaccatcactgcccctgggttggacaatgcataggacttaggaattacaggttcttctatatgtttgtattctcgacaactttgctctgcctgtatgtctttgggttctgctgggtgttcattattaagatcagaaatgccgagcagataacaatttggaaggcaatgacaaagacccctgcatctattgccctaatcatctacacattcattgcagtttggtttgttggtggcctctctgtgttccatctgtatctcatgagcacaaatcagacaacatatgagaacttcaggtatcgctatgatcagcgagacaacccatacaacaagggagtcatggaaaacatcaaagagatcttctttacaacgatccctccttccaagaacaacttctgtggtagggtcgaacaggagcatggtctgaggccccgtccaacgaatggtttcatgagtccaaacatggggagagctgttggcgacattgagatgggtagaaaaccagtggcttgggatgagcctaggatggcggctgaaattggtgatttaggagcaggtctgagcaacctgttggaggacaaggatggcaggtttcgtaccacatctccagatctcagccgcgacgcccttgcggttggaggaggcttagaagagcacggatcctcagcgatgaaccctgggcgctcaagctggggagttgaagcaggtcgatgatggcaatggcattgaccatgtaaggcagatgtagtgagatgctcagggttgttagtgccagttcgtcgctaatttgttgttttgttggagatttgaggtcactaatgttattagacttatgacctgtatggctgttgtttctggactttcttttcttcttcctcttaatttggggcgtcttccatgtccattgtttgaagcagtcggtttgtgacgtctccagcttggtactgtcaggttttgtctgtatataatcggagcattaagcctaaaataggtttcggttgtttgggtttggatggtaatggttgtgaacaatgttgaaccttcgcattgcagtaaatgaacatcgtttgatcgagtgct

SEQ ID NO: 17419 - DNA, 725 bp, Zea mays
  Clone ID: LIB3069-023-H5_FLI
cggcggaggaggtgtggaaggagatcactggcggaggtggcagtggggaagccgtggctcccgtggcggctcaggttgtcgctcccgatggtggcgccggcacaggcggcccggaggtgacgctggaggacttcctggccagggagagcgcggtgaaggaggatgaggttaagatttctgtcccccccgcgccggtcatggggttaccgggcggagcggagggcgtgagtgtgcctggcggcggaggcgggagggaacggaagcggcagcttgtgagtacagtggatcgcgctcgctctgctatccagcgagagaaacgaatgataaaaaaccgcgagtctgctgccaggtcacgggagaggaagcaggcctatatcgccgagctagaatacatggtaacgcggctcgcggaggagaaagctgagttgttgagacaacaggaagagcagttccagacgcggcttgaagagctcgtggaccgagcgacgccagccattctgagggaaaaaaacatcacgagatcttagaagaacgaactcaatgcagtggtagatttgagccaagctcggtcgccgtctccttactgttataacatagaatttgcgccctgtatgtcatttttctatttatatgcgccaacttagttgtagtaccttaactgaaattgcatgggcaattagccgacacaaagcttaaatgaaatcatgttgtgtaggtcatgaccg

SEQ ID NO: 17420 - DNA, 323 bp, Zea mays
  Clone ID: LIB3069-024-B12_FLI
ggcttaaataaggcatcatcgaaggcagatgagggctcctccattttatgctcactttccctatccatggtggcaacgaagcttaatctttctggttcagatattgtagatgatgaaccactgtctctctctcttgggctccctagtgttgtcggtgggagagcagatcaggagatgaagcaattcctgccggagaagccaggcataaacacttaatgcccctttagatttgcgagtgtacagttttgtgcagctgtatggagtttagacagggtagaagtatggtatagctgttaaattatgaatatttttcattttttttc

SEQ ID NO: 17421 - DNA, 1130 bp, Zea mays
  Clone ID: LIB3069-024-D6_FLI
cgcgatctagaagctcttgtcacccagctttgtcatgctgtgataatatggttgaggaggacccatctagctcttgtaacccagctttggcatgctgggatatggttgatgttgctcctgtccaggagggaaatgatgcacatgaagcgatggtgtttgttctgagctatcttggcttacgtgacatcctctctgttgagatggtgtgcaagtcattgcattcagctgtccggaacgaaccctttttatggaagtgcatccatattgactcgcgcttggggaagaagatgtctgatgctgatcttatgtgcctgacacagaagtccccaggttctatgcagtgcctgagtcttatgcactgtaacaacatcacagatcagggattgaaagctgttttaaagagtaatctacagttaacaaagttgggcatttttggtgctttccggattacttatcaaggtcttattgacagtctgaggtcatttaatatggaaacagatattggtataaagaaactcagagttacaaatcacgtcactgcatcagaagcgcaatatgaagagttgttgtccttgatgaaaatagacaagaagatggcattacacaaacaggagcctcggatctttcattctggtcgtcttttactagatctttatggtggatatgttcccgattctttcgtaccagagcttcatgatgaatttgctcttgatattgagaagtgccctctttgtccaaactacaaacttgtttatgattgcccatcaaaggagtgcaagaacagcagacatagtacttgcagagggtgtattgtttgcatctggagatgtttgctatgtgggagatgtatagacattgccaatgtgttccaagagtcgttttgtttggggaaactttgccgtgactgtgtcaaatatgaagacttgctccccacagaaaagtagatgttcgaatctgttatcttcattggatggatacagttttaacttttaacataacatttcttctgttgattgatgctcccatccatcagtatcttgactgagtatttctaacaaggaaaagaaaaaaaagaggtataccaatttgctatcggtgtagttgcaatgactgaaattgtttttgcttac

SEQ ID NO: 17422 - DNA, 1247 bp, Zea mays
  Clone ID: LIB3069-025-A10_FLI
cttgaaattgacaatgtaggaggatggcggtacatgtttggttttagtgctccgcttgcagctattatggctattggtatgtggactttaccatcttcaccaagatggctacttctcagggcagttcaaggaaaggcttctttggaggataataaaaagaaggcaattcaagcccttagaacattgaggggccgcacagcaagtgaaaaggttttggcagatgatgttgacgatacaattgtctctattaaggctgcctacgcaggacaggaagctgaaggaaacgtttgggatgtatttgaaggagctagcttgaaggccttcactattggcggaggtctggttctgtttcagcagataacaggtcaaccgagtgttctatattatgctgcttcaatacttcaggtgttgcggtatttaaagttgacgatgttggaaggcgcccattattgataggaggtgttggtggaattgctttgtcactcttcctactggcagcttactacaagatcctgaacaacttcccctttgttgctgtcggcgcgttacttctatatgtcggtgcttaccaggtctcatttggtccaattagttggctaatggtatctgagatctttccactcggacaagagggcgtgggatcagcctcgcagtactaacaaatttcggctcgaacgctctggtgacatttgcgttttcacccttgaaggagctcctcgggccagccaatatatttttcctgttcggcgtcatagcagtgctctccctcgtgtttgtgatcctcgtcgttccagaaaccaaaggactgagcctggaggagatcgagtcgaagatcctgaagtaattaaaaaccgttcgtgcgatcataagccccatttggagatattgtaagtagcgatgccattttcaaaacgggcgctcgctcactcgtaggatcggagccaaagctttcagacatgggagtacatatgcaaagggcacgtctcggtgtaaagcttggacatctttctcttttattagcgtagtgaatatttccgaacatacttggtaaattacatttcagttgagtcataatcacgcttctgtagactgtagtccactgtgacctactgtagtagtatgcatgtcactagtaaaagctggtaagctgtgtgatggactgatggtgtagacttgtgcagttgtgctcgcataaggctggccatcagatcgtgtatatagcgacataaaacactattttgcactat

SEQ ID NO: 17423 - DNA, 1238 bp, Zea mays
  Clone ID: LIB3069-025-C8_FLI
ttcgccgtcgaagagtccccagcagcaccatgcccttttctcggcccgccgttggtttcttagttagactggttggggtccggccaagctgctgtcctccttcccgtgcatttgcagctgtcagagctcaaaagattcagcttcccaagaaaaaaaggcgattagatgaagtgtgcttagaaaggtttcaacaatacagtagaacatacatccagtcatggattcttcaaggcaaagtcatcgtggatggaagagttgtgaataaagctggaacacaagtatctgacaagtctgtcatcgaaatcaaggctgaaatcccaaaatatgtatgtagagcaggacataagcttgaggcagctatcaaaggatttgatattgattgtgatggaaagatagcccttgattcaggattatccacaggtggctttactgactgtttacttcagcatggagcatcacatgtttatggtgtagatgttggctatggacaggtggctgaaaaaattcgcacacatgaacgtgtttcagtgatcgaacgcacaaatttaagatatctatctcaactgccagaaccagttgacttggtgacactagacctatcatttatctccattctcttggtcatgcctgctgttatcaaagtaatgaaaacggattctacattgataacacttatcaagcctcaatttgaagcacgtagatcacaggtaggaggtggtgggattgttcgagatcctttggttcatcaagaggtactggatagaataatttcaggcgtggaagaatttggattctgcaataagggttggatcgaatctcctataaagggtgcagaagggaataaggagtttcttgcttgcttcaacaggatcccaatatcagagtcacagccagaggcagaggcaaaggaacctgtaacctaggatgtcagcagaaattactcaaagtgcgtcatcattgatcaggacaccctcataaagtatctggaagctatattgattatcaaccataacctctgatattcctgacattcttagttgtgtgataaaatttgtccagtttatcaccattgtttatagtctgtaggaactaggggtacttgtaggagatggagggaggtcgatggcgctgtggtggtgtcaggccatgccaccttgtagggaccgaccatagggtgataggatgcactgcctctatcctacggtgatggtctgatggagttgctccttcctgacggt

SEQ ID NO: 17424 - DNA, 851 bp, Zea mays
  Clone ID: LIB3069-025-F9_FLI
taagtttgacttgtttgggatttaaacccacccaatcccactcaatccacatggattgagagctaaccgaacaagcccacacatgtctagttggttcaactgtaccattacgagcaggtgatggaccattgggtttatgacaaaaggtgacaaatatcaaatacacgcccccgcgctcgaaggtcagatcatttttgttgatcttatctagcgaagtgatggcttctttttccaggatcatgagcttgttgagatgttttgggaggtcttgaagagcttaagttcagacaaccagaaaaaatttctcaagtttgtgactggatgttctcgtggccccctccttggatttcagtatctcgaaccgaaattttgcattcagagagctggtgttccaggtctggaggagcatgcagaccgcttgccgacatcagctacctgcatgaaccttctgaagctccccccctataaaagcaaggagcagatgcaaaccaaactattgtacgcgataaattcagaagctggttttgatctaagttgatcatgatcgggattcagtatttgcagttcagatagtcgctattaaaggcaccaagggccgaacccaaccaaccatcggccccatttgaagccccatgaatgaaggaaatgaaggaaaaaaagaaagaaacgcagttgtttctcagagtagttgaatgtctggagggaggctgcaatatagctgtctgctaactaagggcttcgttctccaagagaaataggcagacgctgtctaatcaatcatgggcatgtacatatgtgcatcattttatacagaaattttatatgtatctaatcaatgctggtttgcggtc
